United States Patent Application Publication US 2007/0214517 A1 - sequence listing, part 61

SEQ ID NO: 80539 - protein, 921 aa, Arabidopsis thaliana
  peptide (1)..(921): Ceres Seq. ID no. 12656351
  misc_feature (407)..(920): Pfam Name: Ferric reductase like transmembrane component Pfam Description: Ferric reductase like transmembrane component
  misc_feature (72)..(921): Homolog of NCBI NO: 16549089 NR Description: respiratory burst oxidase homolog [Solanum
  misc_feature (25)..(921): Homolog of NCBI NO: 15241361 NR Description: respiratory burst oxidase protein; protein id: [Arabidopsis thaliana] >gi|9758253|dbj|BAB08752.1| respiratory
  misc_feature (25)..(921): Homolog of NCBI NO: 26449420 NR Description: putative respiratory burst oxidase protein
  misc_feature (71)..(921): Homolog of NCBI NO: 3242781 NR Description: respiratory burst oxidase protein A [Arabidopsis
  misc_feature (91)..(921): Homolog of NCBI NO: 30680952 NR Description: respiratory burst oxidase protein B (NADPH (RbohB) [Arabidopsis thaliana] >gi|3242783|gb|AAC39476.1|
  misc_feature (118)..(921): Homolog of NCBI NO: 30686753 NR Description: respiratory burst oxidase (NADPH oxidase),
  misc_feature (118)..(921): Homolog of NCBI NO: 7484891 NR Description: cytochrome b245 beta chain homolog F13M23.230 -
  misc_feature (157)..(785): Homolog of NCBI NO: 17384016 NR Description: NADPH oxidase [Nicotiana tabacum]
  misc_feature (157)..(785): Homolog of NCBI NO: 28268678 NR Description: respiratory burst oxidase homolog [Nicotiana
  misc_feature (784)..(921): Homolog of NCBI NO: 17384016 NR Description: NADPH oxidase [Nicotiana tabacum]
MKMRRGNSSNDHELGILRGANSDTNSDTESIASDRGAFSGPLGRPKRASKKNARFADDLPKRSNSVAGGRGDDDEYVEITLDIRDDSVAVHSVQQAAGGGGHLEDPELALLTKKTLESSLNNTTSLSFFRSTSSRIKNASRELRRVFSRRPSPAVRRFDRTSSAAIHALKGLKFIATKTAAWPAVDQRFDKLSADSNGLLLSAKFWECLGMNKESKDFADQLFRALARRNNVSGDAITKEQLRIFWEQISDESFDAKLQVFFDMVDKDEDGRVTEEEVAEIISLSASANKLSNIQKQAKEYAALIMEELDPDNAGFIMIENLEMLLLQAPNQSVRMGDSRILSQMLSQKLRPAKESNPLVRWSEKIKYFILDNWQRLWIMMLWLGICGGLFTYKFIQYKNKAAYGVMGYCVCVAKGGAETLKFNMALILLPVCRNTITWLRNKTKLGTVVPFDDSLNFHKVIASGIVVGVLLHAGAHLTCDFPRLIAADEDTYEPMEKYFGDQPTSYWWFVKGVEGWTGIVMVVLMAIAFTLATPWFRRNKLNLPNFLKKLTGFNAFWYTHHLFIIVYALLIVHGIKLYLTKIWYQKTTWMYLAVPILLYASERLLRAFRSSIKPVKMIKVAVYPGNVLSLHMTKPQGFKYKSGQFMLVNCRAVSPFEWHPFSITSAPGDDYLSVHIRTLGDWTRKLRTVFSEVCKPPTAGKSGLLRADGGDGNLPFPKVLIDGPYGAPAQDYKKYDVVLLVGLGIGATPMISILKDIINNMKGPDRDSDIENNNSNNNSKGFKTRKAYFYWVTREQGSFEWFKGIMDEISELDEEGIIELHNYCTSVYEEGDARVALIAMLQSLQHAKNGVDVVSGTRVKSHFAKPNWRQVYKKIAVQHPGKRIGVFYCGMPGMIKELKNLALDFSRKTTTKFDFHKENF

SEQ ID NO: 80540 - protein, 919 aa, Arabidopsis thaliana
  peptide (1)..(919): Ceres Seq. ID no. 12656352
  misc_feature (405)..(918): Pfam Name: Ferric reductase like transmembrane component Pfam Description: Ferric reductase like transmembrane component
  misc_feature (70)..(919): Homolog of NCBI NO: 16549089 NR Description: respiratory burst oxidase homolog [Solanum
  misc_feature (23)..(919): Homolog of NCBI NO: 15241361 NR Description: respiratory burst oxidase protein; protein id: [Arabidopsis thaliana] >gi|9758253|dbj|BAB08752.1| respiratory
  misc_feature (23)..(919): Homolog of NCBI NO: 26449420 NR Description: putative respiratory burst oxidase protein
  misc_feature (69)..(919): Homolog of NCBI NO: 3242781 NR Description: respiratory burst oxidase protein A [Arabidopsis
  misc_feature (89)..(919): Homolog of NCBI NO: 30680952 NR Description: respiratory burst oxidase protein B (NADPH (RbohB) [Arabidopsis thaliana] >gi|3242783|gb|AAC39476.1|
  misc_feature (116)..(919): Homolog of NCBI NO: 30686753 NR Description: respiratory burst oxidase (NADPH oxidase),
  misc_feature (116)..(919): Homolog of NCBI NO: 7484891 NR Description: cytochrome b245 beta chain homolog F13M23.230 -
  misc_feature (155)..(783): Homolog of NCBI NO: 17384016 NR Description: NADPH oxidase [Nicotiana tabacum]
  misc_feature (155)..(783): Homolog of NCBI NO: 28268678 NR Description: respiratory burst oxidase homolog [Nicotiana
  misc_feature (782)..(919): Homolog of NCBI NO: 17384016 NR Description: NADPH oxidase [Nicotiana tabacum]
MRRGNSSNDHELGILRGANSDTNSDTESIASDRGAFSGPLGRPKRASKKNARFADDLPKRSNSVAGGRGDDDEYVEITLDIRDDSVAVHSVQQAAGGGGHLEDPELALLTKKTLESSLNNTTSLSFFRSTSSRIKNASRELRRVFSRRPSPAVRRFDRTSSAAIHALKGLKFIATKTAAWPAVDQRFDKLSADSNGLLLSAKFWECLGMNKESKDFADQLFRALARRNNVSGDAITKEQLRIFWEQISDESFDAKLQVFFDMVDKDEDGRVTEEEVAEIISLSASANKLSNIQKQAKEYAALIMEELDPDNAGFIMIENLEMLLLQAPNQSVRMGDSRILSQMLSQKLRPAKESNPLVRWSEKIKYFILDNWQRLWIMMLWLGICGGLFTYKFIQYKNKAAYGVMGYCVCVAKGGAETLKFNMALILLPVCRNTITWLRNKTKLGTVVPFDDSLNFHKVIASGIVVGVLLHAGAHLTCDFPRLIAADEDTYEPMEKYFGDQPTSYWWFVKGVEGWTGIVMVVLMAIAFTLATPWFRRNKLNLPNFLKKLTGFNAFWYTHHLFIIVYALLIVHGIKLYLTKIWYQKTTWMYLAVPILLYASERLLRAFRSSIKPVKMIKVAVYPGNVLSLHMTKPQGFKYKSGQFMLVNCRAVSPFEWHPFSITSAPGDDYLSVHIRTLGDWTRKLRTVFSEVCKPPTAGKSGLLRADGGDGNLPFPKVLIDGPYGAPAQDYKKYDVVLLVGLGIGATPMISILKDIINNMKGPDRDSDIENNNSNNNSKGFKTRKAYFYWVTREQGSFEWFKGIMDEISELDEEGIIELHNYCTSVYEEGDARVALIAMLQSLQHAKNGVDVVSGTRVKSHFAKPNWRQVYKKIAVQHPGKRIGVFYCGMPGMIKELKNLALDFSRKTTTKFDFHKENF

SEQ ID NO: 80541 - protein, 711 aa, Arabidopsis thaliana
  peptide (1)..(711): Ceres Seq. ID no. 12656353
  misc_feature (197)..(710): Pfam Name: Ferric reductase like transmembrane component Pfam Description: Ferric reductase like transmembrane component
  misc_feature (1)..(711): Homolog of NCBI NO: 16549089 NR Description: respiratory burst oxidase homolog [Solanum
  misc_feature (1)..(711): Homolog of NCBI NO: 15241361 NR Description: respiratory burst oxidase protein; protein id: [Arabidopsis thaliana] >gi|9758253|dbj|BAB08752.1| respiratory
  misc_feature (1)..(711): Homolog of NCBI NO: 26449420 NR Description: putative respiratory burst oxidase protein
  misc_feature (1)..(711): Homolog of NCBI NO: 3242781 NR Description: respiratory burst oxidase protein A [Arabidopsis
  misc_feature (1)..(711): Homolog of NCBI NO: 30680952 NR Description: respiratory burst oxidase protein B (NADPH (RbohB) [Arabidopsis thaliana] >gi|3242783|gb|AAC39476.1|
  misc_feature (1)..(711): Homolog of NCBI NO: 30686753 NR Description: respiratory burst oxidase (NADPH oxidase),
  misc_feature (1)..(711): Homolog of NCBI NO: 7484891 NR Description: cytochrome b245 beta chain homolog F13M23.230 -
  misc_feature (1)..(575): Homolog of NCBI NO: 17384016 NR Description: NADPH oxidase [Nicotiana tabacum]
  misc_feature (1)..(575): Homolog of NCBI NO: 28268678 NR Description: respiratory burst oxidase homolog [Nicotiana
  misc_feature (574)..(711): Homolog of NCBI NO: 17384016 NR Description: NADPH oxidase [Nicotiana tabacum]
MNKESKDFADQLFRALARRNNVSGDAITKEQLRIFWEQISDESFDAKLQVFFDMVDKDEDGRVTEEEVAEIISLSASANKLSNIQKQAKEYAALIMEELDPDNAGFIMIENLEMLLLQAPNQSVRMGDSRILSQMLSQKLRPAKESNPLVRWSEKIKYFILDNWQRLWIMMLWLGICGGLFTYKFIQYKNKAAYGVMGYCVCVAKGGAETLKFNMALILLPVCRNTITWLRNKTKLGTVVPFDDSLNFHKVIASGIVVGVLLHAGAHLTCDFPRLIAADEDTYEPMEKYFGDQPTSYWWFVKGVEGWTGIVMVVLMAIAFTLATPWFRRNKLNLPNFLKKLTGFNAFWYTHHLFIIVYALLIVHGIKLYLTKIWYQKTTWMYLAVPILLYASERLLRAFRSSIKPVKMIKVAVYPGNVLSLHMTKPQGFKYKSGQFMLVNCRAVSPFEWHPFSITSAPGDDYLSVHIRTLGDWTRKLRTVFSEVCKPPTAGKSGLLRADGGDGNLPFPKVLIDGPYGAPAQDYKKYDVVLLVGLGIGATPMISILKDIINNMKGPDRDSDIENNNSNNNSKGFKTRKAYFYWVTREQGSFEWFKGIMDEISELDEEGIIELHNYCTSVYEEGDARVALIAMLQSLQHAKNGVDVVSGTRVKSHFAKPNWRQVYKKIAVQHPGKRIGVFYCGMPGMIKELKNLALDFSRKTTTKFDFHKENF

SEQ ID NO: 80542 - DNA, 814 bp, Arabidopsis thaliana
  misc_feature (1)..(814): Ceres Seq. ID no. 12656362
  misc_feature: MA Experiment ID: 20000180 Result: Up-regulated in Transcription
  misc_feature: MA Experiment 20000180 PARAMETER Experiment Name: At_Germinating_Seeds_P Parameter: Age (hr) Value: 24 vs. 0
  misc_feature: MA Experiment 20000180 PARAMETER Experiment Name: At_Germinating_Seeds_P Parameter: Tissue Value: Germinating Seeds
  misc_feature: MA Experiment ID: 20000184 Result: Down-regulated in Transcription
  misc_feature: MA Experiment 20000184 PARAMETER Experiment Name: At_Shoots__P Parameter: Age (day) Value: 7
  misc_feature: MA Experiment 20000184 PARAMETER Experiment Name: At_Shoots__P Parameter: Tissue Value: Shoots vs. Whole Plant
  misc_feature: MA Experiment ID: 20000234 Result: Down-regulated in Transcription
  misc_feature: MA Experiment 20000234 PARAMETER Experiment Name: At_Siliques_P Parameter: Age (day) Value: 21
  misc_feature: MA Experiment 20000234 PARAMETER Experiment Name: At_Siliques_P Parameter: Organism Value: A. thaliana
  misc_feature: MA Experiment 20000234 PARAMETER Experiment Name: At_Siliques_P Parameter: Plant Line Value: WS
  misc_feature: MA Experiment 20000234 PARAMETER Experiment Name: At_Siliques_P Parameter: Tissue Value: Less Than 5mm Siliques vs. Whole Plant
  misc_feature: MA Experiment ID: 20000235 Result: Down-regulated in Transcription
  misc_feature: MA Experiment 20000235 PARAMETER Experiment Name: At_Siliques_P Parameter: Age (day) Value: 21
  misc_feature: MA Experiment 20000235 PARAMETER Experiment Name: At_Siliques_P Parameter: Organism Value: A. thaliana
  misc_feature: MA Experiment 20000235 PARAMETER Experiment Name: At_Siliques_P Parameter: Plant Line Value: WS
  misc_feature: MA Experiment 20000235 PARAMETER Experiment Name: At_Siliques_P Parameter: Tissue Value: 5-10mm Siliques vs. Whole Plant
  misc_feature: MA Experiment ID: 20000265 Result: Down-regulated in Transcription
  misc_feature: MA Experiment 20000265 PARAMETER Experiment Name: At_Open_Flower_P Parameter: Age (day) Value: 21
  misc_feature: MA Experiment 20000265 PARAMETER Experiment Name: At_Open_Flower_P Parameter: Plant Line Value: WS
  misc_feature: MA Experiment 20000265 PARAMETER Experiment Name: At_Open_Flower_P Parameter: Tissue Value: Closed Flower vs. Whole Plant
  misc_feature: MA Experiment ID: 20000286 Result: Down-regulated in Transcription
  misc_feature: MA Experiment 20000286 PARAMETER Experiment Name: At_Open_Flower_P Parameter: Age (day) Value: 21
  misc_feature: MA Experiment 20000286 PARAMETER Experiment Name: At_Open_Flower_P Parameter: Plant Line Value: WS
  misc_feature: MA Experiment 20000286 PARAMETER Experiment Name: At_Open_Flower_P Parameter: Tissue Value: Half Open vs. Whole Plant
  misc_feature: MA Experiment ID: 20000438 Result: Down-regulated in Transcription
  misc_feature: MA Experiment 20000438 PARAMETER Experiment Name: At_Shoots__P Parameter: Age (day) Value: 14
  misc_feature: MA Experiment 20000438 PARAMETER Experiment Name: At_Shoots__P Parameter: Tissue Value: Shoots vs. Whole Plant
  misc_feature: MA Experiment ID: 20001757 Result: Down-regulated in Transcription
  misc_feature: MA Experiment 20001757 PARAMETER Experiment Name: At_50mM_NH4NO3_L-to-H_P Parameter: Timepoint (hr) Value: 6
  misc_feature: MA Experiment 20001757 PARAMETER Experiment Name: At_50mM_NH4NO3_L-to-H_P Parameter: Tissue Value: Leaf
  misc_feature: MA Experiment 20001757 PARAMETER Experiment Name: At_50mM_NH4NO3_L-to-H_P Parameter: Treatment Value: 50mM NH4NO3 vs 100mM Mannitol
tacaactaagtcatttctatcgcctctaaaatctataagcttgtgattttggtgtgaacgatgtcaaaatttcagagcaatttcaatcagaagatagattatgtgttcaaggtagtcttgatcggcgactctgctgttggtaaatctcagcttctcgctaggttttcaagaaacgagttcagtatcgaatctaaagcaacgatcggtgtcgagtttcagacaagaacacttgaaatcgatcgtaaaactatcaaagctcagatatgggacactgctggtcaagaacggtatcgagcggtgacgagtgcatactacagaggagcagtaggggcaatgttagtttacgatataacaaaacgacagtcgtttgatcatgtagcgagatggttagaagaattgagaggacatgctgacaaaaacattgtgattatgctaataggaaacaaaactgatctcgggacacttcgagctgtaccaaccgaggatgctaaagaatttgctcaaagagaaaatctgtttttcatggagacatcagccttggattcaaacaatgttgagccttcgttcctcacggttttgacggaaatatatcgaattgtgagtaaaaagaatcttgttgctaatgaggaaggagaatctggaggagactcttctcttttgcaaggaactaagattgttgttgctggagaagagactgaatctaaaggaaaaggttgttgtggaacatcatagactttttttcatgatcttttctctttttttttttgttactaccatttcttgtgatcatatttctctttctctttgactgcat

SEQ ID NO: 80543 - protein, 223 aa, Arabidopsis thaliana
  peptide (1)..(223): Ceres Seq. ID no. 12656363
  misc_feature (17)..(178): Pfam Name: Ras family Pfam Description: Ras family
  misc_feature (1)..(223): Homolog of NCBI NO: 15238852 NR Description: Ras-related GTP-binding protein, putative; id: At5g47960.1, supported by cDNA: gi_12004622 [Arabidopsis
  misc_feature (1)..(223): Homolog of NCBI NO: 15230422 NR Description: ras-related GTP-binding protein, putative;
  misc_feature (10)..(220): Homolog of NCBI NO: 132521 NR Description: RAS-RELATED PROTEIN RGP1 (GTP-BINDING REGULATORY
  misc_feature (1)..(223): Homolog of NCBI NO: 12322015 NR Description: ras-related GTP-binding protein, putative;
  misc_feature (9)..(220): Homolog of NCBI NO: 7438430 NR Description: GTP-binding protein - garden pea
MSKFQSNFNQKIDYVFKVVLIGDSAVGKSQLLARFSRNEFSIESKATIGVEFQTRTLEIDRKTIKAQIWDTAGQERYRAVTSAYYRGAVGAMLVYDITKRQSFDHVARWLEELRGHADKNIVIMLIGNKTDLGTLRAVPTEDAKEFAQRENLFFMETSALDSNNVEPSFLTVLTEIYRIVSKKNLVANEEGESGGDSSLLQGTKIVVAGEETESKGKGCCGTS

SEQ ID NO: 80544 - protein, 132 aa, Arabidopsis thaliana
  peptide (1)..(132): Ceres Seq. ID no. 12656364
  misc_feature (1)..(87): Pfam Name: Ras family Pfam Description: Ras family
  misc_feature (1)..(132): Homolog of NCBI NO: 15238852 NR Description: Ras-related GTP-binding protein, putative; id: At5g47960.1, supported by cDNA: gi_12004622 [Arabidopsis
  misc_feature (1)..(132): Homolog of NCBI NO: 15230422 NR Description: ras-related GTP-binding protein, putative;
  misc_feature (1)..(129): Homolog of NCBI NO: 132521 NR Description: RAS-RELATED PROTEIN RGP1 (GTP-BINDING REGULATORY
  misc_feature (1)..(132): Homolog of NCBI NO: 12322015 NR Description: ras-related GTP-binding protein, putative;
  misc_feature (1)..(129): Homolog of NCBI NO: 7438430 NR Description: GTP-binding protein - garden pea
MLVYDITKRQSFDHVARWLEELRGHADKNIVIMLIGNKTDLGTLRAVPTEDAKEFAQRENLFFMETSALDSNNVEPSFLTVLTEIYRIVSKKNLVANEEGESGGDSSLLQGTKIVVAGEETESKGKGCCGTS

SEQ ID NO: 80545 - DNA, 1536 bp, Arabidopsis thaliana
  misc_feature (1)..(1536): Ceres Seq. ID no. 12656365
  misc_feature: MA Experiment ID: 20000180 Result: Up-regulated in Transcription
  misc_feature: MA Experiment 20000180 PARAMETER Experiment Name: At_Germinating_Seeds_P Parameter: Age (hr) Value: 24 vs. 0
  misc_feature: MA Experiment 20000180 PARAMETER Experiment Name: At_Germinating_Seeds_P Parameter: Tissue Value: Germinating Seeds
  misc_feature: MA Experiment ID: 20000184 Result: Up-regulated in Transcription
  misc_feature: MA Experiment 20000184 PARAMETER Experiment Name: At_Shoots__P Parameter: Age (day) Value: 7
  misc_feature: MA Experiment 20000184 PARAMETER Experiment Name: At_Shoots__P Parameter: Tissue Value: Shoots vs. Whole Plant
  misc_feature: MA Experiment ID: 20000185 Result: Up-regulated in Transcription
  misc_feature: MA Experiment 20000185 PARAMETER Experiment Name: At_Roots__P Parameter: Age (day) Value: 7 vs. 21
  misc_feature: MA Experiment 20000185 PARAMETER Experiment Name: At_Roots__P Parameter: Organism Value: A. thaliana
  misc_feature: MA Experiment 20000185 PARAMETER Experiment Name: At_Roots__P Parameter: Tissue Value: Roots vs. Whole Plant
  misc_feature: MA Experiment ID: 20000269 Result: Up-regulated in Transcription
  misc_feature: MA Experiment 20000269 PARAMETER Experiment Name: At_1mM_KNO3_L-vs-H_Roots_P Parameter: Age (day) Value: 7,10,12
  misc_feature: MA Experiment 20000269 PARAMETER Experiment Name: At_1mM_KNO3_L-vs-H_Roots_P Parameter: Organism Value: A. thaliana
  misc_feature: MA Experiment 20000269 PARAMETER Experiment Name: At_1mM_KNO3_L-vs-H_Roots_P Parameter: Plant Line Value: WS
  misc_feature: MA Experiment 20000269 PARAMETER Experiment Name: At_1mM_KNO3_L-vs-H_Roots_P Parameter: Timepoint (day) Value: 7,10,12
  misc_feature: MA Experiment 20000269 PARAMETER Experiment Name: At_1mM_KNO3_L-vs-H_Roots_P Parameter: Tissue Value: Roots
  misc_feature: MA Experiment 20000269 PARAMETER Experiment Name: At_1mM_KNO3_L-vs-H_Roots_P Parameter: Treatment Value: 1mM KNO3 vs. 50mM KNO3
  misc_feature: MA Experiment ID: 20000439 Result: Up-regulated in Transcription
  misc_feature: MA Experiment 20000439 PARAMETER Experiment Name: At_Roots__P Parameter: Age (day) Value: 14 vs. 21
  misc_feature: MA Experiment 20000439 PARAMETER Experiment Name: At_Roots__P Parameter: Organism Value: A. thaliana
  misc_feature: MA Experiment 20000439 PARAMETER Experiment Name: At_Roots__P Parameter: Tissue Value: Roots vs. Whole Plant
  misc_feature: MA Experiment ID: 20000527 Result: Down-regulated in Transcription
  misc_feature: MA Experiment 20000527 PARAMETER Experiment Name: At_10percent_PEG_P Parameter: Age (day) Value: 20
  misc_feature: MA Experiment 20000527 PARAMETER Experiment Name: At_10percent_PEG_P Parameter: Organism Value: A. thaliana
  misc_feature: MA Experiment 20000527 PARAMETER Experiment Name: At_10percent_PEG_P Parameter: Plant Line Value: WS
  misc_feature: MA Experiment 20000527 PARAMETER Experiment Name: At_10percent_PEG_P Parameter: Timepoint (day) Value: 20
  misc_feature: MA Experiment 20000527 PARAMETER Experiment Name: At_10percent_PEG_P Parameter: Tissue Value: Whole Plant
  misc_feature: MA Experiment 20000527 PARAMETER Experiment Name: At_10percent_PEG_P Parameter: Treatment Value: 10percent PEG vs. No Treatment
atggcatcaatgatcactgttgactttgaaaactgcttcatcttcctcctcttatgtcttttctcacgcctctcttacgatcttttcttcaggaaaacaaaagactcacgagctggctgtgctcttcctccgagccctccttcattaccaatcattggtcatcttcaccttatactctttgtcccaatccaccagtctttcaagaacatctcatctaaatatggacctctcctccacctccgcttctttaacttccccatagtcctcgtctcctcggcctcaacggcctacgagatcttcaaggcccaagacgtgaatgtctcctctcgccctccccctcctatcgaggagtctctcattttaggatcttccagcttcatcaacactccctatggagattactcgaagttcatgaagaagttcatggtccaaaagctgcttggaccacaagcactccaacggtcccgaaatatccgtgcagatgagctggaacggttctacaaaaccctgcttgataaggcgatgaagaagcagactgttgagattcgtaatgaagcaatgaagctcactaacaacaccatttgcaagatgattatggggaggagttgttcagaggagaacggtgaggctgagacagtcagaggcttggtgaccgagtcgattttcttgacaaagaaacatttcttgggagccatgtttcacaaaccacttaagaagctcgggatctcattattcgcaaaggaattgatgaatgtttccaacaggtttgatgagctactggagaagattcttgttgaacatgaagagaaattgcaggagcatcatcaaactagtgacatgttggatatgttgttggaagcttatggagacgaaaacgcagagtataagatcactagagaccaaatcaagtctttgttcgtggatctgttcagtgcaggcactgaagcctcggcgaacactatacagtggaccatggcggagatcattaagaatcctaagatttgtgagagactgagagaagaaattgattctgttgtagggaaaacaaggttggttcaagagactgatctaccaaatctcccttacttgcaagcaatagttaaagaagggctaagattgcatcctccgggaccagtggtaaggacgttcaaagagacatgtgaaatcaaaggattctacataccggagaagacaagactttttgttaatgtttatgcgataatgagagatcctgatttctgggaagaccctgaggagtttaagccagagaggtttttagcttcttcaagattaggggaagaggatgagaaaagagaggacatgctaaaatacattcctttcggtagcggaaggagagcttgtcctggatcacatctagcttataccgttgtaggaagtgtaattggaatgatggtgcaacactttgactggataatcaaaggagaaaaaatcaacatgaaggagggtggaacaatgaccttgaccatggctcaccctcttaagtgcactcctgttcctcgaaacctaaacacttaa

SEQ ID NO: 80546 - protein, 511 aa, Arabidopsis thaliana [sequence omitted]

SEQ ID NO: 80547 - protein, 508 aa, Arabidopsis thaliana
  peptide (1)..(508): Ceres Seq. ID no. 12656367
  misc_feature (1)..(508): Homolog of NCBI NO: 15238866 NR Description: cytochrome p450 family; protein id: At5g47990.1 thaliana] >gi|10177750|dbj|BAB11063.1| cytochrome P450
  misc_feature (11)..(507): Homolog of NCBI NO: 15233774 NR Description: cytochrome p450 family; protein id: At4g15350.1
  misc_feature (11)..(507): Homolog of NCBI NO: 7430617 NR Description: cytochrome P450 - Arabidopsis thaliana
  misc_feature (1)..(507): Homolog of NCBI NO: 15232418 NR Description: cytochrome P450, putative; protein id: At3g20950.1
  misc_feature (1)..(507): Homolog of NCBI NO: 30685997 NR Description: cytochrome P450 family [Arabidopsis thaliana]
  misc_feature (1)..(504): Homolog of NCBI NO: 15231049 NR Description: cytochrome p450 family; protein id: At3g20100.1, by cDNA: 149380., supported by cDNA: gi_15215771 [Arabidopsis
  misc_feature (1)..(504): Homolog of NCBI NO: 21553521 NR Description: cytochrome P450, putative [Arabidopsis thaliana]
  misc_feature (8)..(505): Homolog of NCBI NO: 9293969 NR Description: cytochrome P450-like protein [Arabidopsis
  misc_feature (1)..(504): Homolog of NCBI NO: 15231047 NR Description: cytochrome P450, putative; protein id: At3g20090.1
  misc_feature (1)..(506): Homolog of NCBI NO: 9294003 NR Description: cytochrome P450-like protein [Arabidopsis
MITVDFENCFIFLLLCLFSRLSYDLFFRKTKDSRAGCALPPSPPSLPIIGHLHLILFVPIHQSFKNISSKYGPLLHLRFFNFPIVLVSSASTAYEIFKAQDVNVSSRPPPPIEESLILGSSSFINTPYGDYSKFMKKFMVQKLLGPQALQRSRNIRADELERFYKTLLDKAMKKQTVEIRNEAMKLTNNTICKMIMGRSCSEENGEAETVRGLVTESIFLTKKHFLGAMFHKPLKKLGISLFAKELMNVSNRFDELLEKILVEHEEKLQEHHQTSDMLDMLLEAYGDENAEYKITRDQIKSLFVDLFSAGTEASANTIQWTMAEIIKNPKICERLREEIDSVVGKTRLVQETDLPNLPYLQAIVKEGLRLHPPGPVVRTFKETCEIKGFYIPEKTRLFVNVYAIMRDPDFWEDPEEFKPERFLASSRLGEEDEKREDMLKYIPFGSGRRACPGSHLAYTVVGSVIGMMVQHFDWIIKGEKINMKEGGTMTLTMAHPLKCTPVPRNLNT

SEQ ID NO: 80548 - protein, 374 aa, Arabidopsis thaliana
  peptide (1)..(374): Ceres Seq. ID no. 12656368
  misc_feature (1)..(374): Homolog of NCBI NO: 15238866 NR Description: cytochrome p450 family; protein id: At5g47990.1 thaliana] >gi|10177750|dbj|BAB11063.1| cytochrome P450
  misc_feature (1)..(373): Homolog of NCBI NO: 15233774 NR Description: cytochrome p450 family; protein id: At4g15350.1
  misc_feature (1)..(373): Homolog of NCBI NO: 7430617 NR Description: cytochrome P450 - Arabidopsis thaliana
  misc_feature (1)..(373): Homolog of NCBI NO: 15232418 NR Description: cytochrome P450, putative; protein id: At3g20950.1
  misc_feature (1)..(373): Homolog of NCBI NO: 30685997 NR Description: cytochrome P450 family [Arabidopsis thaliana]
  misc_feature (1)..(370): Homolog of NCBI NO: 15231049 NR Description: cytochrome p450 family; protein id: At3g20100.1, by cDNA: 149380., supported by cDNA: gi_15215771 [Arabidopsis
  misc_feature (1)..(370): Homolog of NCBI NO: 21553521 NR Description: cytochrome P450, putative [Arabidopsis thaliana]
  misc_feature (1)..(371): Homolog of NCBI NO: 9293969 NR Description: cytochrome P450-like protein [Arabidopsis
  misc_feature (1)..(370): Homolog of NCBI NO: 15231047 NR Description: cytochrome P450, putative; protein id: At3g20090.1
  misc_feature (1)..(372): Homolog of NCBI NO: 9294003 NR Description: cytochrome P450-like protein [Arabidopsis
MKKFMVQKLLGPQALQRSRNIRADELERFYKTLLDKAMKKQTVEIRNEAMKLTNNTICKMIMGRSCSEENGEAETVRGLVTESIFLTKKHFLGAMFHKPLKKLGISLFAKELMNVSNRFDELLEKILVEHEEKLQEHHQTSDMLDMLLEAYGDENAEYKITRDQIKSLFVDLFSAGTEASANTIQWTMAEIIKNPKICERLREEIDSVVGKTRLVQETDLPNLPYLQAIVKEGLRLHPPGPVVRTFKETCEIKGFYIPEKTRLFVNVYAIMRDPDFWEDPEEFKPERFLASSRLGEEDEKREDMLKYIPFGSGRRACPGSHLAYTVVGSVIGMMVQHFDWIIKGEKINMKEGGTMTLTMAHPLKCTPVPRNLNT

SEQ ID NO: 80549 - DNA, 1792 bp, Arabidopsis thaliana
  misc_feature (1)..(1792): Ceres Seq. ID no. 12656384
  misc_feature: MA Experiment ID: 20000171 Result: Down-regulated in Transcription
  misc_feature: MA Experiment 20000171 PARAMETER Experiment Name: At_42deg_Heat_P Parameter: Age (day) Value: 14
  misc_feature: MA Experiment 20000171 PARAMETER Experiment Name: At_42deg_Heat_P Parameter: Organism Value: A. thaliana
  misc_feature: MA Experiment 20000171 PARAMETER Experiment Name: At_42deg_Heat_P Parameter: Plant Line Value: WS
  misc_feature: MA Experiment 20000171 PARAMETER Experiment Name: At_42deg_Heat_P Parameter: Temperature (deg C) Value: 42 vs. 22
  misc_feature: MA Experiment 20000171 PARAMETER Experiment Name: At_42deg_Heat_P Parameter: Timepoint (hr) Value: 1
  misc_feature: MA Experiment 20000171 PARAMETER Experiment Name: At_42deg_Heat_P Parameter: Tissue Value: Aerial
  misc_feature: MA Experiment ID: 20000173 Result: Down-regulated in Transcription
  misc_feature: MA Experiment 20000173 PARAMETER Experiment Name: At_42deg_Heat_P Parameter: Age (day) Value: 14
  misc_feature: MA Experiment 20000173 PARAMETER Experiment Name: At_42deg_Heat_P Parameter: Organism Value: A. thaliana
  misc_feature: MA Experiment 20000173 PARAMETER Experiment Name: At_42deg_Heat_P Parameter: Plant Line Value: WS
  misc_feature: MA Experiment 20000173 PARAMETER Experiment Name: At_42deg_Heat_P Parameter: Temperature (deg C) Value: 42 vs. 22
  misc_feature: MA Experiment 20000173 PARAMETER Experiment Name: At_42deg_Heat_P Parameter: Timepoint (hr) Value: 6
  misc_feature: MA Experiment 20000173 PARAMETER Experiment Name: At_42deg_Heat_P Parameter: Tissue Value: Aerial
  misc_feature: MA Experiment ID: 20000235 Result: Up-regulated in Transcription
  misc_feature: MA Experiment 20000235 PARAMETER Experiment Name: At_Siliques_P Parameter: Age (day) Value: 21
  misc_feature: MA Experiment 20000235 PARAMETER Experiment Name: At_Siliques_P Parameter: Organism Value: A. thaliana
  misc_feature: MA Experiment 20000235 PARAMETER Experiment Name: At_Siliques_P Parameter: Plant Line Value: WS
  misc_feature: MA Experiment 20000235 PARAMETER Experiment Name: At_Siliques_P Parameter: Tissue Value: 5-10mm Siliques vs. Whole Plant
  misc_feature: MA Experiment ID: 20000264 Result: Up-regulated in Transcription
  misc_feature: MA Experiment 20000264 PARAMETER Experiment Name: At_Open_Flower_P Parameter: Age (day) Value: 21
  misc_feature: MA Experiment 20000264 PARAMETER Experiment Name: At_Open_Flower_P Parameter: Plant Line Value: WS
  misc_feature: MA Experiment 20000264 PARAMETER Experiment Name: At_Open_Flower_P Parameter: Tissue Value: Open Flower vs. Whole Plant
  misc_feature: MA Experiment ID: 20000445 Result: Up-regulated in Transcription
  misc_feature: MA Experiment 20000445 PARAMETER Experiment Name: At_100uM_NAA__P Parameter: Age (day) Value: 14
  misc_feature: MA Experiment 20000445 PARAMETER Experiment Name: At_100uM_NAA__P Parameter: Organism Value: A. thaliana
  misc_feature: MA Experiment 20000445 PARAMETER Experiment Name: At_100uM_NAA__P Parameter: Plant Line Value: WS
  misc_feature: MA Experiment 20000445 PARAMETER Experiment Name: At_100uM_NAA__P Parameter: Timepoint (hr) Value: 6
  misc_feature: MA Experiment 20000445 PARAMETER Experiment Name: At_100uM_NAA__P Parameter: Tissue Value: Aerial
  misc_feature: MA Experiment 20000445 PARAMETER Experiment Name: At_100uM_NAA__P Parameter: Treatment Value: 100uM NAA vs. No Treatment
  misc_feature: MA Experiment ID: 20000794 Result: Up-regulated in Transcription
  misc_feature: MA Experiment 20000794 PARAMETER Experiment Name: At_Petals_P Parameter: Age (day) Value: 23-25 days
  misc_feature: MA Experiment 20000794 PARAMETER Experiment Name: At_Petals_P Parameter: Plant Line Value: WS
  misc_feature: MA Experiment 20000794 PARAMETER Experiment Name: At_Petals_P Parameter: Tissue Value: Petals vs. Whole plant
ctccgacaactttctctcttcccttctctcttcctctggttcacatggaacttcaataacattcactactttaaggtttctcatctccgaaaaagtcagttattgtgcagatcattgaagtgactagaaatgtacaagcagcctagacaagagcttgaggcttattattttgagcctaactctgttgagaagcttaggtacttaccggttaacaactctcgtaaacggttttgtacgctcgagccatttcctgactctcctccttataatgctctatctactgctacatatgatgatacatgtggctcttgtgtaacggatgagttgaatgacttcaaacacaagattagggaaatcgaaacggtgatgatggggccggactcgttggacttacttgtcgattgcacggactcatttgattccacggcgagtcaagagattaatggttggagatcaactctagaggctatctcgaggcgggatttaagagctgatcttgtttcatgtgccaaagctatgtcggaaaatgatcttatgatggctcattcaatgatggagaagttgcggcagatggtttcggtttctggtgagcctattcaacggttgggagcttacttattggaaggtctagtggcgcagctagcttcgtcgggcagttctatatacaaagcacttaataggtgtcctgaaccggctagcacagagcttctctcttacatgcacattctctatgaggtttgtccttacttcaagtttggatacatgtcagcaaatggtgctattgctgaggcaatgaaggaagaaaacagagttcacattattgatttccaaatcggtcaagggagtcaatgggtcactcttatccaggcttttgcagctaggcctggtgggcctccgcggattcggataacgggtatcgatgatatgacttcagcgtatgctcgtggaggtggcctaagcattgttggaaatagactcgctaagcttgctaagcagttcaacgttccattcgagtttaactcggtatcggtgtcagtttccgaggttaaacctaaaaacctcggggttcgacctggggaagctctagccgtaaactttgcctttgtgcttcatcatatgccagacgaaagcgtgagcaccgagaatcaccgcgaccggttattgagaatggtgaagagcttatctcccaaggtggtgactcttgtggaacaagagtcaaacacaaacacagccgctttcttcccgaggttcatggagacaatgaactactatgccgcgatgtttgagtcaattgatgtgactctaccaagagatcacaaacagaggattaatgtggagcaacattgtctagcaagagatgtcgtgaacatcatcgcatgtgaaggagctgatcgggtggagcgacacgagctcctaggaaaatggaggtcacggtttgggatggcgggtttcactccttacccgttgagtcccttggtgaattcaaccattaaaagtctgcttaggaactactcagacaagtacaggctagaagaaagagatggagctttgtatcttggttggatgcatcgagatttggttgcctcgtgtgcttggaaatgagacagtgacatttctctagtgtgatggcaattaatgtgtttctacttgtatgcaatttagtcgctcatttgaatcttcaaaacatttgaagaatcttatgtttactactagagaccaagagtgtgcacaattgctcaaatgtcaaagtcaactctttcctcaatcaaaatttaagtatgtagttcacacg

SEQ ID NO: 80550 - protein, 490 aa, Arabidopsis thaliana
  peptide (1)..(490): Ceres Seq. ID no. 12656385
  misc_feature (93)..(400): Pfam Name: GRAS family transcription factor Pfam Description: GRAS family transcription factor
  misc_feature (1)..(490): Homolog of NCBI NO: 15238903 NR Description: SCARECROW gene regulator-like; protein id: supported by cDNA: gi_8132288 [Arabidopsis thaliana] phytochrome A signal transduction 1 protein [Arabidopsis
  misc_feature (80)..(490): Homolog of NCBI NO: 26450054 NR Description: putative SCARECROW gene regulator [Arabidopsis
  misc_feature (7)..(489): Homolog of NCBI NO: 37533564 NR Description: putative SCARECROW gene regulator-like [Oryza
  misc_feature (82)..(490): Homolog of NCBI NO: 15224425 NR Description: putative SCARECROW gene regulator; protein id: supported by cDNA: gi_6644391 [Arabidopsis thaliana]
  misc_feature (59)..(490): Homolog of NCBI NO: 23397333 NR Description: putative scarecrow protein [Arabidopsis thaliana]
  misc_feature (59)..(490): Homolog of NCBI NO: 25405382 NR Description: scarecrow-like protein [imported] - Arabidopsis >gi|9454552|gb|AAF87875.1|AC012561_8 Putative transcription
  misc_feature (59)..(490): Homolog of NCBI NO: 30694805 NR Description: scarecrow-like transcription factor 5 (SCL5) thaliana] >gi|24030207|gb|AAN41283.1| putative scarecrow protein
  misc_feature (59)..(490): Homolog of NCBI NO: 14517552 NR Description: F17J6.12/F17J6.12 [Arabidopsis thaliana]
  misc_feature (30)..(489): Homolog of NCBI NO: 25989334 NR Description: chitin-inducible gibberellin-responsive protein
  misc_feature (60)..(490): Homolog of NCBI NO: 16930433 NR Description: AT4g17230/dl4650c [Arabidopsis thaliana]
MYKQPRQELEAYYFEPNSVEKLRYLPVNNSRKRFCTLEPFPDSPPYNALSTATYDDTCGSCVTDELNDFKHKIREIETVMMGPDSLDLLVDCTDSFDSTASQEINGWRSTLEAISRRDLRADLVSCAKAMSENDLMMAHSMMEKLRQMVSVSGEPIQRLGAYLLEGLVAQLASSGSSIYKALNRCPEPASTELLSYMHILYEVCPYFKFGYMSANGAIAEAMKEENRVHIIDFQIGQGSQWVTLIQAFAARPGGPPRIRITGIDDMTSAYARGGGLSIVGNRLAKLAKQFNVPFEFNSVSVSVSEVKPKNLGVRPGEALAVNFAFVLHHMPDESVSTENHRDRLLRMVKSLSPKVVTLVEQESNTNTAAFFPRFMETMNYYAAMFESIDVTLPRDHKQRINVEQHCLARDVVNIIACEGADRVERHELLGKWRSRFGMAGFTPYPLSPLVNSTIKSLLRNYSDKYRLEERDGALYLGWMHRDLVASCAWK

SEQ ID NO: 80551 - protein, 411 aa, Arabidopsis thaliana
  peptide (1)..(411): Ceres Seq. ID no. 12656386
  misc_feature (14)..(321): Pfam Name: GRAS family transcription factor Pfam Description: GRAS family transcription factor
  misc_feature (1)..(411): Homolog of NCBI NO: 15238903 NR Description: SCARECROW gene regulator-like; protein id: supported by cDNA: gi_8132288 [Arabidopsis thaliana] phytochrome A signal transduction 1 protein [Arabidopsis
  misc_feature (1)..(411): Homolog of NCBI NO: 26450054 NR Description: putative SCARECROW gene regulator [Arabidopsis
  misc_feature (1)..(410): Homolog of NCBI NO: 37533564 NR Description: putative SCARECROW gene regulator-like [Oryza
  misc_feature (3)..(411): Homolog of NCBI NO: 15224425 NR Description: putative SCARECROW gene regulator; protein id: supported by cDNA: gi_6644391 [Arabidopsis thaliana]
  misc_feature (1)..(411): Homolog of NCBI NO: 23397333 NR Description: putative scarecrow protein [Arabidopsis thaliana]
  misc_feature (1)..(411): Homolog of NCBI NO: 30694805 NR Description: scarecrow-like transcription factor 5 (SCL5) thaliana] >gi|24030207|gb|AAN41283.1| putative scarecrow protein
  misc_feature (1)..(411): Homolog of NCBI NO: 25405382 NR Description: scarecrow-like protein [imported] - Arabidopsis >gi|9454552|gb|AAF87875.1|AC012561_8 Putative transcription
  misc_feature (1)..(411): Homolog of NCBI NO: 14517552 NR Description: F17J6.12/F17J6.12 [Arabidopsis thaliana]
  misc_feature (1)..(410): Homolog of NCBI NO: 25989334 NR Description: chitin-inducible gibberellin-responsive protein
  misc_feature (1)..(411): Homolog of NCBI NO: 16930433 NR Description: AT4g17230/dl4650c [Arabidopsis thaliana]
MMGPDSLDLLVDCTDSFDSTASQEINGWRSTLEAISRRDLRADLVSCAKAMSENDLMMAHSMMEKLRQMVSVSGEPIQRLGAYLLEGLVAQLASSGSSIYKALNRCPEPASTELLSYMHILYEVCPYFKFGYMSANGAIAEAMKEENRVHIIDFQIGQGSQWVTLIQAFAARPGGPPRIRITGIDDMTSAYARGGGLSIVGNRLAKLAKQFNVPFEFNSVSVSVSEVKPKNLGVRPGEALAVNFAFVLHHMPDESVSTENHRDRLLRMVKSLSPKVVTLVEQESNTNTAAFFPRFMETMNYYAAMFESIDVTLPRDHKQRINVEQHCLARDVVNIIACEGADRVERHELLGKWRSRFGMAGFTPYPLSPLVNSTIKSLLRNYSDKYRLEERDGALYLGWMHRDLVASCAWK

SEQ ID NO: 80552 - protein, 410 aa, Arabidopsis thaliana
  peptide (1)..(410): Ceres Seq. ID no. 12656387
  misc_feature (13)..(320): Pfam Name: GRAS family transcription factor Pfam Description: GRAS family transcription factor
  misc_feature (1)..(410): Homolog of NCBI NO: 15238903 NR Description: SCARECROW gene regulator-like; protein id: supported by cDNA: gi_8132288 [Arabidopsis thaliana] phytochrome A signal transduction 1 protein [Arabidopsis
  misc_feature (1)..(410): Homolog of NCBI NO: 26450054 NR Description: putative SCARECROW gene regulator [Arabidopsis
  misc_feature (1)..(409): Homolog of NCBI NO: 37533564 NR Description: putative SCARECROW gene regulator-like [Oryza
  misc_feature (2)..(410): Homolog of NCBI NO: 15224425 NR Description: putative SCARECROW gene regulator; protein id: supported by cDNA: gi_6644391 [Arabidopsis thaliana]
  misc_feature (1)..(410): Homolog of NCBI NO: 23397333 NR Description: putative scarecrow protein [Arabidopsis thaliana]
  misc_feature (1)..(410): Homolog of NCBI NO: 25405382 NR Description: scarecrow-like protein [imported] - Arabidopsis >gi|9454552|gb|AAF87875.1|AC012561_8 Putative transcription
  misc_feature (1)..(410): Homolog of NCBI NO: 30694805 NR Description: scarecrow-like transcription factor 5 (SCL5) thaliana] >gi|24030207|gb|AAN41283.1| putative scarecrow protein
  misc_feature (1)..(410): Homolog of NCBI NO: 14517552 NR Description: F17J6.12/F17J6.12 [Arabidopsis thaliana]
  misc_feature (1)..(409): Homolog of NCBI NO: 25989334 NR Description: chitin-inducible gibberellin-responsive protein
  misc_feature (1)..(410): Homolog of NCBI NO: 16930433 NR Description: AT4g17230/dl4650c [Arabidopsis thaliana]
MGPDSLDLLVDCTDSFDSTASQEINGWRSTLEAISRRDLRADLVSCAKAMSENDLMMAHSMMEKLRQMVSVSGEPIQRLGAYLLEGLVAQLASSGSSIYKALNRCPEPASTELLSYMHILYEVCPYFKFGYMSANGAIAEAMKEENRVHIIDFQIGQGSQWVTLIQAFAARPGGPPRIRITGIDDMTSAYARGGGLSIVGNRLAKLAKQFNVPFEFNSVSVSVSEVKPKNLGVRPGEALAVNFAFVLHHMPDESVSTENHRDRLLRMVKSLSPKVVTLVEQESNTNTAAFFPRFMETMNYYAAMFESIDVTLPRDHKQRINVEQHCLARDVVNIIACEGADRVERHELLGKWRSRFGMAGFTPYPLSPLVNSTIKSLLRNYSDKYRLEERDGALYLGWMHRDLVASCAWK

SEQ ID NO: 80553 - DNA, 1668 bp, Arabidopsis thaliana
  misc_feature (1)..(1668): Ceres Seq. ID no. 12656388
  misc_feature: MA Experiment ID: 20000171 Result: Up-regulated in Transcription
  misc_feature: MA Experiment 20000171 PARAMETER Experiment Name: At_42deg_Heat_P Parameter: Age (day) Value: 14
  misc_feature: MA Experiment 20000171 PARAMETER Experiment Name: At_42deg_Heat_P Parameter: Organism Value: A. thaliana
  misc_feature: MA Experiment 20000171 PARAMETER Experiment Name: At_42deg_Heat_P Parameter: Plant Line Value: WS
  misc_feature: MA Experiment 20000171 PARAMETER Experiment Name: At_42deg_Heat_P Parameter: Temperature (deg C) Value: 42 vs. 22
  misc_feature: MA Experiment 20000171 PARAMETER Experiment Name: At_42deg_Heat_P Parameter: Timepoint (hr) Value: 1
  misc_feature: MA Experiment 20000171 PARAMETER Experiment Name: At_42deg_Heat_P Parameter: Tissue Value: Aerial
  misc_feature: MA Experiment ID: 20000184 Result: Down-regulated in Transcription
  misc_feature: MA Experiment 20000184 PARAMETER Experiment Name: At_Shoots__P Parameter: Age (day) Value: 7
  misc_feature: MA Experiment 20000184 PARAMETER Experiment Name: At_Shoots__P Parameter: Tissue Value: Shoots vs. Whole Plant
  misc_feature: MA Experiment ID: 20000185 Result: Down-regulated in Transcription
  misc_feature: MA Experiment 20000185 PARAMETER Experiment Name: At_Roots__P Parameter: Age (day) Value: 7 vs. 21
  misc_feature: MA Experiment 20000185 PARAMETER Experiment Name: At_Roots__P Parameter: Organism Value: A. thaliana
  misc_feature: MA Experiment 20000185 PARAMETER Experiment Name: At_Roots__P Parameter: Tissue Value: Roots vs. Whole Plant
  misc_feature: MA Experiment ID: 20000437 Result: Up-regulated in Transcription
  misc_feature: MA Experiment 20000437 PARAMETER Experiment Name: At_Drought_P Parameter: Age (day) Value: 8
  misc_feature: MA Experiment 20000437 PARAMETER Experiment Name: At_Drought_P Parameter: Organism Value: A. thaliana
  misc_feature: MA Experiment 20000437 PARAMETER Experiment Name: At_Drought_P Parameter: Plant Line Value: WS
  misc_feature: MA Experiment 20000437 PARAMETER Experiment Name: At_Drought_P Parameter: Timepoint (hr) Value: 24
  misc_feature: MA Experiment 20000437 PARAMETER Experiment Name: At_Drought_P Parameter: Tissue Value: Whole Plant
  misc_feature: MA Experiment 20000437 PARAMETER Experiment Name: At_Drought_P Parameter: Treatment Value: Drought vs. No Drought
  misc_feature: MA Experiment ID: 20000438 Result: Down-regulated in Transcription
  misc_feature: MA Experiment 20000438 PARAMETER Experiment Name: At_Shoots__P Parameter: Age (day) Value: 14
  misc_feature: MA Experiment 20000438 PARAMETER Experiment Name: At_Shoots__P Parameter: Tissue Value: Shoots vs. Whole Plant
  misc_feature: MA Experiment ID: 20000439 Result: Down-regulated in Transcription
  misc_feature: MA Experiment 20000439 PARAMETER Experiment Name: At_Roots__P Parameter: Age (day) Value: 14 vs. 21
  misc_feature: MA Experiment 20000439 PARAMETER Experiment Name: At_Roots__P Parameter: Organism Value: A. thaliana
  misc_feature: MA Experiment 20000439 PARAMETER Experiment Name: At_Roots__P Parameter: Tissue Value: Roots vs. Whole Plant
  misc_feature: MA Experiment ID: 20000441 Result: Down-regulated in Transcription
  misc_feature: MA Experiment 20000441 PARAMETER Experiment Name: At_1uM_BR-BRZ__P Parameter: Tissue Value: Shoot Apices
  misc_feature: MA Experiment 20000441 PARAMETER Experiment Name: At_1uM_BR-BRZ__P Parameter: Treatment Value: 1uM BR vs. No Treatment
  misc_feature: MA Experiment ID: 20000495 Result: Down-regulated in Transcription
  misc_feature: MA Experiment 20000495 PARAMETER Experiment Name: At_Guard_Cells_P Parameter: Harvest Date Value: 8/2/2002
  misc_feature: MA Experiment 20000495 PARAMETER Experiment Name: At_Guard_Cells_P Parameter: Organism Value: A. thaliana
  misc_feature: MA Experiment 20000495 PARAMETER Experiment Name: At_Guard_Cells_P Parameter: Tissue Value: Guard Cells vs. Leaves
  misc_feature: MA Experiment ID: 20001247 Result: Down-regulated in Transcription
  misc_feature: MA Experiment 20001247 PARAMETER Experiment Name: At_Far-red-induction_P Parameter: Age (day) Value: 7
  misc_feature: MA Experiment 20001247 PARAMETER Experiment Name: At_Far-red-induction_P Parameter: Light Value: Far-red vs. White
  misc_feature: MA Experiment 20001247 PARAMETER Experiment Name: At_Far-red-induction_P Parameter: Organism Value: A. thaliana
  misc_feature: MA Experiment 20001247 PARAMETER Experiment Name: At_Far-red-induction_P Parameter: Plant Line Value: Columbia
  misc_feature: MA Experiment 20001247 PARAMETER Experiment Name: At_Far-red-induction_P Parameter: Timepoint (hr) Value: 1
  misc_feature: MA Experiment 20001247 PARAMETER Experiment Name: At_Far-red-induction_P Parameter: Tissue Value: Whole Plant
  misc_feature: MA Experiment ID: 20001248 Result: Up-regulated in Transcription
  misc_feature: MA Experiment 20001248 PARAMETER Experiment Name: At_Far-red-induction_P Parameter: Age (day) Value: 7
  misc_feature: MA Experiment 20001248 PARAMETER Experiment Name: At_Far-red-induction_P Parameter: Light Value: Far-red vs. White
  misc_feature: MA Experiment 20001248 PARAMETER Experiment Name: At_Far-red-induction_P Parameter: Organism Value: A. thaliana
  misc_feature: MA Experiment 20001248 PARAMETER Experiment Name: At_Far-red-induction_P Parameter: Plant Line Value: Columbia
  misc_feature: MA Experiment 20001248 PARAMETER Experiment Name: At_Far-red-induction_P Parameter: Timepoint (hr) Value: 4
  misc_feature: MA Experiment 20001248 PARAMETER Experiment Name: At_Far-red-induction_P Parameter: Tissue Value: Whole Plant
  misc_feature: MA Experiment ID: 20001451 Result: Down-regulated in Transcription
  misc_feature: MA Experiment 20001451 PARAMETER Experiment Name: At_Far-red-induction_P Parameter: Age (day) Value: 7
  misc_feature: MA Experiment 20001451 PARAMETER Experiment Name: At_Far-red-induction_P Parameter: Light Value: Far-red vs. White
  misc_feature: MA Experiment 20001451 PARAMETER Experiment Name: At_Far-red-induction_P Parameter: Organism Value: A. thaliana
  misc_feature: MA Experiment 20001451 PARAMETER Experiment Name: At_Far-red-induction_P Parameter: Plant Line Value: Columbia
  misc_feature: MA Experiment 20001451 PARAMETER Experiment Name: At_Far-red-induction_P Parameter: Timepoint (hr) Value: 24
  misc_feature: MA Experiment 20001451 PARAMETER Experiment Name: At_Far-red-induction_P Parameter: Tissue Value: Whole Plant
  misc_feature: MA Experiment ID: 20001458 Result: Up-regulated in Transcription
  misc_feature: MA Experiment 20001458 PARAMETER Experiment Name: At_50mM_NH4NO3_L-to-H_P Parameter: Age (day) Value: Undefined
  misc_feature: MA Experiment 20001458 PARAMETER Experiment Name: At_50mM_NH4NO3_L-to-H_P Parameter: Organism Value: Undefined
  misc_feature: MA Experiment 20001458 PARAMETER Experiment Name: At_50mM_NH4NO3_L-to-H_P Parameter: Plant Line Value: Undefined
  misc_feature: MA Experiment 20001458 PARAMETER Experiment Name: At_50mM_NH4NO3_L-to-H_P Parameter: Timepoint (hr) Value: 2
  misc_feature: MA Experiment 20001458 PARAMETER Experiment Name: At_50mM_NH4NO3_L-to-H_P Parameter: Tissue Value: Siliques
  misc_feature: MA Experiment 20001458 PARAMETER Experiment Name: At_50mM_NH4NO3_L-to-H_P Parameter: Treatment Value: 50mM NH4NO3 vs. 100mM Manitol
  misc_feature: MA Experiment ID: 20001459 Result: Down-regulated in Transcription
  misc_feature: MA Experiment 20001459 PARAMETER Experiment Name: At_50mM_NH4NO3_L-to-H_P Parameter: Age (day) Value: Undefined
  misc_feature: MA Experiment 20001459 PARAMETER Experiment Name: At_50mM_NH4NO3_L-to-H_P Parameter: Organism Value: Undefined
  misc_feature: MA Experiment 20001459 PARAMETER Experiment Name: At_50mM_NH4NO3_L-to-H_P Parameter: Plant Line Value: Undefined
  misc_feature: MA Experiment 20001459 PARAMETER Experiment Name: At_50mM_NH4NO3_L-to-H_P Parameter: Timepoint (hr) Value: 4
  misc_feature: MA Experiment 20001459 PARAMETER Experiment Name: At_50mM_NH4NO3_L-to-H_P Parameter: Tissue Value: Siliques
  misc_feature: MA Experiment 20001459 PARAMETER Experiment Name: At_50mM_NH4NO3_L-to-H_P Parameter: Treatment Value: 50mM NH4NO3 vs. 100mM Manitol
  misc_feature: MA Experiment ID: 20001559 Result: Up-regulated in Transcription
  misc_feature: MA Experiment 20001559 PARAMETER Experiment Name: At_Drought_Soil_Dry_P Parameter: Age (day) Value: 28
  misc_feature: MA Experiment 20001559 PARAMETER Experiment Name: At_Drought_Soil_Dry_P Parameter: Organism Value: A. thaliana
  misc_feature: MA Experiment 20001559 PARAMETER Experiment Name: At_Drought_Soil_Dry_P Parameter: Plant Line Value: WS
  misc_feature: MA Experiment 20001559 PARAMETER Experiment Name: At_Drought_Soil_Dry_P Parameter: Post Timepoint (hr) Value: 29
  misc_feature: MA Experiment 20001559 PARAMETER Experiment Name: At_Drought_Soil_Dry_P Parameter: Post-Treatment Value: Re-Water vs. No Drought
  misc_feature: MA Experiment 20001559 PARAMETER Experiment Name: At_Drought_Soil_Dry_P Parameter: Timepoint (day) Value: 14
  misc_feature: MA Experiment 20001559 PARAMETER Experiment Name: At_Drought_Soil_Dry_P Parameter: Treatment Value: Drought vs. No Drought
atccatctgtttctccttttacccttcttcacacgcagctaaagaagaaatttgtggaatcatcgcttattcgtttcaaaagtcattcatttttggtgtctctgcttcagaagatacttgacgatctctcctactgaaaggagcttgctttcttcagtgtgacggttgagattggttgaaagatgggttatatgtgtgatttctgtggtgaacaaagatcaatggtgtattgtcgatctgatgcagcgtgtttgtgtctttcgtgtgaccgtaatgttcattctgctaatgctctatcgaaacgtcattcgcggactttggtatgtgagaggtgtaatgcacagccagcttctgtccggtgtagtgatgagagggtttctctatgtcaaaactgtgattggtcaggccatgacggcaagaattctactactacttcacatcataaaaggcaaaccatcaattgttattctggttgtccctcgagtgccgaattatcctcgatatggtctttctgtatggatttgaatatctcttctgctgaagaatccgcttgtgagcaaggaatgggtttgatgactatagatgaagatggcacaggagaaaaatctggtgtccaaaaaattaatgtagaacagcctgaaaccagttcggctgcacaaggtatggatcactctagtgttccagaaaattcatcaatggctaaggagcttggagtatgtgaggatgacttcaatggaaatctcatttcagatgaagtagacttggctcttgagaactatgaagaactctttggttcagccttcaactcatcaagatatctcttcgagcacggtggaattggaagtcttttcgagaaagatgaagctcatgagggctcaatgcagcagccagcattaagcaataatgcatctgcagattcgttcatgacttgtagaaccgagccaataatttgctattcatcaaagccagcacattcgaatatctccttctctggcatcactggagaaagtaatgctggagatttccaagattgtggggcgtcatcgatgaagcagctttcaagggagccacaaccatggtgccatccaacagcacaggacattattgcttcctcacatgcaacaacacgtaataacgctgttatgcgttacaaggaaaagaagaaggctcgcaagtttgacaagcgagtaaggtatgtctctaggaaagaaagggctgatgtgagacggcgtgtgaaaggacggtttgtcaagtccggtgaagcttatgattacgacccgatgagcccaacaagaagctactgaggataaaacctcaaaacaatgaaagatcacaaagtggagatataagacagagatgcaactaattggcagcgatggatctggaagccattattggttgaaaaggaacacgagttctccgcctcaaaagcgtcatacttgcttagaaaggcgcatgcttctgcagttctgcctcattttttgcataaagtttgttatcttcttctgtcatttggcatcatgacttgactgtgaaactagaaactcttctacagattcaggttcatgatccttaaattttgtcctattataatttgtgtagccaaggcaaaacaacgaatgtatattttttttacgtcatataaataataaccatgtagaagtttgg

SEQ ID NO: 80554 - protein, 373 aa, Arabidopsis thaliana
  peptide (1)..(373): Ceres Seq. ID no. 12656389
  misc_feature (1)..(47): Pfam Name: B-box zinc finger Pfam Description: B-box zinc finger
  misc_feature (1)..(373): Homolog of NCBI NO: 15238918 NR Description: CONSTANS B-box zinc finger family protein; id: At5g48250.1 [Arabidopsis thaliana]
  misc_feature (1)..(373): Homolog of NCBI NO: 15231491 NR Description: CONSTANS B-box zinc finger family protein; id: At3g07650.1 [Arabidopsis thaliana]
  misc_feature (5)..(117): Homolog of NCBI NO: 15233186 NR Description: CONSTANS B-box zinc finger family protein;
  misc_feature (5)..(117): Homolog of NCBI NO: 17433065 NR Description: Zinc finger protein constans-like 12
  misc_feature (272)..(370): Homolog of NCBI NO: 15233186 NR Description: CONSTANS B-box zinc finger family protein;
  misc_feature (272)..(370): Homolog of NCBI NO: 17433065 NR Description: Zinc finger protein constans-like 12
  misc_feature (4)..(373): Homolog of NCBI NO: 7489605 NR Description: zinc-finger protein S3574 [imported] - rice
  misc_feature (1)..(143): Homolog of NCBI NO: 7489605 NR Description: zinc-finger protein S3574 [imported] - rice
  misc_feature (5)..(149): Homolog of NCBI NO: 30685731 NR Description: CONSTANS B-box zinc finger family protein
  misc_feature (313)..(358): Homolog of NCBI NO: 30685731 NR Description: CONSTANS B-box zinc finger family protein
MGYMCDFCGEQRSMVYCRSDAACLCLSCDRNVHSANALSKRHSRTLVCERCNAQPASVRCSDERVSLCQNCDWSGHDGKNSTTTSHHKRQTINCYSGCPSSAELSSIWSFCMDLNISSAEESACEQGMGLMTIDEDGTGEKSGVQKINVEQPETSSAAQGMDHSSVPENSSMAKELGVCEDDFNGNLISDEVDLALENYEELFGSAFNSSRYLFEHGGIGSLFEKDEAHEGSMQQPALSNNASADSFMTCRTEPIICYSSKPAHSNISFSGITGESNAGDFQDCGASSMKQLSREPQPWCHPTAQDIIASSHATTRNNAVMRYKEKKKARKFDKRVRYVSRKERADVRRRVKGRFVKSGEAYDYDPMSPTRSY

SEQ ID NO: 80555 - protein, 370 aa, Arabidopsis thaliana
  peptide (1)..(370): Ceres Seq. ID no. 12656390
  misc_feature (1)..(44): Pfam Name: B-box zinc finger Pfam Description: B-box zinc finger
  misc_feature (1)..(370): Homolog of NCBI NO: 15238918 NR Description: CONSTANS B-box zinc finger family protein; id: At5g48250.1 [Arabidopsis thaliana]
  misc_feature (1)..(370): Homolog of NCBI NO: 15231491 NR Description: CONSTANS B-box zinc finger family protein; id: At3g07650.1 [Arabidopsis thaliana]
  misc_feature (2)..(114): Homolog of NCBI NO: 15233186 NR Description: CONSTANS B-box zinc finger family protein;
  misc_feature (2)..(114): Homolog of NCBI NO: 17433065 NR Description: Zinc finger protein constans-like 12
  misc_feature (269)..(367): Homolog of NCBI NO: 15233186 NR Description: CONSTANS B-box zinc finger family protein;
  misc_feature (269)..(367): Homolog of NCBI NO: 17433065 NR Description: Zinc finger protein constans-like 12
  misc_feature (1)..(370): Homolog of NCBI NO: 7489605 NR Description: zinc-finger protein S3574 [imported] - rice
  misc_feature (1)..(140): Homolog of NCBI NO: 7489605 NR Description: zinc-finger protein S3574 [imported] - rice
  misc_feature (2)..(146): Homolog of NCBI NO: 30685731 NR Description: CONSTANS B-box zinc finger family protein
  misc_feature (310)..(355): Homolog of NCBI NO: 30685731 NR Description: CONSTANS B-box zinc finger family protein
MCDFCGEQRSMVYCRSDAACLCLSCDRNVHSANALSKRHSRTLVCERCNAQPASVRCSDERVSLCQNCDWSGHDGKNSTTTSHHKRQTINCYSGCPSSAELSSIWSFCMDLNISSAEESACEQGMGLMTIDEDGTGEKSGVQKINVEQPETSSAAQGMDHSSVPENSSMAKELGVCEDDFNGNLISDEVDLALENYEELFGSAFNSSRYLFEHGGIGSLFEKDEAHEGSMQQPALSNNASADSFMTCRTEPIICYSSKPAHSNISFSGITGESNAGDFQDCGASSMKQLSREPQPWCHPTAQDIIASSHATTRNNAVMRYKEKKKARKFDKRVRYVSRKERADVRRRVKGRFVKSGEAYDYDPMSPTRSY

SEQ ID NO: 80556 - protein, 360 aa, Arabidopsis thaliana
  peptide (1)..(360): Ceres Seq. ID no. 12656391
  misc_feature (1)..(34): Pfam Name: B-box zinc finger Pfam Description: B-box zinc finger
  misc_feature (1)..(360): Homolog of NCBI NO: 15238918 NR Description: CONSTANS B-box zinc finger family protein; id: At5g48250.1 [Arabidopsis thaliana]
  misc_feature (1)..(360): Homolog of NCBI NO: 15231491 NR Description: CONSTANS B-box zinc finger family protein; id: At3g07650.1 [Arabidopsis thaliana]
  misc_feature (1)..(104): Homolog of NCBI NO: 15233186 NR Description: CONSTANS B-box zinc finger family protein;
  misc_feature (1)..(104): Homolog of NCBI NO: 17433065 NR Description: Zinc finger protein constans-like 12
  misc_feature (259)..(357): Homolog of NCBI NO: 15233186 NR Description: CONSTANS B-box zinc finger family protein;
  misc_feature (259)..(357): Homolog of NCBI NO: 17433065 NR Description: Zinc finger protein constans-like 12
  misc_feature (1)..(360): Homolog of NCBI NO: 7489605 NR Description: zinc-finger protein S3574 [imported] - rice
  misc_feature (1)..(130): Homolog of NCBI NO: 7489605 NR Description: zinc-finger protein S3574 [imported] - rice
  misc_feature (1)..(136): Homolog of NCBI NO: 30685731 NR Description: CONSTANS B-box zinc finger family protein
  misc_feature (300)..(345): Homolog of NCBI NO: 30685731 NR Description: CONSTANS B-box zinc finger family protein
MVYCRSDAACLCLSCDRNVHSANALSKRHSRTLVCERCNAQPASVRCSDERVSLCQNCDWSGHDGKNSTTTSHHKRQTINCYSGCPSSAELSSIWSFCMDLNISSAEESACEQGMGLMTIDEDGTGEKSGVQKINVEQPETSSAAQGMDHSSVPENSSMAKELGVCEDDFNGNLISDEVDLALENYEELFGSAFNSSRYLFEHGGIGSLFEKDEAHEGSMQQPALSNNASADSFMTCRTEPIICYSSKPAHSNISFSGITGESNAGDFQDCGASSMKQLSREPQPWCHPTAQDIIASSHATTRNNAVMRYKEKKKARKFDKRVRYVSRKERADVRRRVKGRFVKSGEAYDYDPMSPTRSY

SEQ ID NO: 80557 - DNA, 1653 bp, Arabidopsis thaliana
  misc_feature (1)..(1653): Ceres Seq. ID no. 12656411
  misc_feature: MA Experiment ID: 20001247 Result: Down-regulated in Transcription
  misc_feature: MA Experiment 20001247 PARAMETER Experiment Name: At_Far-red-induction_P Parameter: Age (day) Value: 7
  misc_feature: MA Experiment 20001247 PARAMETER Experiment Name: At_Far-red-induction_P Parameter: Light Value: Far-red vs. White
  misc_feature: MA Experiment 20001247 PARAMETER Experiment Name: At_Far-red-induction_P Parameter: Organism Value: A. thaliana
  misc_feature: MA Experiment 20001247 PARAMETER Experiment Name: At_Far-red-induction_P Parameter: Plant Line Value: Columbia
  misc_feature: MA Experiment 20001247 PARAMETER Experiment Name: At_Far-red-induction_P Parameter: Timepoint (hr) Value: 1
  misc_feature: MA Experiment 20001247 PARAMETER Experiment Name: At_Far-red-induction_P Parameter: Tissue Value: Whole Plant
atgatccagagattatctcatccttctttgctctcactcgaaaccctcttcaagctctgcaaatccgagattcatcttaatcaaatccatgcccgaatcatccgcaaaggtcttgaacaagaccagaatctcatctcaatcttcatctcttcgtcttcttcgtcttcttcgtctctctcttactcttcctctgtttttgaacgtgttccttctcctggaacttatctctggaatcatttgattaaagggtactcgaataagtttctcttctttgagactgtttcgattctaatgcggatgatgagaacaggtttagctagacctgatgagtatacttttcctttggttatgaaagtttgttctaacaatggacaggttcgtgttggttcatcggttcatgggttagttttgagaattgggtttgataaagatgttgttgtgggtacaagttttgttgatttttatggtaaatgtaaggatttgtttagtgcacgtaaggtgtttggggaaatgcctgagagaaatgctgtttcttggacagctttggttgttgcctatgtgaaatctggggagttagaggaagcgaagagcatgtttgatcttatgcctgagcgtaatttgggatcttggaatgctttggttgatgggttggttaaatctggtgatttggttaatgctaagaagttgtttgatgaaatgcctaagagagatataatttcgtatacctctatgattgatgggtatgctaaaggtggtgatatggtttctgcaagggatttgtttgaggaagcgaggggtgttgatgttagagcatggtcagctttgatattgggttatgcacagaacggtcagccgaatgaggcttttaaggtttttagcgaaatgtgtgcgaagaatgtcaaacctgatgagtttataatggtgggtttgatgtcagcttgttctcagatgggttgttttgagttatgtgaaaaggttgattcttatctgcaccaaaggatgaataagttttctagtcattatgttgtacctgctttgatagacatgaatgccaagtgtggccacatggacagagcagctaagttgtttgaagagatgcctcagcgagatcttgtttcatattgttcgatgatggaaggaatggcgatccacgggtgtggaagtgaagctattcgactgtttgagaaaatggtagacgaaggtattgttcctgatgaagttgccttcacagtaatattgaaagtttgtggccaatccaggcttgttgaggagggattgaggtatttcgagttaatgcgaaagaaatattctattttggcatctcctgatcattattcatgcattgtgaatcttcttagccggacagggaagcttaaagaggcctatgagcttatcaaatccatgccctttgaagctcatgctagtgcttggggttcacttttgggtggttgtagtctacatgggaatactgagatagcagaggtagttgcaaggcacctctttgagcttgaaccacaaagtgccggtagttacgtgcttctgtcaaatatttatgcagctttagaccggtggacggatgttgctcatcttagggacaaaatgaacgaaaatggtattacaaagatttgtggccgaagttggataagtcgataa

SEQ ID NO: 80558 - protein, 550 aa, Arabidopsis thaliana
  peptide (1)..(550): Ceres Seq. ID no. 12656412
  misc_feature (146)..(180): Pfam Name: PPR repeat Pfam Description: PPR repeat
  misc_feature (1)..(550): Homolog of NCBI NO: 15240281 NR Description: putative protein; protein id: At5g37570.1 thaliana] >gi|9757967|dbj|BAB08303.1|
  misc_feature (13)..(546): Homolog of NCBI NO: 15228653 NR Description: hypothetical protein; protein id: At3g29230.1 thaliana] >gi|9293916|dbj|BAB01819.1|
  misc_feature (1)..(548): Homolog of NCBI NO: 34906932 NR Description: selenium-binding protein-like [Oryza sativa
  misc_feature (26)..(548): Homolog of NCBI NO: 11994419 NR Description: selenium-binding protein-like [Arabidopsis
  misc_feature (26)..(548): Homolog of NCBI NO: 15230593 NR Description: unknown protein; protein id: At3g12770.1
  misc_feature (96)..(548): Homolog of NCBI NO: 34906898 NR Description: P0470A12.29 [Oryza sativa (japonica
  misc_feature (13)..(548): Homolog of NCBI NO: 15231970 NR Description: unknown protein; protein id: At3g08820.1 thaliana] >gi|6403507|gb|AAF07847.1|AC010871_23 unknown protein
  misc_feature (80)..(548): Homolog of NCBI NO: 15222280 NR Description: hypothetical protein; protein id: At1g13410.1
  misc_feature (33)..(548): Homolog of NCBI NO: 15225365 NR Description: hypothetical protein; protein id: At2g44880.1
  misc_feature (1)..(546): Homolog of NCBI NO: 15229939 NR Description: hypothetical protein; protein id: At3g05240.1 thaliana] >gi|6729034|gb|AAF27030.1|AC009177_20 hypothetical
MIQRLSHPSLLSLETLFKLCKSEIHLNQIHARIIRKGLEQDQNLISIFISSSSSSSSSLSYSSSVFERVPSPGTYLWNHLIKGYSNKFLFFETVSILMRMMRTGLARPDEYTFPLVMKVCSNNGQVRVGSSVHGLVLRIGFDKDVVVGTSFVDFYGKCKDLFSARKVFGEMPERNAVSWTALVVAYVKSGELEEAKSMFDLMPERNLGSWNALVDGLVKSGDLVNAKKLFDEMPKRDIISYTSMIDGYAKGGDMVSARDLFEEARGVDVRAWSALILGYAQNGQPNEAFKVFSEMCAKNVKPDEFIMVGLMSACSQMGCFELCEKVDSYLHQRMNKFSSHYVVPALIDMNAKCGHMDRAAKLFEEMPQRDLVSYCSMMEGMAIHGCGSEAIRLFEKMVDEGIVPDEVAFTVILKVCGQSRLVEEGLRYFELMRKKYSILASPDHYSCIVNLLSRTGKLKEAYELIKSMPFEAHASAWGSLLGGCSLHGNTEIAEVVARHLFELEPQSAGSYVLLSNIYAALDRWTDVAHLRDKMNENGITKICGRSWISR

SEQ ID NO: 80559 - protein, 453 aa, Arabidopsis thaliana
  peptide (1)..(453): Ceres Seq. ID no. 12656413
  misc_feature (49)..(83): Pfam Name: PPR repeat Pfam Description: PPR repeat
  misc_feature (1)..(453): Homolog of NCBI NO: 15240281 NR Description: putative protein; protein id: At5g37570.1 thaliana] >gi|9757967|dbj|BAB08303.1|
  misc_feature (1)..(449): Homolog of NCBI NO: 15228653 NR Description: hypothetical protein; protein id: At3g29230.1 thaliana] >gi|9293916|dbj|BAB01819.1|
  misc_feature (1)..(451): Homolog of NCBI NO: 34906932 NR Description: selenium-binding protein-like [Oryza sativa
  misc_feature (1)..(451): Homolog of NCBI NO: 11994419 NR Description: selenium-binding protein-like [Arabidopsis
  misc_feature (1)..(451): Homolog of NCBI NO: 15230593 NR Description: unknown protein; protein id: At3g12770.1
  misc_feature (1)..(451): Homolog of NCBI NO: 34906898 NR Description: P0470A12.29 [Oryza sativa (japonica
  misc_feature (1)..(451): Homolog of NCBI NO: 15231970 NR Description: unknown protein; protein id: At3g08820.1 thaliana] >gi|6403507|gb|AAF07847.1|AC010871_23 unknown protein
  misc_feature (1)..(451): Homolog of NCBI NO: 15222280 NR Description: hypothetical protein; protein id: At1g13410.1
  misc_feature (1)..(451): Homolog of NCBI NO: 15225365 NR Description: hypothetical protein; protein id: At2g44880.1
  misc_feature (1)..(449): Homolog of NCBI NO: 15229939 NR Description: hypothetical protein; protein id: At3g05240.1 thaliana] >gi|6729034|gb|AAF27030.1|AC009177_20 hypothetical
MRMMRTGLARPDEYTFPLVMKVCSNNGQVRVGSSVHGLVLRIGFDKDVVVGTSFVDFYGKCKDLFSARKVFGEMPERNAVSWTALVVAYVKSGELEEAKSMFDLMPERNLGSWNALVDGLVKSGDLVNAKKLFDEMPKRDIISYTSMIDGYAKGGDMVSARDLFEEARGVDVRAWSALILGYAQNGQPNEAFKVFSEMCAKNVKPDEFIMVGLMSACSQMGCFELCEKVDSYLHQRMNKFSSHYVVPALIDMNAKCGHMDRAAKLFEEMPQRDLVSYCSMMEGMAIHGCGSEAIRLFEKMVDEGIVPDEVAFTVILKVCGQSRLVEEGLRYFELMRKKYSILASPDHYSCIVNLLSRTGKLKEAYELIKSMPFEAHASAWGSLLGGCSLHGNTEIAEVVARHLFELEPQSAGSYVLLSNIYAALDRWTDVAHLRDKMNENGITKICGRSWISR

SEQ ID NO: 80560 - protein, 451 aa, Arabidopsis thaliana
  peptide (1)..(451): Ceres Seq. ID no. 12656414
  misc_feature (47)..(81): Pfam Name: PPR repeat Pfam Description: PPR repeat
  misc_feature (1)..(451): Homolog of NCBI NO: 15240281 NR Description: putative protein; protein id: At5g37570.1 thaliana] >gi|9757967|dbj|BAB08303.1|
  misc_feature (1)..(447): Homolog of NCBI NO: 15228653 NR Description: hypothetical protein; protein id: At3g29230.1 thaliana] >gi|9293916|dbj|BAB01819.1|
  misc_feature (1)..(449): Homolog of NCBI NO: 34906932 NR Description: selenium-binding protein-like [Oryza sativa
  misc_feature (1)..(449): Homolog of NCBI NO: 11994419 NR Description: selenium-binding protein-like [Arabidopsis
  misc_feature (1)..(449): Homolog of NCBI NO: 15230593 NR Description: unknown protein; protein id: At3g12770.1
  misc_feature (1)..(449): Homolog of NCBI NO: 34906898 NR Description: P0470A12.29 [Oryza sativa (japonica
  misc_feature (1)..(449): Homolog of NCBI NO: 15231970 NR Description: unknown protein; protein id: At3g08820.1 thaliana] >gi|6403507|gb|AAF07847.1|AC010871_23 unknown protein
  misc_feature (1)..(449): Homolog of NCBI NO: 15222280 NR Description: hypothetical protein; protein id: At1g13410.1
  misc_feature (1)..(449): Homolog of NCBI NO: 15225365 NR Description: hypothetical protein; protein id: At2g44880.1
  misc_feature (1)..(447): Homolog of NCBI NO: 15229939 NR Description: hypothetical protein; protein id: At3g05240.1 thaliana] >gi|6729034|gb|AAF27030.1|AC009177_20 hypothetical
MMRTGLARPDEYTFPLVMKVCSNNGQVRVGSSVHGLVLRIGFDKDVVVGTSFVDFYGKCKDLFSARKVFGEMPERNAVSWTALVVAYVKSGELEEAKSMFDLMPERNLGSWNALVDGLVKSGDLVNAKKLFDEMPKRDIISYTSMIDGYAKGGDMVSARDLFEEARGVDVRAWSALILGYAQNGQPNEAFKVFSEMCAKNVKPDEFIMVGLMSACSQMGCFELCEKVDSYLHQRMNKFSSHYVVPALIDMNAKCGHMDRAAKLFEEMPQRDLVSYCSMMEGMAIHGCGSEAIRLFEKMVDEGIVPDEVAFTVILKVCGQSRLVEEGLRYFELMRKKYSILASPDHYSCIVNLLSRTGKLKEAYELIKSMPFEAHASAWGSLLGGCSLHGNTEIAEVVARHLFELEPQSAGSYVLLSNIYAALDRWTDVAHLRDKMNENGITKICGRSWISR

SEQ ID NO: 80561 - DNA, 1482 bp, Arabidopsis thaliana
  misc_feature (1)..(1482): Ceres Seq. ID no. 12656421
  misc_feature: MA Experiment ID: 20000315 Result: Up-regulated in Transcription
  misc_feature: MA Experiment 20000315 PARAMETER Experiment Name: At_14day_Shoots-Roots_Sub_P Parameter: Age (day) Value: 14
  misc_feature: MA Experiment 20000315 PARAMETER Experiment Name: At_14day_Shoots-Roots_Sub_P Parameter: Organism Value: A. thaliana
  misc_feature: MA Experiment 20000315 PARAMETER Experiment Name: At_14day_Shoots-Roots_Sub_P Parameter: Plant Line Value: WS
  misc_feature: MA Experiment 20000315 PARAMETER Experiment Name: At_14day_Shoots-Roots_Sub_P Parameter: Tissue Value: Shoots vs. Whole Plant
  misc_feature: MA Experiment ID: 20000327 Result: Down-regulated in Transcription
  misc_feature: MA Experiment 20000327 PARAMETER Experiment Name: At_42deg_Heat_Sub_P Parameter: Age (day) Value: 14
  misc_feature: MA Experiment 20000327 PARAMETER Experiment Name: At_42deg_Heat_Sub_P Parameter: Organism Value: A. thaliana
  misc_feature: MA Experiment 20000327 PARAMETER Experiment Name: At_42deg_Heat_Sub_P Parameter: Plant Line Value: WS
  misc_feature: MA Experiment 20000327 PARAMETER Experiment Name: At_42deg_Heat_Sub_P Parameter: Temperature (deg C) Value: 42 vs. 22
  misc_feature: MA Experiment 20000327 PARAMETER Experiment Name: At_42deg_Heat_Sub_P Parameter: Timepoint (hr) Value: 1
  misc_feature: MA Experiment 20000327 PARAMETER Experiment Name: At_42deg_Heat_Sub_P Parameter: Tissue Value: Aerial
  misc_feature: MA Experiment ID: 20000328 Result: Down-regulated in Transcription
  misc_feature: MA Experiment 20000328 PARAMETER Experiment Name: At_42deg_Heat_Sub_P Parameter: Age (day) Value: 14
  misc_feature: MA Experiment 20000328 PARAMETER Experiment Name: At_42deg_Heat_Sub_P Parameter: Organism Value: A. thaliana
  misc_feature: MA Experiment 20000328 PARAMETER Experiment Name: At_42deg_Heat_Sub_P Parameter: Plant Line Value: WS
  misc_feature: MA Experiment 20000328 PARAMETER Experiment Name: At_42deg_Heat_Sub_P Parameter: Temperature (deg C) Value: 42 vs. 22
  misc_feature: MA Experiment 20000328 PARAMETER Experiment Name: At_42deg_Heat_Sub_P Parameter: Timepoint (hr) Value: 6
  misc_feature: MA Experiment 20000328 PARAMETER Experiment Name: At_42deg_Heat_Sub_P Parameter: Tissue Value: Aerial
  misc_feature: MA Experiment ID: 20000348 Result: Up-regulated in Transcription
  misc_feature: MA Experiment 20000348 PARAMETER Experiment Name: At_100uM_ABA_Sub_P Parameter: Age (day) Value: 14
  misc_feature: MA Experiment 20000348 PARAMETER Experiment Name: At_100uM_ABA_Sub_P Parameter: Organism Value: A. thaliana
  misc_feature: MA Experiment 20000348 PARAMETER Experiment Name: At_100uM_ABA_Sub_P Parameter: Plant Line Value: WS
  misc_feature: MA Experiment 20000348 PARAMETER Experiment Name: At_100uM_ABA_Sub_P Parameter: Timepoint (hr) Value: 1
  misc_feature: MA Experiment 20000348 PARAMETER Experiment Name: At_100uM_ABA_Sub_P Parameter: Tissue Value: Aerial
  misc_feature: MA Experiment 20000348 PARAMETER Experiment Name: At_100uM_ABA_Sub_P Parameter: Treatment Value: 100uM ABA vs. No Treatment
  misc_feature: MA Experiment ID: 20000355 Result: Down-regulated in Transcription
  misc_feature: MA Experiment 20000355 PARAMETER Experiment Name: At_Siliques_Sub_P Parameter: Age (day) Value: 21
  misc_feature: MA Experiment 20000355 PARAMETER Experiment Name: At_Siliques_Sub_P Parameter: Organism Value: A. thaliana
  misc_feature: MA Experiment 20000355 PARAMETER Experiment Name: At_Siliques_Sub_P Parameter: Plant Line Value: WS
  misc_feature: MA Experiment 20000355 PARAMETER Experiment Name: At_Siliques_Sub_P Parameter: Tissue Value: Less Than 5mm Siliques vs. Whole Plant
atggattaccccatgaagaaggtaaaaatctttttcaactacctcatggcgcatcgcttcaagctctgcttcttaccattaatggttgctatagccgtggaggcgtctcgtctttccacacaagatctccaaaacttttacctctacttacaaaacaaccacacatctctaaccatgttcttcctttacctcgctctcgggtcgactctttacctcatgacccggcccaaacccgtttatctcgttgactttagctgctacctcccaccgtcgcatctcaaagccagcacccagaggatcatgcaacacgtaaggcttgtacgagaagcaggcgcgtggaagcaagagtccgattacttgatggacttctgcgagaagattctagaacgttccggtctaggccaagagacgtacgtacccgaaggtcttcaaactttgccactacaacagaatttggctgtatcacgtatagagacggaggaagttattattggtgcggtcgataatctgtttcgcaacacgggaataagccctagtgatataggtatattggtggtgaattcaagcacttttaatccaacaccttcgctatcaagtatcttagtgaataagtttaaacttagggataatataaagagcttgaatcttggtgggatggggtgtagcgctggagtcatcgctatcgatgcggctaagagcttgttacaagttcatagaaacacttatgctcttgtggtgagcacggagaacatcactcaaaacttgtacatgggtaacaacaaatcaatgttggttacaaactgtttgttccgtataggtggggccgcgattttgctttctaaccggtctatagatcgtaaacgcgcaaaatacgagcttgttcacaccgtgcgggtccataccggagcagatgaccgatcctatgaatgtgcaactcaagaagaggatgaagatggcatagttggggtttccttgtcaaagaatctaccaatggtagctgcaagaaccctaaagatcaatatcgcaactttgggtccgcttgttcttcccataagcgagaagtttcacttctttgtgaggttcgttaaaaagaagtttctcaaccccaagctaaagcattacattccggatttcaagctcgcattcgagcatttctgtatccatgcgggtggtagagcgctaattgatgagatggagaagaatcttcatctaactccactagacgttgaggcttcaagaatgacattacacaggtttggtaatacctcttcgagctccatttggtacgagttggcttacacagaagccaaaggaaggatgacgaaaggagataggatttggcagattgcgttggggtcaggttttaagtgtaatagttcagtttgggtggctcttcgtaacgtcaagccttctactaataatccttgggaacagtgtctacacaaatatccagttgagatcgatatagatttaaaagagtga

SEQ ID NO: 80562 - protein, 493 aa, Arabidopsis thaliana
  peptide (1)..(493): Ceres Seq. ID no. 12656422
  misc_feature (320)..(466): Pfam Name: Chalcone and stilbene synthases, C-terminal domain Pfam Description: Chalcone and stilbene synthases, C-terminal
  misc_feature (1)..(493): Homolog of NCBI NO: 15235309 NR Description: fatty acid elongase - like protein; protein id: [Arabidopsis thaliana] >gi|7484964|pir||T04771 fatty acid
  misc_feature (5)..(489): Homolog of NCBI NO: 30679326 NR Description: fatty acid elongase 1 (FAE1), putative
  misc_feature (20)..(489): Homolog of NCBI NO: 25411602 NR Description: probable fatty acid elongase [imported] - thaliana >gi|4115364|gb|AAD03366.1| putative fatty acid elongase
  misc_feature (8)..(493): Homolog of NCBI NO: 15236144 NR Description: fatty acid elongase 1; protein id: At4g34520.1
  misc_feature (8)..(490): Homolog of NCBI NO: 14495235 NR Description: beta-ketoacyl-CoA synthase [Brassica napus]
  misc_feature (8)..(490): Homolog of NCBI NO: 19919736 NR Description: 3-ketoacyl-CoA synthase [Brassica rapa]
  misc_feature (8)..(490): Homolog of NCBI NO: 30424122 NR Description: beta-ketoacyl-CoA synthase FAE1.2 [Brassica
  misc_feature (8)..(490): Homolog of NCBI NO: 30424120 NR Description: beta-ketoacyl-CoA synthase FAE1.1 [Brassica
  misc_feature (8)..(490): Homolog of NCBI NO: 19919732 NR Description: 3-ketoacyl-CoA synthase [Brassica napus]
  misc_feature (8)..(490): Homolog of NCBI NO: 19919734 NR Description: 3-ketoacyl-CoA synthase [Brassica oleracea]
MDYPMKKVKIFFNYLMAHRFKLCFLPLMVAIAVEASRLSTQDLQNFYLYLQNNHTSLTMFFLYLALGSTLYLMTRPKPVYLVDFSCYLPPSHLKASTQRIMQHVRLVREAGAWKQESDYLMDFCEKILERSGLGQETYVPEGLQTLPLQQNLAVSRIETEEVIIGAVDNLFRNTGISPSDIGILVVNSSTFNPTPSLSSILVNKFKLRDNIKSLNLGGMGCSAGVIAIDAAKSLLQVHRNTYALVVSTENITQNLYMGNNKSMLVTNCLFRIGGAAILLSNRSIDRKRAKYELVHTVRVHTGADDRSYECATQEEDEDGIVGVSLSKNLPMVAARTLKINIATLGPLVLPISEKFHFFVRFVKKKFLNPKLKHYIPDFKLAFEHFCIHAGGRALIDEMEKNLHLTPLDVEASRMTLHRFGNTSSSSIWYELAYTEAKGRMTKGDRIWQIALGSGFKCNSSVWVALRNVKPSTNNPWEQCLHKYPVEIDIDLKE

SEQ ID NO: 80563 - protein, 489 aa, Arabidopsis thaliana
  peptide (1)..(489): Ceres Seq. ID no. 12656423
  misc_feature (316)..(462): Pfam Name: Chalcone and stilbene synthases, C-terminal domain Pfam Description: Chalcone and stilbene synthases, C-terminal
  misc_feature (1)..(489): Homolog of NCBI NO: 15235309 NR Description: fatty acid elongase - like protein; protein id: [Arabidopsis thaliana] >gi|7484964|pir||T04771 fatty acid
  misc_feature (1)..(485): Homolog of NCBI NO: 30679326 NR Description: fatty acid elongase 1 (FAE1), putative
  misc_feature (16)..(485): Homolog of NCBI NO: 25411602 NR Description: probable fatty acid elongase [imported] - thaliana >gi|4115364|gb|AAD03366.1| putative fatty acid elongase
  misc_feature (4)..(489): Homolog of NCBI NO: 15236144 NR Description: fatty acid elongase 1; protein id: At4g34520.1
  misc_feature (4)..(486): Homolog of NCBI NO: 14495235 NR Description: beta-ketoacyl-CoA synthase [Brassica napus]
  misc_feature (4)..(486): Homolog of NCBI NO: 19919736 NR Description: 3-ketoacyl-CoA synthase [Brassica rapa]
  misc_feature (4)..(486): Homolog of NCBI NO: 30424122 NR Description: beta-ketoacyl-CoA synthase FAE1.2 [Brassica
  misc_feature (4)..(486): Homolog of NCBI NO: 30424120 NR Description: beta-ketoacyl-CoA synthase FAE1.1 [Brassica
  misc_feature (4)..(486): Homolog of NCBI NO: 19919732 NR Description: 3-ketoacyl-CoA synthase [Brassica napus]
  misc_feature (4)..(486): Homolog of NCBI NO: 19919734 NR Description: 3-ketoacyl-CoA synthase [Brassica oleracea]
MKKVKIFFNYLMAHRFKLCFLPLMVAIAVEASRLSTQDLQNFYLYLQNNHTSLTMFFLYLALGSTLYLMTRPKPVYLVDFSCYLPPSHLKASTQRIMQHVRLVREAGAWKQESDYLMDFCEKILERSGLGQETYVPEGLQTLPLQQNLAVSRIETEEVIIGAVDNLFRNTGISPSDIGILVVNSSTFNPTPSLSSILVNKFKLRDNIKSLNLGGMGCSAGVIAIDAAKSLLQVHRNTYALVVSTENITQNLYMGNNKSMLVTNCLFRIGGAAILLSNRSIDRKRAKYELVHTVRVHTGADDRSYECATQEEDEDGIVGVSLSKNLPMVAARTLKINIATLGPLVLPISEKFHFFVRFVKKKFLNPKLKHYIPDFKLAFEHFCIHAGGRALIDEMEKNLHLTPLDVEASRMTLHRFGNTSSSSIWYELAYTEAKGRMTKGDRIWQIALGSGFKCNSSVWVALRNVKPSTNNPWEQCLHKYPVEIDIDLKE

SEQ ID NO: 80564 - protein, 478 aa, Arabidopsis thaliana
  peptide (1)..(478): Ceres Seq. ID no. 12656424
  misc_feature (305)..(451): Pfam Name: Chalcone and stilbene synthases, C-terminal domain Pfam Description: Chalcone and stilbene synthases, C-terminal
  misc_feature (1)..(478): Homolog of NCBI NO: 15235309 NR Description: fatty acid elongase - like protein; protein id: [Arabidopsis thaliana] >gi|7484964|pir||T04771 fatty acid
  misc_feature (1)..(474): Homolog of NCBI NO: 30679326 NR Description: fatty acid elongase 1 (FAE1), putative
  misc_feature (5)..(474): Homolog of NCBI NO: 25411602 NR Description: probable fatty acid elongase [imported] - thaliana >gi|4115364|gb|AAD03366.1| putative fatty acid elongase
  misc_feature (1)..(478): Homolog of NCBI NO: 15236144 NR Description: fatty acid elongase 1; protein id: At4g34520.1
  misc_feature (1)..(475): Homolog of NCBI NO: 14495235 NR Description: beta-ketoacyl-CoA synthase [Brassica napus]
  misc_feature (1)..(475): Homolog of NCBI NO: 19919736 NR Description: 3-ketoacyl-CoA synthase [Brassica rapa]
  misc_feature (1)..(475): Homolog of NCBI NO: 30424122 NR Description: beta-ketoacyl-CoA synthase FAE1.2 [Brassica
  misc_feature (1)..(475): Homolog of NCBI NO: 30424120 NR Description: beta-ketoacyl-CoA synthase FAE1.1 [Brassica
  misc_feature (1)..(475): Homolog of NCBI NO: 19919732 NR Description: 3-ketoacyl-CoA synthase [Brassica napus]
  misc_feature (1)..(475): Homolog of NCBI NO: 19919734 NR Description: 3-ketoacyl-CoA synthase [Brassica oleracea]
MAHRFKLCFLPLMVAIAVEASRLSTQDLQNFYLYLQNNHTSLTMFFLYLALGSTLYLMTRPKPVYLVDFSCYLPPSHLKASTQRIMQHVRLVREAGAWKQESDYLMDFCEKILERSGLGQETYVPEGLQTLPLQQNLAVSRIETEEVIIGAVDNLFRNTGISPSDIGILVVNSSTFNPTPSLSSILVNKFKLRDNIKSLNLGGMGCSAGVIAIDAAKSLLQVHRNTYALVVSTENITQNLYMGNNKSMLVTNCLFRIGGAAILLSNRSIDRKRAKYELVHTVRVHTGADDRSYECATQEEDEDGIVGVSLSKNLPMVAARTLKINIATLGPLVLPISEKFHFFVRFVKKKFLNPKLKHYIPDFKLAFEHFCIHAGGRALIDEMEKNLHLTPLDVEASRMTLHRFGNTSSSSIWYELAYTEAKGRMTKGDRIWQIALGSGFKCNSSVWVALRNVKPSTNNPWEQCLHKYPVEIDIDLKE

SEQ ID NO: 80565 - DNA, 901 bp, Arabidopsis thaliana
  misc_feature (1)..(901): Ceres Seq. ID no. 12656425
  misc_feature: MA Experiment ID: 20000224 Result: Up-regulated in Transcription
atggagacggtggtcgataaagatgttctgaagtcttccggggctgagcttcttcccgacggacgtcgaggtttacgcatccatgactgggagatcgaaaccctccgcggcacgattctcacttctctcgctgtcgaagagtgggaaaaaaagcttaagacatctcacttacctgaaatggtttttggcgagaatgcattagtccttaaacacttaggtagcaacactaagattcattttaatgcgtttgacgcactagctggttggaagcaggaagggcttccacctgttgaagttcctgctgcagcacaatggaaattcaggagcaagccgtctcagcaggtgatactagattatgattacacgtttacaacgccatactgtggaagtgaagtagttgagaaagacaaagaaacggttgaggcaaaagctaatccaaagggggaagctactcttcagtgggagaactgtgaagatcagattgatttggctgctctctcacttaaagaacctattctcttctatgatgaggtagttttgtatgaagatgaactggctgacaatggagtgtcacttctgactgtgaaagtgagagtcatgccaagctcatggttcctcctcttgcgattttggctgagagttgatggtgtgcttatgagattgagagagacgagaatgcattataggtttggcgaagatgaggcaccaactgttcttcgtgaaaactgttggagagaagcaacatttcagtctctatctgcgaaagggtatccagttgacttagcagtctggagcgacccgagctccatcagtcagaggcttccagtgattaagcatacgacacagaaactgaagatccctagtaaagtttaagctgtttataaagttgcaaattatatct

SEQ ID NO: 80566 - protein, 290 aa, Arabidopsis thaliana
  peptide (1)..(290): Ceres Seq. ID no. 12656426
  misc_feature (60)..(254): Pfam Name: TIP41-like family Pfam Description: TIP41-like family
  misc_feature (1)..(290): Homolog of NCBI NO: 22329154 NR Description: putative protein; protein id: At4g34270.1, by cDNA: gi_18377790, supported by cDNA: gi_20259224 [Arabidopsis >gi|18377791|gb|AAL67045.1| unknown protein [Arabidopsis
  misc_feature (60)..(290): Homolog of NCBI NO: 7485322 NR Description: hypothetical protein F10M10.40 - Arabidopsis >gi|4455172|emb|CAB36704.1| putative protein [Arabidopsis >gi|7270377|emb|CAB80144.1| putative protein [Arabidopsis
  misc_feature (10)..(288): Homolog of NCBI NO: 14488361 NR Description: unknown protein [Oryza sativa (japonica
  misc_feature (30)..(290): Homolog of NCBI NO: 23097250 NR Description: similar to CG9578 gene product; yeast YPR037W and
  misc_feature (30)..(290): Homolog of NCBI NO: 21704010 NR Description: similar to CG9578 gene product [Mus musculus] similar to CG9578 gene product [Mus musculus]
  misc_feature (30)..(290): Homolog of NCBI NO: 34880821 NR Description: similar to CG9578-like [Rattus norvegicus]
  misc_feature (30)..(287): Homolog of NCBI NO: 34784442 NR Description: Unknown (protein for MGC:66327) [Danio rerio]
  misc_feature (133)..(284): Homolog of NCBI NO: 40739133 NR Description: hypothetical protein AN5814.2 [Aspergillus
  misc_feature (15)..(117): Homolog of NCBI NO: 40739133 NR Description: hypothetical protein AN5814.2 [Aspergillus
  misc_feature (9)..(278): Homolog of NCBI NO: 6325297 NR Description: SDF1 the first obserwed null phenotype was DeFiciency; Tip41p [Saccharomyces cerevisiae]
METVVDKDVLKSSGAELLPDGRRGLRIHDWEIETLRGTILTSLAVEEWEKKLKTSHLPEMVFGENALVLKHLGSNTKIHFNAFDALAGWKQEGLPPVEVPAAAQWKFRSKPSQQVILDYDYTFTTPYCGSEVVEKDKETVEAKANPKGEATLQWENCEDQIDLAALSLKEPILFYDEVVLYEDELADNGVSLLTVKVRVMPSSWFLLLRFWLRVDGVLMRLRETRMHYRFGEDEAPTVLRENCWREATFQSLSAKGYPVDLAVWSDPSSISQRLPVIKHTTQKLKIPSKV

SEQ ID NO: 80567 - protein, 231 aa, Arabidopsis thaliana
  peptide (1)..(231): Ceres Seq. ID no. 12656427
  misc_feature (1)..(195): Pfam Name: TIP41-like family Pfam Description: TIP41-like family
  misc_feature (1)..(231): Homolog of NCBI NO: 22329154 NR Description: putative protein; protein id: At4g34270.1, by cDNA: gi_18377790, supported by cDNA: gi_20259224 [Arabidopsis >gi|18377791|gb|AAL67045.1| unknown protein [Arabidopsis
  misc_feature (1)..(231): Homolog of NCBI NO: 7485322 NR Description: hypothetical protein F10M10.40 - Arabidopsis >gi|4455172|emb|CAB36704.1| putative protein [Arabidopsis >gi|7270377|emb|CAB80144.1| putative protein [Arabidopsis
  misc_feature (1)..(229): Homolog of NCBI NO: 14488361 NR Description: unknown protein [Oryza sativa (japonica
  misc_feature (1)..(231): Homolog of NCBI NO: 23097250 NR Description: similar to CG9578 gene product; yeast YPR037W and
  misc_feature (1)..(231): Homolog of NCBI NO: 21704010 NR Description: similar to CG9578 gene product [Mus musculus] similar to CG9578 gene product [Mus musculus]
  misc_feature (1)..(231): Homolog of NCBI NO: 34880821 NR Description: similar to CG9578-like [Rattus norvegicus]
  misc_feature (1)..(228): Homolog of NCBI NO: 34784442 NR Description: Unknown (protein for MGC:66327) [Danio rerio]
  misc_feature (74)..(225): Homolog of NCBI NO: 40739133 NR Description: hypothetical protein AN5814.2 [Aspergillus
  misc_feature (1)..(58): Homolog of NCBI NO: 40739133 NR Description: hypothetical protein AN5814.2 [Aspergillus
  misc_feature (1)..(219): Homolog of NCBI NO: 6325297 NR Description: SDF1 the first obserwed null phenotype was DeFiciency; Tip41p [Saccharomyces cerevisiae]
MVFGENALVLKHLGSNTKIHFNAFDALAGWKQEGLPPVEVPAAAQWKFRSKPSQQVILDYDYTFTTPYCGSEVVEKDKETVEAKANPKGEATLQWENCEDQIDLAALSLKEPILFYDEVVLYEDELADNGVSLLTVKVRVMPSSWFLLLRFWLRVDGVLMRLRETRMHYRFGEDEAPTVLRENCWREATFQSLSAKGYPVDLAVWSDPSSISQRLPVIKHTTQKLKIPSKV

SEQ ID NO: 80568 - DNA, 432 bp, Arabidopsis thaliana
  misc_feature (1)..(432): Ceres Seq. ID no. 12656443
  misc_feature: MA Experiment ID: 20000171 Result: Up-regulated in Transcription
  misc_feature: MA Experiment 20000171 PARAMETER Experiment Name: At_42deg_Heat_P Parameter: Age (day) Value: 14
  misc_feature: MA Experiment 20000171 PARAMETER Experiment Name: At_42deg_Heat_P Parameter: Organism Value: A. thaliana
  misc_feature: MA Experiment 20000171 PARAMETER Experiment Name: At_42deg_Heat_P Parameter: Plant Line Value: WS
  misc_feature: MA Experiment 20000171 PARAMETER Experiment Name: At_42deg_Heat_P Parameter: Temperature (deg C) Value: 42 vs. 22
  misc_feature: MA Experiment 20000171 PARAMETER Experiment Name: At_42deg_Heat_P Parameter: Timepoint (hr) Value: 1
  misc_feature: MA Experiment 20000171 PARAMETER Experiment Name: At_42deg_Heat_P Parameter: Tissue Value: Aerial
  misc_feature: MA Experiment ID: 20000173 Result: Up-regulated in Transcription
  misc_feature: MA Experiment 20000173 PARAMETER Experiment Name: At_42deg_Heat_P Parameter: Age (day) Value: 14
  misc_feature: MA Experiment 20000173 PARAMETER Experiment Name: At_42deg_Heat_P Parameter: Organism Value: A. thaliana
  misc_feature: MA Experiment 20000173 PARAMETER Experiment Name: At_42deg_Heat_P Parameter: Plant Line Value: WS
  misc_feature: MA Experiment 20000173 PARAMETER Experiment Name: At_42deg_Heat_P Parameter: Temperature (deg C) Value: 42 vs. 22
  misc_feature: MA Experiment 20000173 PARAMETER Experiment Name: At_42deg_Heat_P Parameter: Timepoint (hr) Value: 6
  misc_feature: MA Experiment 20000173 PARAMETER Experiment Name: At_42deg_Heat_P Parameter: Tissue Value: Aerial
  misc_feature: MA Experiment ID: 20000235 Result: Down-regulated in Transcription
  misc_feature: MA Experiment 20000235 PARAMETER Experiment Name: At_Siliques_P Parameter: Age (day) Value: 21
  misc_feature: MA Experiment 20000235 PARAMETER Experiment Name: At_Siliques_P Parameter: Organism Value: A. thaliana
  misc_feature: MA Experiment 20000235 PARAMETER Experiment Name: At_Siliques_P Parameter: Plant Line Value: WS
  misc_feature: MA Experiment 20000235 PARAMETER Experiment Name: At_Siliques_P Parameter: Tissue Value: 5-10mm Siliques vs. Whole Plant
  misc_feature: MA Experiment ID: 20000438 Result: Down-regulated in Transcription
  misc_feature: MA Experiment 20000438 PARAMETER Experiment Name: At_Shoots__P Parameter: Age (day) Value: 14
  misc_feature: MA Experiment 20000438 PARAMETER Experiment Name: At_Shoots__P Parameter: Tissue Value: Shoots vs. Whole Plant
  misc_feature: MA Experiment ID: 20000439 Result: Down-regulated in Transcription
  misc_feature: MA Experiment 20000439 PARAMETER Experiment Name: At_Roots__P Parameter: Age (day) Value: 14 vs. 21
  misc_feature: MA Experiment 20000439 PARAMETER Experiment Name: At_Roots__P Parameter: Organism Value: A. thaliana
  misc_feature: MA Experiment 20000439 PARAMETER Experiment Name: At_Roots__P Parameter: Tissue Value: Roots vs. Whole Plant
  misc_feature: MA Experiment ID: 20000794 Result: Down-regulated in Transcription
  misc_feature: MA Experiment 20000794 PARAMETER Experiment Name: At_Petals_P Parameter: Age (day) Value: 23-25 days
  misc_feature: MA Experiment 20000794 PARAMETER Experiment Name: At_Petals_P Parameter: Plant Line Value: WS
  misc_feature: MA Experiment 20000794 PARAMETER Experiment Name: At_Petals_P Parameter: Tissue Value: Petals vs. Whole plant
atgaaggtttttaatcttgaccgtggaaacactctctctgtttccctcttctccggtgtcaccaactccaaggagctcttgaattcaatgcttgacggaagtctgaagctggaggtctcatttctcaatgcatcacttattccagacatttttcctctattggctgctgctcagaaagcacttatctccaaatcacgcgattccttatcaaccagaactcttcattctgagcttgtctacaattactcaggatctaagcacattacagaatcattgaaacgatgtgggatttctgagaacactacttacattctagctgcccggttcaatgcttctcccgttgagcattacaagataactagccaagagctcggaatttcctctctgggagatgccattgtttgtcgaatagctgcacgcgatgctttgtag

SEQ ID NO: 80569 - protein, 143 aa, Arabidopsis thaliana
  peptide (1)..(143): Ceres Seq. ID no. 12656444
  misc_feature (1)..(143): Homolog of NCBI NO: 22329156 NR Description: hypothetical protein; protein id: At4g34412.1
  misc_feature (1)..(115): Homolog of NCBI NO: 38454120 NR Description: At4g34412 [Arabidopsis thaliana]
  misc_feature (111)..(143): Homolog of NCBI NO: 38454120 NR Description: At4g34412 [Arabidopsis thaliana]
  misc_feature (1)..(115): Homolog of NCBI NO: 34895710 NR Description: P0019D06.12 [Oryza sativa (japonica
  misc_feature (4)..(110): Homolog of NCBI NO: 17542786 NR Description: Putative cytoplasmic protein of eukaryotic origin
  misc_feature (4)..(110): Homolog of NCBI NO: 39588478 NR Description: Hypothetical protein CBG20111 [Caenorhabditis
  misc_feature (12)..(105): Homolog of NCBI NO: 27712192 NR Description: similar to RIKEN cDNA 1810034M08 [Mus musculus]
  misc_feature (12)..(129): Homolog of NCBI NO: 28849893 NR Description: CGI-121 protein [Mus musculus] RIKEN cDNA 1810034M08 [Mus musculus] >gi|20071790|gb|AAH27162.1|
  misc_feature (16)..(122): Homolog of NCBI NO: 39794363 NR Description: Unknown (protein for MGC:75657) [Silurana
  misc_feature (12)..(129): Homolog of NCBI NO: 20072102 NR Description: Unknown (protein for MGC:36208) [Mus musculus]
MKVFNLDRGNTLSVSLFSGVTNSKELLNSMLDGSLKLEVSFLNASLIPDIFPLLAAAQKALISKSRDSLSTRTLHSELVYNYSGSKHITESLKRCGISENTTYILAARFNASPVEHYKITSQELGISSLGDAIVCRIAARDAL

SEQ ID NO: 80570 - protein, 114 aa, Arabidopsis thaliana
  peptide (1)..(114): Ceres Seq. ID no. 12656445
  misc_feature (1)..(114): Homolog of NCBI NO: 22329156 NR Description: hypothetical protein; protein id: At4g34412.1
  misc_feature (1)..(86): Homolog of NCBI NO: 38454120 NR Description: At4g34412 [Arabidopsis thaliana]
  misc_feature (82)..(114): Homolog of NCBI NO: 38454120 NR Description: At4g34412 [Arabidopsis thaliana]
  misc_feature (1)..(86): Homolog of NCBI NO: 34895710 NR Description: P0019D06.12 [Oryza sativa (japonica
  misc_feature (1)..(81): Homolog of NCBI NO: 17542786 NR Description: Putative cytoplasmic protein of eukaryotic origin
  misc_feature (1)..(81): Homolog of NCBI NO: 39588478 NR Description: Hypothetical protein CBG20111 [Caenorhabditis
  misc_feature (1)..(76): Homolog of NCBI NO: 27712192 NR Description: similar to RIKEN cDNA 1810034M08 [Mus musculus]
  misc_feature (1)..(100): Homolog of NCBI NO: 28849893 NR Description: CGI-121 protein [Mus musculus] RIKEN cDNA 1810034M08 [Mus musculus] >gi|20071790|gb|AAH27162.1|
  misc_feature (1)..(93): Homolog of NCBI NO: 39794363 NR Description: Unknown (protein for MGC:75657) [Silurana
  misc_feature (1)..(100): Homolog of NCBI NO: 20072102 NR Description: Unknown (protein for MGC:36208) [Mus musculus]
MLDGSLKLEVSFLNASLIPDIFPLLAAAQKALISKSRDSLSTRTLHSELVYNYSGSKHITESLKRCGISENTTYILAARFNASPVEHYKITSQELGISSLGDAIVCRIAARDAL

SEQ ID NO: 80571 - DNA, 1476 bp, Arabidopsis thaliana
  misc_feature (1)..(1476): Ceres Seq. ID no. 12656446
  misc_feature: MA Experiment ID: 20000227 Result: Up-regulated in Transcription
  misc_feature: MA Experiment 20000227 PARAMETER Experiment Name: At_Root-Tips-vs-Tops_P Parameter: Tissue Value: Root Tips vs. Root Tops
  misc_feature: MA Experiment ID: 20000439 Result: Up-regulated in Transcription
  misc_feature: MA Experiment 20000439 PARAMETER Experiment Name: At_Roots__P Parameter: Age (day) Value: 14 vs. 21
  misc_feature: MA Experiment 20000439 PARAMETER Experiment Name: At_Roots__P Parameter: Organism Value: A. thaliana
  misc_feature: MA Experiment 20000439 PARAMETER Experiment Name: At_Roots__P Parameter: Tissue Value: Roots vs. Whole Plant
  misc_feature: MA Experiment ID: 20000573 Result: Up-regulated in Transcription
  misc_feature: MA Experiment 20000573 PARAMETER Experiment Name: At_100uM_ABA_Mutants__P Parameter: Organism Value: A. thaliana
  misc_feature: MA Experiment 20000573 PARAMETER Experiment Name: At_100uM_ABA_Mutants__P Parameter: Plant Line Value: CS22 vs. Ler wt
  misc_feature: MA Experiment 20000573 PARAMETER Experiment Name: At_100uM_ABA_Mutants__P Parameter: Timepoint (hr) Value: N/A
  misc_feature: MA Experiment 20000573 PARAMETER Experiment Name: At_100uM_ABA_Mutants__P Parameter: Tissue Value: Whole Plant
  misc_feature: MA Experiment 20000573 PARAMETER Experiment Name: At_100uM_ABA_Mutants__P Parameter: Treatment Value: None
  misc_feature: MA Experiment ID: 20001451 Result: Up-regulated in Transcription
  misc_feature: MA Experiment 20001451 PARAMETER Experiment Name: At_Far-red-induction_P Parameter: Age (day) Value: 7
  misc_feature: MA Experiment 20001451 PARAMETER Experiment Name: At_Far-red-induction_P Parameter: Light Value: Far-red vs. White
  misc_feature: MA Experiment 20001451 PARAMETER Experiment Name: At_Far-red-induction_P Parameter: Organism Value: A. thaliana
  misc_feature: MA Experiment 20001451 PARAMETER Experiment Name: At_Far-red-induction_P Parameter: Plant Line Value: Columbia
  misc_feature: MA Experiment 20001451 PARAMETER Experiment Name: At_Far-red-induction_P Parameter: Timepoint (hr) Value: 24
  misc_feature: MA Experiment 20001451 PARAMETER Experiment Name: At_Far-red-induction_P Parameter: Tissue Value: Whole Plant
atggaatgttcaaacatgaaacagcatcagtaccacggttcatacgcagagccaaggatctcattctcaagcggtttcgcagcgactaagcacgaaatgatcaagtacaaggaggcaccagtgtcgtcagatgattttgagttcggagtcgagaacttctctatgaccacagcagatgaaatattcttcgatggcatgatcttgcctctaaaggaagaagttaacacgacgaagagaatgtcaactctgagggaagaactcagtgaagaagatggtgattcgccgagaagcaaatcaaaaggatcgagtggttggtggagagagagattagggctagcattcgtgaggtccaagaaagatcacaagaaaatgtgtctgaaaaaaattcaatgtctttatgttctgttcttttctgatctctctgaatctctctctatcgcgacagccatggccgaagacccttctttcctccccaaggatggttttgtcttgaagcttcctaaaaagtcatcacttgtattgagaatggtcgttctcctctttgtaatggtctgtgctgtgtacatttgctccatttgtcttaagcaaataggagttagtccaaactatggtttcttgaacgttgaagtgtttgagaggccttgtcctgagcctaacatcgaaccgtgggacattccttttgtgcattaccctaaaccaaagacatataacagggatgaatgttcttgccacccggttaggtactttgcgattctatcgatgcagagatctggtagtggctggtttgagactttgttaaacaatcatactaacataagctccaacggggagatattttctgtgaaagataggagggctaatgtttccaccattttcgagactcttgacaaagtctataatctagactggttgagtagtgcctctaagaacgagtgcacttccgctgttggcttcaagtggatgcttaatcagggtctaatgaaacatcatgaagaaatagtagaatacttcaaaacccgaggcgtctctgcgattttcctattcagaaaaaacctattgcgccgcatgatatcagtactcgcaaactcttatgacagagatgctaagctactaaacgggactcacaagtctcacacccattcggccaaagaagctgagatattagcaggttacaaaccaatgatcaacacaacacttttaataaatgagctgagacagattcaagaaatgactttgaaagctttgacttacttcaataccactcgacatatccttgtctactacgaagatgttgtcaagaacctcacgagactagacgatgtacaggagtttctaaaggtaccaaaacgtaagttaaagagtaggcaagtgaagattcatggaggttcattgtcaaaacatgtacagaattgggaagaggtcatgaccacacttaaaggaaccaatttcgaaaatttcttacaccaagaattttaa

SEQ ID NO: 80572 - protein, 491 aa, Arabidopsis thaliana
  peptide (1)..(491): Ceres Seq. ID no. 12656447
  misc_feature (1)..(491): Homolog of NCBI NO: 22329158 NR Description: hypothetical protein; protein id: At4g34420.1
  misc_feature (150)..(491): Homolog of NCBI NO: 40823013 NR Description: At2g15730 [Arabidopsis thaliana]
  misc_feature (6)..(114): Homolog of NCBI NO: 7485320 NR Description: hypothetical protein F10M10.190 - Arabidopsis >gi|4455187|emb|CAB36719.1| hypothetical protein [Arabidopsis >gi|7270392|emb|CAB80159.1| hypothetical protein [Arabidopsis
  misc_feature (349)..(449): Homolog of NCBI NO: 7485320 NR Description: hypothetical protein F10M10.190 - Arabidopsis >gi|4455187|emb|CAB36719.1| hypothetical protein [Arabidopsis >gi|7270392|emb|CAB80159.1| hypothetical protein [Arabidopsis
  misc_feature (159)..(491): Homolog of NCBI NO: 29824462 NR Description: unknown protein [Oryza sativa (japonica
  misc_feature (162)..(487): Homolog of NCBI NO: 33146729 NR Description: unknown protein [Oryza sativa (japonica
  misc_feature (162)..(327): Homolog of NCBI NO: 34904786 NR Description: contains ESTs to Arabidopsis thaliana chromosome3,At3g50620~unknown protein
  misc_feature (325)..(487): Homolog of NCBI NO: 34904786 NR Description: contains ESTs to Arabidopsis thaliana chromosome3,At3g50620~unknown protein
  misc_feature (159)..(384): Homolog of NCBI NO: 14029013 NR Description: Unknown protein [Oryza sativa]
  misc_feature (400)..(491): Homolog of NCBI NO: 14029013 NR Description: Unknown protein [Oryza sativa]
MECSNMKQHQYHGSYAEPRISFSSGFAATKHEMIKYKEAPVSSDDFEFGVENFSMTTADEIFFDGMILPLKEEVNTTKRMSTLREELSEEDGDSPRSKSKGSSGWWRERLGLAFVRSKKDHKKMCLKKIQCLYVLFFSDLSESLSIATAMAEDPSFLPKDGFVLKLPKKSSLVLRMVVLLFVMVCAVYICSICLKQIGVSPNYGFLNVEVFERPCPEPNIEPWDIPFVHYPKPKTYNRDECSCHPVRYFAILSMQRSGSGWFETLLNNHTNISSNGEIFSVKDRRANVSTIFETLDKVYNLDWLSSASKNECTSAVGFKWMLNQGLMKHHEEIVEYFKTRGVSAIFLFRKNLLRRMISVLANSYDRDAKLLNGTHKSHTHSAKEAEILAGYKPMINTTLLINELRQIQEMTLKALTYFNTTRHILVYYEDVVKNLTRLDDVQEFLKVPKRKLKSRQVKIHGGSLSKHVQNWEEVMTTLKGTNFENFLHQEF

SEQ ID NO: 80573 - protein, 486 aa, Arabidopsis thaliana
  peptide (1)..(486): Ceres Seq. ID no. 12656448
  misc_feature (1)..(486): Homolog of NCBI NO: 22329158 NR Description: hypothetical protein; protein id: At4g34420.1
  misc_feature (145)..(486): Homolog of NCBI NO: 40823013 NR Description: At2g15730 [Arabidopsis thaliana]
  misc_feature (1)..(109): Homolog of NCBI NO: 7485320 NR Description: hypothetical protein F10M10.190 - Arabidopsis >gi|4455187|emb|CAB36719.1| hypothetical protein [Arabidopsis >gi|7270392|emb|CAB80159.1| hypothetical protein [Arabidopsis
  misc_feature (344)..(444): Homolog of NCBI NO: 7485320 NR Description: hypothetical protein F10M10.190 - Arabidopsis >gi|4455187|emb|CAB36719.1| hypothetical protein [Arabidopsis >gi|7270392|emb|CAB80159.1| hypothetical protein [Arabidopsis
  misc_feature (154)..(486): Homolog of NCBI NO: 29824462 NR Description: unknown protein [Oryza sativa (japonica
  misc_feature (157)..(482): Homolog of NCBI NO: 33146729 NR Description: unknown protein [Oryza sativa (japonica
  misc_feature (157)..(322): Homolog of NCBI NO: 34904786 NR Description: contains ESTs to Arabidopsis thaliana chromosome3,At3g50620~unknown protein
  misc_feature (320)..(482): Homolog of NCBI NO: 34904786 NR Description: contains ESTs to Arabidopsis thaliana chromosome3,At3g50620~unknown protein
  misc_feature (154)..(379): Homolog of NCBI NO: 14029013 NR Description: Unknown protein [Oryza sativa]
  misc_feature (395)..(486): Homolog of NCBI NO: 14029013 NR Description: Unknown protein [Oryza sativa]
MKQHQYHGSYAEPRISFSSGFAATKHEMIKYKEAPVSSDDFEFGVENFSMTTADEIFFDGMILPLKEEVNTTKRMSTLREELSEEDGDSPRSKSKGSSGWWRERLGLAFVRSKKDHKKMCLKKIQCLYVLFFSDLSESLSIATAMAEDPSFLPKDGFVLKLPKKSSLVLRMVVLLFVMVCAVYICSICLKQIGVSPNYGFLNVEVFERPCPEPNIEPWDIPFVHYPKPKTYNRDECSCHPVRYFAILSMQRSGSGWFETLLNNHTNISSNGEIFSVKDRRANVSTIFETLDKVYNLDWLSSASKNECTSAVGFKWMLNQGLMKHHEEIVEYFKTRGVSAIFLFRKNLLRRMISVLANSYDRDAKLLNGTHKSHTHSAKEAEILAGYKPMINTTLLINELRQIQEMTLKALTYFNTTRHILVYYEDVVKNLTRLDDVQEFLKVPKRKLKSRQVKIHGGSLSKHVQNWEEVMTTLKGTNFENFLHQEF

SEQ ID NO: 80574 - protein, 459 aa, Arabidopsis thaliana
  peptide (1)..(459): Ceres Seq. ID no. 12656449
  misc_feature (1)..(459): Homolog of NCBI NO: 22329158 NR Description: hypothetical protein; protein id: At4g34420.1
  misc_feature (118)..(459): Homolog of NCBI NO: 40823013 NR Description: At2g15730 [Arabidopsis thaliana]
  misc_feature (1)..(82): Homolog of NCBI NO: 7485320 NR Description: hypothetical protein F10M10.190 - Arabidopsis >gi|4455187|emb|CAB36719.1| hypothetical protein [Arabidopsis >gi|7270392|emb|CAB80159.1| hypothetical protein [Arabidopsis
  misc_feature (317)..(417): Homolog of NCBI NO: 7485320 NR Description: hypothetical protein F10M10.190 - Arabidopsis >gi|4455187|emb|CAB36719.1| hypothetical protein [Arabidopsis >gi|7270392|emb|CAB80159.1| hypothetical protein [Arabidopsis
  misc_feature (127)..(459): Homolog of NCBI NO: 29824462 NR Description: unknown protein [Oryza sativa (japonica
  misc_feature (130)..(455): Homolog of NCBI NO: 33146729 NR Description: unknown protein [Oryza sativa (japonica
  misc_feature (130)..(295): Homolog of NCBI NO: 34904786 NR Description: contains ESTs to Arabidopsis thaliana chromosome3,At3g50620~unknown protein
  misc_feature (293)..(455): Homolog of NCBI NO: 34904786 NR Description: contains ESTs to Arabidopsis thaliana chromosome3,At3g50620~unknown protein
  misc_feature (127)..(352): Homolog of NCBI NO: 14029013 NR Description: Unknown protein [Oryza sativa]
  misc_feature (368)..(459): Homolog of NCBI NO: 14029013 NR Description: Unknown protein [Oryza sativa]
MIKYKEAPVSSDDFEFGVENFSMTTADEIFFDGMILPLKEEVNTTKRMSTLREELSEEDGDSPRSKSKGSSGWWRERLGLAFVRSKKDHKKMCLKKIQCLYVLFFSDLSESLSIATAMAEDPSFLPKDGFVLKLPKKSSLVLRMVVLLFVMVCAVYICSICLKQIGVSPNYGFLNVEVFERPCPEPNIEPWDIPFVHYPKPKTYNRDECSCHPVRYFAILSMQRSGSGWFETLLNNHTNISSNGEIFSVKDRRANVSTIFETLDKVYNLDWLSSASKNECTSAVGFKWMLNQGLMKHHEEIVEYFKTRGVSAIFLFRKNLLRRMISVLANSYDRDAKLLNGTHKSHTHSAKEAEILAGYKPMINTTLLINELRQIQEMTLKALTYFNTTRHILVYYEDVVKNLTRLDDVQEFLKVPKRKLKSRQVKIHGGSLSKHVQNWEEVMTTLKGTNFENFLHQEF

SEQ ID NO: 80575 - DNA, 1464 bp, Arabidopsis thaliana
  misc_feature (1)..(1464): Ceres Seq. ID no. 12656454
  misc_feature: MA Experiment ID: 20000327 Result: Down-regulated in Transcription
  misc_feature: MA Experiment 20000327 PARAMETER Experiment Name: At_42deg_Heat_Sub_P Parameter: Age (day) Value: 14
  misc_feature: MA Experiment 20000327 PARAMETER Experiment Name: At_42deg_Heat_Sub_P Parameter: Organism Value: A. thaliana
  misc_feature: MA Experiment 20000327 PARAMETER Experiment Name: At_42deg_Heat_Sub_P Parameter: Plant Line Value: WS
  misc_feature: MA Experiment 20000327 PARAMETER Experiment Name: At_42deg_Heat_Sub_P Parameter: Temperature (deg C) Value: 42 vs. 22
  misc_feature: MA Experiment 20000327 PARAMETER Experiment Name: At_42deg_Heat_Sub_P Parameter: Timepoint (hr) Value: 1
  misc_feature: MA Experiment 20000327 PARAMETER Experiment Name: At_42deg_Heat_Sub_P Parameter: Tissue Value: Aerial
  misc_feature: MA Experiment ID: 20000440 Result: Up-regulated in Transcription
  misc_feature: MA Experiment 20000440 PARAMETER Experiment Name: At_Closed-Flower__Sub_P Parameter: Tissue Value: Closed Flower vs. Whole Plant
atggatgctaatggaggacctgtacagatccggacccaaaactacgtcaagcttggttatcactatctgatcactcacttttttaaactcatgttcctccctctaatggctgttttgttcatgaatgtctcattgttaagcctaaaccatcttcagctctattacaattccaccggattcatcttcgtcattactctcgccattgtcggatccattgtcttcttcatgtctcgacctagatccatctaccttctagattactcttgctacctcccgccttcgagtcaaaaagttagctaccagaaattcatgaacaactctagtttgattcaagatttcagcgaaacttctcttgagttccagaggaagatcttgattcgctctggtctcggtgaagagacttatttaccggattctattcactctatccctccgcgtcctactatggctgcagcgcgtgaagaagcggagcaggtaatcttcggtgcactcgacaatcttttcgagaatacaaaaatcaatcctagggagattggtgttcttgttgtgaattgtagtttgtttaaccctacgccttctttatccgccatgattgttaacaagtataagcttagaggaaacattaagagctttaaccttggaggaatgggatgtagtgctggtgttatcgcggtagatctagctagtgatatgttacaaatccataggaacacttttgctcttgtggttagtactgagaacatcactcagaattggtattttggtaacaagaaagcaatgttgatccctaattgcttgtttagagttggtggttccgcggttctgctttcgaacaagcctttggatcgaaaacgatccaagtataagcttgttcatacggtcaggactcataaaggatctgatgagaacgcattcaattgtgtgtatcaagaacaagatgagtgtttgaaaaccggagtttctttgtctaaagatcttatggctatagctggagaagctttaaagacgaatatcacttctttgggtcctctggttcttcctataagcgagcagattctgttctttgcgacttttgttgctaagagattgttcaatgacaagaagaagaagccttacataccggatttcaagcttgctttagatcatttctgtattcacgcgggaggtagagccgtgattgatgagctagagaagagtttaaagctttctccaaaacatgttgaggcgtctagaatgactttgcatagatttggaaacacttcctctagctctatatggtatgaattggcttacacggaagctaaaggaagaatgaggaaaggaaacagagtttggcagattgcttttggtagcgggtttaagtgtaacagcgcggtttgggtggctcttcgcaatgtcgagccctcggttaacaatccttgggaacattgcatccatagatatccggttaagatcgatctttga

SEQ ID NO: 80576 - protein, 487 aa, Arabidopsis thaliana
  peptide (1)..(487): Ceres Seq. ID no. 12656455
  misc_feature (320)..(464): Pfam Name: Chalcone and stilbene synthases, C-terminal domain Pfam Description: Chalcone and stilbene synthases, C-terminal
  misc_feature (1)..(487): Homolog of NCBI NO: 15236133 NR Description: putative ketoacyl-CoA synthase; protein id:
  misc_feature (8)..(486): Homolog of NCBI NO: 15226724 NR Description: putative beta-ketoacyl-CoA synthase; protein id:
  misc_feature (15)..(485): Homolog of NCBI NO: 15223556 NR Description: very-long-chain fatty acid condensing enzyme putative; protein id: At1g19440.1, supported by cDNA: 158882.
  misc_feature (16)..(486): Homolog of NCBI NO: 30424122 NR Description: beta-ketoacyl-CoA synthase FAE1.2 [Brassica
  misc_feature (16)..(486): Homolog of NCBI NO: 15236144 NR Description: fatty acid elongase 1; protein id: At4g34520.1
  misc_feature (15)..(485): Homolog of NCBI NO: 11066477 NR Description: fatty acid elongase 1-like protein [Limnanthes
  misc_feature (15)..(485): Homolog of NCBI NO: 14334714 NR Description: putative beta-ketoacyl-CoA synthase [Arabidopsis
  misc_feature (15)..(485): Homolog of NCBI NO: 15239981 NR Description: beta-ketoacyl-CoA synthase; protein id: supported by cDNA: gi_14334713, supported by cDNA: gi_15983490
  misc_feature (15)..(485): Homolog of NCBI NO: 9714501 NR Description: putative fatty acid elongase [Zea mays]
  misc_feature (16)..(486): Homolog of NCBI NO: 19919732 NR Description: 3-ketoacyl-CoA synthase [Brassica napus]
MDANGGPVQIRTQNYVKLGYHYLITHFFKLMFLPLMAVLFMNVSLLSLNHLQLYYNSTGFIFVITLAIVGSIVFFMSRPRSIYLLDYSCYLPPSSQKVSYQKFMNNSSLIQDFSETSLEFQRKILIRSGLGEETYLPDSIHSIPPRPTMAAAREEAEQVIFGALDNLFENTKINPREIGVLVVNCSLFNPTPSLSAMIVNKYKLRGNIKSFNLGGMGCSAGVIAVDLASDMLQIHRNTFALVVSTENITQNWYFGNKKAMLIPNCLFRVGGSAVLLSNKPLDRKRSKYKLVHTVRTHKGSDENAFNCVYQEQDECLKTGVSLSKDLMAIAGEALKTNITSLGPLVLPISEQILFFATFVAKRLFNDKKKKPYIPDFKLALDHFCIHAGGRAVIDELEKSLKLSPKHVEASRMTLHRFGNTSSSSIWYELAYTEAKGRMRKGNRVWQIAFGSGFKCNSAVWVALRNVEPSVNNPWEHCIHRYPVKIDL

SEQ ID NO: 80577 - protein, 457 aa, Arabidopsis thaliana
  peptide (1)..(457): Ceres Seq. ID no. 12656456
  misc_feature (290)..(434): Pfam Name: Chalcone and stilbene synthases, C-terminal domain Pfam Description: Chalcone and stilbene synthases, C-terminal
  misc_feature (1)..(457): Homolog of NCBI NO: 15236133 NR Description: putative ketoacyl-CoA synthase; protein id:
  misc_feature (1)..(456): Homolog of NCBI NO: 15226724 NR Description: putative beta-ketoacyl-CoA synthase; protein id:
  misc_feature (1)..(455): Homolog of NCBI NO: 15223556 NR Description: very-long-chain fatty acid condensing enzyme putative; protein id: At1g19440.1, supported by cDNA: 158882.
  misc_feature (1)..(456): Homolog of NCBI NO: 30424122 NR Description: beta-ketoacyl-CoA synthase FAE1.2 [Brassica
  misc_feature (1)..(456): Homolog of NCBI NO: 15236144 NR Description: fatty acid elongase 1; protein id: At4g34520.1
  misc_feature (1)..(455): Homolog of NCBI NO: 11066477 NR Description: fatty acid elongase 1-like protein [Limnanthes
  misc_feature (1)..(455): Homolog of NCBI NO: 14334714 NR Description: putative beta-ketoacyl-CoA synthase [Arabidopsis
  misc_feature (1)..(455): Homolog of NCBI NO: 15239981 NR Description: beta-ketoacyl-CoA synthase; protein id: supported by cDNA: gi_14334713, supported by cDNA: gi_15983490
  misc_feature (1)..(455): Homolog of NCBI NO: 9714501 NR Description: putative fatty acid elongase [Zea mays]
  misc_feature (1)..(456): Homolog of NCBI NO: 19919732 NR Description: 3-ketoacyl-CoA synthase [Brassica napus]
MFLPLMAVLFMNVSLLSLNHLQLYYNSTGFIFVITLAIVGSIVFFMSRPRSIYLLDYSCYLPPSSQKVSYQKFMNNSSLIQDFSETSLEFQRKILIRSGLGEETYLPDSIHSIPPRPTMAAAREEAEQVIFGALDNLFENTKINPREIGVLVVNCSLFNPTPSLSAMIVNKYKLRGNIKSFNLGGMGCSAGVIAVDLASDMLQIHRNTFALVVSTENITQNWYFGNKKAMLIPNCLFRVGGSAVLLSNKPLDRKRSKYKLVHTVRTHKGSDENAFNCVYQEQDECLKTGVSLSKDLMAIAGEALKTNITSLGPLVLPISEQILFFATFVAKRLFNDKKKKPYIPDFKLALDHFCIHAGGRAVIDELEKSLKLSPKHVEASRMTLHRFGNTSSSSIWYELAYTEAKGRMRKGNRVWQIAFGSGFKCNSAVWVALRNVEPSVNNPWEHCIHRYPVKIDL

SEQ ID NO: 80578 - protein, 452 aa, Arabidopsis thaliana
  peptide (1)..(452): Ceres Seq. ID no. 12656457
  misc_feature (285)..(429): Pfam Name: Chalcone and stilbene synthases, C-terminal domain Pfam Description: Chalcone and stilbene synthases, C-terminal
  misc_feature (1)..(452): Homolog of NCBI NO: 15236133 NR Description: putative ketoacyl-CoA synthase; protein id:
  misc_feature (1)..(451): Homolog of NCBI NO: 15226724 NR Description: putative beta-ketoacyl-CoA synthase; protein id:
  misc_feature (1)..(450): Homolog of NCBI NO: 15223556 NR Description: very-long-chain fatty acid condensing enzyme putative; protein id: At1g19440.1, supported by cDNA: 158882.
  misc_feature (1)..(451): Homolog of NCBI NO: 30424122 NR Description: beta-ketoacyl-CoA synthase FAE1.2 [Brassica
  misc_feature (1)..(451): Homolog of NCBI NO: 15236144 NR Description: fatty acid elongase 1; protein id: At4g34520.1
  misc_feature (1)..(450): Homolog of NCBI NO: 11066477 NR Description: fatty acid elongase 1-like protein [Limnanthes
  misc_feature (1)..(450): Homolog of NCBI NO: 14334714 NR Description: putative beta-ketoacyl-CoA synthase [Arabidopsis
  misc_feature (1)..(450): Homolog of NCBI NO: 15239981 NR Description: beta-ketoacyl-CoA synthase; protein id: supported by cDNA: gi_14334713, supported by cDNA: gi_15983490
  misc_feature (1)..(450): Homolog of NCBI NO: 9714501 NR Description: putative fatty acid elongase [Zea mays]
  misc_feature (1)..(451): Homolog of NCBI NO: 19919732 NR Description: 3-ketoacyl-CoA synthase [Brassica napus]
MAVLFMNVSLLSLNHLQLYYNSTGFIFVITLAIVGSIVFFMSRPRSIYLLDYSCYLPPSSQKVSYQKFMNNSSLIQDFSETSLEFQRKILIRSGLGEETYLPDSIHSIPPRPTMAAAREEAEQVIFGALDNLFENTKINPREIGVLVVNCSLFNPTPSLSAMIVNKYKLRGNIKSFNLGGMGCSAGVIAVDLASDMLQIHRNTFALVVSTENITQNWYFGNKKAMLIPNCLFRVGGSAVLLSNKPLDRKRSKYKLVHTVRTHKGSDENAFNCVYQEQDECLKTGVSLSKDLMAIAGEALKTNITSLGPLVLPISEQILFFATFVAKRLFNDKKKKPYIPDFKLALDHFCIHAGGRAVIDELEKSLKLSPKHVEASRMTLHRFGNTSSSSIWYELAYTEAKGRMRKGNRVWQIAFGSGFKCNSAVWVALRNVEPSVNNPWEHCIHRYPVKIDL

SEQ ID NO: 80579 - DNA, 1521 bp, Arabidopsis thaliana
  misc_feature (1)..(1521): Ceres Seq. ID no. 12656458
  misc_feature: MA Experiment ID: 20001906 Result: Up-regulated in Transcription
  misc_feature: MA Experiment 20001906 PARAMETER Experiment Name: At_Drought_Reproduction_P Parameter: Age (day) Value: 35
  misc_feature: MA Experiment 20001906 PARAMETER Experiment Name: At_Drought_Reproduction_P Parameter: Organism Value: A. thaliana
  misc_feature: MA Experiment 20001906 PARAMETER Experiment Name: At_Drought_Reproduction_P Parameter: Plant Line Value: WS
  misc_feature: MA Experiment 20001906 PARAMETER Experiment Name: At_Drought_Reproduction_P Parameter: Timepoint (day) Value: 5
  misc_feature: MA Experiment 20001906 PARAMETER Experiment Name: At_Drought_Reproduction_P Parameter: Tissue Value: Siliques
  misc_feature: MA Experiment 20001906 PARAMETER Experiment Name: At_Drought_Reproduction_P Parameter: Treatment Value: Drought vs. No Drought
  misc_feature: MA Experiment ID: 20001908 Result: Up-regulated in Transcription
  misc_feature: MA Experiment 20001908 PARAMETER Experiment Name: At_Drought_Reproduction_P Parameter: Age (day) Value: 40
  misc_feature: MA Experiment 20001908 PARAMETER Experiment Name: At_Drought_Reproduction_P Parameter: Organism Value: A. thaliana
  misc_feature: MA Experiment 20001908 PARAMETER Experiment Name: At_Drought_Reproduction_P Parameter: Plant Line Value: WS
  misc_feature: MA Experiment 20001908 PARAMETER Experiment Name: At_Drought_Reproduction_P Parameter: Timepoint (day) Value: 10
  misc_feature: MA Experiment 20001908 PARAMETER Experiment Name: At_Drought_Reproduction_P Parameter: Tissue Value: Siliques
  misc_feature: MA Experiment 20001908 PARAMETER Experiment Name: At_Drought_Reproduction_P Parameter: Treatment Value: Drought vs. No Drought
atgacgtccgttaacgttaagctcctttaccgttacgtcttaaccaactttttcaacctctgtttgttcccgttaacggcgttcctcgccggaaaagcctctcggcttaccataaacgatctccacaacttcctttcctatctccaacacaaccttataacagtaactttactctttgctttcactgttttcggtttggttctctacatcgtaacccgacccaatccggtttatctcgttgactactcgtgttaccttccaccaccgcatctcaaagttagtgtctctaaagtcatggatattttctaccaaataagaaaagctgatacttcttcacggaacgtggcatgtgatgatccgtcctcgctcgatttcctgaggaagattcaagagcgttcaggtctaggtgatgagacgtacagtcctgagggactcattcacgtaccaccgcggaagacttttgcagcgtcacgtgaagagacagagaaggttatcatcggtgcgctcgaaaatctattcgagaacaccaaagttaaccctagagagattggtatacttgtggtgaactcaagcatgtttaatccaactccttcgctatccgctatggtcgttaatactttcaagctccgaagcaacatcaaaagctttaatctaggaggaatgggttgtagtgctggtgttattgccattgatttggctaaagacttgttgcatgttcataaaaacacttatgctcttgtggtgagcactgagaacatcacacaaggcatttatgctggagaaaatagatcaatgatggttagcaattgcttgtttcgtgttggtggggccgcgattttgctctctaacaagtcgggagaccggagacggtccaagtacaagctagttcacacggtccgaacgcatactggagctgatgacaagtcttttcgatgtgtgcaacaagaagacgatgagagcggcaaaatcggagtttgtctgtcaaaggacataaccaatgttgcggggacaacacttacgaaaaatatagcaacattgggtccgttgattcttcctttaagcgaaaagtttctttttttcgctaccttcgtcgccaagaaacttctaaaggataaaatcaagcattactatgttccggatttcaagcttgctgttgaccatttctgtattcatgccggaggcagagccgtgatcgatgagctagagaagaacttaggactatcgccgatcgatgtggaggcatctagatcaacgttacatagatttgggaatacttcatctagctcaatttggtatgaattagcatacatagaggcaaagggaagaatgaagaaagggaataaagcttggcagattgctttaggatcagggtttaagtgtaatagtgcggtttgggtggctctacgcaatgtcaaggcatcggcaaatagtccttggcaacattgcatcgatagatatccggttaaaattgattctgatttgtcaaagtcaaagactcatgtccaaaacggtcggtcctaa

SEQ ID NO: 80580 - protein, 506 aa, Arabidopsis thaliana
  peptide (1)..(506): Ceres Seq. ID no. 12656459
  misc_feature (325)..(469): Pfam Name: Chalcone and stilbene synthases, C-terminal domain Pfam Description: Chalcone and stilbene synthases, C-terminal
  misc_feature (1)..(506): Homolog of NCBI NO: 15236144 NR Description: fatty acid elongase 1; protein id: At4g34520.1
  misc_feature (1)..(506): Homolog of NCBI NO: 2980829 NR Description: fatty acid elongation 1 [Brassica juncea]
  misc_feature (1)..(506): Homolog of NCBI NO: 30424122 NR Description: beta-ketoacyl-CoA synthase FAE1.2 [Brassica
  misc_feature (1)..(506): Homolog of NCBI NO: 20136381 NR Description: fatty acid elongase [Brassica juncea]
  misc_feature (1)..(506): Homolog of NCBI NO: 14495235 NR Description: beta-ketoacyl-CoA synthase [Brassica napus]
  misc_feature (1)..(506): Homolog of NCBI NO: 30424120 NR Description: beta-ketoacyl-CoA synthase FAE1.1 [Brassica
  misc_feature (1)..(506): Homolog of NCBI NO: 7488479 NR Description: probable 3-oxoacyl-[acyl-carrier-protein]
  misc_feature (1)..(506): Homolog of NCBI NO: 19919736 NR Description: 3-ketoacyl-CoA synthase [Brassica rapa]
  misc_feature (1)..(506): Homolog of NCBI NO: 19919734 NR Description: 3-ketoacyl-CoA synthase [Brassica oleracea]
  misc_feature (1)..(506): Homolog of NCBI NO: 19919738 NR Description: 3-ketoacyl-CoA synthase [Brassica napus]
MTSVNVKLLYRYVLTNFFNLCLFPLTAFLAGKASRLTINDLHNFLSYLQHNLITVTLLFAFTVFGLVLYIVTRPNPVYLVDYSCYLPPPHLKVSVSKVMDIFYQIRKADTSSRNVACDDPSSLDFLRKIQERSGLGDETYSPEGLIHVPPRKTFAASREETEKVIIGALENLFENTKVNPREIGILVVNSSMFNPTPSLSAMVVNTFKLRSNIKSFNLGGMGCSAGVIAIDLAKDLLHVHKNTYALVVSTENITQGIYAGENRSMMVSNCLFRVGGAAILLSNKSGDRRRSKYKLVHTVRTHTGADDKSFRCVQQEDDESGKIGVCLSKDITNVAGTTLTKNIATLGPLILPLSEKFLFFATFVAKKLLKDKIKHYYVPDFKLAVDHFCIHAGGRAVIDELEKNLGLSPIDVEASRSTLHRFGNTSSSSIWYELAYIEAKGRMKKGNKAWQIALGSGFKCNSAVWVALRNVKASANSPWQHCIDRYPVKIDSDLSKSKTHVQNGRS

SEQ ID NO: 80581 - protein, 408 aa, Arabidopsis thaliana
  peptide (1)..(408): Ceres Seq. ID no. 12656460
  misc_feature (227)..(371): Pfam Name: Chalcone and stilbene synthases, C-terminal domain Pfam Description: Chalcone and stilbene synthases, C-terminal
  misc_feature (1)..(408): Homolog of NCBI NO: 15236144 NR Description: fatty acid elongase 1; protein id: At4g34520.1
  misc_feature (1)..(408): Homolog of NCBI NO: 2980829 NR Description: fatty acid elongation 1 [Brassica juncea]
  misc_feature (1)..(408): Homolog of NCBI NO: 30424122 NR Description: beta-ketoacyl-CoA synthase FAE1.2 [Brassica
  misc_feature (1)..(408): Homolog of NCBI NO: 20136381 NR Description: fatty acid elongase [Brassica juncea]
  misc_feature (1)..(408): Homolog of NCBI NO: 14495235 NR Description: beta-ketoacyl-CoA synthase [Brassica napus]
  misc_feature (1)..(408): Homolog of NCBI NO: 30424120 NR Description: beta-ketoacyl-CoA synthase FAE1.1 [Brassica
  misc_feature (1)..(408): Homolog of NCBI NO: 7488479 NR Description: probable 3-oxoacyl-[acyl-carrier-protein]
  misc_feature (1)..(408): Homolog of NCBI NO: 19919736 NR Description: 3-ketoacyl-CoA synthase [Brassica rapa]
  misc_feature (1)..(408): Homolog of NCBI NO: 19919734 NR Description: 3-ketoacyl-CoA synthase [Brassica oleracea]
  misc_feature (1)..(408): Homolog of NCBI NO: 19919738 NR Description: 3-ketoacyl-CoA synthase [Brassica napus]
MDIFYQIRKADTSSRNVACDDPSSLDFLRKIQERSGLGDETYSPEGLIHVPPRKTFAASREETEKVIIGALENLFENTKVNPREIGILVVNSSMFNPTPSLSAMVVNTFKLRSNIKSFNLGGMGCSAGVIAIDLAKDLLHVHKNTYALVVSTENITQGIYAGENRSMMVSNCLFRVGGAAILLSNKSGDRRRSKYKLVHTVRTHTGADDKSFRCVQQEDDESGKIGVCLSKDITNVAGTTLTKNIATLGPLILPLSEKFLFFATFVAKKLLKDKIKHYYVPDFKLAVDHFCIHAGGRAVIDELEKNLGLSPIDVEASRSTLHRFGNTSSSSIWYELAYIEAKGRMKKGNKAWQIALGSGFKCNSAVWVALRNVKASANSPWQHCIDRYPVKIDSDLSKSKTHVQNGRS

SEQ ID NO: 80582 - protein, 315 aa, Arabidopsis thaliana
  peptide (1)..(315): Ceres Seq. ID no. 12656461
  misc_feature (134)..(278): Pfam Name: Chalcone and stilbene synthases, C-terminal domain Pfam Description: Chalcone and stilbene synthases, C-terminal
  misc_feature (1)..(315): Homolog of NCBI NO: 15236144 NR Description: fatty acid elongase 1; protein id: At4g34520.1
  misc_feature (1)..(315): Homolog of NCBI NO: 2980829 NR Description: fatty acid elongation 1 [Brassica juncea]
  misc_feature (1)..(315): Homolog of NCBI NO: 30424122 NR Description: beta-ketoacyl-CoA synthase FAE1.2 [Brassica
  misc_feature (1)..(315): Homolog of NCBI NO: 20136381 NR Description: fatty acid elongase [Brassica juncea]
  misc_feature (1)..(315): Homolog of NCBI NO: 14495235 NR Description: beta-ketoacyl-CoA synthase [Brassica napus]
  misc_feature (1)..(315): Homolog of NCBI NO: 30424120 NR Description: beta-ketoacyl-CoA synthase FAE1.1 [Brassica
  misc_feature (1)..(315): Homolog of NCBI NO: 7488479 NR Description: probable 3-oxoacyl-[acyl-carrier-protein]
  misc_feature (1)..(315): Homolog of NCBI NO: 19919736 NR Description: 3-ketoacyl-CoA synthase [Brassica rapa]
  misc_feature (1)..(315): Homolog of NCBI NO: 19919734 NR Description: 3-ketoacyl-CoA synthase [Brassica oleracea]
  misc_feature (1)..(315): Homolog of NCBI NO: 19919738 NR Description: 3-ketoacyl-CoA synthase [Brassica napus]
MFNPTPSLSAMVVNTFKLRSNIKSFNLGGMGCSAGVIAIDLAKDLLHVHKNTYALVVSTENITQGIYAGENRSMMVSNCLFRVGGAAILLSNKSGDRRRSKYKLVHTVRTHTGADDKSFRCVQQEDDESGKIGVCLSKDITNVAGTTLTKNIATLGPLILPLSEKFLFFATFVAKKLLKDKIKHYYVPDFKLAVDHFCIHAGGRAVIDELEKNLGLSPIDVEASRSTLHRFGNTSSSSIWYELAYIEAKGRMKKGNKAWQIALGSGFKCNSAVWVALRNVKASANSPWQHCIDRYPVKIDSDLSKSKTHVQNGRS

SEQ ID NO: 80583 - DNA, 1009 bp, Arabidopsis thaliana
  misc_feature (1)..(1009): Ceres Seq. ID no. 12656471
  misc_feature: MA Experiment ID: 20000171 Result: Up-regulated in Transcription
  misc_feature: MA Experiment 20000171 PARAMETER Experiment Name: At_42deg_Heat_P Parameter: Age (day) Value: 14
  misc_feature: MA Experiment 20000171 PARAMETER Experiment Name: At_42deg_Heat_P Parameter: Organism Value: A. thaliana
  misc_feature: MA Experiment 20000171 PARAMETER Experiment Name: At_42deg_Heat_P Parameter: Plant Line Value: WS
  misc_feature: MA Experiment 20000171 PARAMETER Experiment Name: At_42deg_Heat_P Parameter: Temperature (deg C) Value: 42 vs. 22
  misc_feature: MA Experiment 20000171 PARAMETER Experiment Name: At_42deg_Heat_P Parameter: Timepoint (hr) Value: 1
  misc_feature: MA Experiment 20000171 PARAMETER Experiment Name: At_42deg_Heat_P Parameter: Tissue Value: Aerial
  misc_feature: MA Experiment ID: 20000173 Result: Up-regulated in Transcription
  misc_feature: MA Experiment 20000173 PARAMETER Experiment Name: At_42deg_Heat_P Parameter: Age (day) Value: 14
  misc_feature: MA Experiment 20000173 PARAMETER Experiment Name: At_42deg_Heat_P Parameter: Organism Value: A. thaliana
  misc_feature: MA Experiment 20000173 PARAMETER Experiment Name: At_42deg_Heat_P Parameter: Plant Line Value: WS
  misc_feature: MA Experiment 20000173 PARAMETER Experiment Name: At_42deg_Heat_P Parameter: Temperature (deg C) Value: 42 vs. 22
  misc_feature: MA Experiment 20000173 PARAMETER Experiment Name: At_42deg_Heat_P Parameter: Timepoint (hr) Value: 6
  misc_feature: MA Experiment 20000173 PARAMETER Experiment Name: At_42deg_Heat_P Parameter: Tissue Value: Aerial
  misc_feature: MA Experiment ID: 20000184 Result: Down-regulated in Transcription
  misc_feature: MA Experiment 20000184 PARAMETER Experiment Name: At_Shoots__P Parameter: Age (day) Value: 7
  misc_feature: MA Experiment 20000184 PARAMETER Experiment Name: At_Shoots__P Parameter: Tissue Value: Shoots vs. Whole Plant
  misc_feature: MA Experiment ID: 20000185 Result: Up-regulated in Transcription
  misc_feature: MA Experiment 20000185 PARAMETER Experiment Name: At_Roots__P Parameter: Age (day) Value: 7 vs. 21
  misc_feature: MA Experiment 20000185 PARAMETER Experiment Name: At_Roots__P Parameter: Organism Value: A. thaliana
  misc_feature: MA Experiment 20000185 PARAMETER Experiment Name: At_Roots__P Parameter: Tissue Value: Roots vs. Whole Plant
  misc_feature: MA Experiment ID: 20000227 Result: Down-regulated in Transcription
  misc_feature: MA Experiment 20000227 PARAMETER Experiment Name: At_Root-Tips-vs-Tops_P Parameter: Tissue Value: Root Tips vs. Root Tops
  misc_feature: MA Experiment ID: 20000495 Result: Up-regulated in Transcription
  misc_feature: MA Experiment 20000495 PARAMETER Experiment Name: At_Guard_Cells_P Parameter: Harvest Date Value: 8/2/2002
  misc_feature: MA Experiment 20000495 PARAMETER Experiment Name: At_Guard_Cells_P Parameter: Organism Value: A. thaliana
  misc_feature: MA Experiment 20000495 PARAMETER Experiment Name: At_Guard_Cells_P Parameter: Tissue Value: Guard Cells vs. Leaves
atcggaatatctctcttcctctgtttcttcgccattctctcagcttttctccttcttcttcgtctttgtcagagtgaatggagctgtggacagaagctagagccttaaaggcaagtctaagaggagaatctactatatctctcaaacatcaccaagtgattgtgtcggaagatttaagccgaacttcttccttgccggaagatttctccgttgagtgtttcctcgatttctcagaaggtcaaaaagaagaagaagaagaagttgtctctgtttcttcttcacaagagcaagaagaacaagaacatgattgtgtctttagttcacaaccttgcatctttgatcaacttccttctttgccggatgaagatgtggaagagcttgaatgggtatctcgtgttgtggatgattgttcatcaccagaagtttcacttctcttaacacaaacacataaaaccaaaccaagcttctcaagaattccggttaaaccaagaaccaaacggtctcggaacagtttaaccggtagtcgtgtttggccactcgtttcaaccaatcatcaacatgcagcaacagagcagttgaggaagaagaaacaagaaactgtccttgtgtttcaacgaagatgcagccattgtggcacaaacaacacaccacagtggagaaccggtccggtcggtccaaaaaccttatgtaatgcatgtggagtccggtttaagtctggtaggctctgcccggaatacagaccggcggatagtccgacgttctcgaatgagattcactcaaatcttcataggaaggttctggaattaagaaagagtaaagagttgggtgaagaaacaggtgaagctagtactaaatcagacccagtcaaatttggcagcaagtggtagataagacttaggtaaaacctactttttgtaacattatctgtagtgttgtaatttaacaacttgcttcttaacattttgaaactgtttcaggaactagtcttaagtaaacaatggttttctat

SEQ ID NO: 80584 - protein, 269 aa, Arabidopsis thaliana
  peptide (1)..(269): Ceres Seq. ID no. 12656472
  misc_feature (1)..(269): Homolog of NCBI NO: 15236172 NR Description: GATA transcription factor 3; protein id: supported by cDNA: gi_20466647 [Arabidopsis thaliana]
  misc_feature (1)..(269): Homolog of NCBI NO: 7484970 NR Description: GATA-binding transcription factor homolog 3
  misc_feature (1)..(269): Homolog of NCBI NO: 20466648 NR Description: GATA transcription factor 3 [Arabidopsis >gi|22136458|gb|AAM91307.1| GATA transcription factor 3
  misc_feature (30)..(172): Homolog of NCBI NO: 15225399 NR Description: GATA zinc finger protein; protein id: At2g45050.1
  misc_feature (180)..(249): Homolog of NCBI NO: 15225399 NR Description: GATA zinc finger protein; protein id: At2g45050.1
  misc_feature (38)..(251): Homolog of NCBI NO: 15232355 NR Description: GATA zinc finger protein; protein id: supported by cDNA: gi_14190406, supported by cDNA: gi_14517394, by cDNA: gi_15215890 [Arabidopsis thaliana]
  misc_feature (42)..(247): Homolog of NCBI NO: 15234336 NR Description: GATA zinc finger protein; protein id: supported by cDNA: gi_18252998 [Arabidopsis thaliana]
  misc_feature (41)..(156): Homolog of NCBI NO: 38344977 NR Description: OSJNBa0011L07.7 [Oryza sativa (japonica
  misc_feature (184)..(262): Homolog of NCBI NO: 38344977 NR Description: OSJNBa0011L07.7 [Oryza sativa (japonica
  misc_feature (93)..(249): Homolog of NCBI NO: 37572447 NR Description: AG-motif binding protein-3 [Nicotiana tabacum]
MELWTEARALKASLRGESTISLKHHQVIVSEDLSRTSSLPEDFSVECFLDFSEGQKEEEEEVVSVSSSQEQEEQEHDCVFSSQPCIFDQLPSLPDEDVEELEWVSRVVDDCSSPEVSLLLTQTHKTKPSFSRIPVKPRTKRSRNSLTGSRVWPLVSTNHQHAATEQLRKKKQETVLVFQRRCSHCGTNNTPQWRTGPVGPKTLCNACGVRFKSGRLCPEYRPADSPTFSNEIHSNLHRKVLELRKSKELGEETGEASTKSDPVKFGSKW

SEQ ID NO: 80585 - DNA, 1599 bp, Arabidopsis thaliana
  misc_feature (1)..(1599): Ceres Seq. ID no. 12656486
  misc_feature: MA Experiment ID: 20000184 Result: Up-regulated in Transcription
  misc_feature: MA Experiment 20000184 PARAMETER Experiment Name: At_Shoots__P Parameter: Age (day) Value: 7
  misc_feature: MA Experiment 20000184 PARAMETER Experiment Name: At_Shoots__P Parameter: Tissue Value: Shoots vs. Whole Plant
  misc_feature: MA Experiment ID: 20000185 Result: Up-regulated in Transcription
  misc_feature: MA Experiment 20000185 PARAMETER Experiment Name: At_Roots__P Parameter: Age (day) Value: 7 vs. 21
  misc_feature: MA Experiment 20000185 PARAMETER Experiment Name: At_Roots__P Parameter: Organism Value: A. thaliana
  misc_feature: MA Experiment 20000185 PARAMETER Experiment Name: At_Roots__P Parameter: Tissue Value: Roots vs. Whole Plant
  misc_feature: MA Experiment ID: 20000438 Result: Up-regulated in Transcription
  misc_feature: MA Experiment 20000438 PARAMETER Experiment Name: At_Shoots__P Parameter: Age (day) Value: 14
  misc_feature: MA Experiment 20000438 PARAMETER Experiment Name: At_Shoots__P Parameter: Tissue Value: Shoots vs. Whole Plant
  misc_feature: MA Experiment ID: 20000439 Result: Up-regulated in Transcription
  misc_feature: MA Experiment 20000439 PARAMETER Experiment Name: At_Roots__P Parameter: Age (day) Value: 14 vs. 21
  misc_feature: MA Experiment 20000439 PARAMETER Experiment Name: At_Roots__P Parameter: Organism Value: A. thaliana
  misc_feature: MA Experiment 20000439 PARAMETER Experiment Name: At_Roots__P Parameter: Tissue Value: Roots vs. Whole Plant
  misc_feature: MA Experiment ID: 20000451 Result: Up-regulated in Transcription
  misc_feature: MA Experiment 20000451 PARAMETER Experiment Name: At_CS6879_Shoots-Roots_P Parameter: Age (day) Value: 14
  misc_feature: MA Experiment 20000451 PARAMETER Experiment Name: At_CS6879_Shoots-Roots_P Parameter: Organism Value: A. thaliana
  misc_feature: MA Experiment 20000451 PARAMETER Experiment Name: At_CS6879_Shoots-Roots_P Parameter: Plant Line Value: CS6879 vs. WS
  misc_feature: MA Experiment 20000451 PARAMETER Experiment Name: At_CS6879_Shoots-Roots_P Parameter: Tissue Value: Roots
  misc_feature: MA Experiment ID: 20000496 Result: Up-regulated in Transcription
  misc_feature: MA Experiment 20000496 PARAMETER Experiment Name: At_Guard_Cells_P Parameter: Harvest Date Value: 7/19/2002
  misc_feature: MA Experiment 20000496 PARAMETER Experiment Name: At_Guard_Cells_P Parameter: Organism Value: Canola
  misc_feature: MA Experiment 20000496 PARAMETER Experiment Name: At_Guard_Cells_P Parameter: Tissue Value: Guard Cells vs. Leaves
  misc_feature: MA Experiment ID: 20001557 Result: Up-regulated in Transcription
  misc_feature: MA Experiment 20001557 PARAMETER Experiment Name: At_Drought_Soil_Dry_P Parameter: Age (day) Value: 27
  misc_feature: MA Experiment 20001557 PARAMETER Experiment Name: At_Drought_Soil_Dry_P Parameter: Organism Value: A. thaliana
  misc_feature: MA Experiment 20001557 PARAMETER Experiment Name: At_Drought_Soil_Dry_P Parameter: Plant Line Value: WS
  misc_feature: MA Experiment 20001557 PARAMETER Experiment Name: At_Drought_Soil_Dry_P Parameter: Post Timepoint (hr) Value: 3
  misc_feature: MA Experiment 20001557 PARAMETER Experiment Name: At_Drought_Soil_Dry_P Parameter: Post-Treatment Value: Re-Water vs. No Drought
  misc_feature: MA Experiment 20001557 PARAMETER Experiment Name: At_Drought_Soil_Dry_P Parameter: Timepoint (day) Value: 13
  misc_feature: MA Experiment 20001557 PARAMETER Experiment Name: At_Drought_Soil_Dry_P Parameter: Treatment Value: Drought vs. No Drought
  misc_feature: MA Experiment ID: 20001768 Result: Down-regulated in Transcription
  misc_feature: MA Experiment 20001768 PARAMETER Experiment Name: At_Far-red-enriched-adult_P Parameter: Age (day) Value: 28
  misc_feature: MA Experiment 20001768 PARAMETER Experiment Name: At_Far-red-enriched-adult_P Parameter: Light Value: Far-red enriched vs. White
  misc_feature: MA Experiment 20001768 PARAMETER Experiment Name: At_Far-red-enriched-adult_P Parameter: Organism Value: A. thaliana
  misc_feature: MA Experiment 20001768 PARAMETER Experiment Name: At_Far-red-enriched-adult_P Parameter: Plant Line Value: Columbia
  misc_feature: MA Experiment 20001768 PARAMETER Experiment Name: At_Far-red-enriched-adult_P Parameter: Timepoint (hr) Value: 1
  misc_feature: MA Experiment 20001768 PARAMETER Experiment Name: At_Far-red-enriched-adult_P Parameter: Tissue Value: Aerial
atgtgtaacccatcaacaacaacaacaaccaccggttcagagaaccaagaatctcgaaccggactcttcctcgatctcttctcgatcaatagctttgaacccacaaagagaaatctccggcattgtgagaacagaggatctcctcttatggcagaagctgtaacagaggcgaaatctctcttcacgttagcttttccgatcgccgtgacggctcttgtcctctacctacgctcagccgtatcaatgtttttcttgggtcaacttggtgacctcgaattagccgccggttcactcgccattgcctttgctaacataaccggttactctgttttatccggtttagctcttggtatggaaccactctgttctcaagccttcggtgctcaccgcttcaaactcctttccctaaccctccatcgaaccgtggtttttctcttggtttgttgcgtaccgatctcggttctctggtttaacgtcggcaaaatatcggtttaccttcaccaagaccccgacatcgcgaaattagctcagacatatctcatcttctccctacctgatcttctcaccaacactcttcttcatccaatcagaatctaccttcgtgctcaaggcatcattcaccccgtaaccctagcttctctctccggcgctgtttttcacctcccggctaatcttttcttagtctcttacctccgtcttggtttaaccggcgtagcagtcgcttcctccatcacaaacatcttcgtcgttgctttcctcgtttgctacgtctgggcgagtggtcttcacgcgcctacatggactgacccgacccgtgattgtttccgcgggtgggctccgttgctgcgtctcgcgggaccaagctgtgtctccgtgtgtttggaatggtggtggtacgagatcatgatcgttttgtgtggtttgctcgtgaatccaagatcgacggtggctgctatgggcgttttgatccagacgacgtcgtttctttatgttttcccgtcttctcttagctttgctgtctcaactagagtcggaaacgaacttggagccaaccgtcccaagacagcaaagctaacggctacggtggctatcgttttcgcggcggttacagggattatagcggcggcgtttgcttactcagtcagaaacgcttggggaaggattttcaccggagacaaagagatactccagctaacagcggcggcgttaccgatattaggtctatgcgagatcggaaactgtcctcagacggtgggatgcggcgtcgtgagaggaacagcacgaccgtcaacggcggcgaacgtgaaccttggagcgttttatctggtgggcatgccggtggcagtgggtctcgggttttgggccggaattgggtttaatgggctttgggtaggactacttgcggcgcagattagctgcgcaggtcttatgatgtacgtggtggggaccacagattgggaatcggaggctaagaaggcgcagacgctaacgtgcgctgagactgtagagaatgatattattaaggcggtggtggcgagtactatagacggtgagtgcgatgaggctgagccgttgattcgcatcacggtgctttattaa

SEQ ID NO: 80586 - protein, 532 aa, Arabidopsis thaliana
  peptide (1)..(532): Ceres Seq. ID no. 12656487
  misc_feature (1)..(532): Homolog of NCBI NO: 15233459 NR Description: putative protein; protein id: At4g29140.1
  misc_feature (48)..(531): Homolog of NCBI NO: 15241158 NR Description: putative protein; protein id: At5g19700.1
  misc_feature (50)..(496): Homolog of NCBI NO: 15235905 NR Description: putative protein; protein id: At4g23030.1
  misc_feature (1)..(531): Homolog of NCBI NO: 18406257 NR Description: expressed protein; protein id: At1g58340.1, by cDNA: gi_6520160 [Arabidopsis thaliana]
  misc_feature (56)..(505): Homolog of NCBI NO: 37536202 NR Description: putative membrane protein [Oryza sativa (japonica group)] >gi|27311284|gb|AAO00710.1| putative membrane protein
  misc_feature (56)..(505): Homolog of NCBI NO: 38567909 NR Description: OSJNBa0088I22.5 [Oryza sativa (japonica
  misc_feature (49)..(501): Homolog of NCBI NO: 20532318 NR Description: Putative membrane protein [Oryza sativa (japonica group)] >gi|27356666|gb|AAO06955.1| Putative membrane protein
  misc_feature (277)..(500): Homolog of NCBI NO: 15217599 NR Description: hypothetical protein; protein id: At1g71870.1
  misc_feature (47)..(262): Homolog of NCBI NO: 15217599 NR Description: hypothetical protein; protein id: At1g71870.1
  misc_feature (34)..(499): Homolog of NCBI NO: 15242265 NR Description: integral membrane protein-like; protein id:
MCNPSTTTTTTGSENQESRTGLFLDLFSINSFEPTKRNLRHCENRGSPLMAEAVTEAKSLFTLAFPIAVTALVLYLRSAVSMFFLGQLGDLELAAGSLAIAFANITGYSVLSGLALGMEPLCSQAFGAHRFKLLSLTLHRTVVFLLVCCVPISVLWFNVGKISVYLHQDPDIAKLAQTYLIFSLPDLLTNTLLHPIRIYLRAQGIIHPVTLASLSGAVFHLPANLFLVSYLRLGLTGVAVASSITNIFVVAFLVCYVWASGLHAPTWTDPTRDCFRGWAPLLRLAGPSCVSVCLEWWWYEIMIVLCGLLVNPRSTVAAMGVLIQTTSFLYVFPSSLSFAVSTRVGNELGANRPKTAKLTATVAIVFAAVTGIIAAAFAYSVRNAWGRIFTGDKEILQLTAAALPILGLCEIGNCPQTVGCGVVRGTARPSTAANVNLGAFYLVGMPVAVGLGFWAGIGFNGLWVGLLAAQISCAGLMMYVVGTTDWESEAKKAQTLTCAETVENDIIKAVVASTIDGECDEAEPLIRITVLY

SEQ ID NO: 80587 - protein, 483 aa, Arabidopsis thaliana
  peptide (1)..(483): Ceres Seq. ID no. 12656488
  misc_feature (1)..(483): Homolog of NCBI NO: 15233459 NR Description: putative protein; protein id: At4g29140.1
  misc_feature (1)..(482): Homolog of NCBI NO: 15241158 NR Description: putative protein; protein id: At5g19700.1
  misc_feature (1)..(447): Homolog of NCBI NO: 15235905 NR Description: putative protein; protein id: At4g23030.1
  misc_feature (1)..(482): Homolog of NCBI NO: 18406257 NR Description: expressed protein; protein id: At1g58340.1, by cDNA: gi_6520160 [Arabidopsis thaliana]
  misc_feature (7)..(456): Homolog of NCBI NO: 37536202 NR Description: putative membrane protein [Oryza sativa (japonica group)] >gi|27311284|gb|AAO00710.1| putative membrane protein
  misc_feature (7)..(456): Homolog of NCBI NO: 38567909 NR Description: OSJNBa0088I22.5 [Oryza sativa (japonica
  misc_feature (1)..(452): Homolog of NCBI NO: 20532318 NR Description: Putative membrane protein [Oryza sativa (japonica group)] >gi|27356666|gb|AAO06955.1| Putative membrane protein
  misc_feature (228)..(451): Homolog of NCBI NO: 15217599 NR Description: hypothetical protein; protein id: At1g71870.1
  misc_feature (1)..(213): Homolog of NCBI NO: 15217599 NR Description: hypothetical protein; protein id: At1g71870.1
  misc_feature (1)..(450): Homolog of NCBI NO: 15242265 NR Description: integral membrane protein-like; protein id:
MAEAVTEAKSLFTLAFPIAVTALVLYLRSAVSMFFLGQLGDLELAAGSLAIAFANITGYSVLSGLALGMEPLCSQAFGAHRFKLLSLTLHRTVVFLLVCCVPISVLWFNVGKISVYLHQDPDIAKLAQTYLIFSLPDLLTNTLLHPIRIYLRAQGIIHPVTLASLSGAVFHLPANLFLVSYLRLGLTGVAVASSITNIFVVAFLVCYVWASGLHAPTWTDPTRDCFRGWAPLLRLAGPSCVSVCLEWWWYEIMIVLCGLLVNPRSTVAAMGVLIQTTSFLYVFPSSLSFAVSTRVGNELGANRPKTAKLTATVAIVFAAVTGIIAAAFAYSVRNAWGRIFTGDKEILQLTAAALPILGLCEIGNCPQTVGCGVVRGTARPSTAANVNLGAFYLVGMPVAVGLGFWAGIGFNGLWVGLLAAQISCAGLMMYVVGTTDWESEAKKAQTLTCAETVENDIIKAVVASTIDGECDEAEPLIRITVLY

SEQ ID NO: 80588 - protein, 451 aa, Arabidopsis thaliana
  peptide (1)..(451): Ceres Seq. ID no. 12656489
  misc_feature (1)..(451): Homolog of NCBI NO: 15233459 NR Description: putative protein; protein id: At4g29140.1
  misc_feature (1)..(450): Homolog of NCBI NO: 15241158 NR Description: putative protein; protein id: At5g19700.1
  misc_feature (1)..(415): Homolog of NCBI NO: 15235905 NR Description: putative protein; protein id: At4g23030.1
  misc_feature (1)..(450): Homolog of NCBI NO: 18406257 NR Description: expressed protein; protein id: At1g58340.1, by cDNA: gi_6520160 [Arabidopsis thaliana]
  misc_feature (1)..(424): Homolog of NCBI NO: 37536202 NR Description: putative membrane protein [Oryza sativa (japonica group)] >gi|27311284|gb|AAO00710.1| putative membrane protein
  misc_feature (1)..(424): Homolog of NCBI NO: 38567909 NR Description: OSJNBa0088I22.5 [Oryza sativa (japonica
  misc_feature (1)..(420): Homolog of NCBI NO: 20532318 NR Description: Putative membrane protein [Oryza sativa (japonica group)] >gi|27356666|gb|AAO06955.1| Putative membrane protein
  misc_feature (196)..(419): Homolog of NCBI NO: 15217599 NR Description: hypothetical protein; protein id: At1g71870.1
  misc_feature (1)..(181): Homolog of NCBI NO: 15217599 NR Description: hypothetical protein; protein id: At1g71870.1
  misc_feature (1)..(418): Homolog of NCBI NO: 15242265 NR Description: integral membrane protein-like; protein id:
MFFLGQLGDLELAAGSLAIAFANITGYSVLSGLALGMEPLCSQAFGAHRFKLLSLTLHRTVVFLLVCCVPISVLWFNVGKISVYLHQDPDIAKLAQTYLIFSLPDLLTNTLLHPIRIYLRAQGIIHPVTLASLSGAVFHLPANLFLVSYLRLGLTGVAVASSITNIFVVAFLVCYVWASGLHAPTWTDPTRDCFRGWAPLLRLAGPSCVSVCLEWWWYEIMIVLCGLLVNPRSTVAAMGVLIQTTSFLYVFPSSLSFAVSTRVGNELGANRPKTAKLTATVAIVFAAVTGIIAAAFAYSVRNAWGRIFTGDKEILQLTAAALPILGLCEIGNCPQTVGCGVVRGTARPSTAANVNLGAFYLVGMPVAVGLGFWAGIGFNGLWVGLLAAQISCAGLMMYVVGTTDWESEAKKAQTLTCAETVENDIIKAVVASTIDGECDEAEPLIRITVLY

SEQ ID NO: 80589 - DNA, 1917 bp, Arabidopsis thaliana
  misc_feature (1)..(1917): Ceres Seq. ID no. 12656498
  misc_feature: MA Experiment ID: 20000171 Result: Up-regulated in Transcription
  misc_feature: MA Experiment 20000171 PARAMETER Experiment Name: At_42deg_Heat_P Parameter: Age (day) Value: 14
  misc_feature: MA Experiment 20000171 PARAMETER Experiment Name: At_42deg_Heat_P Parameter: Organism Value: A. thaliana
  misc_feature: MA Experiment 20000171 PARAMETER Experiment Name: At_42deg_Heat_P Parameter: Plant Line Value: WS
  misc_feature: MA Experiment 20000171 PARAMETER Experiment Name: At_42deg_Heat_P Parameter: Temperature (deg C) Value: 42 vs. 22
  misc_feature: MA Experiment 20000171 PARAMETER Experiment Name: At_42deg_Heat_P Parameter: Timepoint (hr) Value: 1
  misc_feature: MA Experiment 20000171 PARAMETER Experiment Name: At_42deg_Heat_P Parameter: Tissue Value: Aerial
  misc_feature: MA Experiment ID: 20000173 Result: Up-regulated in Transcription
  misc_feature: MA Experiment 20000173 PARAMETER Experiment Name: At_42deg_Heat_P Parameter: Age (day) Value: 14
  misc_feature: MA Experiment 20000173 PARAMETER Experiment Name: At_42deg_Heat_P Parameter: Organism Value: A. thaliana
  misc_feature: MA Experiment 20000173 PARAMETER Experiment Name: At_42deg_Heat_P Parameter: Plant Line Value: WS
  misc_feature: MA Experiment 20000173 PARAMETER Experiment Name: At_42deg_Heat_P Parameter: Temperature (deg C) Value: 42 vs. 22
  misc_feature: MA Experiment 20000173 PARAMETER Experiment Name: At_42deg_Heat_P Parameter: Timepoint (hr) Value: 6
  misc_feature: MA Experiment 20000173 PARAMETER Experiment Name: At_42deg_Heat_P Parameter: Tissue Value: Aerial
  misc_feature: MA Experiment ID: 20000182 Result: Down-regulated in Transcription
  misc_feature: MA Experiment 20000182 PARAMETER Experiment Name: At_2mM_SA_P Parameter: Age (day) Value: 14
  misc_feature: MA Experiment 20000182 PARAMETER Experiment Name: At_2mM_SA_P Parameter: Organism Value: A. thaliana
  misc_feature: MA Experiment 20000182 PARAMETER Experiment Name: At_2mM_SA_P Parameter: Plant Line Value: WS
  misc_feature: MA Experiment 20000182 PARAMETER Experiment Name: At_2mM_SA_P Parameter: Timepoint (hr) Value: 6
  misc_feature: MA Experiment 20000182 PARAMETER Experiment Name: At_2mM_SA_P Parameter: Tissue Value: Aerial
  misc_feature: MA Experiment 20000182 PARAMETER Experiment Name: At_2mM_SA_P Parameter: Treatment Value: 2mM SA vs. No Treatment
  misc_feature: MA Experiment ID: 20000234 Result: Up-regulated in Transcription
  misc_feature: MA Experiment 20000234 PARAMETER Experiment Name: At_Siliques_P Parameter: Age (day) Value: 21
  misc_feature: MA Experiment 20000234 PARAMETER Experiment Name: At_Siliques_P Parameter: Organism Value: A. thaliana
  misc_feature: MA Experiment 20000234 PARAMETER Experiment Name: At_Siliques_P Parameter: Plant Line Value: WS
  misc_feature: MA Experiment 20000234 PARAMETER Experiment Name: At_Siliques_P Parameter: Tissue Value: Less Than 5mm Siliques vs. Whole Plant
  misc_feature: MA Experiment ID: 20000235 Result: Up-regulated in Transcription
  misc_feature: MA Experiment 20000235 PARAMETER Experiment Name: At_Siliques_P Parameter: Age (day) Value: 21
  misc_feature: MA Experiment 20000235 PARAMETER Experiment Name: At_Siliques_P Parameter: Organism Value: A. thaliana
  misc_feature: MA Experiment 20000235 PARAMETER Experiment Name: At_Siliques_P Parameter: Plant Line Value: WS
  misc_feature: MA Experiment 20000235 PARAMETER Experiment Name: At_Siliques_P Parameter: Tissue Value: 5-10mm Siliques vs. Whole Plant
  misc_feature: MA Experiment ID: 20000264 Result: Up-regulated in Transcription
  misc_feature: MA Experiment 20000264 PARAMETER Experiment Name: At_Open_Flower_P Parameter: Age (day) Value: 21
  misc_feature: MA Experiment 20000264 PARAMETER Experiment Name: At_Open_Flower_P Parameter: Plant Line Value: WS
  misc_feature: MA Experiment 20000264 PARAMETER Experiment Name: At_Open_Flower_P Parameter: Tissue Value: Open Flower vs. Whole Plant
  misc_feature: MA Experiment ID: 20000265 Result: Up-regulated in Transcription
  misc_feature: MA Experiment 20000265 PARAMETER Experiment Name: At_Open_Flower_P Parameter: Age (day) Value: 21
  misc_feature: MA Experiment 20000265 PARAMETER Experiment Name: At_Open_Flower_P Parameter: Plant Line Value: WS
  misc_feature: MA Experiment 20000265 PARAMETER Experiment Name: At_Open_Flower_P Parameter: Tissue Value: Closed Flower vs. Whole Plant
  misc_feature: MA Experiment ID: 20000286 Result: Up-regulated in Transcription
  misc_feature: MA Experiment 20000286 PARAMETER Experiment Name: At_Open_Flower_P Parameter: Age (day) Value: 21
  misc_feature: MA Experiment 20000286 PARAMETER Experiment Name: At_Open_Flower_P Parameter: Plant Line Value: WS
  misc_feature: MA Experiment 20000286 PARAMETER Experiment Name: At_Open_Flower_P Parameter: Tissue Value: Half Open vs. Whole Plant
  misc_feature: MA Experiment ID: 20000437 Result: Down-regulated in Transcription
  misc_feature: MA Experiment 20000437 PARAMETER Experiment Name: At_Drought_P Parameter: Age (day) Value: 8
  misc_feature: MA Experiment 20000437 PARAMETER Experiment Name: At_Drought_P Parameter: Organism Value: A. thaliana
  misc_feature: MA Experiment 20000437 PARAMETER Experiment Name: At_Drought_P Parameter: Plant Line Value: WS
  misc_feature: MA Experiment 20000437 PARAMETER Experiment Name: At_Drought_P Parameter: Timepoint (hr) Value: 24
  misc_feature: MA Experiment 20000437 PARAMETER Experiment Name: At_Drought_P Parameter: Tissue Value: Whole Plant
  misc_feature: MA Experiment 20000437 PARAMETER Experiment Name: At_Drought_P Parameter: Treatment Value: Drought vs. No Drought
  misc_feature: MA Experiment ID: 20000495 Result: Up-regulated in Transcription
  misc_feature: MA Experiment 20000495 PARAMETER Experiment Name: At_Guard_Cells_P Parameter: Harvest Date Value: 8/2/2002
  misc_feature: MA Experiment 20000495 PARAMETER Experiment Name: At_Guard_Cells_P Parameter: Organism Value: A. thaliana
  misc_feature: MA Experiment 20000495 PARAMETER Experiment Name: At_Guard_Cells_P Parameter: Tissue Value: Guard Cells vs. Leaves
  misc_feature: MA Experiment ID: 20001558 Result: Up-regulated in Transcription
  misc_feature: MA Experiment 20001558 PARAMETER Experiment Name: At_Drought_Soil_Dry_P Parameter: Age (day) Value: 27
  misc_feature: MA Experiment 20001558 PARAMETER Experiment Name: At_Drought_Soil_Dry_P Parameter: Organism Value: A. thaliana
  misc_feature: MA Experiment 20001558 PARAMETER Experiment Name: At_Drought_Soil_Dry_P Parameter: Plant Line Value: WS
  misc_feature: MA Experiment 20001558 PARAMETER Experiment Name: At_Drought_Soil_Dry_P Parameter: Post Timepoint (hr) Value: 6
  misc_feature: MA Experiment 20001558 PARAMETER Experiment Name: At_Drought_Soil_Dry_P Parameter: Post-Treatment Value: Re-Water vs. No Drought
  misc_feature: MA Experiment 20001558 PARAMETER Experiment Name: At_Drought_Soil_Dry_P Parameter: Timepoint (day) Value: 13
  misc_feature: MA Experiment 20001558 PARAMETER Experiment Name: At_Drought_Soil_Dry_P Parameter: Treatment Value: Drought vs. No Drought
  misc_feature: MA Experiment ID: 20001560 Result: Up-regulated in Transcription
  misc_feature: MA Experiment 20001560 PARAMETER Experiment Name: At_Drought_Soil_Dry_P Parameter: Age (day) Value: 28
  misc_feature: MA Experiment 20001560 PARAMETER Experiment Name: At_Drought_Soil_Dry_P Parameter: Organism Value: A. thaliana
  misc_feature: MA Experiment 20001560 PARAMETER Experiment Name: At_Drought_Soil_Dry_P Parameter: Plant Line Value: WS
  misc_feature: MA Experiment 20001560 PARAMETER Experiment Name: At_Drought_Soil_Dry_P Parameter: Post Timepoint (hr) Value: None
  misc_feature: MA Experiment 20001560 PARAMETER Experiment Name: At_Drought_Soil_Dry_P Parameter: Post-Treatment Value: None
  misc_feature: MA Experiment 20001560 PARAMETER Experiment Name: At_Drought_Soil_Dry_P Parameter: Timepoint (day) Value: 14
  misc_feature: MA Experiment 20001560 PARAMETER Experiment Name: At_Drought_Soil_Dry_P Parameter: Treatment Value: Drought vs. No Drought
acaacgttcacctccagtgacttctctctatctctaaatctctcttgcgtcacttaaaaagtcggtgcttcctacttaagtgttcttgagagtgagacgtttcatttctgggttcaagggtgtagaataaacacttgagtgaagtttaaagcttgagaaagacagaggaaagaaaaatgggtcaaagactgaatctagtcttctggatttttgtctccattcttgcctttttgaattttggtatggctagcaagattgggatatgttatggaagaaatgctgataatcttccaagtcctaacagagtctctgagctaatccaacatctcaacatcaaatttgttcgaatctatgacgccaacattgatgttcttaaagcttttgcaaacactggaatcgagcttatgattggtgtccctaacgctgatctacttgcatttgctcagtttcaatccaatgtagatacttggcttagcaacaacatccttccttattatccatctaccaaaatcacttcgatttcagttggtcttgaagtaactgaagcaccagacaatgccactggtctagtcttacctgcgatgcgaaacattcacacagctcttaagaagtctggtttggataaaaagatcaagatctcgagctcacattcccttgctatcttgtcacgctccttcccgccttcgtcagcttctttcagcaagaagcattcagcgttcttgaaaccaatgcttgagttcttggttgagaatgagtctccctttatgatagacctgtatccgtattatgcttacagagattccactgaaaaagttccgttggagtatgctctattcgagtcatcttcgcaggttgttgatcctgccacgggtttgctttactccaacatgtttgatgctcagcttgacgctatctatttcgctttgactgctatgagctttaagaccgttaaggttatggtcactgagtccgggtggccgagtaaaggctcgcctaaagagacagctgcaactcctgagaacgctctggcttacaataccaacctcatccgccatgtcattggtgatccaggtactcctgcaaagcctggagaagagatagatgtgtacttattctcgttgttcaatgagaaccggaagcctgggatagaatccgagagaaactggggaatgttctacgcgaacggaactaatgtttacgctttagacttcactggggaaaacactacgcctgtttctccaacaaattcaaccacaggtaccagtccaagtccaagttcaagtccaattatcaacggtaactcgacagtaaccatcggaggaggaggaggaggaggaaccaagaaatggtgtattgcttcttcacaagcttcggtaacggaactgcagactgcattggactgggcttgtggtcctggaaatgttgattgttcagctgttcaaccagaccaaccttgctttgaaccagatactgttctctcacacgcatcttatgcattcaacacttattaccaacagagcggagcaagcagcatagattgcagctttaatggagccagcgttgaagttgacaaggatccaagttatggtaactgtttgtacatgattgctccggctaccgacggattcaacagaacaatggcgggtaatatcactggaaacataactgccattgattcccccttggcttcgccttcgtcaaccaatgaagcattcagacaaatggtggttgcagtctctgttttgttgccgtgttttgtagtttgttcgagtatttggtgacaagtgtgtacatgaatgcactgtcgccttcttttgtatgaagttttgagtagtgagcgaacttaaactagaatttagcccaactgttgaacttggtaatttctttcaccacgtaaccgaaatgtcaagcttggtg

SEQ ID NO: 80590 - protein, 534 aa, Arabidopsis thaliana
  peptide (1)..(534): Ceres Seq. ID no. 12656499
  misc_feature (27)..(345): Pfam Name: Glycosyl hydrolases family 17 Pfam Description: Glycosyl hydrolases family 17
  misc_feature (1)..(534): Homolog of NCBI NO: 30688297 NR Description: glycosyl hydrolase family 17 [Arabidopsis
  misc_feature (23)..(534): Homolog of NCBI NO: 25407609 NR Description: beta-1, 3-glucanase-like protein [imported] -
  misc_feature (1)..(469): Homolog of NCBI NO: 30688300 NR Description: glycosyl hydrolase family 17 [Arabidopsis
  misc_feature (1)..(369): Homolog of NCBI NO: 15241268 NR Description: glycosyl hydrolase family 17; protein id:
  misc_feature (373)..(527): Homolog of NCBI NO: 15241268 NR Description: glycosyl hydrolase family 17; protein id:
  misc_feature (12)..(363): Homolog of NCBI NO: 34909360 NR Description: P0638D12.12 [Oryza sativa (japonica
  misc_feature (11)..(475): Homolog of NCBI NO: 11071974 NR Description: elicitor inducible beta-1,3-glucanase Nt-SubE76
  misc_feature (11)..(351): Homolog of NCBI NO: 15231273 NR Description: glycosyl hydrolase family 17; protein id: supported by cDNA: gi_14334497, supported by cDNA: gi_17104804
  misc_feature (338)..(483): Homolog of NCBI NO: 15231273 NR Description: glycosyl hydrolase family 17; protein id: supported by cDNA: gi_14334497, supported by cDNA: gi_17104804
  misc_feature (7)..(473): Homolog of NCBI NO: 30678225 NR Description: glycosyl hydrolase family 17 [Arabidopsis
MGQRLNLVFWIFVSILAFLNFGMASKIGICYGRNADNLPSPNRVSELIQHLNIKFVRIYDANIDVLKAFANTGIELMIGVPNADLLAFAQFQSNVDTWLSNNILPYYPSTKITSISVGLEVTEAPDNATGLVLPAMRNIHTALKKSGLDKKIKISSSHSLAILSRSFPPSSASFSKKHSAFLKPMLEFLVENESPFMIDLYPYYAYRDSTEKVPLEYALFESSSQVVDPATGLLYSNMFDAQLDAIYFALTAMSFKTVKVMVTESGWPSKGSPKETAATPENALAYNTNLIRHVIGDPGTPAKPGEEIDVYLFSLFNENRKPGIESERNWGMFYANGTNVYALDFTGENTTPVSPTNSTTGTSPSPSSSPIINGNSTVTIGGGGGGGTKKWCIASSQASVTELQTALDWACGPGNVDCSAVQPDQPCFEPDTVLSHASYAFNTYYQQSGASSIDCSFNGASVEVDKDPSYGNCLYMIAPATDGFNRTMAGNITGNITAIDSPLASPSSTNEAFRQMVVAVSVLLPCFVVCSSIW

SEQ ID NO: 80591 - protein, 512 aa, Arabidopsis thaliana
  peptide (1)..(512): Ceres Seq. ID no. 12656500
  misc_feature (5)..(323): Pfam Name: Glycosyl hydrolases family 17 Pfam Description: Glycosyl hydrolases family 17
  misc_feature (1)..(512): Homolog of NCBI NO: 30688297 NR Description: glycosyl hydrolase family 17 [Arabidopsis
  misc_feature (1)..(512): Homolog of NCBI NO: 25407609 NR Description: beta-1, 3-glucanase-like protein [imported] -
  misc_feature (1)..(447): Homolog of NCBI NO: 30688300 NR Description: glycosyl hydrolase family 17 [Arabidopsis
  misc_feature (1)..(347): Homolog of NCBI NO: 15241268 NR Description: glycosyl hydrolase family 17; protein id:
  misc_feature (351)..(505): Homolog of NCBI NO: 15241268 NR Description: glycosyl hydrolase family 17; protein id:
  misc_feature (1)..(341): Homolog of NCBI NO: 34909360 NR Description: P0638D12.12 [Oryza sativa (japonica
  misc_feature (1)..(453): Homolog of NCBI NO: 11071974 NR Description: elicitor inducible beta-1,3-glucanase Nt-SubE76
  misc_feature (1)..(329): Homolog of NCBI NO: 15231273 NR Description: glycosyl hydrolase family 17; protein id: supported by cDNA: gi_14334497, supported by cDNA: gi_17104804
  misc_feature (316)..(461): Homolog of NCBI NO: 15231273 NR Description: glycosyl hydrolase family 17; protein id: supported by cDNA: gi_14334497, supported by cDNA: gi_17104804
  misc_feature (1)..(451): Homolog of NCBI NO: 30678225 NR Description: glycosyl hydrolase family 17 [Arabidopsis
MASKIGICYGRNADNLPSPNRVSELIQHLNIKFVRIYDANIDVLKAFANTGIELMIGVPNADLLAFAQFQSNVDTWLSNNILPYYPSTKITSISVGLEVTEAPDNATGLVLPAMRNIHTALKKSGLDKKIKISSSHSLAILSRSFPPSSASFSKKHSAFLKPMLEFLVENESPFMIDLYPYYAYRDSTEKVPLEYALFESSSQVVDPATGLLYSNMFDAQLDAIYFALTAMSFKTVKVMVTESGWPSKGSPKETAATPENALAYNTNLIRHVIGDPGTPAKPGEEIDVYLFSLFNENRKPGIESERNWGMFYANGTNVYALDFTGENTTPVSPTNSTTGTSPSPSSSPIINGNSTVTIGGGGGGGTKKWCIASSQASVTELQTALDWACGPGNVDCSAVQPDQPCFEPDTVLSHASYAFNTYYQQSGASSIDCSFNGASVEVDKDPSYGNCLYMIAPATDGFNRTMAGNITGNITAIDSPLASPSSTNEAFRQMVVAVSVLLPCFVVCSSIW

SEQ ID NO: 80592 - protein, 458 aa, Arabidopsis thaliana
  peptide (1)..(458): Ceres Seq. ID no. 12656501
  misc_feature (1)..(269): Pfam Name: Glycosyl hydrolases family 17 Pfam Description: Glycosyl hydrolases family 17
  misc_feature (1)..(458): Homolog of NCBI NO: 30688297 NR Description: glycosyl hydrolase family 17 [Arabidopsis
  misc_feature (1)..(458): Homolog of NCBI NO: 25407609 NR Description: beta-1, 3-glucanase-like protein [imported] -
  misc_feature (1)..(393): Homolog of NCBI NO: 30688300 NR Description: glycosyl hydrolase family 17 [Arabidopsis
  misc_feature (1)..(293): Homolog of NCBI NO: 15241268 NR Description: glycosyl hydrolase family 17; protein id:
  misc_feature (297)..(451): Homolog of NCBI NO: 15241268 NR Description: glycosyl hydrolase family 17; protein id:
  misc_feature (1)..(287): Homolog of NCBI NO: 34909360 NR Description: P0638D12.12 [Oryza sativa (japonica
  misc_feature (1)..(399): Homolog of NCBI NO: 11071974 NR Description: elicitor inducible beta-1,3-glucanase Nt-SubE76
  misc_feature (1)..(275): Homolog of NCBI NO: 15231273 NR Description: glycosyl hydrolase family 17; protein id: supported by cDNA: gi_14334497, supported by cDNA: gi_17104804
  misc_feature (262)..(407): Homolog of NCBI NO: 15231273 NR Description: glycosyl hydrolase family 17; protein id: supported by cDNA: gi_14334497, supported by cDNA: gi_17104804
  misc_feature (1)..(397): Homolog of NCBI NO: 30678225 NR Description: glycosyl hydrolase family 17 [Arabidopsis
MIGVPNADLLAFAQFQSNVDTWLSNNILPYYPSTKITSISVGLEVTEAPDNATGLVLPAMRNIHTALKKSGLDKKIKISSSHSLAILSRSFPPSSASFSKKHSAFLKPMLEFLVENESPFMIDLYPYYAYRDSTEKVPLEYALFESSSQVVDPATGLLYSNMFDAQLDAIYFALTAMSFKTVKVMVTESGWPSKGSPKETAATPENALAYNTNLIRHVIGDPGTPAKPGEEIDVYLFSLFNENRKPGIESERNWGMFYANGTNVYALDFTGENTTPVSPTNSTTGTSPSPSSSPIINGNSTVTIGGGGGGGTKKWCIASSQASVTELQTALDWACGPGNVDCSAVQPDQPCFEPDTVLSHASYAFNTYYQQSGASSIDCSFNGASVEVDKDPSYGNCLYMIAPATDGFNRTMAGNITGNITAIDSPLASPSSTNEAFRQMVVAVSVLLPCFVVCSSIW

SEQ ID NO: 80593 - DNA, 3216 bp, Arabidopsis thaliana
  misc_feature (1)..(3216): Ceres Seq. ID no. 12656516
  misc_feature: MA Experiment ID: 20001451 Result: Up-regulated in Transcription
  misc_feature: MA Experiment 20001451 PARAMETER Experiment Name: At_Far-red-induction_P Parameter: Age (day) Value: 7
  misc_feature: MA Experiment 20001451 PARAMETER Experiment Name: At_Far-red-induction_P Parameter: Light Value: Far-red vs. White
  misc_feature: MA Experiment 20001451 PARAMETER Experiment Name: At_Far-red-induction_P Parameter: Organism Value: A. thaliana
  misc_feature: MA Experiment 20001451 PARAMETER Experiment Name: At_Far-red-induction_P Parameter: Plant Line Value: Columbia
  misc_feature: MA Experiment 20001451 PARAMETER Experiment Name: At_Far-red-induction_P Parameter: Timepoint (hr) Value: 24
  misc_feature: MA Experiment 20001451 PARAMETER Experiment Name: At_Far-red-induction_P Parameter: Tissue Value: Whole Plant
atggcggcttcacgcctgaaaatcctgaagaacaaaaaggatacacagattaagcaactgaggagagaattagctcatttgcttgaatccggccaaacccaaacagctaaaattcgggtggagcatgtggtaagagaagaaaagacagtagctgcttatgagctcgttggtatatattgtgaacttcttgttgctcgtttgggtgtcattgactctcaaaagacatgtcctaatgatcttaaggaagctgtcgcaagtgtcttatacgcttctcaaaggttaacagatgttggggagctctcagatattgttaagcatttctctgcaaagtatggtaaagattttgtttcagctgctattggtttgcaaccggattctggtgtgagtcgtttgttagtagagaaattgtctgttaaagctcctgatggtccaacaaagatcaaaattttgacggagattgctacgcagcataatgtaacttgggaagcagagtctttggttgaatcagatccaaaggaaaccatgtcggcgagtggagcaagttcatctgtgtctcagccagcaactggaataaagtcggagtcttcaagaatccagaacaatcaacctccagtatttcaagctgcagctactgtcaatgtgtcgcagaattcatatgcaactgatgggagatcttcaagccgcatgacatctactgatttcaacgttgggaagacacctgatcactatcatcaagacccaaaaccttctggagatagagttgacggtagagaacacagggatcacaatccaggtcatggggatacatctccattcgaaacgaaatttgttgatgcaacgagtgctgcacgtgctgctgctgaatctgcggaaagagcgagttttgctgcacgtagagctgctgagctttcaagtaaagaaagaatgatgatgatgcagaattcaacagagtcgcggaactcatcctcgtatgagaatcttagaagcaatcccccacatagtcgtactagtagctcaaatatgcaaggcggaggttttggtaaagaagagttattaaaaagcaataacaggcaagtagatcaatctactactactactagagcagagtcatctaagaagactgttgatgagctatcagaaaatacttcatggaggagaggtcattctcgggagaactcattggagatgaggccgaatgattcctttgctaaaataggtagagagaaacagcagccaggtatggatgatataaaccttagcagttcagcagatgttctaaataagaaacaatcaagccgagcttcatcgcattcaccgtcaagcaatttttccgatgataatgatgtcactgccttggaccatatcgattcaccaagtatctttgaggaaaacaaatttcagagcactgttggagatagagagagctacaatgacagtcctgttgttgttgttgctccggcttttgatgactatagctcgttttttgacaaacctcaattcgacacagaagatgcttatcatgatgaaccagaacaaggattaggattttcattgcttggcagtagcagcaaaacatcggatcatatgcctacagagataagttcatggagcctcgaaggacacaaggatctgggaaaactcagctcagcctcaacctcacaggttcttgaaaaggagaagccaagttctcctccaacatttgatgatggtcctacaagtcctccagcttctctgcatgagcctgagccgtctgcaaagtttgatgattatgaccgagattctgaaagtgaagaagacaatctaggaagactttccggacgtgcagaaggaaagtcgaagctgacagctcagaagtctcacatgtctgaaggtcctgatgatttaggacgttactttttcccatcagacacagaagaccaaggagatgattccaaaacacaggaagaatctgacgcagagactcctacaggtcttaagtttggacctctagccagtggacttgagaatgaaacgactctcccatcttatggatcgagtccgccaagagacaagacgtcgtctaaatctataaaagagtatcttccaacagaggttgatccgtcaaggtcttcttctctgcagacagcttcttctagcagtattaggaatgaactttacactcagaaagcaagtaactcagacaaaagaccaagctctatacctccagattcatcttctagtgatgatgaatcagatatggaacttccaaagagagtttctttcagatatcaagagaaaagaactgagtcaagaacccggcccacacatctacattcgggtgtcagccataaggacttggaggaagaaatcccgactcgagcttctaccagaagtcaagataggaggacccacaagaccacccctgcctctgcttctgcttcatattttcacacaatgtccagtgacgatgaagatgagaaagaagtccatagagatactgcacacattcaaaccaggccttatatttccatctcaagaagaacaaagggccaagagagaagaccatccctcgttactgcaaaaattgacaaagtttcttttgatgaagaatctccaccaaagctaagtcctgaggccaagccactgactaagcaacaaggatcagcttcctctttaagctatcttcccaaaactgagaaagtttctcacgatcaagaatctcatccaaagctaggtcttggggccaaaccactgattaagcaacaaggatcagcttcttctttaagctttcttccaaaaaccaacaaagcttctcccgatcaagattctcctccaaagctagttccaaaggaaaaaccagcagctaagcaacgaggatcagcttcttctttaagctttcttccaaaaactgacaaagcttctcccgatcaagattctcctccaaagctacttccaaaggaaaagccagcagctaagcaacaaggatcagcaacttcttcaagctctcttccaaaaactgaaaaaatctctcactatagagaatctccttcaaagctaactccagaggctaagtcaatggctaagcaagaaggattagcttcttcttcaagctcgcttcccaaaactgtgacatcacctgacccagaaactccggcaaaggagaaagctagccatgtacatcccaaactcccagattacgatgacatatttgccaagctcggggctcttcgtcgctga

SEQ ID NO: 80594 - protein, 1071 aa, Arabidopsis thaliana
  peptide (1)..(1071): Ceres Seq. ID no. 12656517
  misc_feature (1)..(122): Pfam Name: Eukaryotic protein of unknown function, DUF292 Pfam Description: Eukaryotic protein of unknown function, DUF292
  misc_feature (1)..(904): Homolog of NCBI NO: 15224833 NR Description: hypothetical protein; protein id: At2g19710.1
  misc_feature (985)..(1070): Homolog of NCBI NO: 15224833 NR Description: hypothetical protein; protein id: At2g19710.1
  misc_feature (1)..(904): Homolog of NCBI NO: 34222084 NR Description: At2g19710 [Arabidopsis thaliana]
  misc_feature (985)..(1070): Homolog of NCBI NO: 34222084 NR Description: At2g19710 [Arabidopsis thaliana]
  misc_feature (1)..(447): Homolog of NCBI NO: 34910388 NR Description: P0692C11.15 [Oryza sativa (japonica
  misc_feature (1)..(170): Homolog of NCBI NO: 40253290 NR Description: unknown protein [Oryza sativa (japonica
  misc_feature (185)..(331): Homolog of NCBI NO: 40253290 NR Description: unknown protein [Oryza sativa (japonica
  misc_feature (1)..(330): Homolog of NCBI NO: 15237108 NR Description: putative protein; protein id: At4g35730.1
  misc_feature (1)..(231): Homolog of NCBI NO: 18395668 NR Description: expressed protein; protein id: At1g25420.1, by cDNA: 7917., supported by cDNA: gi_20465253 [Arabidopsis
  misc_feature (1)..(231): Homolog of NCBI NO: 21595428 NR Description: unknown [Arabidopsis thaliana]
MAASRLKILKNKKDTQIKQLRRELAHLLESGQTQTAKIRVEHVVREEKTVAAYELVGIYCELLVARLGVIDSQKTCPNDLKEAVASVLYASQRLTDVGELSDIVKHFSAKYGKDFVSAAIGLQPDSGVSRLLVEKLSVKAPDGPTKIKILTEIATQHNVTWEAESLVESDPKETMSASGASSSVSQPATGIKSESSRIQNNQPPVFQAAATVNVSQNSYATDGRSSSRMTSTDFNVGKTPDHYHQDPKPSGDRVDGREHRDHNPGHGDTSPFETKFVDATSAARAAAESAERASFAARRAAELSSKERMMMMQNSTESRNSSSYENLRSNPPHSRTSSSNMQGGGFGKEELLKSNNRQVDQSTTTTRAESSKKTVDELSENTSWRRGHSRENSLEMRPNDSFAKIGREKQQPGMDDINLSSSADVLNKKQSSRASSHSPSSNFSDDNDVTALDHIDSPSIFEENKFQSTVGDRESYNDSPVVVVAPAFDDYSSFFDKPQFDTEDAYHDEPEQGLGFSLLGSSSKTSDHMPTEISSWSLEGHKDLGKLSSASTSQVLEKEKPSSPPTFDDGPTSPPASLHEPEPSAKFDDYDRDSESEEDNLGRLSGRAEGKSKLTAQKSHMSEGPDDLGRYFFPSDTEDQGDDSKTQEESDAETPTGLKFGPLASGLENETTLPSYGSSPPRDKTSSKSIKEYLPTEVDPSRSSSLQTASSSSIRNELYTQKASNSDKRPSSIPPDSSSSDDESDMELPKRVSFRYQEKRTESRTRPTHLHSGVSHKDLEEEIPTRASTRSQDRRTHKTTPASASASYFHTMSSDDEDEKEVHRDTAHIQTRPYISISRRTKGQERRPSLVTAKIDKVSFDEESPPKLSPEAKPLTKQQGSASSLSYLPKTEKVSHDQESHPKLGLGAKPLIKQQGSASSLSFLPKTNKASPDQDSPPKLVPKEKPAAKQRGSASSLSFLPKTDKASPDQDSPPKLLPKEKPAAKQQGSATSSSSLPKTEKISHYRESPSKLTPEAKSMAKQEGLASSSSSLPKTVTSPDPETPAKEKASHVHPKLPDYDDIFAKLGALRR

SEQ ID NO: 80595 - protein, 897 aa, Arabidopsis thaliana
  peptide (1)..(897): Ceres Seq. ID no. 12656518
  misc_feature (380)..(875): Pfam Name: AF-4 proto-oncoprotein Pfam Description: AF-4 proto-oncoprotein
  misc_feature (1)..(730): Homolog of NCBI NO: 15224833 NR Description: hypothetical protein; protein id: At2g19710.1
  misc_feature (811)..(896): Homolog of NCBI NO: 15224833 NR Description: hypothetical protein; protein id: At2g19710.1
  misc_feature (1)..(730): Homolog of NCBI NO: 34222084 NR Description: At2g19710 [Arabidopsis thaliana]
  misc_feature (811)..(896): Homolog of NCBI NO: 34222084 NR Description: At2g19710 [Arabidopsis thaliana]
  misc_feature (1)..(273): Homolog of NCBI NO: 34910388 NR Description: P0692C11.15 [Oryza sativa (japonica
  misc_feature (11)..(157): Homolog of NCBI NO: 40253290 NR Description: unknown protein [Oryza sativa (japonica
  misc_feature (1)..(156): Homolog of NCBI NO: 15237108 NR Description: putative protein; protein id: At4g35730.1
  misc_feature (1)..(57): Homolog of NCBI NO: 18395668 NR Description: expressed protein; protein id: At1g25420.1, by cDNA: 7917., supported by cDNA: gi_20465253 [Arabidopsis
  misc_feature (1)..(57): Homolog of NCBI NO: 21595428 NR Description: unknown [Arabidopsis thaliana]
  misc_feature (104)..(336): Homolog of NCBI NO: 33589706 NR Description: At1g34220 [Arabidopsis thaliana]
MSASGASSSVSQPATGIKSESSRIQNNQPPVFQAAATVNVSQNSYATDGRSSSRMTSTDFNVGKTPDHYHQDPKPSGDRVDGREHRDHNPGHGDTSPFETKFVDATSAARAAAESAERASFAARRAAELSSKERMMMMQNSTESRNSSSYENLRSNPPHSRTSSSNMQGGGFGKEELLKSNNRQVDQSTTTTRAESSKKTVDELSENTSWRRGHSRENSLEMRPNDSFAKIGREKQQPGMDDINLSSSADVLNKKQSSRASSHSPSSNFSDDNDVTALDHIDSPSIFEENKFQSTVGDRESYNDSPVVVVAPAFDDYSSFFDKPQFDTEDAYHDEPEQGLGFSLLGSSSKTSDHMPTEISSWSLEGHKDLGKLSSASTSQVLEKEKPSSPPTFDDGPTSPPASLHEPEPSAKFDDYDRDSESEEDNLGRLSGRAEGKSKLTAQKSHMSEGPDDLGRYFFPSDTEDQGDDSKTQEESDAETPTGLKFGPLASGLENETTLPSYGSSPPRDKTSSKSIKEYLPTEVDPSRSSSLQTASSSSIRNELYTQKASNSDKRPSSIPPDSSSSDDESDMELPKRVSFRYQEKRTESRTRPTHLHSGVSHKDLEEEIPTRASTRSQDRRTHKTTPASASASYFHTMSSDDEDEKEVHRDTAHIQTRPYISISRRTKGQERRPSLVTAKIDKVSFDEESPPKLSPEAKPLTKQQGSASSLSYLPKTEKVSHDQESHPKLGLGAKPLIKQQGSASSLSFLPKTNKASPDQDSPPKLVPKEKPAAKQRGSASSLSFLPKTDKASPDQDSPPKLLPKEKPAAKQQGSATSSSSLPKTEKISHYRESPSKLTPEAKSMAKQEGLASSSSSLPKTVTSPDPETPAKEKASHVHPKLPDYDDIFAKLGALRR

SEQ ID NO: 80596 - protein, 843 aa, Arabidopsis thaliana
  peptide (1)..(843): Ceres Seq. ID no. 12656519
  misc_feature (326)..(821): Pfam Name: AF-4 proto-oncoprotein Pfam Description: AF-4 proto-oncoprotein
  misc_feature (1)..(676): Homolog of NCBI NO: 15224833 NR Description: hypothetical protein; protein id: At2g19710.1
  misc_feature (757)..(842): Homolog of NCBI NO: 15224833 NR Description: hypothetical protein; protein id: At2g19710.1
  misc_feature (1)..(676): Homolog of NCBI NO: 34222084 NR Description: At2g19710 [Arabidopsis thaliana]
  misc_feature (757)..(842): Homolog of NCBI NO: 34222084 NR Description: At2g19710 [Arabidopsis thaliana]
  misc_feature (1)..(219): Homolog of NCBI NO: 34910388 NR Description: P0692C11.15 [Oryza sativa (japonica
  misc_feature (1)..(103): Homolog of NCBI NO: 40253290 NR Description: unknown protein [Oryza sativa (japonica
  misc_feature (1)..(102): Homolog of NCBI NO: 15237108 NR Description: putative protein; protein id: At4g35730.1
  misc_feature (50)..(282): Homolog of NCBI NO: 33589706 NR Description: At1g34220 [Arabidopsis thaliana]
  misc_feature (1)..(75): Homolog of NCBI NO: 34911298 NR Description: P0519D04.18 [Oryza sativa (japonica
  misc_feature (751)..(843): Homolog of NCBI NO: 15226014 NR Description: hypothetical protein; protein id: At2g14830.1
MTSTDFNVGKTPDHYHQDPKPSGDRVDGREHRDHNPGHGDTSPFETKFVDATSAARAAAESAERASFAARRAAELSSKERMMMMQNSTESRNSSSYENLRSNPPHSRTSSSNMQGGGFGKEELLKSNNRQVDQSTTTTRAESSKKTVDELSENTSWRRGHSRENSLEMRPNDSFAKIGREKQQPGMDDINLSSSADVLNKKQSSRASSHSPSSNFSDDNDVTALDHIDSPSIFEENKFQSTVGDRESYNDSPVVVVAPAFDDYSSFFDKPQFDTEDAYHDEPEQGLGFSLLGSSSKTSDHMPTEISSWSLEGHKDLGKLSSASTSQVLEKEKPSSPPTFDDGPTSPPASLHEPEPSAKFDDYDRDSESEEDNLGRLSGRAEGKSKLTAQKSHMSEGPDDLGRYFFPSDTEDQGDDSKTQEESDAETPTGLKFGPLASGLENETTLPSYGSSPPRDKTSSKSIKEYLPTEVDPSRSSSLQTASSSSIRNELYTQKASNSDKRPSSIPPDSSSSDDESDMELPKRVSFRYQEKRTESRTRPTHLHSGVSHKDLEEEIPTRASTRSQDRRTHKTTPASASASYFHTMSSDDEDEKEVHRDTAHIQTRPYISISRRTKGQERRPSLVTAKIDKVSFDEESPPKLSPEAKPLTKQQGSASSLSYLPKTEKVSHDQESHPKLGLGAKPLIKQQGSASSLSFLPKTNKASPDQDSPPKLVPKEKPAAKQRGSASSLSFLPKTDKASPDQDSPPKLLPKEKPAAKQQGSATSSSSLPKTEKISHYRESPSKLTPEAKSMAKQEGLASSSSSLPKTVTSPDPETPAKEKASHVHPKLPDYDDIFAKLGALRR

SEQ ID NO: 80597 - DNA, 2592 bp, Arabidopsis thaliana
  misc_feature (1)..(2592): Ceres Seq. ID no. 12656520
  misc_feature: MA Experiment ID: 20000352 Result: Down-regulated in Transcription
  misc_feature: MA Experiment 20000352 PARAMETER Experiment Name: At_Drought_Sub_P Parameter: Age (day) Value: 7
  misc_feature: MA Experiment 20000352 PARAMETER Experiment Name: At_Drought_Sub_P Parameter: Organism Value: A. thaliana
  misc_feature: MA Experiment 20000352 PARAMETER Experiment Name: At_Drought_Sub_P Parameter: Plant Line Value: WS
  misc_feature: MA Experiment 20000352 PARAMETER Experiment Name: At_Drought_Sub_P Parameter: Timepoint (hr) Value: 6
  misc_feature: MA Experiment 20000352 PARAMETER Experiment Name: At_Drought_Sub_P Parameter: Tissue Value: Whole Plant
  misc_feature: MA Experiment 20000352 PARAMETER Experiment Name: At_Drought_Sub_P Parameter: Treatment Value: Drought vs. No Drought
atgagggctaatctcgttttcggcatattttgtgcccttgttaccaccattttagttcacggccaagaccaatcaggttacatcagcatcgattgtggcatacctccttacgatacccctgaagacactatgactaacattaattacgtctccgatgaagctttcataaccaccggcgtaaacttcaaggtctctgaagaatacggctatccaaaaaacccggtattgctgtcaactcttgctgaagtaagagctttccctcaaggaaacagaaactgttacaccttaaaactttcacaaggaaaagatcatctttatctcattagagcttcctttatgtatggaaactacgatggtaaaaaagctttgcctgagtttgatctctatgtaaacgtgaacttctggtcgacagtgaaattcaaaaatgcttctgatcaagtcaccaaagagattttaagctttgcagagtcggatacaatatatgtttgccttgtgaataaaggcaaaggaactccttttatttcagggttagagctccgaccagtgaacagctcaatctacggtactgaatttggaagaaatgtctctttggttctctatcgaagatgggacattggatatttaaacggaacaggacggtaccaagacgatagattcgatcgtatttggtctccatactcctcaaatatctcctggaactcgattataacatcgggctatatcgatgtttttcagaacggttattgtccacctgatgaagttattaagacagctgctgctcctgaaaacgttgatgatccgttggaattgttctggacatcagacgatccaaatgttcggttctacgcatatctttacttcgcggaactcgaaacactagagaagaatgagactagaaagatcaagattttgtggaatggttcccctgtttctgaaacttctttcgaaccttcttcaaaatattcaacgacgttttctaatccaagagctttcactggtaaagatcactggatttctattcagaagactgtagattcaacgcttccaccgattctcaatgctatagagatttttaccgcacaatctctagatgaattttccaccacaattgaagacattcatgctatagaaagcataaaagcaacttataaagtgaacaaggtttggagtggtgatccttgctccccaagattattcccttgggaaggtgttggatgcagcgacaacaataataatcatcaaatcaagtccctgaatcttagctcaagcggattactaggaccaatagtcttggcatttagaaatctctctcttcttgagtcattggatttatccaacaatgacctgcaacaaaatgtgcctgagtttttggctgatctaaaacatttgaaagtcctgaatttgaaaggaaacaattttactgggtttatcccaaaatcccttatgaaaaagttaaaggccggtttacttacgctcagtgcggatgagcaaaacctttgtaactcatgtcaagaaaagaagaagaagaagagcatggtcgtgccaatagctgtagcagcatcagtgatcgttctcgttgtcgtcttggttatcatatggatcatactaaggcaaagaaaaaaaggagcctattcaggaccactcctgccttcagggaagagaaggttcacatataatgaggtctctagcataacaaacaacttcaataaagtgattggtaaaggagggtttggtattgtgtaccttggttcccttgaagatgggactaaaattgctgtaaagatgataaacgattcttcattggcaaaacctaaaggaacttcatcatcatcattatcccgggcttctaaccaattccaagtcgaggcagagcttcttttgacagtgcatcaccgtaacttagcttcatttgttggatactgcgatgatgatcgtagcatggctctcatctacgagtacatggccaacggcaacttgcaggcttatctttcaagtgagaatgcagaggatcttagttgggaaaagagactccatatagccatagattctgcacaaggtttggagtatttgcacgatggatgcagaccagcaatagtacatagagacgttaaaacagcaaacattctaataaacgataacttggaagccaagattgctgatttcggcctttctaaggtcttccctgaagacgatctcagccacgtcgtgactaccgtcatgggcactcccggctacgttgatcctgaatactacagaacatttgtgctgaacgagaagagcgacgtgtacagttttggggtcgttcttcttgaactcatcactggccagcgagccatcatcaaaacagaagaaggagacaatatcagcgttattcactacgtttggccgttctttgaggctagagaactagacggcgtcgtggacccgctgcttcggggagacttctcgcaggactcagcttggaagtttgtggatgtggcaatgtcttgcgtcagagataaaggatcgaatagaccaacgatgaaccagatcgtagcggagctgaaacagtgcctagctgctgagctggaccgtgagccacagagccagtga

SEQ ID NO: 80598 - protein, 863 aa, Arabidopsis thaliana
  peptide (1)..(863): Ceres Seq. ID no. 12656521
  misc_feature (18)..(852): Homolog of NCBI NO: 2129635 NR Description: serine/threonine-specific receptor protein kinase
  misc_feature (18)..(852): Homolog of NCBI NO: 15233796 NR Description: serine threonine-specific receptor protein kinase protein id: At4g29990.1 [Arabidopsis thaliana]
  misc_feature (5)..(853): Homolog of NCBI NO: 15224738 NR Description: putative receptor-like protein kinase; protein id:
  misc_feature (83)..(858): Homolog of NCBI NO: 15218050 NR Description: light repressible receptor protein kinase,
  misc_feature (11)..(138): Homolog of NCBI NO: 15218050 NR Description: light repressible receptor protein kinase,
  misc_feature (5)..(685): Homolog of NCBI NO: 25387099 NR Description: hypothetical protein [imported] - Arabidopsis >gi|4836918|gb|AAD30620.1|AC007153_12 Very Similar to light
  misc_feature (609)..(855): Homolog of NCBI NO: 25387099 NR Description: hypothetical protein [imported] - Arabidopsis >gi|4836918|gb|AAD30620.1|AC007153_12 Very Similar to light
  misc_feature (13)..(852): Homolog of NCBI NO: 15224743 NR Description: putative receptor-like protein kinase; protein id:
  misc_feature (11)..(858): Homolog of NCBI NO: 25387148 NR Description: probable protein kinase [imported] - Arabidopsis >gi|9802795|gb|AAF99864.1|AC015448_14 Putative protein kinase
  misc_feature (8)..(863): Homolog of NCBI NO: 15222042 NR Description: light repressible receptor protein kinase,
MRANLVFGIFCALVTTILVHGQDQSGYISIDCGIPPYDTPEDTMTNINYVSDEAFITTGVNFKVSEEYGYPKNPVLLSTLAEVRAFPQGNRNCYTLKLSQGKDHLYLIRASFMYGNYDGKKALPEFDLYVNVNFWSTVKFKNASDQVTKEILSFAESDTIYVCLVNKGKGTPFISGLELRPVNSSIYGTEFGRNVSLVLYRRWDIGYLNGTGRYQDDRFDRIWSPYSSNISWNSIITSGYIDVFQNGYCPPDEVIKTAAAPENVDDPLELFWTSDDPNVRFYAYLYFAELETLEKNETRKIKILWNGSPVSETSFEPSSKYSTTFSNPRAFTGKDHWISIQKTVDSTLPPILNAIEIFTAQSLDEFSTTIEDIHAIESIKATYKVNKVWSGDPCSPRLFPWEGVGCSDNNNNHQIKSLNLSSSGLLGPIVLAFRNLSLLESLDLSNNDLQQNVPEFLADLKHLKVLNLKGNNFTGFIPKSLMKKLKAGLLTLSADEQNLCNSCQEKKKKKSMVVPIAVAASVIVLVVVLVIIWIILRQRKKGAYSGPLLPSGKRRFTYNEVSSITNNFNKVIGKGGFGIVYLGSLEDGTKIAVKMINDSSLAKPKGTSSSSLSRASNQFQVEAELLLTVHHRNLASFVGYCDDDRSMALIYEYMANGNLQAYLSSENAEDLSWEKRLHIAIDSAQGLEYLHDGCRPAIVHRDVKTANILINDNLEAKIADFGLSKVFPEDDLSHVVTTVMGTPGYVDPEYYRTFVLNEKSDVYSFGVVLLELITGQRAIIKTEEGDNISVIHYVWPFFEARELDGVVDPLLRGDFSQDSAWKFVDVAMSCVRDKGSNRPTMNQIVAELKQCLAAELDREPQSQ

SEQ ID NO: 80599 - protein, 820 aa, Arabidopsis thaliana
  peptide (1)..(820): Ceres Seq. ID no. 12656522
  misc_feature (1)..(809): Homolog of NCBI NO: 2129635 NR Description: serine/threonine-specific receptor protein kinase
  misc_feature (1)..(809): Homolog of NCBI NO: 15233796 NR Description: serine threonine-specific receptor protein kinase protein id: At4g29990.1 [Arabidopsis thaliana]
  misc_feature (1)..(810): Homolog of NCBI NO: 15224738 NR Description: putative receptor-like protein kinase; protein id:
  misc_feature (40)..(815): Homolog of NCBI NO: 15218050 NR Description: light repressible receptor protein kinase,
  misc_feature (1)..(95): Homolog of NCBI NO: 15218050 NR Description: light repressible receptor protein kinase,
  misc_feature (1)..(642): Homolog of NCBI NO: 25387099 NR Description: hypothetical protein [imported] - Arabidopsis >gi|4836918|gb|AAD30620.1|AC007153_12 Very Similar to light
  misc_feature (566)..(812): Homolog of NCBI NO: 25387099 NR Description: hypothetical protein [imported] - Arabidopsis >gi|4836918|gb|AAD30620.1|AC007153_12 Very Similar to light
  misc_feature (1)..(809): Homolog of NCBI NO: 15224743 NR Description: putative receptor-like protein kinase; protein id:
  misc_feature (1)..(815): Homolog of NCBI NO: 25387148 NR Description: probable protein kinase [imported] - Arabidopsis >gi|9802795|gb|AAF99864.1|AC015448_14 Putative protein kinase
  misc_feature (1)..(820): Homolog of NCBI NO: 15222042 NR Description: light repressible receptor protein kinase,
MTNINYVSDEAFITTGVNFKVSEEYGYPKNPVLLSTLAEVRAFPQGNRNCYTLKLSQGKDHLYLIRASFMYGNYDGKKALPEFDLYVNVNFWSTVKFKNASDQVTKEILSFAESDTIYVCLVNKGKGTPFISGLELRPVNSSIYGTEFGRNVSLVLYRRWDIGYLNGTGRYQDDRFDRIWSPYSSNISWNSIITSGYIDVFQNGYCPPDEVIKTAAAPENVDDPLELFWTSDDPNVRFYAYLYFAELETLEKNETRKIKILWNGSPVSETSFEPSSKYSTTFSNPRAFTGKDHWISIQKTVDSTLPPILNAIEIFTAQSLDEFSTTIEDIHAIESIKATYKVNKVWSGDPCSPRLFPWEGVGCSDNNNNHQIKSLNLSSSGLLGPIVLAFRNLSLLESLDLSNNDLQQNVPEFLADLKHLKVLNLKGNNFTGFIPKSLMKKLKAGLLTLSADEQNLCNSCQEKKKKKSMVVPIAVAASVIVLVVVLVIIWIILRQRKKGAYSGPLLPSGKRRFTYNEVSSITNNFNKVIGKGGFGIVYLGSLEDGTKIAVKMINDSSLAKPKGTSSSSLSRASNQFQVEAELLLTVHHRNLASFVGYCDDDRSMALIYEYMANGNLQAYLSSENAEDLSWEKRLHIAIDSAQGLEYLHDGCRPAIVHRDVKTANILINDNLEAKIADFGLSKVFPEDDLSHVVTTVMGTPGYVDPEYYRTFVLNEKSDVYSFGVVLLELITGQRAIIKTEEGDNISVIHYVWPFFEARELDGVVDPLLRGDFSQDSAWKFVDVAMSCVRDKGSNRPTMNQIVAELKQCLAAELDREPQSQ

SEQ ID NO: 80600 - protein, 751 aa, Arabidopsis thaliana
  peptide (1)..(751): Ceres Seq. ID no. 12656523
  misc_feature (1)..(740): Homolog of NCBI NO: 2129635 NR Description: serine/threonine-specific receptor protein kinase
  misc_feature (1)..(740): Homolog of NCBI NO: 15233796 NR Description: serine threonine-specific receptor protein kinase protein id: At4g29990.1 [Arabidopsis thaliana]
  misc_feature (1)..(741): Homolog of NCBI NO: 15224738 NR Description: putative receptor-like protein kinase; protein id:
  misc_feature (1)..(746): Homolog of NCBI NO: 15218050 NR Description: light repressible receptor protein kinase,
  misc_feature (1)..(26): Homolog of NCBI NO: 15218050 NR Description: light repressible receptor protein kinase,
  misc_feature (1)..(573): Homolog of NCBI NO: 25387099 NR Description: hypothetical protein [imported] - Arabidopsis >gi|4836918|gb|AAD30620.1|AC007153_12 Very Similar to light
  misc_feature (497)..(743): Homolog of NCBI NO: 25387099 NR Description: hypothetical protein [imported] - Arabidopsis >gi|4836918|gb|AAD30620.1|AC007153_12 Very Similar to light
  misc_feature (1)..(740): Homolog of NCBI NO: 15224743 NR Description: putative receptor-like protein kinase; protein id:
  misc_feature (1)..(746): Homolog of NCBI NO: 25387148 NR Description: probable protein kinase [imported] - Arabidopsis >gi|9802795|gb|AAF99864.1|AC015448_14 Putative protein kinase
  misc_feature (1)..(751): Homolog of NCBI NO: 15222042 NR Description: light repressible receptor protein kinase,
MYGNYDGKKALPEFDLYVNVNFWSTVKFKNASDQVTKEILSFAESDTIYVCLVNKGKGTPFISGLELRPVNSSIYGTEFGRNVSLVLYRRWDIGYLNGTGRYQDDRFDRIWSPYSSNISWNSIITSGYIDVFQNGYCPPDEVIKTAAAPENVDDPLELFWTSDDPNVRFYAYLYFAELETLEKNETRKIKILWNGSPVSETSFEPSSKYSTTFSNPRAFTGKDHWISIQKTVDSTLPPILNAIEIFTAQSLDEFSTTIEDIHAIESIKATYKVNKVWSGDPCSPRLFPWEGVGCSDNNNNHQIKSLNLSSSGLLGPIVLAFRNLSLLESLDLSNNDLQQNVPEFLADLKHLKVLNLKGNNFTGFIPKSLMKKLKAGLLTLSADEQNLCNSCQEKKKKKSMVVPIAVAASVIVLVVVLVIIWIILRQRKKGAYSGPLLPSGKRRFTYNEVSSITNNFNKVIGKGGFGIVYLGSLEDGTKIAVKMINDSSLAKPKGTSSSSLSRASNQFQVEAELLLTVHHRNLASFVGYCDDDRSMALIYEYMANGNLQAYLSSENAEDLSWEKRLHIAIDSAQGLEYLHDGCRPAIVHRDVKTANILINDNLEAKIADFGLSKVFPEDDLSHVVTTVMGTPGYVDPEYYRTFVLNEKSDVYSFGVVLLELITGQRAIIKTEEGDNISVIHYVWPFFEARELDGVVDPLLRGDFSQDSAWKFVDVAMSCVRDKGSNRPTMNQIVAELKQCLAAELDREPQSQ

SEQ ID NO: 80601 - DNA, 1173 bp, Arabidopsis thaliana
  misc_feature (1)..(1173): Ceres Seq. ID no. 12656532
  misc_feature: MA Experiment ID: 108433 Result: Down-regulated in Transcription
  misc_feature: MA Experiment 108433 PARAMETER Experiment Name: At_rhl_Mutant2_cDNA_P Parameter: Age (day) Value: 7
  misc_feature: MA Experiment 108433 PARAMETER Experiment Name: At_rhl_Mutant2_cDNA_P Parameter: Organism Value: A. thaliana
  misc_feature: MA Experiment 108433 PARAMETER Experiment Name: At_rhl_Mutant2_cDNA_P Parameter: Plant Line Value: rhl Mutant vs. wt landsburg
  misc_feature: MA Experiment 108433 PARAMETER Experiment Name: At_rhl_Mutant2_cDNA_P Parameter: Tissue Value: Roots
  misc_feature: MA Experiment ID: 108434 Result: Up-regulated in Transcription
  misc_feature: MA Experiment 108434 PARAMETER Experiment Name: At_Root_Tips_cDNA_P Parameter: Tissue Value: Root Tips
  misc_feature: MA Experiment ID: 108461 Result: Down-regulated in Transcription
  misc_feature: MA Experiment 108461 PARAMETER Experiment Name: At_Germinating_Seeds_cDNA_P Parameter: Age (day) Value: 1 vs. 0
  misc_feature: MA Experiment 108461 PARAMETER Experiment Name: At_Germinating_Seeds_cDNA_P Parameter: Tissue Value: Germinating Seeds
  misc_feature: MA Experiment ID: 108462 Result: Down-regulated in Transcription
  misc_feature: MA Experiment 108462 PARAMETER Experiment Name: At_Germinating_Seeds_cDNA_P Parameter: Age (day) Value: 2 vs. 0
  misc_feature: MA Experiment 108462 PARAMETER Experiment Name: At_Germinating_Seeds_cDNA_P Parameter: Tissue Value: Germinating Seeds
  misc_feature: MA Experiment ID: 108463 Result: Down-regulated in Transcription
  misc_feature: MA Experiment 108463 PARAMETER Experiment Name: At_Germinating_Seeds_cDNA_P Parameter: Age (day) Value: 3 vs. 0
  misc_feature: MA Experiment 108463 PARAMETER Experiment Name: At_Germinating_Seeds_cDNA_P Parameter: Tissue Value: Germinating Seeds
  misc_feature: MA Experiment ID: 108464 Result: Down-regulated in Transcription
  misc_feature: MA Experiment 108464 PARAMETER Experiment Name: At_Germinating_Seeds_cDNA_P Parameter: Age (day) Value: 4 vs. 0
  misc_feature: MA Experiment 108464 PARAMETER Experiment Name: At_Germinating_Seeds_cDNA_P Parameter: Tissue Value: Germinating Seeds
  misc_feature: MA Experiment ID: 108572 Result: Down-regulated in Transcription
  misc_feature: MA Experiment 108572 PARAMETER Experiment Name: At_Drought_cDNA_P Parameter: Timepoint (hr) Value: 1
  misc_feature: MA Experiment 108572 PARAMETER Experiment Name: At_Drought_cDNA_P Parameter: Tissue Value: Aerial
  misc_feature: MA Experiment 108572 PARAMETER Experiment Name: At_Drought_cDNA_P Parameter: Treatment Value: Drought vs. No Drought
  misc_feature: MA Experiment ID: 108576 Result: Down-regulated in Transcription
  misc_feature: MA Experiment 108576 PARAMETER Experiment Name: At_42deg_Heat_cDNA_P Parameter: Temperature (deg C) Value: 42 vs. 22
  misc_feature: MA Experiment 108576 PARAMETER Experiment Name: At_42deg_Heat_cDNA_P Parameter: Timepoint (hr) Value: 1
  misc_feature: MA Experiment 108576 PARAMETER Experiment Name: At_42deg_Heat_cDNA_P Parameter: Tissue Value: Aerial
  misc_feature: MA Experiment ID: 108579 Result: Up-regulated in Transcription
  misc_feature: MA Experiment 108579 PARAMETER Experiment Name: At_4deg_Cold_cDNA_P Parameter: Temperature (deg C) Value: 4 vs. 22
  misc_feature: MA Experiment 108579 PARAMETER Experiment Name: At_4deg_Cold_cDNA_P Parameter: Timepoint (hr) Value: 6
  misc_feature: MA Experiment 108579 PARAMETER Experiment Name: At_4deg_Cold_cDNA_P Parameter: Tissue Value: Aerial
  misc_feature: MA Experiment ID: 108595 Result: Down-regulated in Transcription
  misc_feature: MA Experiment 108595 PARAMETER Experiment Name: At_Ler-pi_Ovule_cDNA_P Parameter: Plant Line Value: null
  misc_feature: MA Experiment ID: 20000307 Result: Down-regulated in Transcription
  misc_feature: MA Experiment 20000307 PARAMETER Experiment Name: At_Germinating_Seeds_Sub_P Parameter: Age (hr) Value: 24 vs. 0
  misc_feature: MA Experiment 20000307 PARAMETER Experiment Name: At_Germinating_Seeds_Sub_P Parameter: Organism Value: A. thaliana
  misc_feature: MA Experiment 20000307 PARAMETER Experiment Name: At_Germinating_Seeds_Sub_P Parameter: Plant Line Value: WS
  misc_feature: MA Experiment 20000307 PARAMETER Experiment Name: At_Germinating_Seeds_Sub_P Parameter: Tissue Value: Germinating Seeds
  misc_feature: MA Experiment ID: 20000329 Result: Up-regulated in Transcription
  misc_feature: MA Experiment 20000329 PARAMETER Experiment Name: At_4deg_Cold_Sub_P Parameter: Age (day) Value: 14
  misc_feature: MA Experiment 20000329 PARAMETER Experiment Name: At_4deg_Cold_Sub_P Parameter: Organism Value: A. thaliana
  misc_feature: MA Experiment 20000329 PARAMETER Experiment Name: At_4deg_Cold_Sub_P Parameter: Plant Line Value: WS
  misc_feature: MA Experiment 20000329 PARAMETER Experiment Name: At_4deg_Cold_Sub_P Parameter: Temperature (deg C) Value: 4 vs. 22
  misc_feature: MA Experiment 20000329 PARAMETER Experiment Name: At_4deg_Cold_Sub_P Parameter: Timepoint (hr) Value: 6
  misc_feature: MA Experiment 20000329 PARAMETER Experiment Name: At_4deg_Cold_Sub_P Parameter: Tissue Value: Aerial
  misc_feature: MA Experiment ID: 20000355 Result: Up-regulated in Transcription
  misc_feature: MA Experiment 20000355 PARAMETER Experiment Name: At_Siliques_Sub_P Parameter: Age (day) Value: 21
  misc_feature: MA Experiment 20000355 PARAMETER Experiment Name: At_Siliques_Sub_P Parameter: Organism Value: A. thaliana
  misc_feature: MA Experiment 20000355 PARAMETER Experiment Name: At_Siliques_Sub_P Parameter: Plant Line Value: WS
  misc_feature: MA Experiment 20000355 PARAMETER Experiment Name: At_Siliques_Sub_P Parameter: Tissue Value: Less Than 5mm Siliques vs. Whole Plant
  misc_feature: MA Experiment ID: 20000440 Result: Up-regulated in Transcription
  misc_feature: MA Experiment 20000440 PARAMETER Experiment Name: At_Closed-Flower__Sub_P Parameter: Tissue Value: Closed Flower vs. Whole Plant
  misc_feature: MA Experiment ID: 20001807 Result: Up-regulated in Transcription
  misc_feature: MA Experiment 20001807 PARAMETER Experiment Name: At_50mM_NH4NO3_L-to-H_Sub_P Parameter: Timepoint (hr) Value: 6
  misc_feature: MA Experiment 20001807 PARAMETER Experiment Name: At_50mM_NH4NO3_L-to-H_Sub_P Parameter: Tissue Value: Leaf
  misc_feature: MA Experiment 20001807 PARAMETER Experiment Name: At_50mM_NH4NO3_L-to-H_Sub_P Parameter: Treatment Value: 50mM NH4NO3 vs 100mM Mannitol
atgactaagaacagtaaccacgacgagaatgagttcatcagctttgaaccaaatcagaacacgaagatacgctttgaagatgctgatgaagacgaagttgctgaagggtctggtgttgccggcgaggaaactccccaagatgagtccatgttcgacgccggagagagcgccgacaccgctgaagtaactgatgataccaccagtgccgattactacttcgattcttactctcactttggaatccatgaagagatgttgaaggatgttgtgagaacaaagacttatcagaatgttatttatcagaacaagtttcttatcaaggacaaaattgttcttgatgttggagctggaaccggaattttgtctctgttctgtgccaaggcaggagctgctcatgtctacgctgttgagtgttctcaaatggctgacatggcaaaggagattgttaaagctaatggattttctgatgttattacggtattgaaagggaagattgaggagatagagcttcccactcctaaagtggatgtgattatatcggaatggatgggttactttttgttgtttgaaaatatgttggacagtgtcttgtatgctcgtgataaatggcttgttgaaggtggagttgtgctaccagacaaagcctctctgcatcttacagccatagaggattcagagtacaaagaagacaaaatcgaattttggaacagtgtgtatggttttgacatgtcatgtattaagaaaaaagctatgatggaaccacttgttgacacagtcgaccaaaaccaaatcgtcaccgatagtaggcttctaaagacgatggatatctcaaagatgtcctctggtgatgcttccttcacagctccctttaagcttgttgcacaacgcaatgactacatccacgcccttgtagcctactttgatgtatcgtttaccatgtgccacaagctgctgggcttctcaacaggaccgaaatcccgagctacacactggaaacaaacagttctgtatctagaagatgtgttaaccatatgtgagggtgagacaatcactggaactatgtccgtttctcctaacaagaagaatcctcgagacattgacataaagctaagctattctttgaatggccagcattgcaagatctcaaggacccaacactacaaaatgcgttaa

SEQ ID NO: 80602 - protein, 390 aa, Arabidopsis thaliana
  peptide (1)..(390): Ceres Seq. ID no. 12656533
  misc_feature (107)..(180): Pfam Name: Met-10+ like-protein Pfam Description: Met-10+ like-protein
  misc_feature (1)..(390): Homolog of NCBI NO: 15233606 NR Description: arginine methyltransferase (pam1); protein id: supported by cDNA: 38601., supported by cDNA: gi_17381027
  misc_feature (1)..(390): Homolog of NCBI NO: 17381028 NR Description: putative arginine methyltransferase pam1
  misc_feature (1)..(376): Homolog of NCBI NO: 25456391 NR Description: protein-arginine N-methyltransferase (EC 2.1.1.23)
  misc_feature (47)..(390): Homolog of NCBI NO: 15224820 NR Description: putative arginine N-methyltransferase; protein id:
  misc_feature (52)..(390): Homolog of NCBI NO: 28207757 NR Description: CR061 protein [Chlamydomonas reinhardtii]
  misc_feature (43)..(390): Homolog of NCBI NO: 7453575 NR Description: protein arginine N-methyltransferase 1-variant 2
  misc_feature (54)..(390): Homolog of NCBI NO: 34785428 NR Description: Unknown (protein for MGC:66201) [Danio rerio]
  misc_feature (47)..(390): Homolog of NCBI NO: 27882547 NR Description: Similar to heterogeneous nuclear
  misc_feature (43)..(390): Homolog of NCBI NO: 9790109 NR Description: heterogeneous nuclear ribonucleoproteins
  misc_feature (55)..(390): Homolog of NCBI NO: 7453576 NR Description: protein arginine N-methyltransferase 1-variant 3
MTKNSNHDENEFISFEPNQNTKIRFEDADEDEVAEGSGVAGEETPQDESMFDAGESADTAEVTDDTTSADYYFDSYSHFGIHEEMLKDVVRTKTYQNVIYQNKFLIKDKIVLDVGAGTGILSLFCAKAGAAHVYAVECSQMADMAKEIVKANGFSDVITVLKGKIEEIELPTPKVDVIISEWMGYFLLFENMLDSVLYARDKWLVEGGVVLPDKASLHLTAIEDSEYKEDKIEFWNSVYGFDMSCIKKKAMMEPLVDTVDQNQIVTDSRLLKTMDISKMSSGDASFTAPFKLVAQRNDYIHALVAYFDVSFTMCHKLLGFSTGPKSRATHWKQTVLYLEDVLTICEGETITGTMSVSPNKKNPRDIDIKLSYSLNGQHCKISRTQHYKMR

SEQ ID NO: 80603 - protein, 341 aa, Arabidopsis thaliana
  peptide (1)..(341): Ceres Seq. ID no. 12656534
  misc_feature (58)..(131): Pfam Name: Met-10+ like-protein Pfam Description: Met-10+ like-protein
  misc_feature (1)..(341): Homolog of NCBI NO: 15233606 NR Description: arginine methyltransferase (pam1); protein id: supported by cDNA: 38601., supported by cDNA: gi_17381027
  misc_feature (1)..(341): Homolog of NCBI NO: 17381028 NR Description: putative arginine methyltransferase pam1
  misc_feature (1)..(327): Homolog of NCBI NO: 25456391 NR Description: protein-arginine N-methyltransferase (EC 2.1.1.23)
  misc_feature (1)..(341): Homolog of NCBI NO: 15224820 NR Description: putative arginine N-methyltransferase; protein id:
  misc_feature (3)..(341): Homolog of NCBI NO: 28207757 NR Description: CR061 protein [Chlamydomonas reinhardtii]
  misc_feature (1)..(341): Homolog of NCBI NO: 7453575 NR Description: protein arginine N-methyltransferase 1-variant 2
  misc_feature (5)..(341): Homolog of NCBI NO: 34785428 NR Description: Unknown (protein for MGC:66201) [Danio rerio]
  misc_feature (1)..(341): Homolog of NCBI NO: 27882547 NR Description: Similar to heterogeneous nuclear
  misc_feature (1)..(341): Homolog of NCBI NO: 9790109 NR Description: heterogeneous nuclear ribonucleoproteins
  misc_feature (6)..(341): Homolog of NCBI NO: 7453576 NR Description: protein arginine N-methyltransferase 1-variant 3
MFDAGESADTAEVTDDTTSADYYFDSYSHFGIHEEMLKDVVRTKTYQNVIYQNKFLIKDKIVLDVGAGTGILSLFCAKAGAAHVYAVECSQMADMAKEIVKANGFSDVITVLKGKIEEIELPTPKVDVIISEWMGYFLLFENMLDSVLYARDKWLVEGGVVLPDKASLHLTAIEDSEYKEDKIEFWNSVYGFDMSCIKKKAMMEPLVDTVDQNQIVTDSRLLKTMDISKMSSGDASFTAPFKLVAQRNDYIHALVAYFDVSFTMCHKLLGFSTGPKSRATHWKQTVLYLEDVLTICEGETITGTMSVSPNKKNPRDIDIKLSYSLNGQHCKISRTQHYKMR

SEQ ID NO: 80604 - protein, 306 aa, Arabidopsis thaliana
  peptide (1)..(306): Ceres Seq. ID no. 12656535
  misc_feature (23)..(96): Pfam Name: Met-10+ like-protein Pfam Description: Met-10+ like-protein
  misc_feature (1)..(306): Homolog of NCBI NO: 15233606 NR Description: arginine methyltransferase (pam1); protein id: supported by cDNA: 38601., supported by cDNA: gi_17381027
  misc_feature (1)..(306): Homolog of NCBI NO: 17381028 NR Description: putative arginine methyltransferase pam1
  misc_feature (1)..(292): Homolog of NCBI NO: 25456391 NR Description: protein-arginine N-methyltransferase (EC 2.1.1.23)
  misc_feature (1)..(306): Homolog of NCBI NO: 15224820 NR Description: putative arginine N-methyltransferase; protein id:
  misc_feature (1)..(306): Homolog of NCBI NO: 28207757 NR Description: CR061 protein [Chlamydomonas reinhardtii]
  misc_feature (1)..(306): Homolog of NCBI NO: 7453575 NR Description: protein arginine N-methyltransferase 1-variant 2
  misc_feature (1)..(306): Homolog of NCBI NO: 34785428 NR Description: Unknown (protein for MGC:66201) [Danio rerio]
  misc_feature (1)..(306): Homolog of NCBI NO: 27882547 NR Description: Similar to heterogeneous nuclear
  misc_feature (1)..(306): Homolog of NCBI NO: 9790109 NR Description: heterogeneous nuclear ribonucleoproteins
  misc_feature (1)..(306): Homolog of NCBI NO: 7453576 NR Description: protein arginine N-methyltransferase 1-variant 3
MLKDVVRTKTYQNVIYQNKFLIKDKIVLDVGAGTGILSLFCAKAGAAHVYAVECSQMADMAKEIVKANGFSDVITVLKGKIEEIELPTPKVDVIISEWMGYFLLFENMLDSVLYARDKWLVEGGVVLPDKASLHLTAIEDSEYKEDKIEFWNSVYGFDMSCIKKKAMMEPLVDTVDQNQIVTDSRLLKTMDISKMSSGDASFTAPFKLVAQRNDYIHALVAYFDVSFTMCHKLLGFSTGPKSRATHWKQTVLYLEDVLTICEGETITGTMSVSPNKKNPRDIDIKLSYSLNGQHCKISRTQHYKMR

SEQ ID NO: 80605 - DNA, 1799 bp, Arabidopsis thaliana
  misc_feature (1)..(1799): Ceres Seq. ID no. 12656575
  misc_feature: MA Experiment ID: 20000180 Result: Up-regulated in Transcription
  misc_feature: MA Experiment 20000180 PARAMETER Experiment Name: At_Germinating_Seeds_P Parameter: Age (hr) Value: 24 vs. 0
  misc_feature: MA Experiment 20000180 PARAMETER Experiment Name: At_Germinating_Seeds_P Parameter: Tissue Value: Germinating Seeds
  misc_feature: MA Experiment ID: 20000185 Result: Up-regulated in Transcription
  misc_feature: MA Experiment 20000185 PARAMETER Experiment Name: At_Roots__P Parameter: Age (day) Value: 7 vs. 21
  misc_feature: MA Experiment 20000185 PARAMETER Experiment Name: At_Roots__P Parameter: Organism Value: A. thaliana
  misc_feature: MA Experiment 20000185 PARAMETER Experiment Name: At_Roots__P Parameter: Tissue Value: Roots vs. Whole Plant
  misc_feature: MA Experiment ID: 20000234 Result: Up-regulated in Transcription
  misc_feature: MA Experiment 20000234 PARAMETER Experiment Name: At_Siliques_P Parameter: Age (day) Value: 21
  misc_feature: MA Experiment 20000234 PARAMETER Experiment Name: At_Siliques_P Parameter: Organism Value: A. thaliana
  misc_feature: MA Experiment 20000234 PARAMETER Experiment Name: At_Siliques_P Parameter: Plant Line Value: WS
  misc_feature: MA Experiment 20000234 PARAMETER Experiment Name: At_Siliques_P Parameter: Tissue Value: Less Than 5mm Siliques vs. Whole Plant
  misc_feature: MA Experiment ID: 20000264 Result: Up-regulated in Transcription
  misc_feature: MA Experiment 20000264 PARAMETER Experiment Name: At_Open_Flower_P Parameter: Age (day) Value: 21
  misc_feature: MA Experiment 20000264 PARAMETER Experiment Name: At_Open_Flower_P Parameter: Plant Line Value: WS
  misc_feature: MA Experiment 20000264 PARAMETER Experiment Name: At_Open_Flower_P Parameter: Tissue Value: Open Flower vs. Whole Plant
atcatcaaccaattgggtttaaatcagaagagaagcaatgatctccggcgacacattatcagctaaaaaacctaaatcagttccacaagaagaagaccaagacccaccaagccaatcaatcgcacttctcgacaatcacacagattcctccggttctgattcttccactagaagcatctcaagctgcttcatcttcacatctctacttctcgtcacctgcatcgctctatccgccgcttcagctttcgccttcctcttcttctcttctcaaaaacctgtcctttccttaaaccaaatctcaaagtcaccagctttcgacagatccgtagctcgtccgctcaagaaactcgacaagcctgttgttcttttgatttcatcagatgggtttcgtttcgggtaccagttcaagaccaaactaccgagcatccacagattaatagccaacggaaccgaagctgagactggtctaatccctgtttttccgacactaactttccctaaccattactctatcgtcacaggtctatacccagcttatcatggaatcatcaataaccactttgttgatccagaaacagggaacgttttcacaatggctagtcatgaaccagagtggtggttaggtgagcctttgtgggagacagttgtgaaccaaggacttaaggctgctacttacttctggcctggctctgaggtacacaaaggctcttggaattgtcctcaaggtttatgtcaaaactacaatggctctgttccttttgatgatagggttgatactattttgagctatttcgatttgcctagtaacgaaatcccgagttttatgacgctttactttgaagatcctgatcatcaaggtcaccaagttggccctgatgatcctcagatcacagaagctgtagttaacattgatcggttaataggaagattaattgatgggttagaaaaacgagggatttttgaggatgtgactatgattatggttggtgatcatggaatggttggaacttgcgataaaaaattggtggttttagatgatttagctccttggatcaaaatccctagcagttgggtacagtactacactccgttgctagcgattcaacccccttcagggcacgatgcagcggatatagtggctaagataaacgaaggtttgagctcgggtaaagtagagaatgggaagtacttgaaggtttatctcaaagaggatttacctagcaggctgcattatgtagacagtgaccgcatcccgcctattataggactagtcgatgagggcttcaaggtggagcagaagaaaagtaaagccaaggaatgcggtggagctcacgggtatgacaatgccttcttttcgatgagaactatattcatcgggcatggtcctatgttctcaaaaggaaggaaagtgccttcttttgagaatgttcagatatacaatgtgatcagttcgattctaggacttaaggcagcaccaaacaatggatctgatgagttttcttcaagcattctcttgccacgcgtgtagaagagtagggtaagtttattcttctgtcaataaaaggcagtctagactcttgagactttgttgtcaaaacataaacgcgtttgacctcttagacgttttatgcgttttgatctgattgctgtttttgtatgatttcatcacgaagttgcactaaaacgtattgtagtatttcggagtatgaaacttgtcttgacatttgatgccaagattggaagctttgtactttccttcaaagaaacaatgctttgaattggatactcgattctttgcc

SEQ ID NO: 80606 - protein, 496 aa, Arabidopsis thaliana
  peptide (1)..(496): Ceres Seq. ID no. 12656576
  misc_feature (1)..(496): Homolog of NCBI NO: 15233659 NR Description: nucleotide pyrophosphatase - like protein; id: At4g29680.1, supported by cDNA: gi_13877570 [Arabidopsis >gi|7487979|pir||T09931 probable phosphodiesterase I (EC 3.1.4.1)
  misc_feature (24)..(494): Homolog of NCBI NO: 12081942 NR Description: nucleotide pyrophosphatase-like protein [Spinacia
  misc_feature (7)..(494): Homolog of NCBI NO: 34903578 NR Description: nucleotide pyrophosphatase homolog [Oryza sativa
  misc_feature (88)..(494): Homolog of NCBI NO: 15233662 NR Description: nucleotide pyrophosphatase - like protein; id: At4g29690.1 [Arabidopsis thaliana] >gi|7487980|pir||T09932 phosphodiesterase I (EC 3.1.4.1) / nucleotide diphosphatase (EC
  misc_feature (88)..(494): Homolog of NCBI NO: 27808612 NR Description: At4g29690 [Arabidopsis thaliana]
  misc_feature (100)..(494): Homolog of NCBI NO: 15233665 NR Description: nucleotide pyrophosphatase -like protein; protein At4g29700.1, supported by cDNA: gi_13430713 [Arabidopsis >gi|7487981|pir||T09933 probable phosphodiesterase I (EC 3.1.4.1)
  misc_feature (263)..(496): Homolog of NCBI NO: 13877571 NR Description: nucleotide pyrophosphatase-like protein
  misc_feature (105)..(484): Homolog of NCBI NO: 4826896 NR Description: ectonucleotide pyrophosphatase/phosphodiesterase
  misc_feature (103)..(484): Homolog of NCBI NO: 91182 NR Description: nucleotide diphosphatase (EC 3.6.1.9) - mouse
  misc_feature (103)..(484): Homolog of NCBI NO: 12597623 NR Description: ectonucleotide pyrophosphatase/phosphodiesterase phosphodiesterase I/nucleotide pyrophosphatase 1; 1 pyrophosphatase/phosphodiesterase 1; tiptoe walking; expressed
MISGDTLSAKKPKSVPQEEDQDPPSQSIALLDNHTDSSGSDSSTRSISSCFIFTSLLLVTCIALSAASAFAFLFFSSQKPVLSLNQISKSPAFDRSVARPLKKLDKPVVLLISSDGFRFGYQFKTKLPSIHRLIANGTEAETGLIPVFPTLTFPNHYSIVTGLYPAYHGIINNHFVDPETGNVFTMASHEPEWWLGEPLWETVVNQGLKAATYFWPGSEVHKGSWNCPQGLCQNYNGSVPFDDRVDTILSYFDLPSNEIPSFMTLYFEDPDHQGHQVGPDDPQITEAVVNIDRLIGRLIDGLEKRGIFEDVTMIMVGDHGMVGTCDKKLVVLDDLAPWIKIPSSWVQYYTPLLAIQPPSGHDAADIVAKINEGLSSGKVENGKYLKVYLKEDLPSRLHYVDSDRIPPIIGLVDEGFKVEQKKSKAKECGGAHGYDNAFFSMRTIFIGHGPMFSKGRKVPSFENVQIYNVISSILGLKAAPNNGSDEFSSSILLPRV

SEQ ID NO: 80607 - protein, 311 aa, Arabidopsis thaliana
  peptide (1)..(311): Ceres Seq. ID no. 12656577
  misc_feature (1)..(311): Homolog of NCBI NO: 15233659 NR Description: nucleotide pyrophosphatase - like protein; id: At4g29680.1, supported by cDNA: gi_13877570 [Arabidopsis >gi|7487979|pir||T09931 probable phosphodiesterase I (EC 3.1.4.1)
  misc_feature (1)..(309): Homolog of NCBI NO: 12081942 NR Description: nucleotide pyrophosphatase-like protein [Spinacia
  misc_feature (1)..(309): Homolog of NCBI NO: 34903578 NR Description: nucleotide pyrophosphatase homolog [Oryza sativa
  misc_feature (1)..(309): Homolog of NCBI NO: 15233662 NR Description: nucleotide pyrophosphatase - like protein; id: At4g29690.1 [Arabidopsis thaliana] >gi|7487980|pir||T09932 phosphodiesterase I (EC 3.1.4.1) / nucleotide diphosphatase (EC
  misc_feature (1)..(309): Homolog of NCBI NO: 27808612 NR Description: At4g29690 [Arabidopsis thaliana]
  misc_feature (1)..(309): Homolog of NCBI NO: 15233665 NR Description: nucleotide pyrophosphatase -like protein; protein At4g29700.1, supported by cDNA: gi_13430713 [Arabidopsis >gi|7487981|pir||T09933 probable phosphodiesterase I (EC 3.1.4.1)
  misc_feature (78)..(311): Homolog of NCBI NO: 13877571 NR Description: nucleotide pyrophosphatase-like protein
  misc_feature (1)..(299): Homolog of NCBI NO: 4826896 NR Description: ectonucleotide pyrophosphatase/phosphodiesterase
  misc_feature (1)..(299): Homolog of NCBI NO: 91182 NR Description: nucleotide diphosphatase (EC 3.6.1.9) - mouse
  misc_feature (1)..(299): Homolog of NCBI NO: 23503085 NR Description: Ectonucleotide pyrophosphatase/phosphodiesterase
MASHEPEWWLGEPLWETVVNQGLKAATYFWPGSEVHKGSWNCPQGLCQNYNGSVPFDDRVDTILSYFDLPSNEIPSFMTLYFEDPDHQGHQVGPDDPQITEAVVNIDRLIGRLIDGLEKRGIFEDVTMIMVGDHGMVGTCDKKLVVLDDLAPWIKIPSSWVQYYTPLLAIQPPSGHDAADIVAKINEGLSSGKVENGKYLKVYLKEDLPSRLHYVDSDRIPPIIGLVDEGFKVEQKKSKAKECGGAHGYDNAFFSMRTIFIGHGPMFSKGRKVPSFENVQIYNVISSILGLKAAPNNGSDEFSSSILLPRV

SEQ ID NO: 80608 - DNA, 1374 bp, Arabidopsis thaliana
  misc_feature (1)..(1374): Ceres Seq. ID no. 12656578
  misc_feature: MA Experiment ID: 20000306 Result: Up-regulated in Transcription
  misc_feature: MA Experiment 20000306 PARAMETER Experiment Name: At_Germinating_Seeds_Sub_P Parameter: Age (hr) Value: 6 vs. 0
  misc_feature: MA Experiment 20000306 PARAMETER Experiment Name: At_Germinating_Seeds_Sub_P Parameter: Organism Value: A. thaliana
  misc_feature: MA Experiment 20000306 PARAMETER Experiment Name: At_Germinating_Seeds_Sub_P Parameter: Plant Line Value: WS
  misc_feature: MA Experiment 20000306 PARAMETER Experiment Name: At_Germinating_Seeds_Sub_P Parameter: Tissue Value: Germinating Seeds
  misc_feature: MA Experiment ID: 20000307 Result: Up-regulated in Transcription
  misc_feature: MA Experiment 20000307 PARAMETER Experiment Name: At_Germinating_Seeds_Sub_P Parameter: Age (hr) Value: 24 vs. 0
  misc_feature: MA Experiment 20000307 PARAMETER Experiment Name: At_Germinating_Seeds_Sub_P Parameter: Organism Value: A. thaliana
  misc_feature: MA Experiment 20000307 PARAMETER Experiment Name: At_Germinating_Seeds_Sub_P Parameter: Plant Line Value: WS
  misc_feature: MA Experiment 20000307 PARAMETER Experiment Name: At_Germinating_Seeds_Sub_P Parameter: Tissue Value: Germinating Seeds
  misc_feature: MA Experiment ID: 20000314 Result: Up-regulated in Transcription
  misc_feature: MA Experiment 20000314 PARAMETER Experiment Name: At_14day_Shoots-Roots_Sub_P Parameter: Age (day) Value: 14
  misc_feature: MA Experiment 20000314 PARAMETER Experiment Name: At_14day_Shoots-Roots_Sub_P Parameter: Organism Value: A. thaliana
  misc_feature: MA Experiment 20000314 PARAMETER Experiment Name: At_14day_Shoots-Roots_Sub_P Parameter: Plant Line Value: WS
  misc_feature: MA Experiment 20000314 PARAMETER Experiment Name: At_14day_Shoots-Roots_Sub_P Parameter: Tissue Value: Roots vs. Whole Plant
  misc_feature: MA Experiment ID: 20000440 Result: Up-regulated in Transcription
  misc_feature: MA Experiment 20000440 PARAMETER Experiment Name: At_Closed-Flower__Sub_P Parameter: Tissue Value: Closed Flower vs. Whole Plant
atgacgaaaagtaaacctggccggtccggtttttccggttacatattgtacaagttatctctaaccgttctcattgtcctctccgtagccgtcactgccaatggttcggactccccatcttcctacgtcaggagaccccaaccccccaagaagctcaacaaaccggtggttctgttaatttcctgcgatggtttccggttcggttaccaattcaagacagagacaccaaacatcgatctgctcatatccagaggtaccgaagctaagaccggtttaattccggttttccccaccatgacgttcccaaaccattactcaatcgctaccggactctatccggcttcccacggcataatcatgaacaaatttaccgatccggtaagtggggaactattcaacaggaacctaaaccctaaatggtggttaggtgagccgttgtgggtgaccgcagtgaaccaagggctcatggctgcgacttacttttggccaggcgctgacgtccacaaagggtcttggaactgcccaaaaggcttttgtaaagctccttacaatgtttcagttcctttagaagaaagagtcgatacgatcttgaactatttcgatcttccagagagagaaatccctgatttcatggctctgtatttcgatgaaccggacatacaaggccatgagtacggccctgatgatcctcgcgtcacggaagccgtctcaaaggtcgataaaatgatcggtaggatcatcatgggattggagaagaggaaggtttttagtgatgttcatgtgatattgcttggtgatcacggaatggttactaactgtgacaagaaagtgatttacattgatgatttagccgattggatcaagatacccgcggattggatccaagattatagtccggtgctagcgatgaatccgcgctggggcaaagatgtcaagaatccaggacagaagaatgcagaactcgtaaggaagatgaacgaagctttgagctcagggaaagtagccaacggagagtttttgcaggtttacttgaaggagaatttaccgcaaaggctgcattattccgatagttctcggattccaccgatcatcggaatggtgggagaaggtctaatggttaaacagaacagaacatacgttcaagaatgttctggaactcatggatacgataatatgttcttttctatgagatcaatctttgttggatatggtccaaggtttaggagaggaataaaagtgccatcgttcgagaatgttcaggtctataatgctgttgcagagattctcggactccgaccagctccgaacaacggttcttctttgtttactcgtagtcttctcttgccatttggagaaacatcacaagtagaatga

SEQ ID NO: 80609 - protein, 457 aa, Arabidopsis thaliana
  peptide (1)..(457): Ceres Seq. ID no. 12656579
  misc_feature (1)..(457): Homolog of NCBI NO: 15233662 NR Description: nucleotide pyrophosphatase - like protein; id: At4g29690.1 [Arabidopsis thaliana] >gi|7487980|pir||T09932 phosphodiesterase I (EC 3.1.4.1) / nucleotide diphosphatase (EC
  misc_feature (1)..(457): Homolog of NCBI NO: 27808612 NR Description: At4g29690 [Arabidopsis thaliana]
  misc_feature (1)..(457): Homolog of NCBI NO: 15233665 NR Description: nucleotide pyrophosphatase -like protein; protein At4g29700.1, supported by cDNA: gi_13430713 [Arabidopsis >gi|7487981|pir||T09933 probable phosphodiesterase I (EC 3.1.4.1)
  misc_feature (36)..(449): Homolog of NCBI NO: 15233659 NR Description: nucleotide pyrophosphatase - like protein; id: At4g29680.1, supported by cDNA: gi_13877570 [Arabidopsis >gi|7487979|pir||T09931 probable phosphodiesterase I (EC 3.1.4.1)
  misc_feature (6)..(449): Homolog of NCBI NO: 34903578 NR Description: nucleotide pyrophosphatase homolog [Oryza sativa
  misc_feature (25)..(449): Homolog of NCBI NO: 12081942 NR Description: nucleotide pyrophosphatase-like protein [Spinacia
  misc_feature (211)..(449): Homolog of NCBI NO: 13877571 NR Description: nucleotide pyrophosphatase-like protein
  misc_feature (37)..(439): Homolog of NCBI NO: 9453796 NR Description: dJ131F15.2 (phosphodiesterase I/nucleotide
  misc_feature (37)..(439): Homolog of NCBI NO: 13324677 NR Description: ectonucleotide pyrophosphatase/phosphodiesterase
  misc_feature (37)..(439): Homolog of NCBI NO: 23503088 NR Description: Ectonucleotide pyrophosphatase/phosphodiesterase
MTKSKPGRSGFSGYILYKLSLTVLIVLSVAVTANGSDSPSSYVRRPQPPKKLNKPVVLLISCDGFRFGYQFKTETPNIDLLISRGTEAKTGLIPVFPTMTFPNHYSIATGLYPASHGIIMNKFTDPVSGELFNRNLNPKWWLGEPLWVTAVNQGLMAATYFWPGADVHKGSWNCPKGFCKAPYNVSVPLEERVDTILNYFDLPEREIPDFMALYFDEPDIQGHEYGPDDPRVTEAVSKVDKMIGRIIMGLEKRKVFSDVHVILLGDHGMVTNCDKKVIYIDDLADWIKIPADWIQDYSPVLAMNPRWGKDVKNPGQKNAELVRKMNEALSSGKVANGEFLQVYLKENLPQRLHYSDSSRIPPIIGMVGEGLMVKQNRTYVQECSGTHGYDNMFFSMRSIFVGYGPRFRRGIKVPSFENVQVYNAVAEILGLRPAPNNGSSLFTRSLLLPFGETSQVE

SEQ ID NO: 80610 - protein, 359 aa, Arabidopsis thaliana
  peptide (1)..(359): Ceres Seq. ID no. 12656580
  misc_feature (1)..(359): Homolog of NCBI NO: 15233662 NR Description: nucleotide pyrophosphatase - like protein; id: At4g29690.1 [Arabidopsis thaliana] >gi|7487980|pir||T09932 phosphodiesterase I (EC 3.1.4.1) / nucleotide diphosphatase (EC
  misc_feature (1)..(359): Homolog of NCBI NO: 27808612 NR Description: At4g29690 [Arabidopsis thaliana]
  misc_feature (1)..(359): Homolog of NCBI NO: 15233665 NR Description: nucleotide pyrophosphatase -like protein; protein At4g29700.1, supported by cDNA: gi_13430713 [Arabidopsis >gi|7487981|pir||T09933 probable phosphodiesterase I (EC 3.1.4.1)
  misc_feature (1)..(351): Homolog of NCBI NO: 15233659 NR Description: nucleotide pyrophosphatase - like protein; id: At4g29680.1, supported by cDNA: gi_13877570 [Arabidopsis >gi|7487979|pir||T09931 probable phosphodiesterase I (EC 3.1.4.1)
  misc_feature (1)..(351): Homolog of NCBI NO: 34903578 NR Description: nucleotide pyrophosphatase homolog [Oryza sativa
  misc_feature (1)..(351): Homolog of NCBI NO: 12081942 NR Description: nucleotide pyrophosphatase-like protein [Spinacia
  misc_feature (113)..(351): Homolog of NCBI NO: 13877571 NR Description: nucleotide pyrophosphatase-like protein
  misc_feature (1)..(341): Homolog of NCBI NO: 9453796 NR Description: dJ131F15.2 (phosphodiesterase I/nucleotide
  misc_feature (1)..(341): Homolog of NCBI NO: 13324677 NR Description: ectonucleotide pyrophosphatase/phosphodiesterase
  misc_feature (1)..(341): Homolog of NCBI NO: 23503088 NR Description: Ectonucleotide pyrophosphatase/phosphodiesterase
MTFPNHYSIATGLYPASHGIIMNKFTDPVSGELFNRNLNPKWWLGEPLWVTAVNQGLMAATYFWPGADVHKGSWNCPKGFCKAPYNVSVPLEERVDTILNYFDLPEREIPDFMALYFDEPDIQGHEYGPDDPRVTEAVSKVDKMIGRIIMGLEKRKVFSDVHVILLGDHGMVTNCDKKVIYIDDLADWIKIPADWIQDYSPVLAMNPRWGKDVKNPGQKNAELVRKMNEALSSGKVANGEFLQVYLKENLPQRLHYSDSSRIPPIIGMVGEGLMVKQNRTYVQECSGTHGYDNMFFSMRSIFVGYGPRFRRGIKVPSFENVQVYNAVAEILGLRPAPNNGSSLFTRSLLLPFGETSQVE

SEQ ID NO: 80611 - protein, 338 aa, Arabidopsis thaliana
  peptide (1)..(338): Ceres Seq. ID no. 12656581
  misc_feature (1)..(338): Homolog of NCBI NO: 15233662 NR Description: nucleotide pyrophosphatase - like protein; id: At4g29690.1 [Arabidopsis thaliana] >gi|7487980|pir||T09932 phosphodiesterase I (EC 3.1.4.1) / nucleotide diphosphatase (EC
  misc_feature (1)..(338): Homolog of NCBI NO: 27808612 NR Description: At4g29690 [Arabidopsis thaliana]
  misc_feature (1)..(338): Homolog of NCBI NO: 15233665 NR Description: nucleotide pyrophosphatase -like protein; protein At4g29700.1, supported by cDNA: gi_13430713 [Arabidopsis >gi|7487981|pir||T09933 probable phosphodiesterase I (EC 3.1.4.1)
  misc_feature (1)..(330): Homolog of NCBI NO: 15233659 NR Description: nucleotide pyrophosphatase - like protein; id: At4g29680.1, supported by cDNA: gi_13877570 [Arabidopsis >gi|7487979|pir||T09931 probable phosphodiesterase I (EC 3.1.4.1)
  misc_feature (1)..(330): Homolog of NCBI NO: 34903578 NR Description: nucleotide pyrophosphatase homolog [Oryza sativa
  misc_feature (1)..(330): Homolog of NCBI NO: 12081942 NR Description: nucleotide pyrophosphatase-like protein [Spinacia
  misc_feature (92)..(330): Homolog of NCBI NO: 13877571 NR Description: nucleotide pyrophosphatase-like protein
  misc_feature (1)..(320): Homolog of NCBI NO: 9453796 NR Description: dJ131F15.2 (phosphodiesterase I/nucleotide
  misc_feature (1)..(320): Homolog of NCBI NO: 13324677 NR Description: ectonucleotide pyrophosphatase/phosphodiesterase
  misc_feature (1)..(320): Homolog of NCBI NO: 23503088 NR Description: Ectonucleotide pyrophosphatase/phosphodiesterase
MNKFTDPVSGELFNRNLNPKWWLGEPLWVTAVNQGLMAATYFWPGADVHKGSWNCPKGFCKAPYNVSVPLEERVDTILNYFDLPEREIPDFMALYFDEPDIQGHEYGPDDPRVTEAVSKVDKMIGRIIMGLEKRKVFSDVHVILLGDHGMVTNCDKKVIYIDDLADWIKIPADWIQDYSPVLAMNPRWGKDVKNPGQKNAELVRKMNEALSSGKVANGEFLQVYLKENLPQRLHYSDSSRIPPIIGMVGEGLMVKQNRTYVQECSGTHGYDNMFFSMRSIFVGYGPRFRRGIKVPSFENVQVYNAVAEILGLRPAPNNGSSLFTRSLLLPFGETSQVE

SEQ ID NO: 80612 - DNA, 402 bp, Arabidopsis thaliana
  misc_feature (1)..(402): Ceres Seq. ID no. 12656582
  misc_feature: MA Experiment ID: 20000307 Result: Up-regulated in Transcription
  misc_feature: MA Experiment 20000307 PARAMETER Experiment Name: At_Germinating_Seeds_Sub_P Parameter: Age (hr) Value: 24 vs. 0
  misc_feature: MA Experiment 20000307 PARAMETER Experiment Name: At_Germinating_Seeds_Sub_P Parameter: Organism Value: A. thaliana
  misc_feature: MA Experiment 20000307 PARAMETER Experiment Name: At_Germinating_Seeds_Sub_P Parameter: Plant Line Value: WS
  misc_feature: MA Experiment 20000307 PARAMETER Experiment Name: At_Germinating_Seeds_Sub_P Parameter: Tissue Value: Germinating Seeds
  misc_feature: MA Experiment ID: 20000314 Result: Up-regulated in Transcription
  misc_feature: MA Experiment 20000314 PARAMETER Experiment Name: At_14day_Shoots-Roots_Sub_P Parameter: Age (day) Value: 14
  misc_feature: MA Experiment 20000314 PARAMETER Experiment Name: At_14day_Shoots-Roots_Sub_P Parameter: Organism Value: A. thaliana
  misc_feature: MA Experiment 20000314 PARAMETER Experiment Name: At_14day_Shoots-Roots_Sub_P Parameter: Plant Line Value: WS
  misc_feature: MA Experiment 20000314 PARAMETER Experiment Name: At_14day_Shoots-Roots_Sub_P Parameter: Tissue Value: Roots vs. Whole Plant
  misc_feature: MA Experiment ID: 20000440 Result: Up-regulated in Transcription
  misc_feature: MA Experiment 20000440 PARAMETER Experiment Name: At_Closed-Flower__Sub_P Parameter: Tissue Value: Closed Flower vs. Whole Plant
atgaacgaagctttgagctcagggaaagtaaaaaacggagagtttttgactgtttacttgaaggagaagttaccggacagactgcattattcccagagttatcggattccaccaatcataggaatggtcggagaaggtctaattgtcagacaaaatagaactaatgctcaagaatgctacggagaccatggttatgacaacaagttcttctcaatgaggactatttttgtcggacatggttctaggtttaggagaggaaagaaagtgccatcgtttgagaatgtgcagatctatagcgtcgttgcagatattcttggactccgaccagctccgaacaatggttcttctttgttccctcggagcattctcttgcctttcagagcaacaagggggttagaatga

SEQ ID NO: 80613 - protein, 133 aa, Arabidopsis thaliana
  peptide (1)..(133): Ceres Seq. ID no. 12656583
  misc_feature (7)..(107): Pfam Name: Type I phosphodiesterase / nucleotide pyrophosphatase Pfam Description: Type I phosphodiesterase / nucleotide
  misc_feature (1)..(133): Homolog of NCBI NO: 15233667 NR Description: putative protein; protein id: At4g29710.1
  misc_feature (1)..(130): Homolog of NCBI NO: 15233665 NR Description: nucleotide pyrophosphatase -like protein; protein At4g29700.1, supported by cDNA: gi_13430713 [Arabidopsis >gi|7487981|pir||T09933 probable phosphodiesterase I (EC 3.1.4.1)
  misc_feature (1)..(133): Homolog of NCBI NO: 15233662 NR Description: nucleotide pyrophosphatase - like protein; id: At4g29690.1 [Arabidopsis thaliana] >gi|7487980|pir||T09932 phosphodiesterase I (EC 3.1.4.1) / nucleotide diphosphatase (EC
  misc_feature (1)..(133): Homolog of NCBI NO: 27808612 NR Description: At4g29690 [Arabidopsis thaliana]
  misc_feature (1)..(125): Homolog of NCBI NO: 13877571 NR Description: nucleotide pyrophosphatase-like protein
  misc_feature (1)..(125): Homolog of NCBI NO: 15233659 NR Description: nucleotide pyrophosphatase - like protein; id: At4g29680.1, supported by cDNA: gi_13877570 [Arabidopsis >gi|7487979|pir||T09931 probable phosphodiesterase I (EC 3.1.4.1)
  misc_feature (1)..(125): Homolog of NCBI NO: 34903578 NR Description: nucleotide pyrophosphatase homolog [Oryza sativa
  misc_feature (1)..(125): Homolog of NCBI NO: 12081942 NR Description: nucleotide pyrophosphatase-like protein [Spinacia
  misc_feature (53)..(124): Homolog of NCBI NO: 15148775 NR Description: nucleotide pytophosphatase-like protein [Elaeis
  misc_feature (19)..(115): Homolog of NCBI NO: 34783766 NR Description: Unknown (protein for MGC:63550) [Danio rerio]
MNEALSSGKVKNGEFLTVYLKEKLPDRLHYSQSYRIPPIIGMVGEGLIVRQNRTNAQECYGDHGYDNKFFSMRTIFVGHGSRFRRGKKVPSFENVQIYSVVADILGLRPAPNNGSSLFPRSILLPFRATRGLE

SEQ ID NO: 80614 - protein, 92 aa, Arabidopsis thaliana
  peptide (1)..(92): Ceres Seq. ID no. 12656584
  misc_feature (1)..(66): Pfam Name: Type I phosphodiesterase / nucleotide pyrophosphatase Pfam Description: Type I phosphodiesterase / nucleotide
  misc_feature (1)..(92): Homolog of NCBI NO: 15233667 NR Description: putative protein; protein id: At4g29710.1
  misc_feature (1)..(89): Homolog of NCBI NO: 15233665 NR Description: nucleotide pyrophosphatase -like protein; protein At4g29700.1, supported by cDNA: gi_13430713 [Arabidopsis >gi|7487981|pir||T09933 probable phosphodiesterase I (EC 3.1.4.1)
  misc_feature (1)..(92): Homolog of NCBI NO: 15233662 NR Description: nucleotide pyrophosphatase - like protein; id: At4g29690.1 [Arabidopsis thaliana] >gi|7487980|pir||T09932 phosphodiesterase I (EC 3.1.4.1) / nucleotide diphosphatase (EC
  misc_feature (1)..(92): Homolog of NCBI NO: 27808612 NR Description: At4g29690 [Arabidopsis thaliana]
  misc_feature (1)..(84): Homolog of NCBI NO: 13877571 NR Description: nucleotide pyrophosphatase-like protein
  misc_feature (1)..(84): Homolog of NCBI NO: 15233659 NR Description: nucleotide pyrophosphatase - like protein; id: At4g29680.1, supported by cDNA: gi_13877570 [Arabidopsis >gi|7487979|pir||T09931 probable phosphodiesterase I (EC 3.1.4.1)
  misc_feature (1)..(84): Homolog of NCBI NO: 34903578 NR Description: nucleotide pyrophosphatase homolog [Oryza sativa
  misc_feature (1)..(84): Homolog of NCBI NO: 12081942 NR Description: nucleotide pyrophosphatase-like protein [Spinacia
  misc_feature (12)..(83): Homolog of NCBI NO: 15148775 NR Description: nucleotide pytophosphatase-like protein [Elaeis
  misc_feature (1)..(74): Homolog of NCBI NO: 34783766 NR Description: Unknown (protein for MGC:63550) [Danio rerio]
MVGEGLIVRQNRTNAQECYGDHGYDNKFFSMRTIFVGHGSRFRRGKKVPSFENVQIYSVVADILGLRPAPNNGSSLFPRSILLPFRATRGLE

SEQ ID NO: 80615 - DNA, 1861 bp, Arabidopsis thaliana
  misc_feature (1)..(1861): Ceres Seq. ID no. 12656585
  misc_feature: MA Experiment ID: 20000169 Result: Down-regulated in Transcription
  misc_feature: MA Experiment 20000169 PARAMETER Experiment Name: At_100uM_ABA_P Parameter: Age (day) Value: 14
  misc_feature: MA Experiment 20000169 PARAMETER Experiment Name: At_100uM_ABA_P Parameter: Organism Value: A. thaliana
  misc_feature: MA Experiment 20000169 PARAMETER Experiment Name: At_100uM_ABA_P Parameter: Plant Line Value: WS
  misc_feature: MA Experiment 20000169 PARAMETER Experiment Name: At_100uM_ABA_P Parameter: Timepoint (hr) Value: 6
  misc_feature: MA Experiment 20000169 PARAMETER Experiment Name: At_100uM_ABA_P Parameter: Tissue Value: Aerial
  misc_feature: MA Experiment 20000169 PARAMETER Experiment Name: At_100uM_ABA_P Parameter: Treatment Value: 100uM ABA vs. No Treatment
  misc_feature: MA Experiment ID: 20000171 Result: Down-regulated in Transcription
  misc_feature: MA Experiment 20000171 PARAMETER Experiment Name: At_42deg_Heat_P Parameter: Age (day) Value: 14
  misc_feature: MA Experiment 20000171 PARAMETER Experiment Name: At_42deg_Heat_P Parameter: Organism Value: A. thaliana
  misc_feature: MA Experiment 20000171 PARAMETER Experiment Name: At_42deg_Heat_P Parameter: Plant Line Value: WS
  misc_feature: MA Experiment 20000171 PARAMETER Experiment Name: At_42deg_Heat_P Parameter: Temperature (deg C) Value: 42 vs. 22
  misc_feature: MA Experiment 20000171 PARAMETER Experiment Name: At_42deg_Heat_P Parameter: Timepoint (hr) Value: 1
  misc_feature: MA Experiment 20000171 PARAMETER Experiment Name: At_42deg_Heat_P Parameter: Tissue Value: Aerial
  misc_feature: MA Experiment ID: 20000182 Result: Up-regulated in Transcription
  misc_feature: MA Experiment 20000182 PARAMETER Experiment Name: At_2mM_SA_P Parameter: Age (day) Value: 14
  misc_feature: MA Experiment 20000182 PARAMETER Experiment Name: At_2mM_SA_P Parameter: Organism Value: A. thaliana
  misc_feature: MA Experiment 20000182 PARAMETER Experiment Name: At_2mM_SA_P Parameter: Plant Line Value: WS
  misc_feature: MA Experiment 20000182 PARAMETER Experiment Name: At_2mM_SA_P Parameter: Timepoint (hr) Value: 6
  misc_feature: MA Experiment 20000182 PARAMETER Experiment Name: At_2mM_SA_P Parameter: Tissue Value: Aerial
  misc_feature: MA Experiment 20000182 PARAMETER Experiment Name: At_2mM_SA_P Parameter: Treatment Value: 2mM SA vs. No Treatment
  misc_feature: MA Experiment ID: 20000227 Result: Down-regulated in Transcription
  misc_feature: MA Experiment 20000227 PARAMETER Experiment Name: At_Root-Tips-vs-Tops_P Parameter: Tissue Value: Root Tips vs. Root Tops
  misc_feature: MA Experiment ID: 20000234 Result: Down-regulated in Transcription
  misc_feature: MA Experiment 20000234 PARAMETER Experiment Name: At_Siliques_P Parameter: Age (day) Value: 21
  misc_feature: MA Experiment 20000234 PARAMETER Experiment Name: At_Siliques_P Parameter: Organism Value: A. thaliana
  misc_feature: MA Experiment 20000234 PARAMETER Experiment Name: At_Siliques_P Parameter: Plant Line Value: WS
  misc_feature: MA Experiment 20000234 PARAMETER Experiment Name: At_Siliques_P Parameter: Tissue Value: Less Than 5mm Siliques vs. Whole Plant
  misc_feature: MA Experiment ID: 20000439 Result: Up-regulated in Transcription
  misc_feature: MA Experiment 20000439 PARAMETER Experiment Name: At_Roots__P Parameter: Age (day) Value: 14 vs. 21
  misc_feature: MA Experiment 20000439 PARAMETER Experiment Name: At_Roots__P Parameter: Organism Value: A. thaliana
  misc_feature: MA Experiment 20000439 PARAMETER Experiment Name: At_Roots__P Parameter: Tissue Value: Roots vs. Whole Plant
  misc_feature: MA Experiment ID: 20000451 Result: Down-regulated in Transcription
  misc_feature: MA Experiment 20000451 PARAMETER Experiment Name: At_CS6879_Shoots-Roots_P Parameter: Age (day) Value: 14
  misc_feature: MA Experiment 20000451 PARAMETER Experiment Name: At_CS6879_Shoots-Roots_P Parameter: Organism Value: A. thaliana
  misc_feature: MA Experiment 20000451 PARAMETER Experiment Name: At_CS6879_Shoots-Roots_P Parameter: Plant Line Value: CS6879 vs. WS
  misc_feature: MA Experiment 20000451 PARAMETER Experiment Name: At_CS6879_Shoots-Roots_P Parameter: Tissue Value: Roots
  misc_feature: MA Experiment ID: 20000456 Result: Up-regulated in Transcription
  misc_feature: MA Experiment 20000456 PARAMETER Experiment Name: At_100uM_BA_P Parameter: Age (day) Value: 14
  misc_feature: MA Experiment 20000456 PARAMETER Experiment Name: At_100uM_BA_P Parameter: Organism Value: A. thaliana
  misc_feature: MA Experiment 20000456 PARAMETER Experiment Name: At_100uM_BA_P Parameter: Plant Line Value: WS
  misc_feature: MA Experiment 20000456 PARAMETER Experiment Name: At_100uM_BA_P Parameter: Timepoint (hr) Value: 6
  misc_feature: MA Experiment 20000456 PARAMETER Experiment Name: At_100uM_BA_P Parameter: Tissue Value: Aerial
  misc_feature: MA Experiment 20000456 PARAMETER Experiment Name: At_100uM_BA_P Parameter: Treatment Value: 100uM BA vs. No Treatment
  misc_feature: MA Experiment ID: 20000495 Result: Down-regulated in Transcription
  misc_feature: MA Experiment 20000495 PARAMETER Experiment Name: At_Guard_Cells_P Parameter: Harvest Date Value: 8/2/2002
  misc_feature: MA Experiment 20000495 PARAMETER Experiment Name: At_Guard_Cells_P Parameter: Organism Value: A. thaliana
  misc_feature: MA Experiment 20000495 PARAMETER Experiment Name: At_Guard_Cells_P Parameter: Tissue Value: Guard Cells vs. Leaves
  misc_feature: MA Experiment ID: 20000794 Result: Down-regulated in Transcription
  misc_feature: MA Experiment 20000794 PARAMETER Experiment Name: At_Petals_P Parameter: Age (day) Value: 23-25 days
  misc_feature: MA Experiment 20000794 PARAMETER Experiment Name: At_Petals_P Parameter: Plant Line Value: WS
  misc_feature: MA Experiment 20000794 PARAMETER Experiment Name: At_Petals_P Parameter: Tissue Value: Petals vs. Whole plant
  misc_feature: MA Experiment ID: 20001450 Result: Down-regulated in Transcription
  misc_feature: MA Experiment 20001450 PARAMETER Experiment Name: At_Far-red-induction_P Parameter: Age (day) Value: 7
  misc_feature: MA Experiment 20001450 PARAMETER Experiment Name: At_Far-red-induction_P Parameter: Light Value: Far-red vs. White
  misc_feature: MA Experiment 20001450 PARAMETER Experiment Name: At_Far-red-induction_P Parameter: Organism Value: A. thaliana
  misc_feature: MA Experiment 20001450 PARAMETER Experiment Name: At_Far-red-induction_P Parameter: Plant Line Value: Columbia
  misc_feature: MA Experiment 20001450 PARAMETER Experiment Name: At_Far-red-induction_P Parameter: Timepoint (hr) Value: 8
  misc_feature: MA Experiment 20001450 PARAMETER Experiment Name: At_Far-red-induction_P Parameter: Tissue Value: Whole Plant
  misc_feature: MA Experiment ID: 20001554 Result: Down-regulated in Transcription
  misc_feature: MA Experiment 20001554 PARAMETER Experiment Name: At_Drought_Soil_Dry_P Parameter: Age (day) Value: 21
  misc_feature: MA Experiment 20001554 PARAMETER Experiment Name: At_Drought_Soil_Dry_P Parameter: Organism Value: A. thaliana
  misc_feature: MA Experiment 20001554 PARAMETER Experiment Name: At_Drought_Soil_Dry_P Parameter: Plant Line Value: WS
  misc_feature: MA Experiment 20001554 PARAMETER Experiment Name: At_Drought_Soil_Dry_P Parameter: Post Timepoint (hr) Value: None
  misc_feature: MA Experiment 20001554 PARAMETER Experiment Name: At_Drought_Soil_Dry_P Parameter: Post-Treatment Value: None
  misc_feature: MA Experiment 20001554 PARAMETER Experiment Name: At_Drought_Soil_Dry_P Parameter: Timepoint (day) Value: 7
  misc_feature: MA Experiment 20001554 PARAMETER Experiment Name: At_Drought_Soil_Dry_P Parameter: Treatment Value: Drought vs. No Drought
  misc_feature: MA Experiment ID: 20001557 Result: Down-regulated in Transcription
  misc_feature: MA Experiment 20001557 PARAMETER Experiment Name: At_Drought_Soil_Dry_P Parameter: Age (day) Value: 27
  misc_feature: MA Experiment 20001557 PARAMETER Experiment Name: At_Drought_Soil_Dry_P Parameter: Organism Value: A. thaliana
  misc_feature: MA Experiment 20001557 PARAMETER Experiment Name: At_Drought_Soil_Dry_P Parameter: Plant Line Value: WS
  misc_feature: MA Experiment 20001557 PARAMETER Experiment Name: At_Drought_Soil_Dry_P Parameter: Post Timepoint (hr) Value: 3
  misc_feature: MA Experiment 20001557 PARAMETER Experiment Name: At_Drought_Soil_Dry_P Parameter: Post-Treatment Value: Re-Water vs. No Drought
  misc_feature: MA Experiment 20001557 PARAMETER Experiment Name: At_Drought_Soil_Dry_P Parameter: Timepoint (day) Value: 13
  misc_feature: MA Experiment 20001557 PARAMETER Experiment Name: At_Drought_Soil_Dry_P Parameter: Treatment Value: Drought vs. No Drought
  misc_feature: MA Experiment ID: 20001560 Result: Down-regulated in Transcription
  misc_feature: MA Experiment 20001560 PARAMETER Experiment Name: At_Drought_Soil_Dry_P Parameter: Age (day) Value: 28
  misc_feature: MA Experiment 20001560 PARAMETER Experiment Name: At_Drought_Soil_Dry_P Parameter: Organism Value: A. thaliana
  misc_feature: MA Experiment 20001560 PARAMETER Experiment Name: At_Drought_Soil_Dry_P Parameter: Plant Line Value: WS
  misc_feature: MA Experiment 20001560 PARAMETER Experiment Name: At_Drought_Soil_Dry_P Parameter: Post Timepoint (hr) Value: None
  misc_feature: MA Experiment 20001560 PARAMETER Experiment Name: At_Drought_Soil_Dry_P Parameter: Post-Treatment Value: None
  misc_feature: MA Experiment 20001560 PARAMETER Experiment Name: At_Drought_Soil_Dry_P Parameter: Timepoint (day) Value: 14
  misc_feature: MA Experiment 20001560 PARAMETER Experiment Name: At_Drought_Soil_Dry_P Parameter: Treatment Value: Drought vs. No Drought
  misc_feature: MA Experiment ID: 20001757 Result: Up-regulated in Transcription
  misc_feature: MA Experiment 20001757 PARAMETER Experiment Name: At_50mM_NH4NO3_L-to-H_P Parameter: Timepoint (hr) Value: 6
  misc_feature: MA Experiment 20001757 PARAMETER Experiment Name: At_50mM_NH4NO3_L-to-H_P Parameter: Tissue Value: Leaf
  misc_feature: MA Experiment 20001757 PARAMETER Experiment Name: At_50mM_NH4NO3_L-to-H_P Parameter: Treatment Value: 50mM NH4NO3 vs 100mM Mannitol
  misc_feature: MA Experiment ID: 20001771 Result: Down-regulated in Transcription
  misc_feature: MA Experiment 20001771 PARAMETER Experiment Name: At_Far-red-enriched-adult_P Parameter: Age (day) Value: 28
  misc_feature: MA Experiment 20001771 PARAMETER Experiment Name: At_Far-red-enriched-adult_P Parameter: Light Value: Far-red enriched vs. White
  misc_feature: MA Experiment 20001771 PARAMETER Experiment Name: At_Far-red-enriched-adult_P Parameter: Organism Value: A. thaliana
  misc_feature: MA Experiment 20001771 PARAMETER Experiment Name: At_Far-red-enriched-adult_P Parameter: Plant Line Value: Columbia
  misc_feature: MA Experiment 20001771 PARAMETER Experiment Name: At_Far-red-enriched-adult_P Parameter: Timepoint (hr) Value: 16
  misc_feature: MA Experiment 20001771 PARAMETER Experiment Name: At_Far-red-enriched-adult_P Parameter: Tissue Value: Aerial
agtaatcccataatcaacaagacactctaatagtaatatctcaacctccgtctcgttttcccattaacctacccgtttgttagattatgactaatactctctgtttaagcctcatcaccctaataacgctttttataagtttaaccccaaccttaatcaaatcagatgagggcattgatgttttcttacccatatcactcaaccttacggtcctaaccgatcccttctccatctctgccgcttctcacgacttcggtaacataaccgacgaaaatcccggcgccgtcctctgcccttcctccaccacggaggtggctcgtctcctccgtttcgctaacggaggattctcttacaataaaggctcaaccagccccgcgtctactttcaaagtggctgctcgaggccaaggccactccctccgtggccaagcctctgcacccggaggtgtcgtcgtgaacatgacgtgtctcgccatggcggctaaaccagcggcggttgttatctcggcagacgggacttacgctgacgtggctgccgggacgatgtgggtggatgttctgaaggcggcggtggatagaggcgtctcgccggttacatggacggattatttgtatctcagcgtcggcgggacgttgtcgaacgctggaatcggtggtcagacgtttagacacggccctcagattagtaacgttcatgagcttgacgttattaccggaaaaggtgaaatgatgacttgctctccaaagttaaaccctgaattgttctatggagttttaggaggtttgggtcaattcggtattataacgagggccaggattgcgttggatcatgcacccacaagggtgaaatggtctcgcatactctacagtgacttctcggcttttaaaagagaccaagagcgtttaatatcaatgaccaatgatctcggagttgactttttggaaggtcaacttatgatgtcaaatggcttcgtagacacctctttcttcccactctccgatcaaacaagagtcgcatctcttgtgaatgaccaccggatcatctatgttctcgaagtagccaagtattatgacagaaccacccttcccattattgaccaggtgattgacacgttaagtagaactctaggtttcgctccagggtttatgttcgtacaagatgttccgtatttcgatttcttgaaccgtgtccgaaacgaagaagataaactcagatctttaggactatgggaagttcctcatccatggcttaacatctttgtcccggggtctcgaatccaagattttcatgatggtgttattaatggccttcttctaaaccaaacctcaacttctggtgttactctcttctatcccacaaaccgaaacaaatggaacaaccgcatgtcaacgatgacaccggacgaagatgttttttatgtgatcggattactgcaatcagctggtggatctcaaaattggcaagaacttgaaaatctcaacgacaaggttattcagttttgtgaaaactcgggaattaagattaaggaatatttgatgcactatacaagaaaagaagattgggttaaacattttggaccaaaatgggatgattttttaagaaagaaaattatgtttgatcccaaaagactattgtctccaggacaagacatatttaattaacttatcacatgtcttaattaatttgttatgtaactttagaacgtatttttataacatatacagacaagtacgttcatcgtctaactaacaaatattatagtttagtgatttggttaggctacttacgttaatctttttcgttcttgtatgaaatatattgtataagtcaaaagacaaagaaaaatatattattatagcgg

SEQ ID NO: 80616 - protein, 524 aa, Arabidopsis thaliana
  peptide (1)..(524): Ceres Seq. ID no. 12656586
  misc_feature (64)..(235): Pfam Name: FAD binding domain Pfam Description: FAD binding domain
  misc_feature (1)..(524): Homolog of NCBI NO: 15233677 NR Description: cytokinin oxidase - like protein; protein id: supported by cDNA: gi_11120511, supported by cDNA: gi_15450760 thaliana] >gi|20137961|sp|Q9FUJ2|CKX4_ARATH Cytokinin oxidase
  misc_feature (1)..(524): Homolog of NCBI NO: 11120512 NR Description: cytokinin oxidase [Arabidopsis thaliana]
  misc_feature (1)..(428): Homolog of NCBI NO: 30688430 NR Description: cytokinin oxidase family [Arabidopsis thaliana]
  misc_feature (13)..(523): Homolog of NCBI NO: 18399056 NR Description: putative cytokinin oxidase; protein id: supported by cDNA: gi_11120507 [Arabidopsis thaliana] Cytokinin oxidase 2 precursor (CKO 2) >gi|20197481|gb|AAD10149.2|
  misc_feature (13)..(523): Homolog of NCBI NO: 11120508 NR Description: cytokinin oxidase [Arabidopsis thaliana]
  misc_feature (13)..(523): Homolog of NCBI NO: 25345685 NR Description: probable cytokinin oxidase [imported] -
  misc_feature (5)..(523): Homolog of NCBI NO: 15241997 NR Description: cytokinin oxidase; protein id: At5g56970.1, by cDNA: gi_11120509 [Arabidopsis thaliana] Cytokinin oxidase 3 precursor (CKO 3) >gi|8777437|dbj|BAA97027.1|
  misc_feature (11)..(524): Homolog of NCBI NO: 11558277 NR Description: cytokinin oxidase [Dendrobium cv. 'Sonia']
  misc_feature (36)..(524): Homolog of NCBI NO: 20138062 NR Description: Cytokinin oxidase 1 precursor (CKO 1)
  misc_feature (46)..(523): Homolog of NCBI NO: 22330649 NR Description: cytokinin oxidase, putative; protein id:
MTNTLCLSLITLITLFISLTPTLIKSDEGIDVFLPISLNLTVLTDPFSISAASHDFGNITDENPGAVLCPSSTTEVARLLRFANGGFSYNKGSTSPASTFKVAARGQGHSLRGQASAPGGVVVNMTCLAMAAKPAAVVISADGTYADVAAGTMWVDVLKAAVDRGVSPVTWTDYLYLSVGGTLSNAGIGGQTFRHGPQISNVHELDVITGKGEMMTCSPKLNPELFYGVLGGLGQFGIITRARIALDHAPTRVKWSRILYSDFSAFKRDQERLISMTNDLGVDFLEGQLMMSNGFVDTSFFPLSDQTRVASLVNDHRIIYVLEVAKYYDRTTLPIIDQVIDTLSRTLGFAPGFMFVQDVPYFDFLNRVRNEEDKLRSLGLWEVPHPWLNIFVPGSRIQDFHDGVINGLLLNQTSTSGVTLFYPTNRNKWNNRMSTMTPDEDVFYVIGLLQSAGGSQNWQELENLNDKVIQFCENSGIKIKEYLMHYTRKEDWVKHFGPKWDDFLRKKIMFDPKRLLSPGQDIFN

SEQ ID NO: 80617 - protein, 400 aa, Arabidopsis thaliana
  peptide (1)..(400): Ceres Seq. ID no. 12656587
  misc_feature (1)..(111): Pfam Name: FAD binding domain Pfam Description: FAD binding domain
  misc_feature (1)..(400): Homolog of NCBI NO: 15233677 NR Description: cytokinin oxidase - like protein; protein id: supported by cDNA: gi_11120511, supported by cDNA: gi_15450760 thaliana] >gi|20137961|sp|Q9FUJ2|CKX4_ARATH Cytokinin oxidase
  misc_feature (1)..(400): Homolog of NCBI NO: 11120512 NR Description: cytokinin oxidase [Arabidopsis thaliana]
  misc_feature (1)..(304): Homolog of NCBI NO: 30688430 NR Description: cytokinin oxidase family [Arabidopsis thaliana]
  misc_feature (1)..(399): Homolog of NCBI NO: 18399056 NR Description: putative cytokinin oxidase; protein id: supported by cDNA: gi_11120507 [Arabidopsis thaliana] Cytokinin oxidase 2 precursor (CKO 2) >gi|20197481|gb|AAD10149.2|
  misc_feature (1)..(399): Homolog of NCBI NO: 11120508 NR Description: cytokinin oxidase [Arabidopsis thaliana]
  misc_feature (1)..(399): Homolog of NCBI NO: 25345685 NR Description: probable cytokinin oxidase [imported] -
  misc_feature (1)..(399): Homolog of NCBI NO: 15241997 NR Description: cytokinin oxidase; protein id: At5g56970.1, by cDNA: gi_11120509 [Arabidopsis thaliana] Cytokinin oxidase 3 precursor (CKO 3) >gi|8777437|dbj|BAA97027.1|
  misc_feature (1)..(400): Homolog of NCBI NO: 11558277 NR Description: cytokinin oxidase [Dendrobium cv. 'Sonia']
  misc_feature (1)..(400): Homolog of NCBI NO: 20138062 NR Description: Cytokinin oxidase 1 precursor (CKO 1)
  misc_feature (1)..(399): Homolog of NCBI NO: 22330649 NR Description: cytokinin oxidase, putative; protein id:
MTCLAMAAKPAAVVISADGTYADVAAGTMWVDVLKAAVDRGVSPVTWTDYLYLSVGGTLSNAGIGGQTFRHGPQISNVHELDVITGKGEMMTCSPKLNPELFYGVLGGLGQFGIITRARIALDHAPTRVKWSRILYSDFSAFKRDQERLISMTNDLGVDFLEGQLMMSNGFVDTSFFPLSDQTRVASLVNDHRIIYVLEVAKYYDRTTLPIIDQVIDTLSRTLGFAPGFMFVQDVPYFDFLNRVRNEEDKLRSLGLWEVPHPWLNIFVPGSRIQDFHDGVINGLLLNQTSTSGVTLFYPTNRNKWNNRMSTMTPDEDVFYVIGLLQSAGGSQNWQELENLNDKVIQFCENSGIKIKEYLMHYTRKEDWVKHFGPKWDDFLRKKIMFDPKRLLSPGQDIFN

SEQ ID NO: 80618 - protein, 395 aa, Arabidopsis thaliana
  peptide (1)..(395): Ceres Seq. ID no. 12656588
  misc_feature (1)..(106): Pfam Name: FAD binding domain Pfam Description: FAD binding domain
  misc_feature (1)..(395): Homolog of NCBI NO: 15233677 NR Description: cytokinin oxidase - like protein; protein id: supported by cDNA: gi_11120511, supported by cDNA: gi_15450760 thaliana] >gi|20137961|sp|Q9FUJ2|CKX4_ARATH Cytokinin oxidase
  misc_feature (1)..(395): Homolog of NCBI NO: 11120512 NR Description: cytokinin oxidase [Arabidopsis thaliana]
  misc_feature (1)..(299): Homolog of NCBI NO: 30688430 NR Description: cytokinin oxidase family [Arabidopsis thaliana]
  misc_feature (1)..(394): Homolog of NCBI NO: 18399056 NR Description: putative cytokinin oxidase; protein id: supported by cDNA: gi_11120507 [Arabidopsis thaliana] Cytokinin oxidase 2 precursor (CKO 2) >gi|20197481|gb|AAD10149.2|
  misc_feature (1)..(394): Homolog of NCBI NO: 11120508 NR Description: cytokinin oxidase [Arabidopsis thaliana]
  misc_feature (1)..(394): Homolog of NCBI NO: 25345685 NR Description: probable cytokinin oxidase [imported] -
  misc_feature (1)..(394): Homolog of NCBI NO: 15241997 NR Description: cytokinin oxidase; protein id: At5g56970.1, by cDNA: gi_11120509 [Arabidopsis thaliana] Cytokinin oxidase 3 precursor (CKO 3) >gi|8777437|dbj|BAA97027.1|
  misc_feature (1)..(395): Homolog of NCBI NO: 11558277 NR Description: cytokinin oxidase [Dendrobium cv. 'Sonia']
  misc_feature (1)..(395): Homolog of NCBI NO: 20138062 NR Description: Cytokinin oxidase 1 precursor (CKO 1)
  misc_feature (1)..(394): Homolog of NCBI NO: 22330649 NR Description: cytokinin oxidase, putative; protein id:
MAAKPAAVVISADGTYADVAAGTMWVDVLKAAVDRGVSPVTWTDYLYLSVGGTLSNAGIGGQTFRHGPQISNVHELDVITGKGEMMTCSPKLNPELFYGVLGGLGQFGIITRARIALDHAPTRVKWSRILYSDFSAFKRDQERLISMTNDLGVDFLEGQLMMSNGFVDTSFFPLSDQTRVASLVNDHRIIYVLEVAKYYDRTTLPIIDQVIDTLSRTLGFAPGFMFVQDVPYFDFLNRVRNEEDKLRSLGLWEVPHPWLNIFVPGSRIQDFHDGVINGLLLNQTSTSGVTLFYPTNRNKWNNRMSTMTPDEDVFYVIGLLQSAGGSQNWQELENLNDKVIQFCENSGIKIKEYLMHYTRKEDWVKHFGPKWDDFLRKKIMFDPKRLLSPGQDIFN

SEQ ID NO: 80619 - DNA, 3331 bp, Arabidopsis thaliana
  misc_feature (1)..(3331): Ceres Seq. ID no. 12656625
  misc_feature: MA Experiment ID: 20000495 Result: Up-regulated in Transcription
  misc_feature: MA Experiment 20000495 PARAMETER Experiment Name: At_Guard_Cells_P Parameter: Harvest Date Value: 8/2/2002
  misc_feature: MA Experiment 20000495 PARAMETER Experiment Name: At_Guard_Cells_P Parameter: Organism Value: A. thaliana
  misc_feature: MA Experiment 20000495 PARAMETER Experiment Name: At_Guard_Cells_P Parameter: Tissue Value: Guard Cells vs. Leaves
aaaaactctctttctatcagaaagaaatgacatttttaatattacatgcctatacagttacaagaatacggttcatcctatagattgtcatgtaatctgcttatgaatgtttcatggtgaaatcattgggaaacctgcaggcgatctgatggacacatttcgttttggatgatcatagtttctgagataggagaccaatacaggcctgattatggcaaattcctttagaaacgattttatattcgttttctgtagcggctgccccttgcaactattaaaggttttttttgcaaaattataaacaaaaggtttcctgtagaaaagaagattgtatttcttttgtttactagtcgtcaactttgcaagtataattttcaagggaccaaaccaaatcaaggattttatttgacttttgtttatatatgtattgtaactgtaattgtaattgtatatcaacccaacatgctaatactataacttagatggagttgaagcgggtacgtgtagtagctgtccttttgatcttgcctcgtctatatattgcatgagagaacattttccataagaaagtaatcaaacacatttggtgataatgacacgtctacgccttctttcatggatttcaatcacgagctgtgtttgtctcgtttttgctcaagaccaatcaggttttattagtatcgattgtgggataccagatgattcaagctacactgatgagaaaacaaacatgaaatacgtttcggatttgggttttgttgagtctggaacaagtcatagcatagtctctgaccttcaaacaacttctcttgaaaggcagttccaaaacgtaagaagcttccctgaaggtaagagaaactgttacgacataaggcctcagcaagggaaaggtttcaagtatctgattagaactcgttttatgtacgggaactatgatggttttagtaaaacacctgagtttgatctctatattggagccaatctttgggaatctgttgttcttatcaatgaaacggctataatgaccaaagaaatcatttatacacctccatcagaccatattcatgtgtgtcttgttgataaaaacagaggaactccttttctctctgtcttggaaataagatttttgaagaacgatacatatgacactccttatgaagcgcttatgcttggtcgaagatgggatttcggcacagcgaccaatcttcaaatcaggtacaaagatgatttctatgatcgcatatggatgccttataagtctccgtaccagaaaactttgaatacatccctcaccatcgatgaaactaaccacaacggtttcagacctgctagtatagtcatgagatctgcgatagcacctggaaacgaaagcaatcccttgaagtttaactgggcaccagatgatccgaggtcgaagttttatatatacatgcacttcgctgaagttcgagagctacaaagaaacgagacacgagaattcgatatatacataaatgacgttatacttgccgagaatttccgtcctttttatttgtttacagacacacgctccactgtagatccagttggcagaaaaatgaatgaaattgtccttcagagaactggtgtatcgacccttccaccgatcatcaacgctatagagatctatcaaatcaacgagttccttcagttaccaacagatcaacaggatgttgatgccatgacgaagattaagttcaagtatagagtaaagaagaactggcaaggagacccatgtgttccagtggacaattcttgggaaggtcttgaatgtctccatagtgataataatacttctccaaaatccattgctctgaacttatcctccagtggactgactggccagattgatccagctttcgccaacctaacatcaataaataaattagacttatcaaacaacagcttaacagggaaagtacccgatttcctcgccagtttaccaaacttgactgaattaaacctggaaggaaacaagttaactggttcgattccagctaaactgttggagaaatcaaaagatggttctctttcgcttagatttggtggaaacccggacctttgtcagtctccctcatgtcaaacaacaacgaagaagaaaattggttacatcgtcccagtagtagcatcactcgcaggattgctcattgttttgaccgcattagctttgatctggcattttaaaaaacgatcacgaagaggtacaatctcaaacaaaccattaggtgtcaacaccggaccattggacacagccaaaagatactttatatactcagaagttgtgaatatcacaaacaacttcgagagagttcttggtaaaggaggttttggtaaagtataccatggtttcttgaatggagatcaagtagctgtgaagatactttccgaagagtcaactcaaggttacaaagagtttcgagcagaggttgagcttctgatgagagtccatcacacaaatttgacatctcttatcggatactgcaatgaagataaccacatggcacttatctacgagtacatggctaatggaaacttaggagactatttgtcaggaaaaagttccttaatcttgagctgggaagagagattacagatatcattggatgcagcacaaggcctcgagtatctccattacggttgcaagcctcccatagttcacagagatgtgaagccggcaaatatcttactgaacgagaatcttcaagccaagatagctgactttggtttatctagaagcttcccagtcgaaggtagtagtcaagtctccaccgttgtcgctggaaccatcggttacttagaccctgagtattacgcaacgcggcaaatgaacgagaagagtgatgtttacagcttcggggtggttcttcttgaagtaataacaggaaaaccggcaatttggcattcaagaacagagagtgtgcatctaagtgatcaggttggttcaatgttggcgaatggagacataaaaggtattgtggatcaacgtctgggagatagatttgaggttggctcggcttggaagatcactgaactagcattggcttgtgcgtctgagagttcagaacaaagaccgacaatgagccaagtcgttatggagctgaaacagagtatctttgggagagtgaacaatcgaagtgaccataaggaccctgtgagaatggttacgatgaacctcgatactgaaatggttcctcgggcgaggtaaagatggatatttgtatcttcataaaactatcagtgtattatcatcccatcattaccgttactatcagtatcattcaaaatcagccatgaatcatgttaaatgcacttg

SEQ ID NO: 80620 - protein, 876 aa, Arabidopsis thaliana
  peptide (1)..(876): Ceres Seq. ID no. 12656626
  misc_feature (1)..(876): Homolog of NCBI NO: 15224735 NR Description: putative receptor-like protein kinase; protein At2g19190.1, supported by cDNA: gi_19569556 [Arabidopsis
  misc_feature (16)..(876): Homolog of NCBI NO: 15224738 NR Description: putative receptor-like protein kinase; protein id:
  misc_feature (4)..(876): Homolog of NCBI NO: 15224743 NR Description: putative receptor-like protein kinase; protein id:
  misc_feature (74)..(854): Homolog of NCBI NO: 15221237 NR Description: putative light repressible receptor protein
  misc_feature (9)..(681): Homolog of NCBI NO: 9837280 NR Description: leaf senescence-associated receptor-like protein
  misc_feature (681)..(876): Homolog of NCBI NO: 9837280 NR Description: leaf senescence-associated receptor-like protein
  misc_feature (12)..(876): Homolog of NCBI NO: 15227017 NR Description: putative receptor-like protein kinase; protein id:
  misc_feature (74)..(854): Homolog of NCBI NO: 25387099 NR Description: hypothetical protein [imported] - Arabidopsis >gi|4836918|gb|AAD30620.1|AC007153_12 Very Similar to light
  misc_feature (6)..(846): Homolog of NCBI NO: 15218033 NR Description: receptor protein kinase, putative; protein id: [Arabidopsis thaliana] >gi|25405499|pir||B96557 probable receptor
  misc_feature (1)..(876): Homolog of NCBI NO: 15231403 NR Description: receptor-like protein kinase homolog; protein id:
MTRLRLLSWISITSCVCLVFAQDQSGFISIDCGIPDDSSYTDEKTNMKYVSDLGFVESGTSHSIVSDLQTTSLERQFQNVRSFPEGKRNCYDIRPQQGKGFKYLIRTRFMYGNYDGFSKTPEFDLYIGANLWESVVLINETAIMTKEIIYTPPSDHIHVCLVDKNRGTPFLSVLEIRFLKNDTYDTPYEALMLGRRWDFGTATNLQIRYKDDFYDRIWMPYKSPYQKTLNTSLTIDETNHNGFRPASIVMRSAIAPGNESNPLKFNWAPDDPRSKFYIYMHFAEVRELQRNETREFDIYINDVILAENFRPFYLFTDTRSTVDPVGRKMNEIVLQRTGVSTLPPIINAIEIYQINEFLQLPTDQQDVDAMTKIKFKYRVKKNWQGDPCVPVDNSWEGLECLHSDNNTSPKSIALNLSSSGLTGQIDPAFANLTSINKLDLSNNSLTGKVPDFLASLPNLTELNLEGNKLTGSIPAKLLEKSKDGSLSLRFGGNPDLCQSPSCQTTTKKKIGYIVPVVASLAGLLIVLTALALIWHFKKRSRRGTISNKPLGVNTGPLDTAKRYFIYSEVVNITNNFERVLGKGGFGKVYHGFLNGDQVAVKILSEESTQGYKEFRAEVELLMRVHHTNLTSLIGYCNEDNHMALIYEYMANGNLGDYLSGKSSLILSWEERLQISLDAAQGLEYLHYGCKPPIVHRDVKPANILLNENLQAKIADFGLSRSFPVEGSSQVSTVVAGTIGYLDPEYYATRQMNEKSDVYSFGVVLLEVITGKPAIWHSRTESVHLSDQVGSMLANGDIKGIVDQRLGDRFEVGSAWKITELALACASESSEQRPTMSQVVMELKQSIFGRVNNRSDHKDPVRMVTMNLDTEMVPRAR

SEQ ID NO: 80621 - protein, 830 aa, Arabidopsis thaliana
  peptide (1)..(830): Ceres Seq. ID no. 12656627
  misc_feature (1)..(830): Homolog of NCBI NO: 15224735 NR Description: putative receptor-like protein kinase; protein At2g19190.1, supported by cDNA: gi_19569556 [Arabidopsis
  misc_feature (1)..(830): Homolog of NCBI NO: 15224738 NR Description: putative receptor-like protein kinase; protein id:
  misc_feature (1)..(830): Homolog of NCBI NO: 15224743 NR Description: putative receptor-like protein kinase; protein id:
  misc_feature (28)..(808): Homolog of NCBI NO: 15221237 NR Description: putative light repressible receptor protein
  misc_feature (1)..(635): Homolog of NCBI NO: 9837280 NR Description: leaf senescence-associated receptor-like protein
  misc_feature (635)..(830): Homolog of NCBI NO: 9837280 NR Description: leaf senescence-associated receptor-like protein
  misc_feature (1)..(830): Homolog of NCBI NO: 15227017 NR Description: putative receptor-like protein kinase; protein id:
  misc_feature (28)..(808): Homolog of NCBI NO: 25387099 NR Description: hypothetical protein [imported] - Arabidopsis >gi|4836918|gb|AAD30620.1|AC007153_12 Very Similar to light
  misc_feature (1)..(800): Homolog of NCBI NO: 15218033 NR Description: receptor protein kinase, putative; protein id: [Arabidopsis thaliana] >gi|25405499|pir||B96557 probable receptor
  misc_feature (1)..(830): Homolog of NCBI NO: 15231403 NR Description: receptor-like protein kinase homolog; protein id:
MKYVSDLGFVESGTSHSIVSDLQTTSLERQFQNVRSFPEGKRNCYDIRPQQGKGFKYLIRTRFMYGNYDGFSKTPEFDLYIGANLWESVVLINETAIMTKEIIYTPPSDHIHVCLVDKNRGTPFLSVLEIRFLKNDTYDTPYEALMLGRRWDFGTATNLQIRYKDDFYDRIWMPYKSPYQKTLNTSLTIDETNHNGFRPASIVMRSAIAPGNESNPLKFNWAPDDPRSKFYIYMHFAEVRELQRNETREFDIYINDVILAENFRPFYLFTDTRSTVDPVGRKMNEIVLQRTGVSTLPPIINAIEIYQINEFLQLPTDQQDVDAMTKIKFKYRVKKNWQGDPCVPVDNSWEGLECLHSDNNTSPKSIALNLSSSGLTGQIDPAFANLTSINKLDLSNNSLTGKVPDFLASLPNLTELNLEGNKLTGSIPAKLLEKSKDGSLSLRFGGNPDLCQSPSCQTTTKKKIGYIVPVVASLAGLLIVLTALALIWHFKKRSRRGTISNKPLGVNTGPLDTAKRYFIYSEVVNITNNFERVLGKGGFGKVYHGFLNGDQVAVKILSEESTQGYKEFRAEVELLMRVHHTNLTSLIGYCNEDNHMALIYEYMANGNLGDYLSGKSSLILSWEERLQISLDAAQGLEYLHYGCKPPIVHRDVKPANILLNENLQAKIADFGLSRSFPVEGSSQVSTVVAGTIGYLDPEYYATRQMNEKSDVYSFGVVLLEVITGKPAIWHSRTESVHLSDQVGSMLANGDIKGIVDQRLGDRFEVGSAWKITELALACASESSEQRPTMSQVVMELKQSIFGRVNNRSDHKDPVRMVTMNLDTEMVPRAR

SEQ ID NO: 80622 - protein, 767 aa, Arabidopsis thaliana
  peptide (1)..(767): Ceres Seq. ID no. 12656628
  misc_feature (1)..(767): Homolog of NCBI NO: 15224735 NR Description: putative receptor-like protein kinase; protein At2g19190.1, supported by cDNA: gi_19569556 [Arabidopsis
  misc_feature (1)..(767): Homolog of NCBI NO: 15224738 NR Description: putative receptor-like protein kinase; protein id:
  misc_feature (1)..(767): Homolog of NCBI NO: 15224743 NR Description: putative receptor-like protein kinase; protein id:
  misc_feature (1)..(745): Homolog of NCBI NO: 15221237 NR Description: putative light repressible receptor protein
  misc_feature (1)..(572): Homolog of NCBI NO: 9837280 NR Description: leaf senescence-associated receptor-like protein
  misc_feature (572)..(767): Homolog of NCBI NO: 9837280 NR Description: leaf senescence-associated receptor-like protein
  misc_feature (1)..(767): Homolog of NCBI NO: 15227017 NR Description: putative receptor-like protein kinase; protein id:
  misc_feature (1)..(745): Homolog of NCBI NO: 25387099 NR Description: hypothetical protein [imported] - Arabidopsis >gi|4836918|gb|AAD30620.1|AC007153_12 Very Similar to light
  misc_feature (1)..(737): Homolog of NCBI NO: 15218033 NR Description: receptor protein kinase, putative; protein id: [Arabidopsis thaliana] >gi|25405499|pir||B96557 probable receptor
  misc_feature (1)..(767): Homolog of NCBI NO: 15231403 NR Description: receptor-like protein kinase homolog; protein id:
MYGNYDGFSKTPEFDLYIGANLWESVVLINETAIMTKEIIYTPPSDHIHVCLVDKNRGTPFLSVLEIRFLKNDTYDTPYEALMLGRRWDFGTATNLQIRYKDDFYDRIWMPYKSPYQKTLNTSLTIDETNHNGFRPASIVMRSAIAPGNESNPLKFNWAPDDPRSKFYIYMHFAEVRELQRNETREFDIYINDVILAENFRPFYLFTDTRSTVDPVGRKMNEIVLQRTGVSTLPPIINAIEIYQINEFLQLPTDQQDVDAMTKIKFKYRVKKNWQGDPCVPVDNSWEGLECLHSDNNTSPKSIALNLSSSGLTGQIDPAFANLTSINKLDLSNNSLTGKVPDFLASLPNLTELNLEGNKLTGSIPAKLLEKSKDGSLSLRFGGNPDLCQSPSCQTTTKKKIGYIVPVVASLAGLLIVLTALALIWHFKKRSRRGTISNKPLGVNTGPLDTAKRYFIYSEVVNITNNFERVLGKGGFGKVYHGFLNGDQVAVKILSEESTQGYKEFRAEVELLMRVHHTNLTSLIGYCNEDNHMALIYEYMANGNLGDYLSGKSSLILSWEERLQISLDAAQGLEYLHYGCKPPIVHRDVKPANILLNENLQAKIADFGLSRSFPVEGSSQVSTVVAGTIGYLDPEYYATRQMNEKSDVYSFGVVLLEVITGKPAIWHSRTESVHLSDQVGSMLANGDIKGIVDQRLGDRFEVGSAWKITELALACASESSEQRPTMSQVVMELKQSIFGRVNNRSDHKDPVRMVTMNLDTEMVPRAR

SEQ ID NO: 80623 - DNA, 2002 bp, Arabidopsis thaliana
  misc_feature (1)..(2002): Ceres Seq. ID no. 12656637
  misc_feature: MA Experiment ID: 20000307 Result: Up-regulated in Transcription
  misc_feature: MA Experiment 20000307 PARAMETER Experiment Name: At_Germinating_Seeds_Sub_P Parameter: Age (hr) Value: 24 vs. 0
  misc_feature: MA Experiment 20000307 PARAMETER Experiment Name: At_Germinating_Seeds_Sub_P Parameter: Organism Value: A. thaliana
  misc_feature: MA Experiment 20000307 PARAMETER Experiment Name: At_Germinating_Seeds_Sub_P Parameter: Plant Line Value: WS
  misc_feature: MA Experiment 20000307 PARAMETER Experiment Name: At_Germinating_Seeds_Sub_P Parameter: Tissue Value: Germinating Seeds
  misc_feature: MA Experiment ID: 20000328 Result: Down-regulated in Transcription
  misc_feature: MA Experiment 20000328 PARAMETER Experiment Name: At_42deg_Heat_Sub_P Parameter: Age (day) Value: 14
  misc_feature: MA Experiment 20000328 PARAMETER Experiment Name: At_42deg_Heat_Sub_P Parameter: Organism Value: A. thaliana
  misc_feature: MA Experiment 20000328 PARAMETER Experiment Name: At_42deg_Heat_Sub_P Parameter: Plant Line Value: WS
  misc_feature: MA Experiment 20000328 PARAMETER Experiment Name: At_42deg_Heat_Sub_P Parameter: Temperature (deg C) Value: 42 vs. 22
  misc_feature: MA Experiment 20000328 PARAMETER Experiment Name: At_42deg_Heat_Sub_P Parameter: Timepoint (hr) Value: 6
  misc_feature: MA Experiment 20000328 PARAMETER Experiment Name: At_42deg_Heat_Sub_P Parameter: Tissue Value: Aerial
  misc_feature: MA Experiment ID: 20000355 Result: Down-regulated in Transcription
  misc_feature: MA Experiment 20000355 PARAMETER Experiment Name: At_Siliques_Sub_P Parameter: Age (day) Value: 21
  misc_feature: MA Experiment 20000355 PARAMETER Experiment Name: At_Siliques_Sub_P Parameter: Organism Value: A. thaliana
  misc_feature: MA Experiment 20000355 PARAMETER Experiment Name: At_Siliques_Sub_P Parameter: Plant Line Value: WS
  misc_feature: MA Experiment 20000355 PARAMETER Experiment Name: At_Siliques_Sub_P Parameter: Tissue Value: Less Than 5mm Siliques vs. Whole Plant
atctctgcctcaaaaatttgcttcctctgtttcgaacccaattgggcatcttcgtcgtcttcttcttcaacattcatcatcgtcatcaatttctctgtagctctttcacaagtatttcttcaatttcatagcgagagagaaataaaagggagaacacagagatcagagagaaattcaaaaacgaatccgtgtgaggacgttttaaaactgccaaagagacgttttacttttacatgcacatagagacatacgtttattttgtgtagctatagctcttaagagtttgaattttctcgagatctttgaccggagcgaaaacgacgaagatatagaaaatctagcgaaacgacgattcggacttgggagactctcttgcgttgtgcttggatctggttccgttgtaaatttgaggttttgattgaccagaggaagttagctttgttcatctagattaggctattattgaggtgttgttgtggctctgaagcaataaaggatttgatgagatgaaggcagttaaaagatggagtatagggaacttagcggacattcccgtgtctttgcctggagctcgataccgtgctcctcctccaggaagaagacgagtatggatcatcatggtgctttcactgatcaccatgttctttattatggcttacatgtatcctcatcatagtaaacgtgcttgttatatgatttcatcaagaggatgcaaggctttagctgattggcttccaccttctctgagggaatattcagatgatgagattgcagctcgtgtagtcattagagaaatattgagttcacctcctgttattagaaagaactctaaaattgctttcatgtttttaactcctggtacattgccttttgagaggctttgggacagatttttcctgggccatgaagggaaattctctgtttatatacatgcatcaaaggaaaggccagttcactacagtcgttactttctcaaccgcgaaattcgtagtgatgaggtggtgtggggaaggatatcaatggttgacgcagagagacggttgttagctaatgctcttagagacacttctaaccagcaatttgttttactctctgatagttgtgtaccacttcgaagttttgaatacatttacaattacctgatgcacagcaatctcagctatgttgactgctttgacgatccaggtcaacatggagcaggcaggcatatgaatcacatgttgcctgaaatcccaaagaaggattttcgaaagggtgcacagtggttcaccatgaagcgacaacacgctgtagcaactatggcagacagtctttactactctaaattccgagattactgcgggccaggtatagagaacaacaagaactgcatagctgatgaacactatctgccaacattctttcatatgcttgatcccggtggcattgctaactggactgtaacacaagttgattggtctgagagaaagtggcatcccaaaacatatatgcctgaggatatcacacacgagttactaaacaacctcacgtctactgacacactcgtacatgtcacaagtgttgggatgggtgaagaaatatggatgccttgtatgtggaacggaatccaaagaccgtgttacttgtttggaaggaaatttcacccggatacactcgataaactgttggatctcttctcaaattacacaagatcagtcacttggaatttgtgattaaaatcagatttttcttcatatacacagtattctttgaccaatgttcgactcccccacccacatgaatcaatatcacctttgaagctgtaacactgcaagtctagaagcttaaggaggtatgagatattttatctcataatatgcttcatttggttggaaggatacgttggttttattcttctctactctgttttttttttggctatatatctcattgttactttactgttgttttgtgttcagaatgttgaacaaacaaaagttatacaggtttatagagtttcttt

SEQ ID NO: 80624 - protein, 401 aa, Arabidopsis thaliana
  peptide (1)..(401): Ceres Seq. ID no. 12656638
  misc_feature (143)..(254): Pfam Name: Arabidopsis protein of unknown function, DUF266 Pfam Description: Arabidopsis protein of unknown function, DUF266
  misc_feature (1)..(401): Homolog of NCBI NO: 22329024 NR Description: putative protein; protein id: At4g30060.1, by cDNA: gi_17065049 [Arabidopsis thaliana] putative protein [Arabidopsis thaliana]
  misc_feature (1)..(397): Homolog of NCBI NO: 30680587 NR Description: expressed protein [Arabidopsis thaliana]
  misc_feature (1)..(198): Homolog of NCBI NO: 7486517 NR Description: hypothetical protein F6G3.90 - Arabidopsis >gi|4938482|emb|CAB43841.1| putative protein [Arabidopsis >gi|7269906|emb|CAB80999.1| putative protein [Arabidopsis
  misc_feature (215)..(341): Homolog of NCBI NO: 7486517 NR Description: hypothetical protein F6G3.90 - Arabidopsis >gi|4938482|emb|CAB43841.1| putative protein [Arabidopsis >gi|7269906|emb|CAB80999.1| putative protein [Arabidopsis
  misc_feature (1)..(351): Homolog of NCBI NO: 7487281 NR Description: hypothetical protein T20K24.18 - Arabidopsis >gi|3176725|gb|AAD12039.1| (AC002392) unknown protein
  misc_feature (31)..(396): Homolog of NCBI NO: 15236024 NR Description: putative protein; protein id: At4g25870.1
  misc_feature (31)..(397): Homolog of NCBI NO: 22327910 NR Description: putative protein; protein id: At5g57270.1, by cDNA: gi_17065015, supported by cDNA: gi_17065151, supported cDNA: gi_20260013 [Arabidopsis thaliana]
  misc_feature (31)..(397): Homolog of NCBI NO: 17065016 NR Description: Unknown protein [Arabidopsis thaliana]
  misc_feature (31)..(353): Homolog of NCBI NO: 8777360 NR Description: gene_id:MJB24.8~pir||T04241~strong similarity to
  misc_feature (19)..(394): Homolog of NCBI NO: 38637182 NR Description: unknown protein [Oryza sativa (japonica
MKAVKRWSIGNLADIPVSLPGARYRAPPPGRRRVWIIMVLSLITMFFIMAYMYPHHSKRACYMISSRGCKALADWLPPSLREYSDDEIAARVVIREILSSPPVIRKNSKIAFMFLTPGTLPFERLWDRFFLGHEGKFSVYIHASKERPVHYSRYFLNREIRSDEVVWGRISMVDAERRLLANALRDTSNQQFVLLSDSCVPLRSFEYIYNYLMHSNLSYVDCFDDPGQHGAGRHMNHMLPEIPKKDFRKGAQWFTMKRQHAVATMADSLYYSKFRDYCGPGIENNKNCIADEHYLPTFFHMLDPGGIANWTVTQVDWSERKWHPKTYMPEDITHELLNNLTSTDTLVHVTSVGMGEEIWMPCMWNGIQRPCYLFGRKFHPDTLDKLLDLFSNYTRSVTWNL

SEQ ID NO: 80625 - protein, 364 aa, Arabidopsis thaliana
  peptide (1)..(364): Ceres Seq. ID no. 12656639
  misc_feature (106)..(217): Pfam Name: Arabidopsis protein of unknown function, DUF266 Pfam Description: Arabidopsis protein of unknown function, DUF266
  misc_feature (1)..(364): Homolog of NCBI NO: 22329024 NR Description: putative protein; protein id: At4g30060.1, by cDNA: gi_17065049 [Arabidopsis thaliana] putative protein [Arabidopsis thaliana]
  misc_feature (1)..(360): Homolog of NCBI NO: 30680587 NR Description: expressed protein [Arabidopsis thaliana]
  misc_feature (1)..(161): Homolog of NCBI NO: 7486517 NR Description: hypothetical protein F6G3.90 - Arabidopsis >gi|4938482|emb|CAB43841.1| putative protein [Arabidopsis >gi|7269906|emb|CAB80999.1| putative protein [Arabidopsis
  misc_feature (178)..(304): Homolog of NCBI NO: 7486517 NR Description: hypothetical protein F6G3.90 - Arabidopsis >gi|4938482|emb|CAB43841.1| putative protein [Arabidopsis >gi|7269906|emb|CAB80999.1| putative protein [Arabidopsis
  misc_feature (1)..(314): Homolog of NCBI NO: 7487281 NR Description: hypothetical protein T20K24.18 - Arabidopsis >gi|3176725|gb|AAD12039.1| (AC002392) unknown protein
  misc_feature (1)..(359): Homolog of NCBI NO: 15236024 NR Description: putative protein; protein id: At4g25870.1
  misc_feature (1)..(360): Homolog of NCBI NO: 22327910 NR Description: putative protein; protein id: At5g57270.1, by cDNA: gi_17065015, supported by cDNA: gi_17065151, supported cDNA: gi_20260013 [Arabidopsis thaliana]
  misc_feature (1)..(360): Homolog of NCBI NO: 17065016 NR Description: Unknown protein [Arabidopsis thaliana]
  misc_feature (1)..(316): Homolog of NCBI NO: 8777360 NR Description: gene_id:MJB24.8~pir||T04241~strong similarity to
  misc_feature (1)..(357): Homolog of NCBI NO: 38637182 NR Description: unknown protein [Oryza sativa (japonica
MVLSLITMFFIMAYMYPHHSKRACYMISSRGCKALADWLPPSLREYSDDEIAARVVIREILSSPPVIRKNSKIAFMFLTPGTLPFERLWDRFFLGHEGKFSVYIHASKERPVHYSRYFLNREIRSDEVVWGRISMVDAERRLLANALRDTSNQQFVLLSDSCVPLRSFEYIYNYLMHSNLSYVDCFDDPGQHGAGRHMNHMLPEIPKKDFRKGAQWFTMKRQHAVATMADSLYYSKFRDYCGPGIENNKNCIADEHYLPTFFHMLDPGGIANWTVTQVDWSERKWHPKTYMPEDITHELLNNLTSTDTLVHVTSVGMGEEIWMPCMWNGIQRPCYLFGRKFHPDTLDKLLDLFSNYTRSVTWNL

SEQ ID NO: 80626 - protein, 357 aa, Arabidopsis thaliana
  peptide (1)..(357): Ceres Seq. ID no. 12656640
  misc_feature (99)..(210): Pfam Name: Arabidopsis protein of unknown function, DUF266 Pfam Description: Arabidopsis protein of unknown function, DUF266
  misc_feature (1)..(357): Homolog of NCBI NO: 22329024 NR Description: putative protein; protein id: At4g30060.1, by cDNA: gi_17065049 [Arabidopsis thaliana] putative protein [Arabidopsis thaliana]
  misc_feature (1)..(353): Homolog of NCBI NO: 30680587 NR Description: expressed protein [Arabidopsis thaliana]
  misc_feature (1)..(154): Homolog of NCBI NO: 7486517 NR Description: hypothetical protein F6G3.90 - Arabidopsis >gi|4938482|emb|CAB43841.1| putative protein [Arabidopsis >gi|7269906|emb|CAB80999.1| putative protein [Arabidopsis
  misc_feature (171)..(297): Homolog of NCBI NO: 7486517 NR Description: hypothetical protein F6G3.90 - Arabidopsis >gi|4938482|emb|CAB43841.1| putative protein [Arabidopsis >gi|7269906|emb|CAB80999.1| putative protein [Arabidopsis
  misc_feature (1)..(307): Homolog of NCBI NO: 7487281 NR Description: hypothetical protein T20K24.18 - Arabidopsis >gi|3176725|gb|AAD12039.1| (AC002392) unknown protein
  misc_feature (1)..(352): Homolog of NCBI NO: 15236024 NR Description: putative protein; protein id: At4g25870.1
  misc_feature (1)..(353): Homolog of NCBI NO: 22327910 NR Description: putative protein; protein id: At5g57270.1, by cDNA: gi_17065015, supported by cDNA: gi_17065151, supported cDNA: gi_20260013 [Arabidopsis thaliana]
  misc_feature (1)..(353): Homolog of NCBI NO: 17065016 NR Description: Unknown protein [Arabidopsis thaliana]
  misc_feature (1)..(309): Homolog of NCBI NO: 8777360 NR Description: gene_id:MJB24.8~pir||T04241~strong similarity to
  misc_feature (1)..(350): Homolog of NCBI NO: 38637182 NR Description: unknown protein [Oryza sativa (japonica
MFFIMAYMYPHHSKRACYMISSRGCKALADWLPPSLREYSDDEIAARVVIREILSSPPVIRKNSKIAFMFLTPGTLPFERLWDRFFLGHEGKFSVYIHASKERPVHYSRYFLNREIRSDEVVWGRISMVDAERRLLANALRDTSNQQFVLLSDSCVPLRSFEYIYNYLMHSNLSYVDCFDDPGQHGAGRHMNHMLPEIPKKDFRKGAQWFTMKRQHAVATMADSLYYSKFRDYCGPGIENNKNCIADEHYLPTFFHMLDPGGIANWTVTQVDWSERKWHPKTYMPEDITHELLNNLTSTDTLVHVTSVGMGEEIWMPCMWNGIQRPCYLFGRKFHPDTLDKLLDLFSNYTRSVTWNL

SEQ ID NO: 80627 - DNA, 2305 bp, Arabidopsis thaliana
  misc_feature (1)..(2305): Ceres Seq. ID no. 12656641
  misc_feature: MA Experiment ID: 20000227 Result: Down-regulated in Transcription
  misc_feature: MA Experiment 20000227 PARAMETER Experiment Name: At_Root-Tips-vs-Tops_P Parameter: Tissue Value: Root Tips vs. Root Tops
  misc_feature: MA Experiment ID: 20000794 Result: Up-regulated in Transcription
  misc_feature: MA Experiment 20000794 PARAMETER Experiment Name: At_Petals_P Parameter: Age (day) Value: 23-25 days
  misc_feature: MA Experiment 20000794 PARAMETER Experiment Name: At_Petals_P Parameter: Plant Line Value: WS
  misc_feature: MA Experiment 20000794 PARAMETER Experiment Name: At_Petals_P Parameter: Tissue Value: Petals vs. Whole plant
gtgcaaaaagtgtaaccttccttatccgattctgaagcagaaattagctgcagaatcttcagattctctctatacctagattggtttttcacagaatcttcgctattttgttcagatctgccactgtttcagcaaaaacggtcacaaaaaatatgataaatgtgatgaatccaatgaaaggtggaacagagaaaggtttagatcctcagctatggcatgcatgtgctggtggtatggttcgtatgcctcctatgaactctaaagtcttttactttcctcaaggtcacgccgaaaacgcttacgattgtgtcgatttcggtaatctccctattcctcccatggttttgtgtcgtgttttagccattaagtatatggctgatgctgaatctgacgaggttttcgctaaactgagattgattcctttgaaagatgatgagtatgttgatcacgagtatggtgatggtgaagatagtaacggtttcgagagtaatagtgagaaaacgccttcgtttgctaagactttgactcagtctgatgctaataacggtgggggtttctctgttcctcgttattgcgctgagacgattttcccgaggttggattataacgccgagccgccggttcagaccattcttgctaaggatgttcatggtgatgtttggaagttcagacatatttatagagggacgcctcggcgtcaccttcttacaaccggatggagtaattttgtaaaccagaagaagcttgtggcgggagattcgattgtcttcatgagagcggagaatggagatctttgtgtaggtattaggagggctaagagaggagggataggtaatggacccgaatattcagcgggttggaatccgatcggtggaagttgcggctactcttctctgttaagggaagatgaaagcaatagtttgaggagaagtaattgttcccttgcggataggaaggggaaagtgacggctgaatctgttatagaagcagccactcttgctattagcggaagaccgtttgaggttgtgtactatccgagagctagcacttcagagttttgtgtcaaggcattagatgctcgagctgccatgcggattccgtggtgctcaggtatgaggtttaagatggcttttgagacagaggattcgtctcggataagttggtttatggggactgtttcagctgttaatgtctctgatcctatccgttggcctaactctccttggcggcttctacaggtggcgtgggatgagccagatttactccaaaacgtgaagcgagttaacccgtggttggtggaattggtatcaaacgtacatccgatcccgcttacttcgttttcgccaccgaggaaaaagatgcggctacctcagcatccagattacaacaatctgatcaattcgattccagtaccttcattcccaagcaatccccttattagatcaagcccgttaagctctgttctggacaatgttcccgtgggtttacagggagccaggcataatgctcatcagtactacgggttatcatcttcggatcttcaccattactacttgaatagaccacctcctcctcctcctccatcctctctccaactttctccttctctcggtctccgaaacatcgataccaaaaacgaaaaaggattttgctttttgacaatgggaacaacaccatgcaatgataccaaatctaaaaagtcccatattgtattgttcggcaagcttatactacccgaggaacagctatcagaaaaaggctcaacggataccgcaaacatagagaaaacgcagatttcatcaggcgggtcgaaccaaaacggcgttgcgggaagggagttttcttcgtcagatgaaggatcaccttgctctaagaaagttcatgatgcatcaggtttggaaacagggcattgtaaagtgtttatggagtcagacgatgtaggtcgaaccttagacctatcggttcttggttcatacgaagaattgagtcggaaactctctgacatgtttggaatcaaaaagtctgagatgttaagctctgttctctatagggatgcatcaggagccatcaaatacgcaggaaacgaacctttcagtgagttcttgaagacagctcgaagattgacaattctgacggaacaaggaagtgagagcgttgtagtataacttggcagagtgttttgttggagcttggaagtcaaaactcaacgattgaatcttttaagttttttttttcttttatttgtttattttagttccacttttttggattatgtaagtttcaaaatgcaattcacaatctattt

SEQ ID NO: 80628 - protein, 670 aa, Arabidopsis thaliana
  peptide (1)..(670): Ceres Seq. ID no. 12656642
  misc_feature (119)..(224): Pfam Name: B3 DNA binding domain Pfam Description: B3 DNA binding domain
  misc_feature (16)..(660): Homolog of NCBI NO: 37535416 NR Description: putative transcription factor [Oryza sativa
  misc_feature (13)..(668): Homolog of NCBI NO: 15226389 NR Description: auxin respone transcription factor; protein id: supported by cDNA: gi_12484202, supported by cDNA: gi_13272404
  misc_feature (13)..(668): Homolog of NCBI NO: 6165644 NR Description: auxin response factor 10 [Arabidopsis thaliana]
  misc_feature (12)..(615): Homolog of NCBI NO: 19352051 NR Description: auxin response factor 10 [Oryza sativa]
  misc_feature (16)..(555): Homolog of NCBI NO: 15810291 NR Description: auxin response factor ARF17 [Arabidopsis thaliana]
  misc_feature (16)..(555): Homolog of NCBI NO: 12323297 NR Description: putative auxin response factor; 79762-82020
  misc_feature (16)..(555): Homolog of NCBI NO: 18411720 NR Description: auxin response factor, putative; protein id: supported by cDNA: gi_15810290 [Arabidopsis thaliana]
  misc_feature (29)..(555): Homolog of NCBI NO: 25370632 NR Description: protein F28K19.6 [imported] - Arabidopsis >gi|6573757|gb|AAF17677.1|AC009243_4 F28K19.6 [Arabidopsis
  misc_feature (19)..(237): Homolog of NCBI NO: 19352033 NR Description: Arabidopsis ETTIN-like protein 1 [Oryza sativa]
  misc_feature (289)..(411): Homolog of NCBI NO: 19352033 NR Description: Arabidopsis ETTIN-like protein 1 [Oryza sativa]
MINVMNPMKGGTEKGLDPQLWHACAGGMVRMPPMNSKVFYFPQGHAENAYDCVDFGNLPIPPMVLCRVLAIKYMADAESDEVFAKLRLIPLKDDEYVDHEYGDGEDSNGFESNSEKTPSFAKTLTQSDANNGGGFSVPRYCAETIFPRLDYNAEPPVQTILAKDVHGDVWKFRHIYRGTPRRHLLTTGWSNFVNQKKLVAGDSIVFMRAENGDLCVGIRRAKRGGIGNGPEYSAGWNPIGGSCGYSSLLREDESNSLRRSNCSLADRKGKVTAESVIEAATLAISGRPFEVVYYPRASTSEFCVKALDARAAMRIPWCSGMRFKMAFETEDSSRISWFMGTVSAVNVSDPIRWPNSPWRLLQVAWDEPDLLQNVKRVNPWLVELVSNVHPIPLTSFSPPRKKMRLPQHPDYNNLINSIPVPSFPSNPLIRSSPLSSVLDNVPVGLQGARHNAHQYYGLSSSDLHHYYLNRPPPPPPPSSLQLSPSLGLRNIDTKNEKGFCFLTMGTTPCNDTKSKKSHIVLFGKLILPEEQLSEKGSTDTANIEKTQISSGGSNQNGVAGREFSSSDEGSPCSKKVHDASGLETGHCKVFMESDDVGRTLDLSVLGSYEELSRKLSDMFGIKKSEMLSSVLYRDASGAIKYAGNEPFSEFLKTARRLTILTEQGSESVVV

SEQ ID NO: 80629 - protein, 666 aa, Arabidopsis thaliana
  peptide (1)..(666): Ceres Seq. ID no. 12656643
  misc_feature (115)..(220): Pfam Name: B3 DNA binding domain Pfam Description: B3 DNA binding domain
  misc_feature (12)..(656): Homolog of NCBI NO: 37535416 NR Description: putative transcription factor [Oryza sativa
  misc_feature (9)..(664): Homolog of NCBI NO: 15226389 NR Description: auxin respone transcription factor; protein id: supported by cDNA: gi_12484202, supported by cDNA: gi_13272404
  misc_feature (9)..(664): Homolog of NCBI NO: 6165644 NR Description: auxin response factor 10 [Arabidopsis thaliana]
  misc_feature (8)..(611): Homolog of NCBI NO: 19352051 NR Description: auxin response factor 10 [Oryza sativa]
  misc_feature (12)..(551): Homolog of NCBI NO: 15810291 NR Description: auxin response factor ARF17 [Arabidopsis thaliana]
  misc_feature (12)..(551): Homolog of NCBI NO: 12323297 NR Description: putative auxin response factor; 79762-82020
  misc_feature (12)..(551): Homolog of NCBI NO: 18411720 NR Description: auxin response factor, putative; protein id: supported by cDNA: gi_15810290 [Arabidopsis thaliana]
  misc_feature (25)..(551): Homolog of NCBI NO: 25370632 NR Description: protein F28K19.6 [imported] - Arabidopsis >gi|6573757|gb|AAF17677.1|AC009243_4 F28K19.6 [Arabidopsis
  misc_feature (15)..(233): Homolog of NCBI NO: 19352033 NR Description: Arabidopsis ETTIN-like protein 1 [Oryza sativa]
  misc_feature (285)..(407): Homolog of NCBI NO: 19352033 NR Description: Arabidopsis ETTIN-like protein 1 [Oryza sativa]
MNPMKGGTEKGLDPQLWHACAGGMVRMPPMNSKVFYFPQGHAENAYDCVDFGNLPIPPMVLCRVLAIKYMADAESDEVFAKLRLIPLKDDEYVDHEYGDGEDSNGFESNSEKTPSFAKTLTQSDANNGGGFSVPRYCAETIFPRLDYNAEPPVQTILAKDVHGDVWKFRHIYRGTPRRHLLTTGWSNFVNQKKLVAGDSIVFMRAENGDLCVGIRRAKRGGIGNGPEYSAGWNPIGGSCGYSSLLREDESNSLRRSNCSLADRKGKVTAESVIEAATLAISGRPFEVVYYPRASTSEFCVKALDARAAMRIPWCSGMRFKMAFETEDSSRISWFMGTVSAVNVSDPIRWPNSPWRLLQVAWDEPDLLQNVKRVNPWLVELVSNVHPIPLTSFSPPRKKMRLPQHPDYNNLINSIPVPSFPSNPLIRSSPLSSVLDNVPVGLQGARHNAHQYYGLSSSDLHHYYLNRPPPPPPPSSLQLSPSLGLRNIDTKNEKGFCFLTMGTTPCNDTKSKKSHIVLFGKLILPEEQLSEKGSTDTANIEKTQISSGGSNQNGVAGREFSSSDEGSPCSKKVHDASGLETGHCKVFMESDDVGRTLDLSVLGSYEELSRKLSDMFGIKKSEMLSSVLYRDASGAIKYAGNEPFSEFLKTARRLTILTEQGSESVVV

SEQ ID NO: 80630 - protein, 663 aa, Arabidopsis thaliana
  peptide (1)..(663): Ceres Seq. ID no. 12656644
  misc_feature (112)..(217): Pfam Name: B3 DNA binding domain Pfam Description: B3 DNA binding domain
  misc_feature (9)..(653): Homolog of NCBI NO: 37535416 NR Description: putative transcription factor [Oryza sativa
  misc_feature (6)..(661): Homolog of NCBI NO: 15226389 NR Description: auxin respone transcription factor; protein id: supported by cDNA: gi_12484202, supported by cDNA: gi_13272404
  misc_feature (6)..(661): Homolog of NCBI NO: 6165644 NR Description: auxin response factor 10 [Arabidopsis thaliana]
  misc_feature (5)..(608): Homolog of NCBI NO: 19352051 NR Description: auxin response factor 10 [Oryza sativa]
  misc_feature (9)..(548): Homolog of NCBI NO: 15810291 NR Description: auxin response factor ARF17 [Arabidopsis thaliana]
  misc_feature (9)..(548): Homolog of NCBI NO: 12323297 NR Description: putative auxin response factor; 79762-82020
  misc_feature (9)..(548): Homolog of NCBI NO: 18411720 NR Description: auxin response factor, putative; protein id: supported by cDNA: gi_15810290 [Arabidopsis thaliana]
  misc_feature (22)..(548): Homolog of NCBI NO: 25370632 NR Description: protein F28K19.6 [imported] - Arabidopsis >gi|6573757|gb|AAF17677.1|AC009243_4 F28K19.6 [Arabidopsis
  misc_feature (12)..(230): Homolog of NCBI NO: 19352033 NR Description: Arabidopsis ETTIN-like protein 1 [Oryza sativa]
  misc_feature (282)..(404): Homolog of NCBI NO: 19352033 NR Description: Arabidopsis ETTIN-like protein 1 [Oryza sativa]
MKGGTEKGLDPQLWHACAGGMVRMPPMNSKVFYFPQGHAENAYDCVDFGNLPIPPMVLCRVLAIKYMADAESDEVFAKLRLIPLKDDEYVDHEYGDGEDSNGFESNSEKTPSFAKTLTQSDANNGGGFSVPRYCAETIFPRLDYNAEPPVQTILAKDVHGDVWKFRHIYRGTPRRHLLTTGWSNFVNQKKLVAGDSIVFMRAENGDLCVGIRRAKRGGIGNGPEYSAGWNPIGGSCGYSSLLREDESNSLRRSNCSLADRKGKVTAESVIEAATLAISGRPFEVVYYPRASTSEFCVKALDARAAMRIPWCSGMRFKMAFETEDSSRISWFMGTVSAVNVSDPIRWPNSPWRLLQVAWDEPDLLQNVKRVNPWLVELVSNVHPIPLTSFSPPRKKMRLPQHPDYNNLINSIPVPSFPSNPLIRSSPLSSVLDNVPVGLQGARHNAHQYYGLSSSDLHHYYLNRPPPPPPPSSLQLSPSLGLRNIDTKNEKGFCFLTMGTTPCNDTKSKKSHIVLFGKLILPEEQLSEKGSTDTANIEKTQISSGGSNQNGVAGREFSSSDEGSPCSKKVHDASGLETGHCKVFMESDDVGRTLDLSVLGSYEELSRKLSDMFGIKKSEMLSSVLYRDASGAIKYAGNEPFSEFLKTARRLTILTEQGSESVVV

SEQ ID NO: 80631 - DNA, 2506 bp, Arabidopsis thaliana
  misc_feature (1)..(2506): Ceres Seq. ID no. 12656657
  misc_feature: MA Experiment ID: 20000234 Result: Up-regulated in Transcription
  misc_feature: MA Experiment 20000234 PARAMETER Experiment Name: At_Siliques_P Parameter: Age (day) Value: 21
  misc_feature: MA Experiment 20000234 PARAMETER Experiment Name: At_Siliques_P Parameter: Organism Value: A. thaliana
  misc_feature: MA Experiment 20000234 PARAMETER Experiment Name: At_Siliques_P Parameter: Plant Line Value: WS
  misc_feature: MA Experiment 20000234 PARAMETER Experiment Name: At_Siliques_P Parameter: Tissue Value: Less Than 5mm Siliques vs. Whole Plant
  misc_feature: MA Experiment ID: 20000264 Result: Up-regulated in Transcription
  misc_feature: MA Experiment 20000264 PARAMETER Experiment Name: At_Open_Flower_P Parameter: Age (day) Value: 21
  misc_feature: MA Experiment 20000264 PARAMETER Experiment Name: At_Open_Flower_P Parameter: Plant Line Value: WS
  misc_feature: MA Experiment 20000264 PARAMETER Experiment Name: At_Open_Flower_P Parameter: Tissue Value: Open Flower vs. Whole Plant
  misc_feature: MA Experiment ID: 20000265 Result: Up-regulated in Transcription
  misc_feature: MA Experiment 20000265 PARAMETER Experiment Name: At_Open_Flower_P Parameter: Age (day) Value: 21
  misc_feature: MA Experiment 20000265 PARAMETER Experiment Name: At_Open_Flower_P Parameter: Plant Line Value: WS
  misc_feature: MA Experiment 20000265 PARAMETER Experiment Name: At_Open_Flower_P Parameter: Tissue Value: Closed Flower vs. Whole Plant
  misc_feature: MA Experiment ID: 20000286 Result: Up-regulated in Transcription
  misc_feature: MA Experiment 20000286 PARAMETER Experiment Name: At_Open_Flower_P Parameter: Age (day) Value: 21
  misc_feature: MA Experiment 20000286 PARAMETER Experiment Name: At_Open_Flower_P Parameter: Plant Line Value: WS
  misc_feature: MA Experiment 20000286 PARAMETER Experiment Name: At_Open_Flower_P Parameter: Tissue Value: Half Open vs. Whole Plant
actactcacaaatatatttttgaccgttgttcactctcaccttcttcacacgctccacatcttcttctgattgacctttaacacctgaaagtttctcctcttgagctttggaattgaagctaagataagaaatttagagagaaatgggatgttctcattcgaagtttgatgacgatgaagctgttcagatctgtaaagataggaaacgtttcatcaaacaagcagtggaacataggactgggtttgcttctggtcacattgcttatatccagtctctgaggaaggtttcagatgctctccgggaatatatcgaaggagatgagccacatgagttcatgttggacacatgtgtcactccagtgaagagaatgagcagctcaggcggcttcattgagatatctcctccttcaaaaatggttcagagtgaggcagagtcgaaattgaatgtcaacagttacttgatggctagtggaagcagaccggttcgggttgaagaaaagcctcctagatcacctgagacttttcaggttgagacttatggagcagatagtttctttgggatgaacatgaacatgaacagtccgggactaggcagtcacaatataccgcctccttcaccacagaactctcaatgggatttcttttggaatccattctcggcattggatcagtatggatacagttatgataaccaaaatggtatggatgatgatatgagacggctgaggcgggttcgggaagaagaagggattccagatcttgaagaagatgaatatgtaaagtttgaggatcatcataacatgaaagcaacagaagattttaatggaggtaaaatgtatcaagaagataaagtagaacatgttaatgaggagttcacggacagtggatgcaagattgagaatgagagcgacaagaactgcaatggaactcaagaacggcgcagtcttgaggtgtccagaggaggaactacagggcatgttgttggagttacatcagatgatggaaaaggagagacacctggtttcactgtgtacttgaatagaaggccaacaagcatggcagaagttattaaagatcttgaagatcagtttgcgatcatatgtaccgctggtaaagaagtctcgggtctgttggaagctagtcgagttcaatacacatcctctaatgaactgagtgccatgacaatgctgaacccagtagctttgttccgctcaggcggctcatcgagatcttcttcctcatcaagattcttgatcagctcttctggaggttcaagggcgagtgaattcgaaagcagcagcgaattttcggaagaatcttgtatgctctcgggtagccatcaatcaacattggaccgactatacgcgtgggagaagaaactctatgatgaagtcaagtctggagaccgaatacggattgcatatgaaaagaaatgtttggtgctgaggaatcaggatgtgaaaggagctgactcttcggcagttgataaaacaagagctacaataagagatctacatactcagatcaaggtctctatacactcaatagagtctatttccgaaaggatcgagactcttcgcgaccaagaactgcttccacagcttcttgagcttgttcaaggattagctcagatgtggaaagtgatggcagagtgtcaccagatacagaagcgaacattggacgaagccaaactattacttgcaaccacaccttctaaccgtcacaagaagcaacaacagacttcactaccagagatcaactctcaaagattagctcgatcagcattgcatcttgtggttcagcttcgaaactggagagcctgcttccaagcatggatcacatcacaaagatcctacatactctctttaaccgggtggttactcagatgtttcagatgtgaccctgacccagagaaagtcacattaacgtcttgtcctcacccaatttatgaagtctgcatccaatggtcaaggctactcaacggattaaacgagaagccagtactagacaaactcgacttctttgcctcagggatgggtgcaatctatgctcggcaactaaaggaagacacgtctccggtaacagattcttcgaggaagtactcaagaccagagagcatggagcttgttgaagctgagaaagtggaagaagagaagataatgactgcagagaaactagctgagattgcagttaaagtactctgccatggaatgtcagttgcagtgagctcactcgccgagttctccattagctcagccgatgaacactcgaagctagttacccatcgagaggaggacatgccagagcaaaccaagatttaaacttttctattctcaacttctcatttatttatttatatatccttagaagattaggactttaggttagattagccatggaagctgcatcatctactatcaaaagatagtttagatggatggagatttgtgtaatattaagacacataaagttagttcagttagacttctaatttgggattttggtc

SEQ ID NO: 80632 - protein, 725 aa, Arabidopsis thaliana
  peptide (1)..(725): Ceres Seq. ID no. 12656658
  misc_feature (283)..(635): Pfam Name: Protein of unknown function (DUF632) Pfam Description: Protein of unknown function (DUF632)
  misc_feature (357)..(722): Homolog of NCBI NO: 15224715 NR Description: hypothetical protein; protein id: At2g19090.1
  misc_feature (1)..(176): Homolog of NCBI NO: 15224715 NR Description: hypothetical protein; protein id: At2g19090.1
  misc_feature (115)..(256): Homolog of NCBI NO: 15224715 NR Description: hypothetical protein; protein id: At2g19090.1
  misc_feature (209)..(422): Homolog of NCBI NO: 15224715 NR Description: hypothetical protein; protein id: At2g19090.1
  misc_feature (360)..(724): Homolog of NCBI NO: 15225846 NR Description: hypothetical protein; protein id: At2g27090.1
  misc_feature (1)..(337): Homolog of NCBI NO: 15225846 NR Description: hypothetical protein; protein id: At2g27090.1
  misc_feature (300)..(675): Homolog of NCBI NO: 15236022 NR Description: putative protein; protein id: At4g39790.1
  misc_feature (11)..(272): Homolog of NCBI NO: 15236022 NR Description: putative protein; protein id: At4g39790.1
  misc_feature (305)..(641): Homolog of NCBI NO: 15223973 NR Description: unknown protein; protein id: At1g77500.1
  misc_feature (1)..(111): Homolog of NCBI NO: 15223973 NR Description: unknown protein; protein id: At1g77500.1
MGCSHSKFDDDEAVQICKDRKRFIKQAVEHRTGFASGHIAYIQSLRKVSDALREYIEGDEPHEFMLDTCVTPVKRMSSSGGFIEISPPSKMVQSEAESKLNVNSYLMASGSRPVRVEEKPPRSPETFQVETYGADSFFGMNMNMNSPGLGSHNIPPPSPQNSQWDFFWNPFSALDQYGYSYDNQNGMDDDMRRLRRVREEEGIPDLEEDEYVKFEDHHNMKATEDFNGGKMYQEDKVEHVNEEFTDSGCKIENESDKNCNGTQERRSLEVSRGGTTGHVVGVTSDDGKGETPGFTVYLNRRPTSMAEVIKDLEDQFAIICTAGKEVSGLLEASRVQYTSSNELSAMTMLNPVALFRSGGSSRSSSSSRFLISSSGGSRASEFESSSEFSEESCMLSGSHQSTLDRLYAWEKKLYDEVKSGDRIRIAYEKKCLVLRNQDVKGADSSAVDKTRATIRDLHTQIKVSIHSIESISERIETLRDQELLPQLLELVQGLAQMWKVMAECHQIQKRTLDEAKLLLATTPSNRHKKQQQTSLPEINSQRLARSALHLVVQLRNWRACFQAWITSQRSYILSLTGWLLRCFRCDPDPEKVTLTSCPHPIYEVCIQWSRLLNGLNEKPVLDKLDFFASGMGAIYARQLKEDTSPVTDSSRKYSRPESMELVEAEKVEEEKIMTAEKLAEIAVKVLCHGMSVAVSSLAEFSISSADEHSKLVTHREEDMPEQTKI

SEQ ID NO: 80633 - protein, 661 aa, Arabidopsis thaliana
  peptide (1)..(661): Ceres Seq. ID no. 12656659
  misc_feature (219)..(571): Pfam Name: Protein of unknown function (DUF632) Pfam Description: Protein of unknown function (DUF632)
  misc_feature (293)..(658): Homolog of NCBI NO: 15224715 NR Description: hypothetical protein; protein id: At2g19090.1
  misc_feature (1)..(112): Homolog of NCBI NO: 15224715 NR Description: hypothetical protein; protein id: At2g19090.1
  misc_feature (51)..(192): Homolog of NCBI NO: 15224715 NR Description: hypothetical protein; protein id: At2g19090.1
  misc_feature (145)..(358): Homolog of NCBI NO: 15224715 NR Description: hypothetical protein; protein id: At2g19090.1
  misc_feature (296)..(660): Homolog of NCBI NO: 15225846 NR Description: hypothetical protein; protein id: At2g27090.1
  misc_feature (1)..(273): Homolog of NCBI NO: 15225846 NR Description: hypothetical protein; protein id: At2g27090.1
  misc_feature (236)..(611): Homolog of NCBI NO: 15236022 NR Description: putative protein; protein id: At4g39790.1
  misc_feature (1)..(208): Homolog of NCBI NO: 15236022 NR Description: putative protein; protein id: At4g39790.1
  misc_feature (241)..(577): Homolog of NCBI NO: 15223973 NR Description: unknown protein; protein id: At1g77500.1
  misc_feature (1)..(47): Homolog of NCBI NO: 15223973 NR Description: unknown protein; protein id: At1g77500.1
MLDTCVTPVKRMSSSGGFIEISPPSKMVQSEAESKLNVNSYLMASGSRPVRVEEKPPRSPETFQVETYGADSFFGMNMNMNSPGLGSHNIPPPSPQNSQWDFFWNPFSALDQYGYSYDNQNGMDDDMRRLRRVREEEGIPDLEEDEYVKFEDHHNMKATEDFNGGKMYQEDKVEHVNEEFTDSGCKIENESDKNCNGTQERRSLEVSRGGTTGHVVGVTSDDGKGETPGFTVYLNRRPTSMAEVIKDLEDQFAIICTAGKEVSGLLEASRVQYTSSNELSAMTMLNPVALFRSGGSSRSSSSSRFLISSSGGSRASEFESSSEFSEESCMLSGSHQSTLDRLYAWEKKLYDEVKSGDRIRIAYEKKCLVLRNQDVKGADSSAVDKTRATIRDLHTQIKVSIHSIESISERIETLRDQELLPQLLELVQGLAQMWKVMAECHQIQKRTLDEAKLLLATTPSNRHKKQQQTSLPEINSQRLARSALHLVVQLRNWRACFQAWITSQRSYILSLTGWLLRCFRCDPDPEKVTLTSCPHPIYEVCIQWSRLLNGLNEKPVLDKLDFFASGMGAIYARQLKEDTSPVTDSSRKYSRPESMELVEAEKVEEEKIMTAEKLAEIAVKVLCHGMSVAVSSLAEFSISSADEHSKLVTHREEDMPEQTKI

SEQ ID NO: 80634 - protein, 650 aa, Arabidopsis thaliana
  peptide (1)..(650): Ceres Seq. ID no. 12656660
  misc_feature (208)..(560): Pfam Name: Protein of unknown function (DUF632) Pfam Description: Protein of unknown function (DUF632)
  misc_feature (282)..(647): Homolog of NCBI NO: 15224715 NR Description: hypothetical protein; protein id: At2g19090.1
  misc_feature (1)..(101): Homolog of NCBI NO: 15224715 NR Description: hypothetical protein; protein id: At2g19090.1
  misc_feature (40)..(181): Homolog of NCBI NO: 15224715 NR Description: hypothetical protein; protein id: At2g19090.1
  misc_feature (134)..(347): Homolog of NCBI NO: 15224715 NR Description: hypothetical protein; protein id: At2g19090.1
  misc_feature (285)..(649): Homolog of NCBI NO: 15225846 NR Description: hypothetical protein; protein id: At2g27090.1
  misc_feature (1)..(262): Homolog of NCBI NO: 15225846 NR Description: hypothetical protein; protein id: At2g27090.1
  misc_feature (225)..(600): Homolog of NCBI NO: 15236022 NR Description: putative protein; protein id: At4g39790.1
  misc_feature (1)..(197): Homolog of NCBI NO: 15236022 NR Description: putative protein; protein id: At4g39790.1
  misc_feature (230)..(566): Homolog of NCBI NO: 15223973 NR Description: unknown protein; protein id: At1g77500.1
  misc_feature (1)..(36): Homolog of NCBI NO: 15223973 NR Description: unknown protein; protein id: At1g77500.1
MSSSGGFIEISPPSKMVQSEAESKLNVNSYLMASGSRPVRVEEKPPRSPETFQVETYGADSFFGMNMNMNSPGLGSHNIPPPSPQNSQWDFFWNPFSALDQYGYSYDNQNGMDDDMRRLRRVREEEGIPDLEEDEYVKFEDHHNMKATEDFNGGKMYQEDKVEHVNEEFTDSGCKIENESDKNCNGTQERRSLEVSRGGTTGHVVGVTSDDGKGETPGFTVYLNRRPTSMAEVIKDLEDQFAIICTAGKEVSGLLEASRVQYTSSNELSAMTMLNPVALFRSGGSSRSSSSSRFLISSSGGSRASEFESSSEFSEESCMLSGSHQSTLDRLYAWEKKLYDEVKSGDRIRIAYEKKCLVLRNQDVKGADSSAVDKTRATIRDLHTQIKVSIHSIESISERIETLRDQELLPQLLELVQGLAQMWKVMAECHQIQKRTLDEAKLLLATTPSNRHKKQQQTSLPEINSQRLARSALHLVVQLRNWRACFQAWITSQRSYILSLTGWLLRCFRCDPDPEKVTLTSCPHPIYEVCIQWSRLLNGLNEKPVLDKLDFFASGMGAIYARQLKEDTSPVTDSSRKYSRPESMELVEAEKVEEEKIMTAEKLAEIAVKVLCHGMSVAVSSLAEFSISSADEHSKLVTHREEDMPEQTKI

SEQ ID NO: 80635 - DNA, 477 bp, Arabidopsis thaliana
  misc_feature (1)..(477): Ceres Seq. ID no. 12656661
  misc_feature: MA Experiment ID: 20000171 Result: Down-regulated in Transcription
  misc_feature: MA Experiment 20000171 PARAMETER Experiment Name: At_42deg_Heat_P Parameter: Age (day) Value: 14
  misc_feature: MA Experiment 20000171 PARAMETER Experiment Name: At_42deg_Heat_P Parameter: Organism Value: A. thaliana
  misc_feature: MA Experiment 20000171 PARAMETER Experiment Name: At_42deg_Heat_P Parameter: Plant Line Value: WS
  misc_feature: MA Experiment 20000171 PARAMETER Experiment Name: At_42deg_Heat_P Parameter: Temperature (deg C) Value: 42 vs. 22
  misc_feature: MA Experiment 20000171 PARAMETER Experiment Name: At_42deg_Heat_P Parameter: Timepoint (hr) Value: 1
  misc_feature: MA Experiment 20000171 PARAMETER Experiment Name: At_42deg_Heat_P Parameter: Tissue Value: Aerial
  misc_feature: MA Experiment ID: 20000173 Result: Down-regulated in Transcription
  misc_feature: MA Experiment 20000173 PARAMETER Experiment Name: At_42deg_Heat_P Parameter: Age (day) Value: 14
  misc_feature: MA Experiment 20000173 PARAMETER Experiment Name: At_42deg_Heat_P Parameter: Organism Value: A. thaliana
  misc_feature: MA Experiment 20000173 PARAMETER Experiment Name: At_42deg_Heat_P Parameter: Plant Line Value: WS
  misc_feature: MA Experiment 20000173 PARAMETER Experiment Name: At_42deg_Heat_P Parameter: Temperature (deg C) Value: 42 vs. 22
  misc_feature: MA Experiment 20000173 PARAMETER Experiment Name: At_42deg_Heat_P Parameter: Timepoint (hr) Value: 6
  misc_feature: MA Experiment 20000173 PARAMETER Experiment Name: At_42deg_Heat_P Parameter: Tissue Value: Aerial
  misc_feature: MA Experiment ID: 20000185 Result: Down-regulated in Transcription
  misc_feature: MA Experiment 20000185 PARAMETER Experiment Name: At_Roots__P Parameter: Age (day) Value: 7 vs. 21
  misc_feature: MA Experiment 20000185 PARAMETER Experiment Name: At_Roots__P Parameter: Organism Value: A. thaliana
  misc_feature: MA Experiment 20000185 PARAMETER Experiment Name: At_Roots__P Parameter: Tissue Value: Roots vs. Whole Plant
  misc_feature: MA Experiment ID: 20000227 Result: Up-regulated in Transcription
  misc_feature: MA Experiment 20000227 PARAMETER Experiment Name: At_Root-Tips-vs-Tops_P Parameter: Tissue Value: Root Tips vs. Root Tops
  misc_feature: MA Experiment ID: 20000234 Result: Up-regulated in Transcription
  misc_feature: MA Experiment 20000234 PARAMETER Experiment Name: At_Siliques_P Parameter: Age (day) Value: 21
  misc_feature: MA Experiment 20000234 PARAMETER Experiment Name: At_Siliques_P Parameter: Organism Value: A. thaliana
  misc_feature: MA Experiment 20000234 PARAMETER Experiment Name: At_Siliques_P Parameter: Plant Line Value: WS
  misc_feature: MA Experiment 20000234 PARAMETER Experiment Name: At_Siliques_P Parameter: Tissue Value: Less Than 5mm Siliques vs. Whole Plant
  misc_feature: MA Experiment ID: 20000235 Result: Up-regulated in Transcription
  misc_feature: MA Experiment 20000235 PARAMETER Experiment Name: At_Siliques_P Parameter: Age (day) Value: 21
  misc_feature: MA Experiment 20000235 PARAMETER Experiment Name: At_Siliques_P Parameter: Organism Value: A. thaliana
  misc_feature: MA Experiment 20000235 PARAMETER Experiment Name: At_Siliques_P Parameter: Plant Line Value: WS
  misc_feature: MA Experiment 20000235 PARAMETER Experiment Name: At_Siliques_P Parameter: Tissue Value: 5-10mm Siliques vs. Whole Plant
  misc_feature: MA Experiment ID: 20000439 Result: Down-regulated in Transcription
  misc_feature: MA Experiment 20000439 PARAMETER Experiment Name: At_Roots__P Parameter: Age (day) Value: 14 vs. 21
  misc_feature: MA Experiment 20000439 PARAMETER Experiment Name: At_Roots__P Parameter: Organism Value: A. thaliana
  misc_feature: MA Experiment 20000439 PARAMETER Experiment Name: At_Roots__P Parameter: Tissue Value: Roots vs. Whole Plant
  misc_feature: MA Experiment ID: 20000460 Result: Up-regulated in Transcription
  misc_feature: MA Experiment 20000460 PARAMETER Experiment Name: At_10percent_PEG_P Parameter: Age (day) Value: 12
  misc_feature: MA Experiment 20000460 PARAMETER Experiment Name: At_10percent_PEG_P Parameter: Organism Value: A. thaliana
  misc_feature: MA Experiment 20000460 PARAMETER Experiment Name: At_10percent_PEG_P Parameter: Plant Line Value: WS
  misc_feature: MA Experiment 20000460 PARAMETER Experiment Name: At_10percent_PEG_P Parameter: Timepoint (day) Value: 12
  misc_feature: MA Experiment 20000460 PARAMETER Experiment Name: At_10percent_PEG_P Parameter: Tissue Value: Whole Plant
  misc_feature: MA Experiment 20000460 PARAMETER Experiment Name: At_10percent_PEG_P Parameter: Treatment Value: 10percent PEG vs. No Treatment
  misc_feature: MA Experiment ID: 20000794 Result: Down-regulated in Transcription
  misc_feature: MA Experiment 20000794 PARAMETER Experiment Name: At_Petals_P Parameter: Age (day) Value: 23-25 days
  misc_feature: MA Experiment 20000794 PARAMETER Experiment Name: At_Petals_P Parameter: Plant Line Value: WS
  misc_feature: MA Experiment 20000794 PARAMETER Experiment Name: At_Petals_P Parameter: Tissue Value: Petals vs. Whole plant
  misc_feature: MA Experiment ID: 20001248 Result: Up-regulated in Transcription
  misc_feature: MA Experiment 20001248 PARAMETER Experiment Name: At_Far-red-induction_P Parameter: Age (day) Value: 7
  misc_feature: MA Experiment 20001248 PARAMETER Experiment Name: At_Far-red-induction_P Parameter: Light Value: Far-red vs. White
  misc_feature: MA Experiment 20001248 PARAMETER Experiment Name: At_Far-red-induction_P Parameter: Organism Value: A. thaliana
  misc_feature: MA Experiment 20001248 PARAMETER Experiment Name: At_Far-red-induction_P Parameter: Plant Line Value: Columbia
  misc_feature: MA Experiment 20001248 PARAMETER Experiment Name: At_Far-red-induction_P Parameter: Timepoint (hr) Value: 4
  misc_feature: MA Experiment 20001248 PARAMETER Experiment Name: At_Far-red-induction_P Parameter: Tissue Value: Whole Plant
  misc_feature: MA Experiment ID: 20001450 Result: Up-regulated in Transcription
  misc_feature: MA Experiment 20001450 PARAMETER Experiment Name: At_Far-red-induction_P Parameter: Age (day) Value: 7
  misc_feature: MA Experiment 20001450 PARAMETER Experiment Name: At_Far-red-induction_P Parameter: Light Value: Far-red vs. White
  misc_feature: MA Experiment 20001450 PARAMETER Experiment Name: At_Far-red-induction_P Parameter: Organism Value: A. thaliana
  misc_feature: MA Experiment 20001450 PARAMETER Experiment Name: At_Far-red-induction_P Parameter: Plant Line Value: Columbia
  misc_feature: MA Experiment 20001450 PARAMETER Experiment Name: At_Far-red-induction_P Parameter: Timepoint (hr) Value: 8
  misc_feature: MA Experiment 20001450 PARAMETER Experiment Name: At_Far-red-induction_P Parameter: Tissue Value: Whole Plant
  misc_feature: MA Experiment ID: 20001761 Result: Up-regulated in Transcription
  misc_feature: MA Experiment 20001761 PARAMETER Experiment Name: At_50mM_NH4NO3_L-to-H_P Parameter: Timepoint (hr) Value: 4
  misc_feature: MA Experiment 20001761 PARAMETER Experiment Name: At_50mM_NH4NO3_L-to-H_P Parameter: Tissue Value: Siliques
  misc_feature: MA Experiment 20001761 PARAMETER Experiment Name: At_50mM_NH4NO3_L-to-H_P Parameter: Treatment Value: 50mM NH4NO3 vs 100mM Mannitol
  misc_feature: MA Experiment ID: 20001768 Result: Up-regulated in Transcription
  misc_feature: MA Experiment 20001768 PARAMETER Experiment Name: At_Far-red-enriched-adult_P Parameter: Age (day) Value: 28
  misc_feature: MA Experiment 20001768 PARAMETER Experiment Name: At_Far-red-enriched-adult_P Parameter: Light Value: Far-red enriched vs. White
  misc_feature: MA Experiment 20001768 PARAMETER Experiment Name: At_Far-red-enriched-adult_P Parameter: Organism Value: A. thaliana
  misc_feature: MA Experiment 20001768 PARAMETER Experiment Name: At_Far-red-enriched-adult_P Parameter: Plant Line Value: Columbia
  misc_feature: MA Experiment 20001768 PARAMETER Experiment Name: At_Far-red-enriched-adult_P Parameter: Timepoint (hr) Value: 1
  misc_feature: MA Experiment 20001768 PARAMETER Experiment Name: At_Far-red-enriched-adult_P Parameter: Tissue Value: Aerial
  misc_feature: MA Experiment ID: 20001770 Result: Up-regulated in Transcription
  misc_feature: MA Experiment 20001770 PARAMETER Experiment Name: At_Far-red-enriched-adult_P Parameter: Age (day) Value: 28
  misc_feature: MA Experiment 20001770 PARAMETER Experiment Name: At_Far-red-enriched-adult_P Parameter: Light Value: Far-red enriched vs. White
  misc_feature: MA Experiment 20001770 PARAMETER Experiment Name: At_Far-red-enriched-adult_P Parameter: Organism Value: A. thaliana
  misc_feature: MA Experiment 20001770 PARAMETER Experiment Name: At_Far-red-enriched-adult_P Parameter: Plant Line Value: Columbia
  misc_feature: MA Experiment 20001770 PARAMETER Experiment Name: At_Far-red-enriched-adult_P Parameter: Timepoint (hr) Value: 8
  misc_feature: MA Experiment 20001770 PARAMETER Experiment Name: At_Far-red-enriched-adult_P Parameter: Tissue Value: Aerial
atggagaggcaaatcataaacaggaagaaacgagtgttttctcttgaaccaaacaagaaccctagtgcagttttcacgagaaaatacacaagccacttggttcctgcactcaagaagctcaacatgaacaagaactcttcaaaacaaaccgtgaagcatgaagtagatatggctttggctttgtctgctcaagaatttgcatggagccgtttcttgctgcagaagctatcgtcctcatcgaatccaaccactaccactagttcttcttccgatggaattcggattcttgaaagacccgataaagaaggcggaaacgaagaaggagggatagaggagagactgagggaattgaagaagcttttgccaggtggggaagagatgaatgtggaagaaatgttgagtgagattggtaactacattaaatgtcttgagttgcagacgattgctctcaagtccattgttcaagatagtacttga

SEQ ID NO: 80636 - protein, 158 aa, Arabidopsis thaliana
  peptide (1)..(158): Ceres Seq. ID no. 12656662
  misc_feature (1)..(158): Homolog of NCBI NO: 15234651 NR Description: hypothetical protein; protein id: At4g30180.1
MERQIINRKKRVFSLEPNKNPSAVFTRKYTSHLVPALKKLNMNKNSSKQTVKHEVDMALALSAQEFAWSRFLLQKLSSSSNPTTTTSSSSDGIRILERPDKEGGNEEGGIEERLRELKKLLPGGEEMNVEEMLSEIGNYIKCLELQTIALKSIVQDST

SEQ ID NO: 80637 - protein, 117 aa, Arabidopsis thaliana
  peptide (1)..(117): Ceres Seq. ID no. 12656663
  misc_feature (1)..(117): Homolog of NCBI NO: 15234651 NR Description: hypothetical protein; protein id: At4g30180.1
MNKNSSKQTVKHEVDMALALSAQEFAWSRFLLQKLSSSSNPTTTTSSSSDGIRILERPDKEGGNEEGGIEERLRELKKLLPGGEEMNVEEMLSEIGNYIKCLELQTIALKSIVQDST

SEQ ID NO: 80638 - protein, 102 aa, Arabidopsis thaliana
  peptide (1)..(102): Ceres Seq. ID no. 12656664
  misc_feature (1)..(102): Homolog of NCBI NO: 15234651 NR Description: hypothetical protein; protein id: At4g30180.1
MALALSAQEFAWSRFLLQKLSSSSNPTTTTSSSSDGIRILERPDKEGGNEEGGIEERLRELKKLLPGGEEMNVEEMLSEIGNYIKCLELQTIALKSIVQDST

SEQ ID NO: 80639 - DNA, 2603 bp, Arabidopsis thaliana
  misc_feature (1)..(2603): Ceres Seq. ID no. 12656665
  misc_feature: MA Experiment ID: 20001905 Result: Up-regulated in Transcription
  misc_feature: MA Experiment 20001905 PARAMETER Experiment Name: At_Drought_Reproduction_P Parameter: Age (day) Value: 40
  misc_feature: MA Experiment 20001905 PARAMETER Experiment Name: At_Drought_Reproduction_P Parameter: Organism Value: A. thaliana
  misc_feature: MA Experiment 20001905 PARAMETER Experiment Name: At_Drought_Reproduction_P Parameter: Plant Line Value: WS
  misc_feature: MA Experiment 20001905 PARAMETER Experiment Name: At_Drought_Reproduction_P Parameter: Timepoint (day) Value: 10
  misc_feature: MA Experiment 20001905 PARAMETER Experiment Name: At_Drought_Reproduction_P Parameter: Tissue Value: Rosettes
  misc_feature: MA Experiment 20001905 PARAMETER Experiment Name: At_Drought_Reproduction_P Parameter: Treatment Value: Drought vs. No Drought
gcgacaatctctatctctctctatctcttctccgctcacagcgaatctctctctctctctctctctctctctcttctccggtgtattccgttctccgggaatttctccgaagagggagagaggaaaaaaaaaacgtccgattcaatctcttcgttgctcgacgaatttttcttaagctttccttattggagatttgaagattctgagtggttgttatgataatgtgggtttgattagttcttcacacacagcttctctacgctcatggattcttctctcgatggagctgcaggtgactcatcgaaatgcagtgaaatgagtgttgatgagaagagacagcttgtttatgaactgtcgaagcaatcacatctagctgctgaggtcttgcaggcatggagccgccaagagattctacagatcttatgcgcagaaatgggaaaagaaaggaagtatactggtttgaccaaagtcaagatcatcgagacccttttgaaaattgtatctgagaaaaactctggagagtgtgaagggaagaagagagattctgattgtttgcctattcagagaaacactaagagacaaaggaaggttgataatccttctcggtatgtgattccagcaaccaacattgtaacaagcaacaatgcctcagggagctgcagctcggttaatactaaaggtgagagtactaccatctactgcaaaaatttggcttgtcgtgctgtactgagacaggaagactcgttttgcagaaggtgttcatgttgcatctgtcgtaagtatgatgataacaaagatcctagtctctggttaacatgtagctcagatcctccatttgagggtgagtcttgcggattctcgtgtcatcttgaatgtgctttcaacactgaaaaatccggtcttggaaaagacaagcaaagtgagggatgctgcttctattgtgtctcttgcggtaaagcaaacagtttgcttgaatgctggaagaagcaattgacgattgctaaagaaaccagaagggtagaagtgctttgttaccgtcttttcttagtccagaaactattgaagagctcaactaaataccgaaatctgtgtgaggttgtggatgaagctgtcaagactcttgaagctgatgtgggtcctctcactggtcttcctatgaaaatgggtagaggaattgtaaacagacttcattcgggacccgatgtgcagaaactttgctcttctgctcttgaatctcttgaaactatagcaactacacctcctgatgttgctgcattaccttcacctcgcagctccaagatgcagcaagattgttcttatgtattgagcaatgagatatctgcagatacagcaaccacaggatcaaccaagatcaggttcgaggatgtaaacgcgacttcacttacagtggttctcgcctctaatgaaattccctcacctccaaacatcgttcactacagtatttggcatcgtaaggtaccagaaaaagattacccggagaaatcgacttgcacattgtttattccaaacacaagatttgttgtctctggattagctccagcttctgagtactgcttcaaagttgtgtcctatagtggaaccagagaaatgggcgttgatgaaatcaatgttttgacacgtagcgctgaagaaggagcgaattgctcttcggcagtggaaagaagcgtaagccctctcacaaattgcagcacattgtcttctaatccttcttctgttgaagctgagtccaacaacgattacattgtcccaaagaagccatcttcaaagaacgaagacaacaattctccttcagtcgatgaaagtgctgcgaaaaggatgaagaggacaaccgactcagacattgtacagattgagaaggacgttgagcagattgtgttgttggatgatgaagaacaagaagctgttctggataagacggaatctgaaactccagtcgtggttactacgaaaagtcttgttggtaatcgaaacagttcagatgcgagtttgccaattactcccttcaggtcagatgaaatcaagaaccgtcaagctagaatcgaaatatcgatgaaagacaactgtaacaacggtgatcattcagcgaatggaggaacagaaagtggattagagcattgtgtgaagatcataagacaactcgagtgttcaggacatatcgataagaatttcagacagaagtttctgacttggtatagcttgagagcaacgtcacaagagattagagttgtgaagatattcattgatacatttattgatgatcccatggctttggctgagcagctcattgatactttcgacgaccgtgtttcgataaagcgttctgcggttggtggtagcggtgcgtctgcagttgttccatctggattctgtatgaagttgtggcattagagaatgggaacttgtgctctgtttttttcaagtcattttcaaaacgttattctaattattgggaaatttgcattattggaacatttccatgcaagaacagtagtactgttgctatcgaatagatcgtctttgtcggattatttatttatttttagtggatttgattccatttataatttagtaattagtcctag

SEQ ID NO: 80640 - protein, 714 aa, Arabidopsis thaliana
  peptide (1)..(714): Ceres Seq. ID no. 12656666
  misc_feature (166)..(231): Pfam Name: PHD-finger Pfam Description: PHD-finger
  misc_feature (11)..(331): Homolog of NCBI NO: 38637254 NR Description: putative coiled-coil protein [Oryza sativa
  misc_feature (334)..(536): Homolog of NCBI NO: 38637254 NR Description: putative coiled-coil protein [Oryza sativa
  misc_feature (611)..(714): Homolog of NCBI NO: 38637254 NR Description: putative coiled-coil protein [Oryza sativa
  misc_feature (46)..(361): Homolog of NCBI NO: 30350861 NR Description: hypothetical protein At2g18880 [Arabidopsis
  misc_feature (343)..(489): Homolog of NCBI NO: 30350861 NR Description: hypothetical protein At2g18880 [Arabidopsis
  misc_feature (597)..(704): Homolog of NCBI NO: 30350861 NR Description: hypothetical protein At2g18880 [Arabidopsis
  misc_feature (468)..(714): Homolog of NCBI NO: 15242117 NR Description: putative protein; protein id: At5g57380.1 thaliana] >gi|9757932|dbj|BAB08475.1|
  misc_feature (105)..(336): Homolog of NCBI NO: 15242117 NR Description: putative protein; protein id: At5g57380.1 thaliana] >gi|9757932|dbj|BAB08475.1|
  misc_feature (346)..(514): Homolog of NCBI NO: 15242117 NR Description: putative protein; protein id: At5g57380.1 thaliana] >gi|9757932|dbj|BAB08475.1|
  misc_feature (146)..(323): Homolog of NCBI NO: 15230113 NR Description: hypothetical protein; protein id: At3g24440.1 thaliana] >gi|9294095|dbj|BAB01947.1|
MDSSLDGAAGDSSKCSEMSVDEKRQLVYELSKQSHLAAEVLQAWSRQEILQILCAEMGKERKYTGLTKVKIIETLLKIVSEKNSGECEGKKRDSDCLPIQRNTKRQRKVDNPSRYVIPATNIVTSNNASGSCSSVNTKGESTTIYCKNLACRAVLRQEDSFCRRCSCCICRKYDDNKDPSLWLTCSSDPPFEGESCGFSCHLECAFNTEKSGLGKDKQSEGCCFYCVSCGKANSLLECWKKQLTIAKETRRVEVLCYRLFLVQKLLKSSTKYRNLCEVVDEAVKTLEADVGPLTGLPMKMGRGIVNRLHSGPDVQKLCSSALESLETIATTPPDVAALPSPRSSKMQQDCSYVLSNEISADTATTGSTKIRFEDVNATSLTVVLASNEIPSPPNIVHYSIWHRKVPEKDYPEKSTCTLFIPNTRFVVSGLAPASEYCFKVVSYSGTREMGVDEINVLTRSAEEGANCSSAVERSVSPLTNCSTLSSNPSSVEAESNNDYIVPKKPSSKNEDNNSPSVDESAAKRMKRTTDSDIVQIEKDVEQIVLLDDEEQEAVLDKTESETPVVVTTKSLVGNRNSSDASLPITPFRSDEIKNRQARIEISMKDNCNNGDHSANGGTESGLEHCVKIIRQLECSGHIDKNFRQKFLTWYSLRATSQEIRVVKIFIDTFIDDPMALAEQLIDTFDDRVSIKRSAVGGSGASAVVPSGFCMKLWH

SEQ ID NO: 80641 - protein, 697 aa, Arabidopsis thaliana
  peptide (1)..(697): Ceres Seq. ID no. 12656667
  misc_feature (149)..(214): Pfam Name: PHD-finger Pfam Description: PHD-finger
  misc_feature (1)..(314): Homolog of NCBI NO: 38637254 NR Description: putative coiled-coil protein [Oryza sativa
  misc_feature (317)..(519): Homolog of NCBI NO: 38637254 NR Description: putative coiled-coil protein [Oryza sativa
  misc_feature (594)..(697): Homolog of NCBI NO: 38637254 NR Description: putative coiled-coil protein [Oryza sativa
  misc_feature (29)..(344): Homolog of NCBI NO: 30350861 NR Description: hypothetical protein At2g18880 [Arabidopsis
  misc_feature (326)..(472): Homolog of NCBI NO: 30350861 NR Description: hypothetical protein At2g18880 [Arabidopsis
  misc_feature (580)..(687): Homolog of NCBI NO: 30350861 NR Description: hypothetical protein At2g18880 [Arabidopsis
  misc_feature (451)..(697): Homolog of NCBI NO: 15242117 NR Description: putative protein; protein id: At5g57380.1 thaliana] >gi|9757932|dbj|BAB08475.1|
  misc_feature (88)..(319): Homolog of NCBI NO: 15242117 NR Description: putative protein; protein id: At5g57380.1 thaliana] >gi|9757932|dbj|BAB08475.1|
  misc_feature (329)..(497): Homolog of NCBI NO: 15242117 NR Description: putative protein; protein id: At5g57380.1 thaliana] >gi|9757932|dbj|BAB08475.1|
  misc_feature (129)..(306): Homolog of NCBI NO: 15230113 NR Description: hypothetical protein; protein id: At3g24440.1 thaliana] >gi|9294095|dbj|BAB01947.1|
MSVDEKRQLVYELSKQSHLAAEVLQAWSRQEILQILCAEMGKERKYTGLTKVKIIETLLKIVSEKNSGECEGKKRDSDCLPIQRNTKRQRKVDNPSRYVIPATNIVTSNNASGSCSSVNTKGESTTIYCKNLACRAVLRQEDSFCRRCSCCICRKYDDNKDPSLWLTCSSDPPFEGESCGFSCHLECAFNTEKSGLGKDKQSEGCCFYCVSCGKANSLLECWKKQLTIAKETRRVEVLCYRLFLVQKLLKSSTKYRNLCEVVDEAVKTLEADVGPLTGLPMKMGRGIVNRLHSGPDVQKLCSSALESLETIATTPPDVAALPSPRSSKMQQDCSYVLSNEISADTATTGSTKIRFEDVNATSLTVVLASNEIPSPPNIVHYSIWHRKVPEKDYPEKSTCTLFIPNTRFVVSGLAPASEYCFKVVSYSGTREMGVDEINVLTRSAEEGANCSSAVERSVSPLTNCSTLSSNPSSVEAESNNDYIVPKKPSSKNEDNNSPSVDESAAKRMKRTTDSDIVQIEKDVEQIVLLDDEEQEAVLDKTESETPVVVTTKSLVGNRNSSDASLPITPFRSDEIKNRQARIEISMKDNCNNGDHSANGGTESGLEHCVKIIRQLECSGHIDKNFRQKFLTWYSLRATSQEIRVVKIFIDTFIDDPMALAEQLIDTFDDRVSIKRSAVGGSGASAVVPSGFCMKLWH

SEQ ID NO: 80642 - protein, 658 aa, Arabidopsis thaliana
  peptide (1)..(658): Ceres Seq. ID no. 12656668
  misc_feature (110)..(175): Pfam Name: PHD-finger Pfam Description: PHD-finger
  misc_feature (1)..(275): Homolog of NCBI NO: 38637254 NR Description: putative coiled-coil protein [Oryza sativa
  misc_feature (278)..(480): Homolog of NCBI NO: 38637254 NR Description: putative coiled-coil protein [Oryza sativa
  misc_feature (555)..(658): Homolog of NCBI NO: 38637254 NR Description: putative coiled-coil protein [Oryza sativa
  misc_feature (1)..(305): Homolog of NCBI NO: 30350861 NR Description: hypothetical protein At2g18880 [Arabidopsis
  misc_feature (287)..(433): Homolog of NCBI NO: 30350861 NR Description: hypothetical protein At2g18880 [Arabidopsis
  misc_feature (541)..(648): Homolog of NCBI NO: 30350861 NR Description: hypothetical protein At2g18880 [Arabidopsis
  misc_feature (412)..(658): Homolog of NCBI NO: 15242117 NR Description: putative protein; protein id: At5g57380.1 thaliana] >gi|9757932|dbj|BAB08475.1|
  misc_feature (49)..(280): Homolog of NCBI NO: 15242117 NR Description: putative protein; protein id: At5g57380.1 thaliana] >gi|9757932|dbj|BAB08475.1|
  misc_feature (290)..(458): Homolog of NCBI NO: 15242117 NR Description: putative protein; protein id: At5g57380.1 thaliana] >gi|9757932|dbj|BAB08475.1|
  misc_feature (90)..(267): Homolog of NCBI NO: 15230113 NR Description: hypothetical protein; protein id: At3g24440.1 thaliana] >gi|9294095|dbj|BAB01947.1|
MGKERKYTGLTKVKIIETLLKIVSEKNSGECEGKKRDSDCLPIQRNTKRQRKVDNPSRYVIPATNIVTSNNASGSCSSVNTKGESTTIYCKNLACRAVLRQEDSFCRRCSCCICRKYDDNKDPSLWLTCSSDPPFEGESCGFSCHLECAFNTEKSGLGKDKQSEGCCFYCVSCGKANSLLECWKKQLTIAKETRRVEVLCYRLFLVQKLLKSSTKYRNLCEVVDEAVKTLEADVGPLTGLPMKMGRGIVNRLHSGPDVQKLCSSALESLETIATTPPDVAALPSPRSSKMQQDCSYVLSNEISADTATTGSTKIRFEDVNATSLTVVLASNEIPSPPNIVHYSIWHRKVPEKDYPEKSTCTLFIPNTRFVVSGLAPASEYCFKVVSYSGTREMGVDEINVLTRSAEEGANCSSAVERSVSPLTNCSTLSSNPSSVEAESNNDYIVPKKPSSKNEDNNSPSVDESAAKRMKRTTDSDIVQIEKDVEQIVLLDDEEQEAVLDKTESETPVVVTTKSLVGNRNSSDASLPITPFRSDEIKNRQARIEISMKDNCNNGDHSANGGTESGLEHCVKIIRQLECSGHIDKNFRQKFLTWYSLRATSQEIRVVKIFIDTFIDDPMALAEQLIDTFDDRVSIKRSAVGGSGASAVVPSGFCMKLWH

SEQ ID NO: 80643 - DNA, 1025 bp, Arabidopsis thaliana
  misc_feature (1)..(1025): Ceres Seq. ID no. 12656697
  misc_feature: MA Experiment ID: 20000794 Result: Up-regulated in Transcription
  misc_feature: MA Experiment 20000794 PARAMETER Experiment Name: At_Petals_P Parameter: Age (day) Value: 23-25 days
  misc_feature: MA Experiment 20000794 PARAMETER Experiment Name: At_Petals_P Parameter: Plant Line Value: WS
  misc_feature: MA Experiment 20000794 PARAMETER Experiment Name: At_Petals_P Parameter: Tissue Value: Petals vs. Whole plant
  misc_feature: MA Experiment ID: 20001247 Result: Down-regulated in Transcription
  misc_feature: MA Experiment 20001247 PARAMETER Experiment Name: At_Far-red-induction_P Parameter: Age (day) Value: 7
  misc_feature: MA Experiment 20001247 PARAMETER Experiment Name: At_Far-red-induction_P Parameter: Light Value: Far-red vs. White
  misc_feature: MA Experiment 20001247 PARAMETER Experiment Name: At_Far-red-induction_P Parameter: Organism Value: A. thaliana
  misc_feature: MA Experiment 20001247 PARAMETER Experiment Name: At_Far-red-induction_P Parameter: Plant Line Value: Columbia
  misc_feature: MA Experiment 20001247 PARAMETER Experiment Name: At_Far-red-induction_P Parameter: Timepoint (hr) Value: 1
  misc_feature: MA Experiment 20001247 PARAMETER Experiment Name: At_Far-red-induction_P Parameter: Tissue Value: Whole Plant
atgcctaaaccacttgttgattttggaaacaaacccatgattttgcatcagattgaagctctaaaaggtgctggagtgactgaagttgtattagctatcaatcaccaacaaccagaggtcatgttgaactttgtgaaagaatatgagaagaagctagagattaagattacattttcccaagaaactgaaccgcttggaacagcagggcctctcgcgctggctcgggataagctggtcgatgaatcaggccaacccttttttgtactaaacagcgatgttatctgtgaatacccattgcttgagatgatcgagtttcacaagactaaccgtgctgaagcatcaatcatggtgaccgaggttgatgatccttctaagtatggtgtggtggttacagaggaaggtacagcgagagttgaaagttttgtcgagaaaccgaaacattttgtggggaacaagatcaacgctgggatatacctcttgagcccatctgttcttgacaggattgagctgagaaggacttcgatagagaaagagatattccctaagatagcttcagagaagaagctttacgcgatggtactacctggtttttggatggacattggtcaaccgaaagattacataaccgggcaaagaatgtaccttaactctctaagagagaaaactccgcaagaactggccacaggggataacataatcgggaatgttctcgtgcacgaaagtgcggttataggagaaggttgcttgataggacctgatgtggtgattggtccgggatgtgtgattgattcaggtgtaagattgtttggttgtactgtaatgcgcggtgtgtggatcaaggaacatgcgtgtatctctaatagtatcgtgggatgggattcaaccgttggaaggtgggctcgagtttttaatataacggttcttggcaaagatgttaacgtcgccgatgcagaggtttacaacagtggggttgttatcgaagagcaaggtctgtgaaaccagagcctagacctagattagttagt

SEQ ID NO: 80644 - protein, 331 aa, Arabidopsis thaliana
  peptide (1)..(331): Ceres Seq. ID no. 12656698
  misc_feature (1)..(217): Pfam Name: Nucleotidyl transferase Pfam Description: Nucleotidyl transferase
  misc_feature (1)..(331): Homolog of NCBI NO: 15234771 NR Description: GDP-mannose pyrophosphorylase like protein;
  misc_feature (1)..(331): Homolog of NCBI NO: 25317396 NR Description: GDP-mannose pyrophosphorylase like protein
  misc_feature (2)..(326): Homolog of NCBI NO: 15225553 NR Description: GDP-mannose pyrophosphorylase; protein id: supported by cDNA: 37775., supported by cDNA: gi_13605662, by cDNA: gi_15982867, supported by cDNA: gi_16226304, supported
  misc_feature (2)..(326): Homolog of NCBI NO: 13509287 NR Description: GDP-mannose pyrophosphorylase [Arabidopsis
  misc_feature (1)..(326): Homolog of NCBI NO: 4103324 NR Description: GDP-mannose pyrophosphorylase [Solanum tuberosum]
  misc_feature (1)..(326): Homolog of NCBI NO: 34902046 NR Description: COG1208, GCD1, Nucleoside-diphosphate-sugar
  misc_feature (2)..(326): Homolog of NCBI NO: 34908274 NR Description: putative GDP-mannose pyrophosphorylase [Oryza
  misc_feature (2)..(326): Homolog of NCBI NO: 40253523 NR Description: putative GDP-mannose pyrophosphorylase [Oryza
  misc_feature (1)..(326): Homolog of NCBI NO: 14971013 NR Description: GDP-D-mannose pyrophosphorylase [Nicotiana
  misc_feature (1)..(331): Homolog of NCBI NO: 15233308 NR Description: mannose-1-phosphate guanylyltransferase-like
MPKPLVDFGNKPMILHQIEALKGAGVTEVVLAINHQQPEVMLNFVKEYEKKLEIKITFSQETEPLGTAGPLALARDKLVDESGQPFFVLNSDVICEYPLLEMIEFHKTNRAEASIMVTEVDDPSKYGVVVTEEGTARVESFVEKPKHFVGNKINAGIYLLSPSVLDRIELRRTSIEKEIFPKIASEKKLYAMVLPGFWMDIGQPKDYITGQRMYLNSLREKTPQELATGDNIIGNVLVHESAVIGEGCLIGPDVVIGPGCVIDSGVRLFGCTVMRGVWIKEHACISNSIVGWDSTVGRWARVFNITVLGKDVNVADAEVYNSGVVIEEQGL

SEQ ID NO: 80645 - protein, 319 aa, Arabidopsis thaliana
  peptide (1)..(319): Ceres Seq. ID no. 12656699
  misc_feature (1)..(205): Pfam Name: Nucleotidyl transferase Pfam Description: Nucleotidyl transferase
  misc_feature (1)..(319): Homolog of NCBI NO: 15234771 NR Description: GDP-mannose pyrophosphorylase like protein;
  misc_feature (1)..(319): Homolog of NCBI NO: 25317396 NR Description: GDP-mannose pyrophosphorylase like protein
  misc_feature (1)..(314): Homolog of NCBI NO: 15225553 NR Description: GDP-mannose pyrophosphorylase; protein id: supported by cDNA: 37775., supported by cDNA: gi_13605662, by cDNA: gi_15982867, supported by cDNA: gi_16226304, supported
  misc_feature (1)..(314): Homolog of NCBI NO: 13509287 NR Description: GDP-mannose pyrophosphorylase [Arabidopsis
  misc_feature (1)..(314): Homolog of NCBI NO: 4103324 NR Description: GDP-mannose pyrophosphorylase [Solanum tuberosum]
  misc_feature (1)..(314): Homolog of NCBI NO: 34902046 NR Description: COG1208, GCD1, Nucleoside-diphosphate-sugar
  misc_feature (1)..(314): Homolog of NCBI NO: 34908274 NR Description: putative GDP-mannose pyrophosphorylase [Oryza
  misc_feature (1)..(314): Homolog of NCBI NO: 40253523 NR Description: putative GDP-mannose pyrophosphorylase [Oryza
  misc_feature (1)..(314): Homolog of NCBI NO: 14971013 NR Description: GDP-D-mannose pyrophosphorylase [Nicotiana
  misc_feature (1)..(319): Homolog of NCBI NO: 15233308 NR Description: mannose-1-phosphate guanylyltransferase-like
MILHQIEALKGAGVTEVVLAINHQQPEVMLNFVKEYEKKLEIKITFSQETEPLGTAGPLALARDKLVDESGQPFFVLNSDVICEYPLLEMIEFHKTNRAEASIMVTEVDDPSKYGVVVTEEGTARVESFVEKPKHFVGNKINAGIYLLSPSVLDRIELRRTSIEKEIFPKIASEKKLYAMVLPGFWMDIGQPKDYITGQRMYLNSLREKTPQELATGDNIIGNVLVHESAVIGEGCLIGPDVVIGPGCVIDSGVRLFGCTVMRGVWIKEHACISNSIVGWDSTVGRWARVFNITVLGKDVNVADAEVYNSGVVIEEQGL

SEQ ID NO: 80646 - protein, 291 aa, Arabidopsis thaliana
  peptide (1)..(291): Ceres Seq. ID no. 12656700
  misc_feature (1)..(177): Pfam Name: Nucleotidyl transferase Pfam Description: Nucleotidyl transferase
  misc_feature (1)..(291): Homolog of NCBI NO: 15234771 NR Description: GDP-mannose pyrophosphorylase like protein;
  misc_feature (1)..(291): Homolog of NCBI NO: 25317396 NR Description: GDP-mannose pyrophosphorylase like protein
  misc_feature (1)..(286): Homolog of NCBI NO: 15225553 NR Description: GDP-mannose pyrophosphorylase; protein id: supported by cDNA: 37775., supported by cDNA: gi_13605662, by cDNA: gi_15982867, supported by cDNA: gi_16226304, supported
  misc_feature (1)..(286): Homolog of NCBI NO: 13509287 NR Description: GDP-mannose pyrophosphorylase [Arabidopsis
  misc_feature (1)..(286): Homolog of NCBI NO: 4103324 NR Description: GDP-mannose pyrophosphorylase [Solanum tuberosum]
  misc_feature (1)..(286): Homolog of NCBI NO: 34902046 NR Description: COG1208, GCD1, Nucleoside-diphosphate-sugar
  misc_feature (1)..(286): Homolog of NCBI NO: 34908274 NR Description: putative GDP-mannose pyrophosphorylase [Oryza
  misc_feature (1)..(286): Homolog of NCBI NO: 40253523 NR Description: putative GDP-mannose pyrophosphorylase [Oryza
  misc_feature (1)..(286): Homolog of NCBI NO: 14971013 NR Description: GDP-D-mannose pyrophosphorylase [Nicotiana
  misc_feature (1)..(291): Homolog of NCBI NO: 15233308 NR Description: mannose-1-phosphate guanylyltransferase-like
MLNFVKEYEKKLEIKITFSQETEPLGTAGPLALARDKLVDESGQPFFVLNSDVICEYPLLEMIEFHKTNRAEASIMVTEVDDPSKYGVVVTEEGTARVESFVEKPKHFVGNKINAGIYLLSPSVLDRIELRRTSIEKEIFPKIASEKKLYAMVLPGFWMDIGQPKDYITGQRMYLNSLREKTPQELATGDNIIGNVLVHESAVIGEGCLIGPDVVIGPGCVIDSGVRLFGCTVMRGVWIKEHACISNSIVGWDSTVGRWARVFNITVLGKDVNVADAEVYNSGVVIEEQGL

SEQ ID NO: 80647 - DNA, 1570 bp, Arabidopsis thaliana
  misc_feature (1)..(1570): Ceres Seq. ID no. 12656701
  misc_feature: MA Experiment ID: 20000171 Result: Down-regulated in Transcription
  misc_feature: MA Experiment 20000171 PARAMETER Experiment Name: At_42deg_Heat_P Parameter: Age (day) Value: 14
  misc_feature: MA Experiment 20000171 PARAMETER Experiment Name: At_42deg_Heat_P Parameter: Organism Value: A. thaliana
  misc_feature: MA Experiment 20000171 PARAMETER Experiment Name: At_42deg_Heat_P Parameter: Plant Line Value: WS
  misc_feature: MA Experiment 20000171 PARAMETER Experiment Name: At_42deg_Heat_P Parameter: Temperature (deg C) Value: 42 vs. 22
  misc_feature: MA Experiment 20000171 PARAMETER Experiment Name: At_42deg_Heat_P Parameter: Timepoint (hr) Value: 1
  misc_feature: MA Experiment 20000171 PARAMETER Experiment Name: At_42deg_Heat_P Parameter: Tissue Value: Aerial
  misc_feature: MA Experiment ID: 20000180 Result: Up-regulated in Transcription
  misc_feature: MA Experiment 20000180 PARAMETER Experiment Name: At_Germinating_Seeds_P Parameter: Age (hr) Value: 24 vs. 0
  misc_feature: MA Experiment 20000180 PARAMETER Experiment Name: At_Germinating_Seeds_P Parameter: Tissue Value: Germinating Seeds
  misc_feature: MA Experiment ID: 20000182 Result: Down-regulated in Transcription
  misc_feature: MA Experiment 20000182 PARAMETER Experiment Name: At_2mM_SA_P Parameter: Age (day) Value: 14
  misc_feature: MA Experiment 20000182 PARAMETER Experiment Name: At_2mM_SA_P Parameter: Organism Value: A. thaliana
  misc_feature: MA Experiment 20000182 PARAMETER Experiment Name: At_2mM_SA_P Parameter: Plant Line Value: WS
  misc_feature: MA Experiment 20000182 PARAMETER Experiment Name: At_2mM_SA_P Parameter: Timepoint (hr) Value: 6
  misc_feature: MA Experiment 20000182 PARAMETER Experiment Name: At_2mM_SA_P Parameter: Tissue Value: Aerial
  misc_feature: MA Experiment 20000182 PARAMETER Experiment Name: At_2mM_SA_P Parameter: Treatment Value: 2mM SA vs. No Treatment
  misc_feature: MA Experiment ID: 20000184 Result: Up-regulated in Transcription
  misc_feature: MA Experiment 20000184 PARAMETER Experiment Name: At_Shoots__P Parameter: Age (day) Value: 7
  misc_feature: MA Experiment 20000184 PARAMETER Experiment Name: At_Shoots__P Parameter: Tissue Value: Shoots vs. Whole Plant
  misc_feature: MA Experiment ID: 20000185 Result: Up-regulated in Transcription
  misc_feature: MA Experiment 20000185 PARAMETER Experiment Name: At_Roots__P Parameter: Age (day) Value: 7 vs. 21
  misc_feature: MA Experiment 20000185 PARAMETER Experiment Name: At_Roots__P Parameter: Organism Value: A. thaliana
  misc_feature: MA Experiment 20000185 PARAMETER Experiment Name: At_Roots__P Parameter: Tissue Value: Roots vs. Whole Plant
  misc_feature: MA Experiment ID: 20000227 Result: Up-regulated in Transcription
  misc_feature: MA Experiment 20000227 PARAMETER Experiment Name: At_Root-Tips-vs-Tops_P Parameter: Tissue Value: Root Tips vs. Root Tops
  misc_feature: MA Experiment ID: 20000265 Result: Up-regulated in Transcription
  misc_feature: MA Experiment 20000265 PARAMETER Experiment Name: At_Open_Flower_P Parameter: Age (day) Value: 21
  misc_feature: MA Experiment 20000265 PARAMETER Experiment Name: At_Open_Flower_P Parameter: Plant Line Value: WS
  misc_feature: MA Experiment 20000265 PARAMETER Experiment Name: At_Open_Flower_P Parameter: Tissue Value: Closed Flower vs. Whole Plant
  misc_feature: MA Experiment ID: 20000268 Result: Down-regulated in Transcription
  misc_feature: MA Experiment 20000268 PARAMETER Experiment Name: At_100mM_NaCl__P Parameter: Age (day) Value: 14
  misc_feature: MA Experiment 20000268 PARAMETER Experiment Name: At_100mM_NaCl__P Parameter: Organism Value: A. thaliana
  misc_feature: MA Experiment 20000268 PARAMETER Experiment Name: At_100mM_NaCl__P Parameter: Plant Line Value: WS
  misc_feature: MA Experiment 20000268 PARAMETER Experiment Name: At_100mM_NaCl__P Parameter: Timepoint (hr) Value: 6
  misc_feature: MA Experiment 20000268 PARAMETER Experiment Name: At_100mM_NaCl__P Parameter: Tissue Value: Whole Plant
  misc_feature: MA Experiment 20000268 PARAMETER Experiment Name: At_100mM_NaCl__P Parameter: Treatment Value: 100mM NaCl vs. No Treatment
  misc_feature: MA Experiment ID: 20000286 Result: Up-regulated in Transcription
  misc_feature: MA Experiment 20000286 PARAMETER Experiment Name: At_Open_Flower_P Parameter: Age (day) Value: 21
  misc_feature: MA Experiment 20000286 PARAMETER Experiment Name: At_Open_Flower_P Parameter: Plant Line Value: WS
  misc_feature: MA Experiment 20000286 PARAMETER Experiment Name: At_Open_Flower_P Parameter: Tissue Value: Half Open vs. Whole Plant
  misc_feature: MA Experiment ID: 20000436 Result: Down-regulated in Transcription
  misc_feature: MA Experiment 20000436 PARAMETER Experiment Name: At_Drought_P Parameter: Age (day) Value: 7
  misc_feature: MA Experiment 20000436 PARAMETER Experiment Name: At_Drought_P Parameter: Organism Value: A. thaliana
  misc_feature: MA Experiment 20000436 PARAMETER Experiment Name: At_Drought_P Parameter: Plant Line Value: WS
  misc_feature: MA Experiment 20000436 PARAMETER Experiment Name: At_Drought_P Parameter: Timepoint (hr) Value: 12
  misc_feature: MA Experiment 20000436 PARAMETER Experiment Name: At_Drought_P Parameter: Tissue Value: Whole Plant
  misc_feature: MA Experiment 20000436 PARAMETER Experiment Name: At_Drought_P Parameter: Treatment Value: Drought vs. No Drought
  misc_feature: MA Experiment ID: 20000437 Result: Down-regulated in Transcription
  misc_feature: MA Experiment 20000437 PARAMETER Experiment Name: At_Drought_P Parameter: Age (day) Value: 8
  misc_feature: MA Experiment 20000437 PARAMETER Experiment Name: At_Drought_P Parameter: Organism Value: A. thaliana
  misc_feature: MA Experiment 20000437 PARAMETER Experiment Name: At_Drought_P Parameter: Plant Line Value: WS
  misc_feature: MA Experiment 20000437 PARAMETER Experiment Name: At_Drought_P Parameter: Timepoint (hr) Value: 24
  misc_feature: MA Experiment 20000437 PARAMETER Experiment Name: At_Drought_P Parameter: Tissue Value: Whole Plant
  misc_feature: MA Experiment 20000437 PARAMETER Experiment Name: At_Drought_P Parameter: Treatment Value: Drought vs. No Drought
  misc_feature: MA Experiment ID: 20000438 Result: Up-regulated in Transcription
  misc_feature: MA Experiment 20000438 PARAMETER Experiment Name: At_Shoots__P Parameter: Age (day) Value: 14
  misc_feature: MA Experiment 20000438 PARAMETER Experiment Name: At_Shoots__P Parameter: Tissue Value: Shoots vs. Whole Plant
  misc_feature: MA Experiment ID: 20000451 Result: Up-regulated in Transcription
  misc_feature: MA Experiment 20000451 PARAMETER Experiment Name: At_CS6879_Shoots-Roots_P Parameter: Age (day) Value: 14
  misc_feature: MA Experiment 20000451 PARAMETER Experiment Name: At_CS6879_Shoots-Roots_P Parameter: Organism Value: A. thaliana
  misc_feature: MA Experiment 20000451 PARAMETER Experiment Name: At_CS6879_Shoots-Roots_P Parameter: Plant Line Value: CS6879 vs. WS
  misc_feature: MA Experiment 20000451 PARAMETER Experiment Name: At_CS6879_Shoots-Roots_P Parameter: Tissue Value: Roots
  misc_feature: MA Experiment ID: 20001248 Result: Down-regulated in Transcription
  misc_feature: MA Experiment 20001248 PARAMETER Experiment Name: At_Far-red-induction_P Parameter: Age (day) Value: 7
  misc_feature: MA Experiment 20001248 PARAMETER Experiment Name: At_Far-red-induction_P Parameter: Light Value: Far-red vs. White
  misc_feature: MA Experiment 20001248 PARAMETER Experiment Name: At_Far-red-induction_P Parameter: Organism Value: A. thaliana
  misc_feature: MA Experiment 20001248 PARAMETER Experiment Name: At_Far-red-induction_P Parameter: Plant Line Value: Columbia
  misc_feature: MA Experiment 20001248 PARAMETER Experiment Name: At_Far-red-induction_P Parameter: Timepoint (hr) Value: 4
  misc_feature: MA Experiment 20001248 PARAMETER Experiment Name: At_Far-red-induction_P Parameter: Tissue Value: Whole Plant
  misc_feature: MA Experiment ID: 20001450 Result: Down-regulated in Transcription
  misc_feature: MA Experiment 20001450 PARAMETER Experiment Name: At_Far-red-induction_P Parameter: Age (day) Value: 7
  misc_feature: MA Experiment 20001450 PARAMETER Experiment Name: At_Far-red-induction_P Parameter: Light Value: Far-red vs. White
  misc_feature: MA Experiment 20001450 PARAMETER Experiment Name: At_Far-red-induction_P Parameter: Organism Value: A. thaliana
  misc_feature: MA Experiment 20001450 PARAMETER Experiment Name: At_Far-red-induction_P Parameter: Plant Line Value: Columbia
  misc_feature: MA Experiment 20001450 PARAMETER Experiment Name: At_Far-red-induction_P Parameter: Timepoint (hr) Value: 8
  misc_feature: MA Experiment 20001450 PARAMETER Experiment Name: At_Far-red-induction_P Parameter: Tissue Value: Whole Plant
  misc_feature: MA Experiment ID: 20001554 Result: Down-regulated in Transcription
  misc_feature: MA Experiment 20001554 PARAMETER Experiment Name: At_Drought_Soil_Dry_P Parameter: Age (day) Value: 21
  misc_feature: MA Experiment 20001554 PARAMETER Experiment Name: At_Drought_Soil_Dry_P Parameter: Organism Value: A. thaliana
  misc_feature: MA Experiment 20001554 PARAMETER Experiment Name: At_Drought_Soil_Dry_P Parameter: Plant Line Value: WS
  misc_feature: MA Experiment 20001554 PARAMETER Experiment Name: At_Drought_Soil_Dry_P Parameter: Post Timepoint (hr) Value: None
  misc_feature: MA Experiment 20001554 PARAMETER Experiment Name: At_Drought_Soil_Dry_P Parameter: Post-Treatment Value: None
  misc_feature: MA Experiment 20001554 PARAMETER Experiment Name: At_Drought_Soil_Dry_P Parameter: Timepoint (day) Value: 7
  misc_feature: MA Experiment 20001554 PARAMETER Experiment Name: At_Drought_Soil_Dry_P Parameter: Treatment Value: Drought vs. No Drought
  misc_feature: MA Experiment ID: 20001558 Result: Up-regulated in Transcription
  misc_feature: MA Experiment 20001558 PARAMETER Experiment Name: At_Drought_Soil_Dry_P Parameter: Age (day) Value: 27
  misc_feature: MA Experiment 20001558 PARAMETER Experiment Name: At_Drought_Soil_Dry_P Parameter: Organism Value: A. thaliana
  misc_feature: MA Experiment 20001558 PARAMETER Experiment Name: At_Drought_Soil_Dry_P Parameter: Plant Line Value: WS
  misc_feature: MA Experiment 20001558 PARAMETER Experiment Name: At_Drought_Soil_Dry_P Parameter: Post Timepoint (hr) Value: 6
  misc_feature: MA Experiment 20001558 PARAMETER Experiment Name: At_Drought_Soil_Dry_P Parameter: Post-Treatment Value: Re-Water vs. No Drought
  misc_feature: MA Experiment 20001558 PARAMETER Experiment Name: At_Drought_Soil_Dry_P Parameter: Timepoint (day) Value: 13
  misc_feature: MA Experiment 20001558 PARAMETER Experiment Name: At_Drought_Soil_Dry_P Parameter: Treatment Value: Drought vs. No Drought
  misc_feature: MA Experiment ID: 20001560 Result: Up-regulated in Transcription
  misc_feature: MA Experiment 20001560 PARAMETER Experiment Name: At_Drought_Soil_Dry_P Parameter: Age (day) Value: 28
  misc_feature: MA Experiment 20001560 PARAMETER Experiment Name: At_Drought_Soil_Dry_P Parameter: Organism Value: A. thaliana
  misc_feature: MA Experiment 20001560 PARAMETER Experiment Name: At_Drought_Soil_Dry_P Parameter: Plant Line Value: WS
  misc_feature: MA Experiment 20001560 PARAMETER Experiment Name: At_Drought_Soil_Dry_P Parameter: Post Timepoint (hr) Value: None
  misc_feature: MA Experiment 20001560 PARAMETER Experiment Name: At_Drought_Soil_Dry_P Parameter: Post-Treatment Value: None
  misc_feature: MA Experiment 20001560 PARAMETER Experiment Name: At_Drought_Soil_Dry_P Parameter: Timepoint (day) Value: 14
  misc_feature: MA Experiment 20001560 PARAMETER Experiment Name: At_Drought_Soil_Dry_P Parameter: Treatment Value: Drought vs. No Drought
atatactatatgacctaattaattacacacacacacacaaaaacccattgaagaaaaaaaaagcgtggagagtgtgtgagaggacacgaaatggcaagaacccatttcattttccttcttcttgtagctcttttatcgacaacatttccatcatcatcatcttcaagagagcaagagaaggacagaatcaaagcacttccaggccaaccaaaagtggcattctcacaatactcaggctatgtcaatgttaaccagtctcatggtcgtgccctcttctattggcttactgagtcatcttctccttctccccacaccaagccccttcttctttggctcaatggaggaccgggctgctcgtcgattgcttatggagcttcagaggaaattggaccgtttcgtatcaacaaaaccggttccaatctctatctcaacaagttcgcttggaacaaagacgcaaaccttctgtttcttgaatcaccggccggagttggatattcctacacgaacacaagctccgatcttaaagactccggagatgaacgaacagctcaagacaacttgatatttcttatcaaatggttatcgagatttcctcaatacaaatacagagacttctatatcgctggtgaaagctatgccgggcattatgttcctcagcttgccaaaaagataaatgactacaacaaagctttctccaaaccaatcattaatctcaaaggattcttggtgggaaatgcagtgacggacaatcagtacgacagtataggaacagtaacttactggtggactcacgcaattatctccgacaaaagctacaagtcaatcctcaaatactgcaatttcacggtggagagagtttccgacgattgcgacaatgcggttaactacgctatgaaccatgagtttggtgacattgatcagtacagcatttacaccccaacgtgcgtggctgctcaacagaagaagaacacaaccggtttctttgtgcggatgaagaacacactcttgcgtagacggttagtgtctggctatgatccttgtacggagagttatgcagagaagtattttaaccgtcccgatgttcagagagccatgcacgctaatgttactggaattcgctataaatggacagcttgcagtgatgttctgatcaagacctggaaagattcggacaagaccatgttgcccatatacaaggaacttgcagcgtccggtttgaggatctggattttcagcggtgatacagactcggtggttccagtgaccgcgacacggttttccctcagccatcttaatctcccggtgaaaactcgttggtatccttggtacactgataaccaggtgggaggatggacagaggtttacaagggactgacctttgcaacggtacgaggggcaggccacgaggtgcctttatttgaaccaaagcgtgctctcattcttttcagatcattcttggccgggaaggaactcccaagatcttattagctactttaataacctaaacatagagtaagagaaaatgtcccgaaggacaatttggctaccagattaggaacctattccgagt

SEQ ID NO: 80648 - protein, 465 aa, Arabidopsis thaliana
  peptide (1)..(465): Ceres Seq. ID no. 12656702
  misc_feature (1)..(465): Homolog of NCBI NO: 15234795 NR Description: SERINE CARBOXYPEPTIDASE II-like protein; protein At4g30610.1, supported by cDNA: gi_13877870 [Arabidopsis
  misc_feature (1)..(465): Homolog of NCBI NO: 13877871 NR Description: putative serine carboxypeptidase II [Arabidopsis
  misc_feature (1)..(465): Homolog of NCBI NO: 15224082 NR Description: putative serine carboxypeptidase II; protein id: [Arabidopsis thaliana] >gi|25289798|pir||D84631 probable serine
  misc_feature (33)..(465): Homolog of NCBI NO: 15224083 NR Description: putative serine carboxypeptidase II; protein id: [Arabidopsis thaliana] >gi|25289799|pir||E84631 probable serine
  misc_feature (7)..(464): Homolog of NCBI NO: 15232847 NR Description: putative serine carboxypeptidase II; protein id: supported by cDNA: 42069., supported by cDNA: gi_14335061 thaliana] >gi|6513922|gb|AAF14826.1|AC011664_8 putative serine
  misc_feature (7)..(464): Homolog of NCBI NO: 21593731 NR Description: putative serine carboxypeptidase II [Arabidopsis
  misc_feature (1)..(462): Homolog of NCBI NO: 34908012 NR Description: putative carboxypeptidase D [Oryza sativa
  misc_feature (1)..(462): Homolog of NCBI NO: 15227493 NR Description: putative serine carboxypeptidase II; protein id:
  misc_feature (6)..(462): Homolog of NCBI NO: 15231911 NR Description: putative serine carboxypeptidase II; protein id: [Arabidopsis thaliana] >gi|6648211|gb|AAF21209.1|AC013483_33
  misc_feature (1)..(462): Homolog of NCBI NO: 11967861 NR Description: putative serine carboxypeptidase [Pisum sativum]
MARTHFIFLLLVALLSTTFPSSSSSREQEKDRIKALPGQPKVAFSQYSGYVNVNQSHGRALFYWLTESSSPSPHTKPLLLWLNGGPGCSSIAYGASEEIGPFRINKTGSNLYLNKFAWNKDANLLFLESPAGVGYSYTNTSSDLKDSGDERTAQDNLIFLIKWLSRFPQYKYRDFYIAGESYAGHYVPQLAKKINDYNKAFSKPIINLKGFLVGNAVTDNQYDSIGTVTYWWTHAIISDKSYKSILKYCNFTVERVSDDCDNAVNYAMNHEFGDIDQYSIYTPTCVAAQQKKNTTGFFVRMKNTLLRRRLVSGYDPCTESYAEKYFNRPDVQRAMHANVTGIRYKWTACSDVLIKTWKDSDKTMLPIYKELAASGLRIWIFSGDTDSVVPVTATRFSLSHLNLPVKTRWYPWYTDNQVGGWTEVYKGLTFATVRGAGHEVPLFEPKRALILFRSFLAGKELPRSY

SEQ ID NO: 80649 - DNA, 2459 bp, Arabidopsis thaliana
  misc_feature (1)..(2459): Ceres Seq. ID no. 12656710
  misc_feature: MA Experiment ID: 20000328 Result: Down-regulated in Transcription
  misc_feature: MA Experiment 20000328 PARAMETER Experiment Name: At_42deg_Heat_Sub_P Parameter: Age (day) Value: 14
  misc_feature: MA Experiment 20000328 PARAMETER Experiment Name: At_42deg_Heat_Sub_P Parameter: Organism Value: A. thaliana
  misc_feature: MA Experiment 20000328 PARAMETER Experiment Name: At_42deg_Heat_Sub_P Parameter: Plant Line Value: WS
  misc_feature: MA Experiment 20000328 PARAMETER Experiment Name: At_42deg_Heat_Sub_P Parameter: Temperature (deg C) Value: 42 vs. 22
  misc_feature: MA Experiment 20000328 PARAMETER Experiment Name: At_42deg_Heat_Sub_P Parameter: Timepoint (hr) Value: 6
  misc_feature: MA Experiment 20000328 PARAMETER Experiment Name: At_42deg_Heat_Sub_P Parameter: Tissue Value: Aerial
atgctgctacggacagtatcgtccgccaccgccgagacaaccgccgcattgataagcaagaacacatatctcgatttcttcaaaagatcaacttctatatctcaccttgctcaaacccatgctcagatcattctccatggcttccgaaacgacatctcattgctcaccaagcttactcaacgactctccgacctcggcgccatttactacgcacgcgacattttcctctccgtccaaagacctgacgttttccttttcaacgtcctcatgcgtggcttctccgtcaacgaatcacctcactcttcgctctctgtgttcgctcatctaaggaaatccactgatctcaagcccaacagctccacctacgccttcgctatctcggctgcttctgggtttcgtgacgacagagctggccgtgttattcatggtcaagcggtcgttgatgggtgtgactcagaattgctgcttgggtctaacattgttaagatgtacttcaagttttggcgagtcgaagatgctaggaaggtgttcgacagaatgcctgagaaagacaccattttgtggaacacgatgatatctggctaccgaaagaatgaaatgtatgtggaatctattcaggttttcagggatttgatcaatgagagctgtacccgtttggacactacaactctgcttgatattcttcccgctgttgcagagttgcaggagctgagactcggcatgcaaatccatagtcttgctacaaaaactgggtgctactcccacgattatgttcttactggtttcatctcactatactcaaagtgtggaaagattaagatgggaagtgctctgtttcgtgagtttcgtaaaccagatatagtagcttacaatgcaatgattcatgggtacacatccaatggagagactgagctctctttaagcctgtttaaagagctgatgttatcaggagcaaggttgaggtcaagcacgttggtgagtctggtccctgtctctggtcatcttatgcttatatatgccattcatggttactgcttgaaatcgaatttcctgtctcatgcttctgtctcaaccgcgttaactacggtttatagtaaattgaatgagatagaatcagcccggaagctttttgatgagtctccggaaaaaagcttgccatcttggaatgcaatgatctcaggttacacccaaaacgggttgacagaggacgcgatatctctcttcagagaaatgcagaagtctgaattcagtccaaaccctgtcacaataacttgtattctatcagcttgtgcgcagttaggagctttaagtttggggaaatgggttcatgatttagtaaggagcacagattttgagtctagcatatatgtgtctactgctttgattggtatgtatgcaaagtgtggaagcattgcagaagcacgccgattgtttgacttgatgacaaagaagaatgaagttacatggaacacgatgatttctggttatggacttcatggacaaggacaagaagctctgaatattttctatgagatgttgaattccggtattacaccaacaccagtcactttcctctgcgttctttacgcttgtagtcatgctggcttggtcaaagaaggtgatgaaattttcaattccatgatccaccggtatggttttgaaccatcagtcaagcattacgcctgtatggttgatattcttggccgagcaggacacttacagagagcattgcagtttatagaggcaatgtcgattgagcctggttcttctgtgtgggaaacattgctaggagcttgtaggattcacaaagacacaaaccttgcccgaacagtctctgagaagctctttgagctagatccagacaatgtaggataccatgttttgctgtcgaatattcactcagctgatagaaactatccacaggctgctacggttagacaaactgcaaagaagaggaaactagccaaagctcctggatataccttaatagaaataggtgaaacgcctcatgtctttacctcaggtgatcagtcacatccacaggtaaaggaaatctatgagaagctggagaagcttgaagggaagatgagggaagctgggtaccaacccgagactgagttggccctgcatgatgtggaggaggaagaaagggagctgatggtgaaggttcacagcgagaggctagccattgcctttggactcatagctactgagccaggaactgaaatccggatcataaagaatcttcgagtctgtttagactgtcacaccgtaaccaaactcatctcaaagatcacagagagagtgattgttgtaagagatgccaaccgcttccatcacttcaaagacggtgtctgttcatgtggagattattggtagtgactcgtttttggcctcaacacaagtcatagtgtactcatcctgtaacattacctcactcataattgatttcttttttg

SEQ ID NO: 80650 - protein, 792 aa, Arabidopsis thaliana
  peptide (1)..(792): Ceres Seq. ID no. 12656711
  misc_feature (487)..(521): Pfam Name: PPR repeat Pfam Description: PPR repeat
  misc_feature (27)..(792): Homolog of NCBI NO: 18418348 NR Description: putative protein; protein id: At4g33990.1
  misc_feature (90)..(792): Homolog of NCBI NO: 34897884 NR Description: Similar to Arabidopsis thaliana DNA chromosome 4,
  misc_feature (28)..(792): Homolog of NCBI NO: 15220337 NR Description: hypothetical protein; protein id: At1g11290.1
  misc_feature (38)..(792): Homolog of NCBI NO: 15226200 NR Description: putative selenium-binding protein; protein id:
  misc_feature (40)..(792): Homolog of NCBI NO: 15228590 NR Description: hypothetical protein; protein id: At3g03580.1 thaliana] >gi|6091764|gb|AAF03474.1|AC009327_13 hypothetical [Arabidopsis thaliana] >gi|28393735|gb|AAO42278.1| unknown
  misc_feature (46)..(792): Homolog of NCBI NO: 15234006 NR Description: putative protein; protein id: At4g18750.1
  misc_feature (272)..(792): Homolog of NCBI NO: 15237421 NR Description: putative protein; protein id: At5g16860.1
  misc_feature (26)..(345): Homolog of NCBI NO: 15237421 NR Description: putative protein; protein id: At5g16860.1
  misc_feature (30)..(792): Homolog of NCBI NO: 18483237 NR Description: putative vegetative storage protein [Sorghum
  misc_feature (51)..(792): Homolog of NCBI NO: 34903762 NR Description: unnamed protein product [Oryza sativa (japonica group)] >gi|7340873|dbj|BAA92963.1| unnamed protein product
MLLRTVSSATAETTAALISKNTYLDFFKRSTSISHLAQTHAQIILHGFRNDISLLTKLTQRLSDLGAIYYARDIFLSVQRPDVFLFNVLMRGFSVNESPHSSLSVFAHLRKSTDLKPNSSTYAFAISAASGFRDDRAGRVIHGQAVVDGCDSELLLGSNIVKMYFKFWRVEDARKVFDRMPEKDTILWNTMISGYRKNEMYVESIQVFRDLINESCTRLDTTTLLDILPAVAELQELRLGMQIHSLATKTGCYSHDYVLTGFISLYSKCGKIKMGSALFREFRKPDIVAYNAMIHGYTSNGETELSLSLFKELMLSGARLRSSTLVSLVPVSGHLMLIYAIHGYCLKSNFLSHASVSTALTTVYSKLNEIESARKLFDESPEKSLPSWNAMISGYTQNGLTEDAISLFREMQKSEFSPNPVTITCILSACAQLGALSLGKWVHDLVRSTDFESSIYVSTALIGMYAKCGSIAEARRLFDLMTKKNEVTWNTMISGYGLHGQGQEALNIFYEMLNSGITPTPVTFLCVLYACSHAGLVKEGDEIFNSMIHRYGFEPSVKHYACMVDILGRAGHLQRALQFIEAMSIEPGSSVWETLLGACRIHKDTNLARTVSEKLFELDPDNVGYHVLLSNIHSADRNYPQAATVRQTAKKRKLAKAPGYTLIEIGETPHVFTSGDQSHPQVKEIYEKLEKLEGKMREAGYQPETELALHDVEEEERELMVKVHSERLAIAFGLIATEPGTEIRIIKNLRVCLDCHTVTKLISKITERVIVVRDANRFHHFKDGVCSCGDYW

SEQ ID NO: 80651 - protein, 703 aa, Arabidopsis thaliana
  peptide (1)..(703): Ceres Seq. ID no. 12656712
  misc_feature (398)..(432): Pfam Name: PPR repeat Pfam Description: PPR repeat
  misc_feature (1)..(703): Homolog of NCBI NO: 18418348 NR Description: putative protein; protein id: At4g33990.1
  misc_feature (1)..(703): Homolog of NCBI NO: 34897884 NR Description: Similar to Arabidopsis thaliana DNA chromosome 4,
  misc_feature (1)..(703): Homolog of NCBI NO: 15220337 NR Description: hypothetical protein; protein id: At1g11290.1
  misc_feature (1)..(703): Homolog of NCBI NO: 15226200 NR Description: putative selenium-binding protein; protein id:
  misc_feature (1)..(703): Homolog of NCBI NO: 15228590 NR Description: hypothetical protein; protein id: At3g03580.1 thaliana] >gi|6091764|gb|AAF03474.1|AC009327_13 hypothetical [Arabidopsis thaliana] >gi|28393735|gb|AAO42278.1| unknown
  misc_feature (1)..(703): Homolog of NCBI NO: 15234006 NR Description: putative protein; protein id: At4g18750.1
  misc_feature (183)..(703): Homolog of NCBI NO: 15237421 NR Description: putative protein; protein id: At5g16860.1
  misc_feature (1)..(256): Homolog of NCBI NO: 15237421 NR Description: putative protein; protein id: At5g16860.1
  misc_feature (1)..(703): Homolog of NCBI NO: 18483237 NR Description: putative vegetative storage protein [Sorghum
  misc_feature (1)..(703): Homolog of NCBI NO: 34903762 NR Description: unnamed protein product [Oryza sativa (japonica group)] >gi|7340873|dbj|BAA92963.1| unnamed protein product
MRGFSVNESPHSSLSVFAHLRKSTDLKPNSSTYAFAISAASGFRDDRAGRVIHGQAVVDGCDSELLLGSNIVKMYFKFWRVEDARKVFDRMPEKDTILWNTMISGYRKNEMYVESIQVFRDLINESCTRLDTTTLLDILPAVAELQELRLGMQIHSLATKTGCYSHDYVLTGFISLYSKCGKIKMGSALFREFRKPDIVAYNAMIHGYTSNGETELSLSLFKELMLSGARLRSSTLVSLVPVSGHLMLIYAIHGYCLKSNFLSHASVSTALTTVYSKLNEIESARKLFDESPEKSLPSWNAMISGYTQNGLTEDAISLFREMQKSEFSPNPVTITCILSACAQLGALSLGKWVHDLVRSTDFESSIYVSTALIGMYAKCGSIAEARRLFDLMTKKNEVTWNTMISGYGLHGQGQEALNIFYEMLNSGITPTPVTFLCVLYACSHAGLVKEGDEIFNSMIHRYGFEPSVKHYACMVDILGRAGHLQRALQFIEAMSIEPGSSVWETLLGACRIHKDTNLARTVSEKLFELDPDNVGYHVLLSNIHSADRNYPQAATVRQTAKKRKLAKAPGYTLIEIGETPHVFTSGDQSHPQVKEIYEKLEKLEGKMREAGYQPETELALHDVEEEERELMVKVHSERLAIAFGLIATEPGTEIRIIKNLRVCLDCHTVTKLISKITERVIVVRDANRFHHFKDGVCSCGDYW

SEQ ID NO: 80652 - protein, 630 aa, Arabidopsis thaliana
  peptide (1)..(630): Ceres Seq. ID no. 12656713
  misc_feature (325)..(359): Pfam Name: PPR repeat Pfam Description: PPR repeat
  misc_feature (1)..(630): Homolog of NCBI NO: 18418348 NR Description: putative protein; protein id: At4g33990.1
  misc_feature (1)..(630): Homolog of NCBI NO: 34897884 NR Description: Similar to Arabidopsis thaliana DNA chromosome 4,
  misc_feature (1)..(630): Homolog of NCBI NO: 15220337 NR Description: hypothetical protein; protein id: At1g11290.1
  misc_feature (1)..(630): Homolog of NCBI NO: 15226200 NR Description: putative selenium-binding protein; protein id:
  misc_feature (1)..(630): Homolog of NCBI NO: 15228590 NR Description: hypothetical protein; protein id: At3g03580.1 thaliana] >gi|6091764|gb|AAF03474.1|AC009327_13 hypothetical [Arabidopsis thaliana] >gi|28393735|gb|AAO42278.1| unknown
  misc_feature (1)..(630): Homolog of NCBI NO: 15234006 NR Description: putative protein; protein id: At4g18750.1
  misc_feature (110)..(630): Homolog of NCBI NO: 15237421 NR Description: putative protein; protein id: At5g16860.1
  misc_feature (1)..(183): Homolog of NCBI NO: 15237421 NR Description: putative protein; protein id: At5g16860.1
  misc_feature (1)..(630): Homolog of NCBI NO: 18483237 NR Description: putative vegetative storage protein [Sorghum
  misc_feature (1)..(630): Homolog of NCBI NO: 34903762 NR Description: unnamed protein product [Oryza sativa (japonica group)] >gi|7340873|dbj|BAA92963.1| unnamed protein product
MYFKFWRVEDARKVFDRMPEKDTILWNTMISGYRKNEMYVESIQVFRDLINESCTRLDTTTLLDILPAVAELQELRLGMQIHSLATKTGCYSHDYVLTGFISLYSKCGKIKMGSALFREFRKPDIVAYNAMIHGYTSNGETELSLSLFKELMLSGARLRSSTLVSLVPVSGHLMLIYAIHGYCLKSNFLSHASVSTALTTVYSKLNEIESARKLFDESPEKSLPSWNAMISGYTQNGLTEDAISLFREMQKSEFSPNPVTITCILSACAQLGALSLGKWVHDLVRSTDFESSIYVSTALIGMYAKCGSIAEARRLFDLMTKKNEVTWNTMISGYGLHGQGQEALNIFYEMLNSGITPTPVTFLCVLYACSHAGLVKEGDEIFNSMIHRYGFEPSVKHYACMVDILGRAGHLQRALQFIEAMSIEPGSSVWETLLGACRIHKDTNLARTVSEKLFELDPDNVGYHVLLSNIHSADRNYPQAATVRQTAKKRKLAKAPGYTLIEIGETPHVFTSGDQSHPQVKEIYEKLEKLEGKMREAGYQPETELALHDVEEEERELMVKVHSERLAIAFGLIATEPGTEIRIIKNLRVCLDCHTVTKLISKITERVIVVRDANRFHHFKDGVCSCGDYW

SEQ ID NO: 80653 - DNA, 1935 bp, Arabidopsis thaliana
  misc_feature (1)..(1935): Ceres Seq. ID no. 12656721
  misc_feature: MA Experiment ID: 108462 Result: Down-regulated in Transcription
  misc_feature: MA Experiment 108462 PARAMETER Experiment Name: At_Germinating_Seeds_cDNA_P Parameter: Age (day) Value: 2 vs. 0
  misc_feature: MA Experiment 108462 PARAMETER Experiment Name: At_Germinating_Seeds_cDNA_P Parameter: Tissue Value: Germinating Seeds
  misc_feature: MA Experiment ID: 108463 Result: Down-regulated in Transcription
  misc_feature: MA Experiment 108463 PARAMETER Experiment Name: At_Germinating_Seeds_cDNA_P Parameter: Age (day) Value: 3 vs. 0
  misc_feature: MA Experiment 108463 PARAMETER Experiment Name: At_Germinating_Seeds_cDNA_P Parameter: Tissue Value: Germinating Seeds
  misc_feature: MA Experiment ID: 108464 Result: Down-regulated in Transcription
  misc_feature: MA Experiment 108464 PARAMETER Experiment Name: At_Germinating_Seeds_cDNA_P Parameter: Age (day) Value: 4 vs. 0
  misc_feature: MA Experiment 108464 PARAMETER Experiment Name: At_Germinating_Seeds_cDNA_P Parameter: Tissue Value: Germinating Seeds
  misc_feature: MA Experiment ID: 108501 Result: Down-regulated in Transcription
  misc_feature: MA Experiment 108501 PARAMETER Experiment Name: At_ap2_floral_buds_cDNA_P Parameter: Plant Line Value: ap2 (Ler.)
  misc_feature: MA Experiment 108501 PARAMETER Experiment Name: At_ap2_floral_buds_cDNA_P Parameter: Tissue Value: Closed Flower
  misc_feature: MA Experiment ID: 108569 Result: Up-regulated in Transcription
  misc_feature: MA Experiment 108569 PARAMETER Experiment Name: At_0.001%_MeJA__cDNA_P Parameter: Timepoint (hr) Value: 6
  misc_feature: MA Experiment 108569 PARAMETER Experiment Name: At_0.001%_MeJA__cDNA_P Parameter: Tissue Value: Aerial
  misc_feature: MA Experiment 108569 PARAMETER Experiment Name: At_0.001%_MeJA__cDNA_P Parameter: Treatment Value: 0.001% MeJA vs. No Treatment
  misc_feature: MA Experiment ID: 108573 Result: Up-regulated in Transcription
  misc_feature: MA Experiment 108573 PARAMETER Experiment Name: At_Drought_cDNA_P Parameter: Timepoint (hr) Value: 6
  misc_feature: MA Experiment 108573 PARAMETER Experiment Name: At_Drought_cDNA_P Parameter: Tissue Value: Aerial
  misc_feature: MA Experiment 108573 PARAMETER Experiment Name: At_Drought_cDNA_P Parameter: Treatment Value: Drought vs. No Drought
gaagtatagtttctgtaacaacaatggccaaaaccagagggtcttgttgtctcgtcaacgctctaatcgctatagcttttttggcgacagcccatttgtgtgaagctggcttgtctcagaaagaacaggacaaggtctcgaaattgcctggtcagaattttaatgttagttttgctcactactctgggtttgttgctactaatgagcaattgggaagagctctcttttactggttatttgaagccgttgaagatgctaagtctaagcctcttgttctctggctcaatggaggaccaggatgttcatctgttgcatatggtgaagcagaagagataggaccatttcacattaaggcagatgggaagactctttaccttaatcaatattcttggaaccaagctgcaaatattttgttccttgatgcacctgttggagttggttattcatactcaaacacctcgtctgatttgaagagcaatggtgataaaagaactgccgaagattcactgaaatttctgctgaaatgggttgagcggtttccggaatacaaaggaagggacttttatatagtaggggagagctatgcaggacattacattcctcagctgagtgaagccattgtaaaacataaccaaggttctgacaaaaacagtataaatctgaagggttacatggtaggaaatgggctgatggacgatttccatgacaggcttggtcttttccaatatatttggtcgttgggttttatatctgaccaaacatacagcttactgcaacttcaatgcggtttcgaatcgtttattcactcctccaaacagtgtaacaagattctggagatagcggacaaagaaataggtaacatagaccaatacagtgtcttcaccccagcttgtgttgccaatgcttcccagtcaaatatgttgctaaagaaaagacctatgactagccgcgtgagcgaacagtatgatccttgtacggagaaacacactacagtttatttcaatcttccagaggttcaaaaagccctccatgtcccaccaggacttgcaccatcaaaatgggatacttgcagtgatgtcgtgagtgaacactggaatgactctccttcctcggttctaaacatttaccacgagcttatagctgctgggcttcgtatctgggttttcagtggggacgcagatgccgttgtaccagtcacatcaacccggtacagtatcgatgcactaaaccttcgtcctttgagtgcctatggtccttggtacttagatggacaggtgggagggtggagtcagcagtatgctggtctgaactttgtgacagtgagaggtgcaggccatgaagttcctttgcacagaccgaagcaagctcttgcgctcttcaaggcttttatatctggaactccattgtccacacatgagaacagcatcagccgcgacatgtctgaactcgttagtgactcataatgagttctgatttgatgtaatgtgtgatttggattctcaatcaaaaactttccacataggccgttgaaataagaagagggaaagagaataaatcagtgttttaagtgatacgttcaatgcttcttcttcttctggttgtttgtttgtttggataaacatttgctgcttggaatctaataaaagaagtttctaccatttgtcagccatacgatccttgaataacaacaacatattcttgtgtaatgagaaagtgaagtctgatctgtgatgtataggactgggtattaatctggtaacggatataatactggggtagaaaatagaatttagactagtattgggggtctaaacgaaattatacagaagcattgggcttgacttggcccatgagacctaagcccatattttaaagaattaggggtttcttcttcctttgtctgttcaaattgaagaaacctgttttttttttttt

SEQ ID NO: 80654 - protein, 486 aa, Arabidopsis thaliana; identical to SEQ ID NO: 34843
  peptide (1)..(486): Ceres Seq. ID no. 12656722
  misc_feature (49)..(465): Pfam Name: Serine carboxypeptidase Pfam Description: Serine carboxypeptidase
  misc_feature (8)..(486): Homolog of NCBI NO: 18417667 NR Description: SERINE CARBOXYPEPTIDASE II - like protein; id: At4g30810.1, supported by cDNA: gi_15293048 [Arabidopsis >gi|15293049|gb|AAK93635.1| putative serine carboxypeptidase II
  misc_feature (8)..(197): Homolog of NCBI NO: 25289792 NR Description: SERINE CARBOXYPEPTIDASE II-like protein
  misc_feature (319)..(486): Homolog of NCBI NO: 25289792 NR Description: SERINE CARBOXYPEPTIDASE II-like protein
  misc_feature (45)..(468): Homolog of NCBI NO: 2493494 NR Description: Serine carboxypeptidase II-2 precursor (CP-MII.2)
  misc_feature (226)..(344): Homolog of NCBI NO: 25289792 NR Description: SERINE CARBOXYPEPTIDASE II-like protein
  misc_feature (21)..(468): Homolog of NCBI NO: 15227493 NR Description: putative serine carboxypeptidase II; protein id:
  misc_feature (34)..(472): Homolog of NCBI NO: 34895992 NR Description: putative carboxypeptidase D [Oryza sativa
  misc_feature (21)..(468): Homolog of NCBI NO: 15231911 NR Description: putative serine carboxypeptidase II; protein id: [Arabidopsis thaliana] >gi|6648211|gb|AAF21209.1|AC013483_33
  misc_feature (20)..(470): Homolog of NCBI NO: 34908012 NR Description: putative carboxypeptidase D [Oryza sativa
  misc_feature (21)..(476): Homolog of NCBI NO: 7428204 NR Description: carboxypeptidase D (EC 3.4.16.6) precursor -

SEQ ID NO: 80655 - protein, 479 aa, Arabidopsis thaliana; identical to SEQ ID NO: 34844
  peptide (1)..(479): Ceres Seq. ID no. 12656723
  misc_feature (42)..(458): Pfam Name: Serine carboxypeptidase Pfam Description: Serine carboxypeptidase
  misc_feature (1)..(479): Homolog of NCBI NO: 18417667 NR Description: SERINE CARBOXYPEPTIDASE II - like protein; id: At4g30810.1, supported by cDNA: gi_15293048 [Arabidopsis >gi|15293049|gb|AAK93635.1| putative serine carboxypeptidase II
  misc_feature (1)..(190): Homolog of NCBI NO: 25289792 NR Description: SERINE CARBOXYPEPTIDASE II-like protein
  misc_feature (312)..(479): Homolog of NCBI NO: 25289792 NR Description: SERINE CARBOXYPEPTIDASE II-like protein
  misc_feature (38)..(461): Homolog of NCBI NO: 2493494 NR Description: Serine carboxypeptidase II-2 precursor (CP-MII.2)
  misc_feature (219)..(337): Homolog of NCBI NO: 25289792 NR Description: SERINE CARBOXYPEPTIDASE II-like protein
  misc_feature (14)..(461): Homolog of NCBI NO: 15227493 NR Description: putative serine carboxypeptidase II; protein id:
  misc_feature (27)..(465): Homolog of NCBI NO: 34895992 NR Description: putative carboxypeptidase D [Oryza sativa
  misc_feature (14)..(461): Homolog of NCBI NO: 15231911 NR Description: putative serine carboxypeptidase II; protein id: [Arabidopsis thaliana] >gi|6648211|gb|AAF21209.1|AC013483_33
  misc_feature (13)..(463): Homolog of NCBI NO: 34908012 NR Description: putative carboxypeptidase D [Oryza sativa
  misc_feature (14)..(469): Homolog of NCBI NO: 7428204 NR Description: carboxypeptidase D (EC 3.4.16.6) precursor -

SEQ ID NO: 80656 - protein, 263 aa, Arabidopsis thaliana; identical to SEQ ID NO: 34845
  peptide (1)..(263): Ceres Seq. ID no. 12656724
  misc_feature (1)..(242): Pfam Name: Serine carboxypeptidase Pfam Description: Serine carboxypeptidase
  misc_feature (1)..(263): Homolog of NCBI NO: 18417667 NR Description: SERINE CARBOXYPEPTIDASE II - like protein; id: At4g30810.1, supported by cDNA: gi_15293048 [Arabidopsis >gi|15293049|gb|AAK93635.1| putative serine carboxypeptidase II
  misc_feature (96)..(263): Homolog of NCBI NO: 25289792 NR Description: SERINE CARBOXYPEPTIDASE II-like protein
  misc_feature (1)..(245): Homolog of NCBI NO: 2493494 NR Description: Serine carboxypeptidase II-2 precursor (CP-MII.2)
  misc_feature (3)..(121): Homolog of NCBI NO: 25289792 NR Description: SERINE CARBOXYPEPTIDASE II-like protein
  misc_feature (1)..(245): Homolog of NCBI NO: 15227493 NR Description: putative serine carboxypeptidase II; protein id:
  misc_feature (1)..(249): Homolog of NCBI NO: 34895992 NR Description: putative carboxypeptidase D [Oryza sativa
  misc_feature (1)..(245): Homolog of NCBI NO: 15231911 NR Description: putative serine carboxypeptidase II; protein id: [Arabidopsis thaliana] >gi|6648211|gb|AAF21209.1|AC013483_33
  misc_feature (1)..(247): Homolog of NCBI NO: 34908012 NR Description: putative carboxypeptidase D [Oryza sativa
  misc_feature (1)..(253): Homolog of NCBI NO: 7428204 NR Description: carboxypeptidase D (EC 3.4.16.6) precursor -
  misc_feature (1)..(253): Homolog of NCBI NO: 20455471 NR Description: Serine carboxypeptidase II precursor

SEQ ID NO: 80657 - DNA, 1383 bp, Arabidopsis thaliana
  misc_feature (1)..(1383): Ceres Seq. ID no. 12656736
  misc_feature: MA Experiment ID: 20000306 Result: Down-regulated in Transcription
  misc_feature: MA Experiment 20000306 PARAMETER Experiment Name: At_Germinating_Seeds_Sub_P Parameter: Age (hr) Value: 6 vs. 0
  misc_feature: MA Experiment 20000306 PARAMETER Experiment Name: At_Germinating_Seeds_Sub_P Parameter: Organism Value: A. thaliana
  misc_feature: MA Experiment 20000306 PARAMETER Experiment Name: At_Germinating_Seeds_Sub_P Parameter: Plant Line Value: WS
  misc_feature: MA Experiment 20000306 PARAMETER Experiment Name: At_Germinating_Seeds_Sub_P Parameter: Tissue Value: Germinating Seeds
  misc_feature: MA Experiment ID: 20000307 Result: Down-regulated in Transcription
  misc_feature: MA Experiment 20000307 PARAMETER Experiment Name: At_Germinating_Seeds_Sub_P Parameter: Age (hr) Value: 24 vs. 0
  misc_feature: MA Experiment 20000307 PARAMETER Experiment Name: At_Germinating_Seeds_Sub_P Parameter: Organism Value: A. thaliana
  misc_feature: MA Experiment 20000307 PARAMETER Experiment Name: At_Germinating_Seeds_Sub_P Parameter: Plant Line Value: WS
  misc_feature: MA Experiment 20000307 PARAMETER Experiment Name: At_Germinating_Seeds_Sub_P Parameter: Tissue Value: Germinating Seeds
atggaagaagacactggtatcgacgaagctaagacatacacggtggagaagagcgagaaagtggagccggagaaggacggactgagtcaattcagagacgaggaaaaatcacttggtgcggatatggaagatttacatgatgagactgtgcgagaaaccctaggcaaggatcaggttcaaggtgttcgagaaaattcctctgtggaaccaaatgttgaagatgtattagaagtgaatgagactgatagcgtcaaggaaactgttgtaagtgcgattgtgccggttgatgaagtggaagagaatcgtcaggtagaaacatctccttctctggctgcatcgtcagactcattgacagtgacgccatgtctatctttggatcctgcaactgcttcaaccgcacaagatttaccactggtttcagttccaactaaacaagagcaaagatcagattcgccggtggttaacagattgtcggttactcctgttcctaggacaccggctcgtgatggttataattggagaaaatatggacagaagcaggttaagagtcccaagggctcacggagttactacaggtgtacatacactgaatgttgtgctaaaaaaattgaatgctccaatgattcaggcaatgtggtagagattgttaacaaaggtttacatactcatgaacctccccggaagactagcttctccccgagagagattagagttacaacagctatccggcctgtttcagaggatgatacagtagtagaagagctatcaattgttcctagcggttcagatccgtctgcttctactaaagaatacatctgtgagtcgcaaacactcgttgaccggaaaagacactgtgagaacgaagctgtggaggaaccagagccaaaacgaaggcaaagttcagattctgtctccaaacctggaaagaaaaacaaattcgtagtacacgcagctggtgatgttggtatctgtggtgatggatacaggtggcgtaaatacgggcagaaaatggtgaaaggaaatcctcatccaaggaactactaccgatgcacttcagcgggatgtccagttcgtaaacacattgagacagcagtcgagaacacaaaagcagtaataatcacatacaaaggagtacacaaccacgacatgccggtgcctaagaaacgccatggtcctccaagctcaatgctcgtagctgcagccgctccaacatcaatgagaaccaggacagacgatcaggtgaacattccgacttcaagccagtgctcggtggggcgagaaagtgagaagcagagtaaagaagcattggacgttggtggagagaaagtgatggaatcagctaggactttgttgagcattggattcgaaatcaagcaatgctga

SEQ ID NO: 80658 - protein, 460 aa, Arabidopsis thaliana
  peptide (1)..(460): Ceres Seq. ID no. 12656737
  misc_feature (1)..(460): Homolog of NCBI NO: 22329039 NR Description: WRKY family transcription factor; protein id:
  misc_feature (1)..(460): Homolog of NCBI NO: 29839502 NR Description: Probable WRKY transcription factor 32 (WRKY protein 32) >gi|28393378|gb|AAO42113.1| putative WRKY family factor [Arabidopsis thaliana] >gi|28827598|gb|AAO50643.1|
  misc_feature (1)..(448): Homolog of NCBI NO: 25407696 NR Description: hypothetical protein AT4g30930 [imported] - thaliana >gi|2980773|emb|CAA18200.1| putative protein thaliana] >gi|7269995|emb|CAB79811.1| putative protein
  misc_feature (96)..(411): Homolog of NCBI NO: 3420906 NR Description: zinc finger protein; WRKY1 [Pimpinella
  misc_feature (167)..(420): Homolog of NCBI NO: 14530685 NR Description: WRKY DNA-binding protein [Nicotiana tabacum]
  misc_feature (167)..(387): Homolog of NCBI NO: 4760692 NR Description: transcription factor NtWRKY2 [Nicotiana tabacum]
  misc_feature (161)..(449): Homolog of NCBI NO: 18158619 NR Description: WRKY-like drought-induced protein [Retama raetam]
  misc_feature (98)..(387): Homolog of NCBI NO: 15227612 NR Description: WRKY family transcription factor; protein id: supported by cDNA: gi_13506736 [Arabidopsis thaliana]
  misc_feature (169)..(411): Homolog of NCBI NO: 5917653 NR Description: zinc-finger type transcription factor WRKY1
  misc_feature (111)..(411): Homolog of NCBI NO: 7488948 NR Description: DNA-binding protein WRKY1 - parsley
MEEDTGIDEAKTYTVEKSEKVEPEKDGLSQFRDEEKSLGADMEDLHDETVRETLGKDQVQGVRENSSVEPNVEDVLEVNETDSVKETVVSAIVPVDEVEENRQVETSPSLAASSDSLTVTPCLSLDPATASTAQDLPLVSVPTKQEQRSDSPVVNRLSVTPVPRTPARDGYNWRKYGQKQVKSPKGSRSYYRCTYTECCAKKIECSNDSGNVVEIVNKGLHTHEPPRKTSFSPREIRVTTAIRPVSEDDTVVEELSIVPSGSDPSASTKEYICESQTLVDRKRHCENEAVEEPEPKRRQSSDSVSKPGKKNKFVVHAAGDVGICGDGYRWRKYGQKMVKGNPHPRNYYRCTSAGCPVRKHIETAVENTKAVIITYKGVHNHDMPVPKKRHGPPSSMLVAAAAPTSMRTRTDDQVNIPTSSQCSVGRESEKQSKEALDVGGEKVMESARTLLSIGFEIKQC

SEQ ID NO: 80659 - protein, 419 aa, Arabidopsis thaliana
  peptide (1)..(419): Ceres Seq. ID no. 12656738
  misc_feature (1)..(419): Homolog of NCBI NO: 22329039 NR Description: WRKY family transcription factor; protein id:
  misc_feature (1)..(419): Homolog of NCBI NO: 29839502 NR Description: Probable WRKY transcription factor 32 (WRKY protein 32) >gi|28393378|gb|AAO42113.1| putative WRKY family factor [Arabidopsis thaliana] >gi|28827598|gb|AAO50643.1|
  misc_feature (1)..(407): Homolog of NCBI NO: 25407696 NR Description: hypothetical protein AT4g30930 [imported] - thaliana >gi|2980773|emb|CAA18200.1| putative protein thaliana] >gi|7269995|emb|CAB79811.1| putative protein
  misc_feature (55)..(370): Homolog of NCBI NO: 3420906 NR Description: zinc finger protein; WRKY1 [Pimpinella
  misc_feature (126)..(379): Homolog of NCBI NO: 14530685 NR Description: WRKY DNA-binding protein [Nicotiana tabacum]
  misc_feature (126)..(346): Homolog of NCBI NO: 4760692 NR Description: transcription factor NtWRKY2 [Nicotiana tabacum]
  misc_feature (120)..(408): Homolog of NCBI NO: 18158619 NR Description: WRKY-like drought-induced protein [Retama raetam]
  misc_feature (57)..(346): Homolog of NCBI NO: 15227612 NR Description: WRKY family transcription factor; protein id: supported by cDNA: gi_13506736 [Arabidopsis thaliana]
  misc_feature (128)..(370): Homolog of NCBI NO: 5917653 NR Description: zinc-finger type transcription factor WRKY1
  misc_feature (70)..(370): Homolog of NCBI NO: 7488948 NR Description: DNA-binding protein WRKY1 - parsley
MEDLHDETVRETLGKDQVQGVRENSSVEPNVEDVLEVNETDSVKETVVSAIVPVDEVEENRQVETSPSLAASSDSLTVTPCLSLDPATASTAQDLPLVSVPTKQEQRSDSPVVNRLSVTPVPRTPARDGYNWRKYGQKQVKSPKGSRSYYRCTYTECCAKKIECSNDSGNVVEIVNKGLHTHEPPRKTSFSPREIRVTTAIRPVSEDDTVVEELSIVPSGSDPSASTKEYICESQTLVDRKRHCENEAVEEPEPKRRQSSDSVSKPGKKNKFVVHAAGDVGICGDGYRWRKYGQKMVKGNPHPRNYYRCTSAGCPVRKHIETAVENTKAVIITYKGVHNHDMPVPKKRHGPPSSMLVAAAAPTSMRTRTDDQVNIPTSSQCSVGRESEKQSKEALDVGGEKVMESARTLLSIGFEIKQC

SEQ ID NO: 80660 - DNA, 1420 bp, Arabidopsis thaliana
  misc_feature (1)..(1420): Ceres Seq. ID no. 12656747
  misc_feature: MA Experiment ID: 20001451 Result: Down-regulated in Transcription
  misc_feature: MA Experiment 20001451 PARAMETER Experiment Name: At_Far-red-induction_P Parameter: Age (day) Value: 7
  misc_feature: MA Experiment 20001451 PARAMETER Experiment Name: At_Far-red-induction_P Parameter: Light Value: Far-red vs. White
  misc_feature: MA Experiment 20001451 PARAMETER Experiment Name: At_Far-red-induction_P Parameter: Organism Value: A. thaliana
  misc_feature: MA Experiment 20001451 PARAMETER Experiment Name: At_Far-red-induction_P Parameter: Plant Line Value: Columbia
  misc_feature: MA Experiment 20001451 PARAMETER Experiment Name: At_Far-red-induction_P Parameter: Timepoint (hr) Value: 24
  misc_feature: MA Experiment 20001451 PARAMETER Experiment Name: At_Far-red-induction_P Parameter: Tissue Value: Whole Plant
  misc_feature: MA Experiment ID: 20001905 Result: Down-regulated in Transcription
  misc_feature: MA Experiment 20001905 PARAMETER Experiment Name: At_Drought_Reproduction_P Parameter: Age (day) Value: 40
  misc_feature: MA Experiment 20001905 PARAMETER Experiment Name: At_Drought_Reproduction_P Parameter: Organism Value: A. thaliana
  misc_feature: MA Experiment 20001905 PARAMETER Experiment Name: At_Drought_Reproduction_P Parameter: Plant Line Value: WS
  misc_feature: MA Experiment 20001905 PARAMETER Experiment Name: At_Drought_Reproduction_P Parameter: Timepoint (day) Value: 10
  misc_feature: MA Experiment 20001905 PARAMETER Experiment Name: At_Drought_Reproduction_P Parameter: Tissue Value: Rosettes
  misc_feature: MA Experiment 20001905 PARAMETER Experiment Name: At_Drought_Reproduction_P Parameter: Treatment Value: Drought vs. No Drought
agcctctttccgatttcttcttcagtctctctccactggttcgtcgacttcgtagaagcaaaaaatgttcttgattcgtctctcccgccataacccatcatcttttacacttctcacgcgccgccttcacgaccaaacaatttcctcgtcacgactccgagacctttacaattttcaatcaccgccgcctttgtcgtcgtcagcctccgaaaatcctgactttaaccagaaaaacaacaataagaagaagccaaagccgcagtaccgtccaccttcttcgctggaaggtgtgaagacggttcactctgatcttccgttcgatttccggttcagttacacagagagttgctcaaatgtgaggccaattggcttgagagaaccaaagtattcaccttttggtcctgatcgattggaccgggaatggaccggtgtctgtgcgccggcggttaatccaaaggtagagtctgttgacggagtggaggatccgaagctggaagagaaaagaaggaaagtgagagagaagattcaaggggcatcactcactgaagctgaaaggaaatttctggtggagctgtgtcagaggaacaaaactaaaagacaagtcaatcttgggcgagatggtttgactcataatatgctgaatgatgtctataatcattggaaacatgctgaagcagttcgggtcaaatgtcttggagtcccaaccctcgatatgaagaacgttatattccaccttgaggacaaaacgtttggccaggtagtctctaaacactctggtacacttgtgttatatagagggcgaaactacgatcccaagaaaaggcctaagatcccattgatgttgtggaaacctcatgaaccagtgtaccctaggctgattaaaacaacaattgatggtctaagcatcgatgagaccaaagcaatgagaaagaaagggctagctgttcctgccttgacaaaacttgccaagaatggttattacggtagtcttgttccaatggtgagagatgctttcctcgtgagtgaattagtacgtattgattgcttgggactagagagaaaggattacaagaaaattggagcaaagcttagggatttggtcccttgcatcctggtgacatttgacaaggagcaggtcgtgatttggagaggtaaagactataagccacccaaagaagatgatgaatattcgtccttcattcatcgtgaatcttccatagactctgatgtcgatttaagttgtagcagaggggctcaagattctcctgacgagacaacctaggatgatttagtactcttgatcccagatgtatagttataatgtgagagtattttgtggtaatgtacttaattgtctcgctaaggagcactagatagttcgaaggaaatgctgattacatcttttctgtgttgcttctcc

SEQ ID NO: 80661 - protein, 405 aa, Arabidopsis thaliana
  peptide (1)..(405): Ceres Seq. ID no. 12656748
  misc_feature (159)..(244): Pfam Name: CRS1 / YhbY domain Pfam Description: CRS1 / YhbY domain
  misc_feature (1)..(405): Homolog of NCBI NO: 22329043 NR Description: hypothetical protein; protein id: At4g31010.1, by cDNA: gi_18176014, supported by cDNA: gi_20465408 [Arabidopsis >gi|18176015|gb|AAL59968.1| unknown protein [Arabidopsis
  misc_feature (1)..(352): Homolog of NCBI NO: 25407702 NR Description: hypothetical protein AT4g31010 [imported] - thaliana >gi|2980765|emb|CAA18192.1| hypothetical protein thaliana] >gi|7270003|emb|CAB79819.1| hypothetical protein
  misc_feature (1)..(284): Homolog of NCBI NO: 14596153 NR Description: Unknown protein [Arabidopsis thaliana]
  misc_feature (29)..(405): Homolog of NCBI NO: 40253285 NR Description: putative CRS2-associated factor 1 [Oryza sativa
  misc_feature (41)..(364): Homolog of NCBI NO: 15240416 NR Description: putative protein; protein id: At5g54890.1 thaliana] >gi|9758269|dbj|BAB08768.1|
  misc_feature (151)..(303): Homolog of NCBI NO: 34905354 NR Description: OJ1126_G08.1 [Oryza sativa (japonica
  misc_feature (12)..(122): Homolog of NCBI NO: 34905354 NR Description: OJ1126_G08.1 [Oryza sativa (japonica
  misc_feature (294)..(375): Homolog of NCBI NO: 34905354 NR Description: OJ1126_G08.1 [Oryza sativa (japonica
  misc_feature (119)..(372): Homolog of NCBI NO: 30349367 NR Description: CRS2-associated factor 1 [Zea mays]
  misc_feature (11)..(122): Homolog of NCBI NO: 30349367 NR Description: CRS2-associated factor 1 [Zea mays]
MFLIRLSRHNPSSFTLLTRRLHDQTISSSRLRDLYNFQSPPPLSSSASENPDFNQKNNNKKKPKPQYRPPSSLEGVKTVHSDLPFDFRFSYTESCSNVRPIGLREPKYSPFGPDRLDREWTGVCAPAVNPKVESVDGVEDPKLEEKRRKVREKIQGASLTEAERKFLVELCQRNKTKRQVNLGRDGLTHNMLNDVYNHWKHAEAVRVKCLGVPTLDMKNVIFHLEDKTFGQVVSKHSGTLVLYRGRNYDPKKRPKIPLMLWKPHEPVYPRLIKTTIDGLSIDETKAMRKKGLAVPALTKLAKNGYYGSLVPMVRDAFLVSELVRIDCLGLERKDYKKIGAKLRDLVPCILVTFDKEQVVIWRGKDYKPPKEDDEYSSFIHRESSIDSDVDLSCSRGAQDSPDETT

SEQ ID NO: 80662 - protein, 215 aa, Arabidopsis thaliana
  peptide (1)..(215): Ceres Seq. ID no. 12656749
  misc_feature (1)..(54): Pfam Name: CRS1 / YhbY domain Pfam Description: CRS1 / YhbY domain
  misc_feature (1)..(215): Homolog of NCBI NO: 22329043 NR Description: hypothetical protein; protein id: At4g31010.1, by cDNA: gi_18176014, supported by cDNA: gi_20465408 [Arabidopsis >gi|18176015|gb|AAL59968.1| unknown protein [Arabidopsis
  misc_feature (1)..(162): Homolog of NCBI NO: 25407702 NR Description: hypothetical protein AT4g31010 [imported] - thaliana >gi|2980765|emb|CAA18192.1| hypothetical protein thaliana] >gi|7270003|emb|CAB79819.1| hypothetical protein
  misc_feature (1)..(94): Homolog of NCBI NO: 14596153 NR Description: Unknown protein [Arabidopsis thaliana]
  misc_feature (1)..(215): Homolog of NCBI NO: 40253285 NR Description: putative CRS2-associated factor 1 [Oryza sativa
  misc_feature (1)..(174): Homolog of NCBI NO: 15240416 NR Description: putative protein; protein id: At5g54890.1 thaliana] >gi|9758269|dbj|BAB08768.1|
  misc_feature (1)..(113): Homolog of NCBI NO: 34905354 NR Description: OJ1126_G08.1 [Oryza sativa (japonica
  misc_feature (104)..(185): Homolog of NCBI NO: 34905354 NR Description: OJ1126_G08.1 [Oryza sativa (japonica
  misc_feature (1)..(182): Homolog of NCBI NO: 30349367 NR Description: CRS2-associated factor 1 [Zea mays]
  misc_feature (1)..(177): Homolog of NCBI NO: 22329751 NR Description: unknown protein; protein id: At1g23400.1, by cDNA: gi_17065311 [Arabidopsis thaliana] F28C11.4 [Arabidopsis thaliana]
  misc_feature (1)..(177): Homolog of NCBI NO: 30349369 NR Description: CRS2-associated factor 2 [Zea mays]
MLNDVYNHWKHAEAVRVKCLGVPTLDMKNVIFHLEDKTFGQVVSKHSGTLVLYRGRNYDPKKRPKIPLMLWKPHEPVYPRLIKTTIDGLSIDETKAMRKKGLAVPALTKLAKNGYYGSLVPMVRDAFLVSELVRIDCLGLERKDYKKIGAKLRDLVPCILVTFDKEQVVIWRGKDYKPPKEDDEYSSFIHRESSIDSDVDLSCSRGAQDSPDETT

SEQ ID NO: 80663 - DNA, 1038 bp, Arabidopsis thaliana
  misc_feature (1)..(1038): Ceres Seq. ID no. 12656750
  misc_feature: MA Experiment ID: 20000182 Result: Down-regulated in Transcription
  misc_feature: MA Experiment 20000182 PARAMETER Experiment Name: At_2mM_SA_P Parameter: Age (day) Value: 14
  misc_feature: MA Experiment 20000182 PARAMETER Experiment Name: At_2mM_SA_P Parameter: Organism Value: A. thaliana
  misc_feature: MA Experiment 20000182 PARAMETER Experiment Name: At_2mM_SA_P Parameter: Plant Line Value: WS
  misc_feature: MA Experiment 20000182 PARAMETER Experiment Name: At_2mM_SA_P Parameter: Timepoint (hr) Value: 6
  misc_feature: MA Experiment 20000182 PARAMETER Experiment Name: At_2mM_SA_P Parameter: Tissue Value: Aerial
  misc_feature: MA Experiment 20000182 PARAMETER Experiment Name: At_2mM_SA_P Parameter: Treatment Value: 2mM SA vs. No Treatment
  misc_feature: MA Experiment ID: 20000185 Result: Down-regulated in Transcription
  misc_feature: MA Experiment 20000185 PARAMETER Experiment Name: At_Roots__P Parameter: Age (day) Value: 7 vs. 21
  misc_feature: MA Experiment 20000185 PARAMETER Experiment Name: At_Roots__P Parameter: Organism Value: A. thaliana
  misc_feature: MA Experiment 20000185 PARAMETER Experiment Name: At_Roots__P Parameter: Tissue Value: Roots vs. Whole Plant
  misc_feature: MA Experiment ID: 20000437 Result: Down-regulated in Transcription
  misc_feature: MA Experiment 20000437 PARAMETER Experiment Name: At_Drought_P Parameter: Age (day) Value: 8
  misc_feature: MA Experiment 20000437 PARAMETER Experiment Name: At_Drought_P Parameter: Organism Value: A. thaliana
  misc_feature: MA Experiment 20000437 PARAMETER Experiment Name: At_Drought_P Parameter: Plant Line Value: WS
  misc_feature: MA Experiment 20000437 PARAMETER Experiment Name: At_Drought_P Parameter: Timepoint (hr) Value: 24
  misc_feature: MA Experiment 20000437 PARAMETER Experiment Name: At_Drought_P Parameter: Tissue Value: Whole Plant
  misc_feature: MA Experiment 20000437 PARAMETER Experiment Name: At_Drought_P Parameter: Treatment Value: Drought vs. No Drought
  misc_feature: MA Experiment ID: 20000439 Result: Down-regulated in Transcription
  misc_feature: MA Experiment 20000439 PARAMETER Experiment Name: At_Roots__P Parameter: Age (day) Value: 14 vs. 21
  misc_feature: MA Experiment 20000439 PARAMETER Experiment Name: At_Roots__P Parameter: Organism Value: A. thaliana
  misc_feature: MA Experiment 20000439 PARAMETER Experiment Name: At_Roots__P Parameter: Tissue Value: Roots vs. Whole Plant
  misc_feature: MA Experiment ID: 20000794 Result: Down-regulated in Transcription
  misc_feature: MA Experiment 20000794 PARAMETER Experiment Name: At_Petals_P Parameter: Age (day) Value: 23-25 days
  misc_feature: MA Experiment 20000794 PARAMETER Experiment Name: At_Petals_P Parameter: Plant Line Value: WS
  misc_feature: MA Experiment 20000794 PARAMETER Experiment Name: At_Petals_P Parameter: Tissue Value: Petals vs. Whole plant
  misc_feature: MA Experiment ID: 20001247 Result: Down-regulated in Transcription
  misc_feature: MA Experiment 20001247 PARAMETER Experiment Name: At_Far-red-induction_P Parameter: Age (day) Value: 7
  misc_feature: MA Experiment 20001247 PARAMETER Experiment Name: At_Far-red-induction_P Parameter: Light Value: Far-red vs. White
  misc_feature: MA Experiment 20001247 PARAMETER Experiment Name: At_Far-red-induction_P Parameter: Organism Value: A. thaliana
  misc_feature: MA Experiment 20001247 PARAMETER Experiment Name: At_Far-red-induction_P Parameter: Plant Line Value: Columbia
  misc_feature: MA Experiment 20001247 PARAMETER Experiment Name: At_Far-red-induction_P Parameter: Timepoint (hr) Value: 1
  misc_feature: MA Experiment 20001247 PARAMETER Experiment Name: At_Far-red-induction_P Parameter: Tissue Value: Whole Plant
  misc_feature: MA Experiment ID: 20001451 Result: Down-regulated in Transcription
  misc_feature: MA Experiment 20001451 PARAMETER Experiment Name: At_Far-red-induction_P Parameter: Age (day) Value: 7
  misc_feature: MA Experiment 20001451 PARAMETER Experiment Name: At_Far-red-induction_P Parameter: Light Value: Far-red vs. White
  misc_feature: MA Experiment 20001451 PARAMETER Experiment Name: At_Far-red-induction_P Parameter: Organism Value: A. thaliana
  misc_feature: MA Experiment 20001451 PARAMETER Experiment Name: At_Far-red-induction_P Parameter: Plant Line Value: Columbia
  misc_feature: MA Experiment 20001451 PARAMETER Experiment Name: At_Far-red-induction_P Parameter: Timepoint (hr) Value: 24
  misc_feature: MA Experiment 20001451 PARAMETER Experiment Name: At_Far-red-induction_P Parameter: Tissue Value: Whole Plant
  misc_feature: MA Experiment ID: 20001905 Result: Down-regulated in Transcription
  misc_feature: MA Experiment 20001905 PARAMETER Experiment Name: At_Drought_Reproduction_P Parameter: Age (day) Value: 40
  misc_feature: MA Experiment 20001905 PARAMETER Experiment Name: At_Drought_Reproduction_P Parameter: Organism Value: A. thaliana
  misc_feature: MA Experiment 20001905 PARAMETER Experiment Name: At_Drought_Reproduction_P Parameter: Plant Line Value: WS
  misc_feature: MA Experiment 20001905 PARAMETER Experiment Name: At_Drought_Reproduction_P Parameter: Timepoint (day) Value: 10
  misc_feature: MA Experiment 20001905 PARAMETER Experiment Name: At_Drought_Reproduction_P Parameter: Tissue Value: Rosettes
  misc_feature: MA Experiment 20001905 PARAMETER Experiment Name: At_Drought_Reproduction_P Parameter: Treatment Value: Drought vs. No Drought
  misc_feature: MA Experiment ID: 20001911 Result: Down-regulated in Transcription
  misc_feature: MA Experiment 20001911 PARAMETER Experiment Name: At_Drought_Reproduction_P Parameter: Age (day) Value: 40
  misc_feature: MA Experiment 20001911 PARAMETER Experiment Name: At_Drought_Reproduction_P Parameter: Organism Value: A. thaliana
  misc_feature: MA Experiment 20001911 PARAMETER Experiment Name: At_Drought_Reproduction_P Parameter: Plant Line Value: WS
  misc_feature: MA Experiment 20001911 PARAMETER Experiment Name: At_Drought_Reproduction_P Parameter: Timepoint (day) Value: 10
  misc_feature: MA Experiment 20001911 PARAMETER Experiment Name: At_Drought_Reproduction_P Parameter: Tissue Value: Flowers
  misc_feature: MA Experiment 20001911 PARAMETER Experiment Name: At_Drought_Reproduction_P Parameter: Treatment Value: Drought vs. No Drought
agtacagagttatggagttgctgaatggagtagaaactctagtttcgggaattcatcatcaccatcgtactaacgcgaagagaaacagattagttagatctgtcaagatcttaaactccgggaatcatgaaatccccagaaagtgcctgtgttttgatctttacgacaaattggttccatacaagaaagcttggtcatggcagaagagcattgtcgaggagaaaaagacattgattgatagaaaccaagactgcgctgatacagtgattttgttacaacactctcctgtttacacaatgggaactgctagtacagaggattatctcaatttcgatataaaggatgctcctttcaatgtttatcgaactgaacgtggtggcgaagtcacttaccatggccctggtcagctagttatgtatcctataatcaatcttcgaaatcacgagatggatcttcattggtacctcaggatgcttgaagagattgtcatccgtgtgctttcctcaactttctccattaaagcttctcgtcttgacggtttaactggagtttgggttggcaaccaaaaagtggcggcgataggtattcgtgtgtcgaaatggataacatatcatggtttagctcttaatgtcactacagatctaacaccattcaactggatagttccatgtgggattagagaccggaaagttggaaacataaagggcttgcttgaagatggagaacacggaatggttgatgatttgaggttgatcgatatagttcacgagtctttactaaaggaattctctgaagctttccagcttcagatcgaaaagcaaacagtttcagatcctaatattctgtaagctgagtcttttaaacgattggagtgctaaaaggaaggtggtattggtagaacaaaatccttgcaatctctatagcattcttgttaagttttgaacataatgatcttatctacatagaaggttttattggatgttttgtgacattgtctgcttcttgttgatgtttatatgagattggtctatttacttc

SEQ ID NO: 80664 - protein, 281 aa, Arabidopsis thaliana
  peptide (1)..(281): Ceres Seq. ID no. 12656751
  misc_feature (4)..(281): Homolog of NCBI NO: 18417727 NR Description: putative protein; protein id: At4g31050.1, by cDNA: gi_15887051 [Arabidopsis thaliana]
  misc_feature (18)..(276): Homolog of NCBI NO: 25405224 NR Description: F16N3.14 [imported] - Arabidopsis thaliana
  misc_feature (4)..(191): Homolog of NCBI NO: 25407705 NR Description: hypothetical protein AT4g31050 [imported] - thaliana >gi|2980761|emb|CAA18188.1| putative protein thaliana] >gi|7270007|emb|CAB79823.1| putative protein
  misc_feature (158)..(280): Homolog of NCBI NO: 15220259 NR Description: hypothetical protein; protein id: At1g47580.1
  misc_feature (99)..(136): Homolog of NCBI NO: 15220259 NR Description: hypothetical protein; protein id: At1g47580.1
  misc_feature (53)..(270): Homolog of NCBI NO: 17230677 NR Description: lipoate-protein ligase B [Nostoc sp. PCC 7120]
  misc_feature (45)..(233): Homolog of NCBI NO: 23125051 NR Description: hypothetical protein [Nostoc punctiforme]
  misc_feature (57)..(277): Homolog of NCBI NO: 22298375 NR Description: lipoate-protein ligase [Thermosynechococcus
  misc_feature (183)..(281): Homolog of NCBI NO: 25407707 NR Description: hypothetical protein AT4g31060 [imported] - thaliana >gi|2980760|emb|CAA18187.1| putative protein thaliana] >gi|7270008|emb|CAB79824.1| putative protein
  misc_feature (57)..(233): Homolog of NCBI NO: 23041482 NR Description: hypothetical protein [Trichodesmium erythraeum
YRVMELLNGVETLVSGIHHHHRTNAKRNRLVRSVKILNSGNHEIPRKCLCFDLYDKLVPYKKAWSWQKSIVEEKKTLIDRNQDCADTVILLQHSPVYTMGTASTEDYLNFDIKDAPFNVYRTERGGEVTYHGPGQLVMYPIINLRNHEMDLHWYLRMLEEIVIRVLSSTFSIKASRLDGLTGVWVGNQKVAAIGIRVSKWITYHGLALNVTTDLTPFNWIVPCGIRDRKVGNIKGLLEDGEHGMVDDLRLIDIVHESLLKEFSEAFQLQIEKQTVSDPNIL

SEQ ID NO: 80665 - protein, 278 aa, Arabidopsis thaliana
  peptide (1)..(278): Ceres Seq. ID no. 12656752
  misc_feature (1)..(278): Homolog of NCBI NO: 18417727 NR Description: putative protein; protein id: At4g31050.1, by cDNA: gi_15887051 [Arabidopsis thaliana]
  misc_feature (15)..(273): Homolog of NCBI NO: 25405224 NR Description: F16N3.14 [imported] - Arabidopsis thaliana
  misc_feature (1)..(188): Homolog of NCBI NO: 25407705 NR Description: hypothetical protein AT4g31050 [imported] - thaliana >gi|2980761|emb|CAA18188.1| putative protein thaliana] >gi|7270007|emb|CAB79823.1| putative protein
  misc_feature (155)..(277): Homolog of NCBI NO: 15220259 NR Description: hypothetical protein; protein id: At1g47580.1
  misc_feature (96)..(133): Homolog of NCBI NO: 15220259 NR Description: hypothetical protein; protein id: At1g47580.1
  misc_feature (50)..(267): Homolog of NCBI NO: 17230677 NR Description: lipoate-protein ligase B [Nostoc sp. PCC 7120]
  misc_feature (42)..(230): Homolog of NCBI NO: 23125051 NR Description: hypothetical protein [Nostoc punctiforme]
  misc_feature (54)..(274): Homolog of NCBI NO: 22298375 NR Description: lipoate-protein ligase [Thermosynechococcus
  misc_feature (180)..(278): Homolog of NCBI NO: 25407707 NR Description: hypothetical protein AT4g31060 [imported] - thaliana >gi|2980760|emb|CAA18187.1| putative protein thaliana] >gi|7270008|emb|CAB79824.1| putative protein
  misc_feature (54)..(230): Homolog of NCBI NO: 23041482 NR Description: hypothetical protein [Trichodesmium erythraeum
MELLNGVETLVSGIHHHHRTNAKRNRLVRSVKILNSGNHEIPRKCLCFDLYDKLVPYKKAWSWQKSIVEEKKTLIDRNQDCADTVILLQHSPVYTMGTASTEDYLNFDIKDAPFNVYRTERGGEVTYHGPGQLVMYPIINLRNHEMDLHWYLRMLEEIVIRVLSSTFSIKASRLDGLTGVWVGNQKVAAIGIRVSKWITYHGLALNVTTDLTPFNWIVPCGIRDRKVGNIKGLLEDGEHGMVDDLRLIDIVHESLLKEFSEAFQLQIEKQTVSDPNIL

SEQ ID NO: 80666 - protein, 183 aa, Arabidopsis thaliana
  peptide (1)..(183): Ceres Seq. ID no. 12656753
  misc_feature (1)..(183): Homolog of NCBI NO: 18417727 NR Description: putative protein; protein id: At4g31050.1, by cDNA: gi_15887051 [Arabidopsis thaliana]
  misc_feature (1)..(178): Homolog of NCBI NO: 25405224 NR Description: F16N3.14 [imported] - Arabidopsis thaliana
  misc_feature (1)..(93): Homolog of NCBI NO: 25407705 NR Description: hypothetical protein AT4g31050 [imported] - thaliana >gi|2980761|emb|CAA18188.1| putative protein thaliana] >gi|7270007|emb|CAB79823.1| putative protein
  misc_feature (60)..(182): Homolog of NCBI NO: 15220259 NR Description: hypothetical protein; protein id: At1g47580.1
  misc_feature (1)..(38): Homolog of NCBI NO: 15220259 NR Description: hypothetical protein; protein id: At1g47580.1
  misc_feature (1)..(172): Homolog of NCBI NO: 17230677 NR Description: lipoate-protein ligase B [Nostoc sp. PCC 7120]
  misc_feature (1)..(135): Homolog of NCBI NO: 23125051 NR Description: hypothetical protein [Nostoc punctiforme]
  misc_feature (1)..(179): Homolog of NCBI NO: 22298375 NR Description: lipoate-protein ligase [Thermosynechococcus
  misc_feature (85)..(183): Homolog of NCBI NO: 25407707 NR Description: hypothetical protein AT4g31060 [imported] - thaliana >gi|2980760|emb|CAA18187.1| putative protein thaliana] >gi|7270008|emb|CAB79824.1| putative protein
  misc_feature (1)..(135): Homolog of NCBI NO: 23041482 NR Description: hypothetical protein [Trichodesmium erythraeum
MGTASTEDYLNFDIKDAPFNVYRTERGGEVTYHGPGQLVMYPIINLRNHEMDLHWYLRMLEEIVIRVLSSTFSIKASRLDGLTGVWVGNQKVAAIGIRVSKWITYHGLALNVTTDLTPFNWIVPCGIRDRKVGNIKGLLEDGEHGMVDDLRLIDIVHESLLKEFSEAFQLQIEKQTVSDPNIL

SEQ ID NO: 80667 - DNA, 1740 bp, Arabidopsis thaliana
  misc_feature (1)..(1740): Ceres Seq. ID no. 12656760
  misc_feature: MA Experiment ID: 20000185 Result: Up-regulated in Transcription
  misc_feature: MA Experiment 20000185 PARAMETER Experiment Name: At_Roots__P Parameter: Age (day) Value: 7 vs. 21
  misc_feature: MA Experiment 20000185 PARAMETER Experiment Name: At_Roots__P Parameter: Organism Value: A. thaliana
  misc_feature: MA Experiment 20000185 PARAMETER Experiment Name: At_Roots__P Parameter: Tissue Value: Roots vs. Whole Plant
  misc_feature: MA Experiment ID: 20000227 Result: Down-regulated in Transcription
  misc_feature: MA Experiment 20000227 PARAMETER Experiment Name: At_Root-Tips-vs-Tops_P Parameter: Tissue Value: Root Tips vs. Root Tops
  misc_feature: MA Experiment ID: 20000234 Result: Up-regulated in Transcription
  misc_feature: MA Experiment 20000234 PARAMETER Experiment Name: At_Siliques_P Parameter: Age (day) Value: 21
  misc_feature: MA Experiment 20000234 PARAMETER Experiment Name: At_Siliques_P Parameter: Organism Value: A. thaliana
  misc_feature: MA Experiment 20000234 PARAMETER Experiment Name: At_Siliques_P Parameter: Plant Line Value: WS
  misc_feature: MA Experiment 20000234 PARAMETER Experiment Name: At_Siliques_P Parameter: Tissue Value: Less Than 5mm Siliques vs. Whole Plant
  misc_feature: MA Experiment ID: 20000235 Result: Up-regulated in Transcription
  misc_feature: MA Experiment 20000235 PARAMETER Experiment Name: At_Siliques_P Parameter: Age (day) Value: 21
  misc_feature: MA Experiment 20000235 PARAMETER Experiment Name: At_Siliques_P Parameter: Organism Value: A. thaliana
  misc_feature: MA Experiment 20000235 PARAMETER Experiment Name: At_Siliques_P Parameter: Plant Line Value: WS
  misc_feature: MA Experiment 20000235 PARAMETER Experiment Name: At_Siliques_P Parameter: Tissue Value: 5-10mm Siliques vs. Whole Plant
  misc_feature: MA Experiment ID: 20000264 Result: Up-regulated in Transcription
  misc_feature: MA Experiment 20000264 PARAMETER Experiment Name: At_Open_Flower_P Parameter: Age (day) Value: 21
  misc_feature: MA Experiment 20000264 PARAMETER Experiment Name: At_Open_Flower_P Parameter: Plant Line Value: WS
  misc_feature: MA Experiment 20000264 PARAMETER Experiment Name: At_Open_Flower_P Parameter: Tissue Value: Open Flower vs. Whole Plant
  misc_feature: MA Experiment ID: 20000265 Result: Up-regulated in Transcription
  misc_feature: MA Experiment 20000265 PARAMETER Experiment Name: At_Open_Flower_P Parameter: Age (day) Value: 21
  misc_feature: MA Experiment 20000265 PARAMETER Experiment Name: At_Open_Flower_P Parameter: Plant Line Value: WS
  misc_feature: MA Experiment 20000265 PARAMETER Experiment Name: At_Open_Flower_P Parameter: Tissue Value: Closed Flower vs. Whole Plant
  misc_feature: MA Experiment ID: 20000286 Result: Up-regulated in Transcription
  misc_feature: MA Experiment 20000286 PARAMETER Experiment Name: At_Open_Flower_P Parameter: Age (day) Value: 21
  misc_feature: MA Experiment 20000286 PARAMETER Experiment Name: At_Open_Flower_P Parameter: Plant Line Value: WS
  misc_feature: MA Experiment 20000286 PARAMETER Experiment Name: At_Open_Flower_P Parameter: Tissue Value: Half Open vs. Whole Plant
  misc_feature: MA Experiment ID: 20000436 Result: Down-regulated in Transcription
  misc_feature: MA Experiment 20000436 PARAMETER Experiment Name: At_Drought_P Parameter: Age (day) Value: 7
  misc_feature: MA Experiment 20000436 PARAMETER Experiment Name: At_Drought_P Parameter: Organism Value: A. thaliana
  misc_feature: MA Experiment 20000436 PARAMETER Experiment Name: At_Drought_P Parameter: Plant Line Value: WS
  misc_feature: MA Experiment 20000436 PARAMETER Experiment Name: At_Drought_P Parameter: Timepoint (hr) Value: 12
  misc_feature: MA Experiment 20000436 PARAMETER Experiment Name: At_Drought_P Parameter: Tissue Value: Whole Plant
  misc_feature: MA Experiment 20000436 PARAMETER Experiment Name: At_Drought_P Parameter: Treatment Value: Drought vs. No Drought
  misc_feature: MA Experiment ID: 20000437 Result: Down-regulated in Transcription
  misc_feature: MA Experiment 20000437 PARAMETER Experiment Name: At_Drought_P Parameter: Age (day) Value: 8
  misc_feature: MA Experiment 20000437 PARAMETER Experiment Name: At_Drought_P Parameter: Organism Value: A. thaliana
  misc_feature: MA Experiment 20000437 PARAMETER Experiment Name: At_Drought_P Parameter: Plant Line Value: WS
  misc_feature: MA Experiment 20000437 PARAMETER Experiment Name: At_Drought_P Parameter: Timepoint (hr) Value: 24
  misc_feature: MA Experiment 20000437 PARAMETER Experiment Name: At_Drought_P Parameter: Tissue Value: Whole Plant
  misc_feature: MA Experiment 20000437 PARAMETER Experiment Name: At_Drought_P Parameter: Treatment Value: Drought vs. No Drought
  misc_feature: MA Experiment ID: 20000439 Result: Up-regulated in Transcription
  misc_feature: MA Experiment 20000439 PARAMETER Experiment Name: At_Roots__P Parameter: Age (day) Value: 14 vs. 21
  misc_feature: MA Experiment 20000439 PARAMETER Experiment Name: At_Roots__P Parameter: Organism Value: A. thaliana
  misc_feature: MA Experiment 20000439 PARAMETER Experiment Name: At_Roots__P Parameter: Tissue Value: Roots vs. Whole Plant
  misc_feature: MA Experiment ID: 20001450 Result: Down-regulated in Transcription
  misc_feature: MA Experiment 20001450 PARAMETER Experiment Name: At_Far-red-induction_P Parameter: Age (day) Value: 7
  misc_feature: MA Experiment 20001450 PARAMETER Experiment Name: At_Far-red-induction_P Parameter: Light Value: Far-red vs. White
  misc_feature: MA Experiment 20001450 PARAMETER Experiment Name: At_Far-red-induction_P Parameter: Organism Value: A. thaliana
  misc_feature: MA Experiment 20001450 PARAMETER Experiment Name: At_Far-red-induction_P Parameter: Plant Line Value: Columbia
  misc_feature: MA Experiment 20001450 PARAMETER Experiment Name: At_Far-red-induction_P Parameter: Timepoint (hr) Value: 8
  misc_feature: MA Experiment 20001450 PARAMETER Experiment Name: At_Far-red-induction_P Parameter: Tissue Value: Whole Plant
  misc_feature: MA Experiment ID: 20001451 Result: Down-regulated in Transcription
  misc_feature: MA Experiment 20001451 PARAMETER Experiment Name: At_Far-red-induction_P Parameter: Age (day) Value: 7
  misc_feature: MA Experiment 20001451 PARAMETER Experiment Name: At_Far-red-induction_P Parameter: Light Value: Far-red vs. White
  misc_feature: MA Experiment 20001451 PARAMETER Experiment Name: At_Far-red-induction_P Parameter: Organism Value: A. thaliana
  misc_feature: MA Experiment 20001451 PARAMETER Experiment Name: At_Far-red-induction_P Parameter: Plant Line Value: Columbia
  misc_feature: MA Experiment 20001451 PARAMETER Experiment Name: At_Far-red-induction_P Parameter: Timepoint (hr) Value: 24
  misc_feature: MA Experiment 20001451 PARAMETER Experiment Name: At_Far-red-induction_P Parameter: Tissue Value: Whole Plant
atggaatctccaatattcattctcatcacactatcattctttcttcaatcagttcttgcttcttctcaaactctatcaaactcttcaacaatctgcaaaacgacgccggatccaaagtattgcaaatccgtttttccacatagccaaggcaatgttcaacaatacggctgtttctctatccgcaaatcgctatcgcaatcgcgaaaatttattcgcaccgtcgatagatatatcaaacgcaacgctcatttatctcaacctgccgttatcagagctctccaagattgccgttttctcgccggtctaacaatggattacctcttaacgtcgttcgaaaccgttaacgacacgtcagcaaaaacctctttcaaaccgctgtcgtttcccaaagccgacgacatccaaacgcttctttccgcggcgctgactaatgagcagacgtgtcttgaaggacttaccacggccgcttcttattccgccacgtggactgtaagaaccggcgtcgctttgcctctcgtcaatgacacgaagctcttgggcgtctcactcgctctcttcaccaaaggttgggttccaaagaagaagaaacgggccgggtttgcttgggcccaaccgagatccggttcatcgacccacactaaaccattccgtctgttccgtaacggagctctaccgttaaagatgacagagaaaacaaaagcggtttacgagtcactcagcagaagaaaactcgccgacggtgacagtaacggtgatggagacgacggaagcatggttctgataagcgatatcgttaccgtgagccaagacggaacaggaaatttcaccaacatcacggcagctgtagcggcggcgccgaacaacaccgacggaagcgccggtttctttttgatctatgtgacggcgggaatctacgaagagtatatctcaatcgcgaagaacaaaaggtacatgatgatgataggtgacgggattaatcagacggtggtcaccggaaatagaagcgtcgtcgacggttggactactttcaattccgccacatttgctgtgacagcaccgaactttgttgcggtgaacataacgttccggaacacggccggaccggagaagcaccaggctgttgcgttacggagcggcgcagatttctcaatcttctatagttgtagtttcgaggcttatcaagatacactctacacacattctctaagacagttttatagagaatgcgatgtctatggaacggtcgattttatatttggaaacgcggcagttgtgtttcaaaactgtaatttatacccgaggaaaccgatgccaaatcagttcaatgctatcaccgcccaaggccggtctgatccgaaccagaacactggtacatcaatccaaaactgtacgattaagccggcggatgatcttgtttcgagtaactatacagttaaaacgtatttgggtcgaccgtggaaagagtattcaaggacggtttacatgcaatcgtacattgatggtttcgttgaaccggttggttggagagaatggaacggtgattttgcgttaagtacattgtactatgcagagtataacaataccggaccgggctcaaacactacaaaccgggttacatggcctggttaccacgtgattaattccactgatgcagctaatttcacggtcactggtttatttatcgaagctgattggatttggaagacaggagtgccttacaccagcggtctaatttcatag

SEQ ID NO: 80668 - protein, 579 aa, Arabidopsis thaliana
  peptide (1)..(579): Ceres Seq. ID no. 12656761
  misc_feature (265)..(564): Pfam Name: Pectinesterase Pfam Description: Pectinesterase
  misc_feature (1)..(579): Homolog of NCBI NO: 18379010 NR Description: pectinesterase family; protein id: At1g02810.1
  misc_feature (8)..(579): Homolog of NCBI NO: 18411914 NR Description: hypothetical protein; protein id: At4g02330.1, by cDNA: gi_19424044 [Arabidopsis thaliana]
  misc_feature (8)..(579): Homolog of NCBI NO: 19424045 NR Description: unknown protein [Arabidopsis thaliana]
  misc_feature (167)..(579): Homolog of NCBI NO: 18407388 NR Description: pectinesterase family; protein id: At2g47550.1, by cDNA: 111254., supported by cDNA: gi_16604401 [Arabidopsis >gi|20196963|gb|AAC62855.2| putative pectinesterase [Arabidopsis
  misc_feature (1)..(207): Homolog of NCBI NO: 18407388 NR Description: pectinesterase family; protein id: At2g47550.1, by cDNA: 111254., supported by cDNA: gi_16604401 [Arabidopsis >gi|20196963|gb|AAC62855.2| putative pectinesterase [Arabidopsis
  misc_feature (262)..(579): Homolog of NCBI NO: 7447370 NR Description: probable pectinesterase (EC 3.1.1.11) T30B22.15 -
  misc_feature (92)..(207): Homolog of NCBI NO: 7447370 NR Description: probable pectinesterase (EC 3.1.1.11) T30B22.15 -
  misc_feature (255)..(577): Homolog of NCBI NO: 34894528 NR Description: putative pectinesterase [Oryza sativa (japonica group)] >gi|20805092|dbj|BAB92764.1| putative pectinesterase
  misc_feature (29)..(208): Homolog of NCBI NO: 34894528 NR Description: putative pectinesterase [Oryza sativa (japonica group)] >gi|20805092|dbj|BAB92764.1| putative pectinesterase
  misc_feature (228)..(579): Homolog of NCBI NO: 27363394 NR Description: At2g47550/T30B22.15 [Arabidopsis thaliana]
MESPIFILITLSFFLQSVLASSQTLSNSSTICKTTPDPKYCKSVFPHSQGNVQQYGCFSIRKSLSQSRKFIRTVDRYIKRNAHLSQPAVIRALQDCRFLAGLTMDYLLTSFETVNDTSAKTSFKPLSFPKADDIQTLLSAALTNEQTCLEGLTTAASYSATWTVRTGVALPLVNDTKLLGVSLALFTKGWVPKKKKRAGFAWAQPRSGSSTHTKPFRLFRNGALPLKMTEKTKAVYESLSRRKLADGDSNGDGDDGSMVLISDIVTVSQDGTGNFTNITAAVAAAPNNTDGSAGFFLIYVTAGIYEEYISIAKNKRYMMMIGDGINQTVVTGNRSVVDGWTTFNSATFAVTAPNFVAVNITFRNTAGPEKHQAVALRSGADFSIFYSCSFEAYQDTLYTHSLRQFYRECDVYGTVDFIFGNAAVVFQNCNLYPRKPMPNQFNAITAQGRSDPNQNTGTSIQNCTIKPADDLVSSNYTVKTYLGRPWKEYSRTVYMQSYIDGFVEPVGWREWNGDFALSTLYYAEYNNTGPGSNTTNRVTWPGYHVINSTDAANFTVTGLFIEADWIWKTGVPYTSGLIS

SEQ ID NO: 80669 - protein, 476 aa, Arabidopsis thaliana
  peptide (1)..(476): Ceres Seq. ID no. 12656762
  misc_feature (162)..(461): Pfam Name: Pectinesterase Pfam Description: Pectinesterase
  misc_feature (1)..(476): Homolog of NCBI NO: 18379010 NR Description: pectinesterase family; protein id: At1g02810.1
  misc_feature (1)..(476): Homolog of NCBI NO: 18411914 NR Description: hypothetical protein; protein id: At4g02330.1, by cDNA: gi_19424044 [Arabidopsis thaliana]
  misc_feature (1)..(476): Homolog of NCBI NO: 19424045 NR Description: unknown protein [Arabidopsis thaliana]
  misc_feature (64)..(476): Homolog of NCBI NO: 18407388 NR Description: pectinesterase family; protein id: At2g47550.1, by cDNA: 111254., supported by cDNA: gi_16604401 [Arabidopsis >gi|20196963|gb|AAC62855.2| putative pectinesterase [Arabidopsis
  misc_feature (1)..(104): Homolog of NCBI NO: 18407388 NR Description: pectinesterase family; protein id: At2g47550.1, by cDNA: 111254., supported by cDNA: gi_16604401 [Arabidopsis >gi|20196963|gb|AAC62855.2| putative pectinesterase [Arabidopsis
  misc_feature (159)..(476): Homolog of NCBI NO: 7447370 NR Description: probable pectinesterase (EC 3.1.1.11) T30B22.15 -
  misc_feature (1)..(104): Homolog of NCBI NO: 7447370 NR Description: probable pectinesterase (EC 3.1.1.11) T30B22.15 -
  misc_feature (152)..(474): Homolog of NCBI NO: 34894528 NR Description: putative pectinesterase [Oryza sativa (japonica group)] >gi|20805092|dbj|BAB92764.1| putative pectinesterase
  misc_feature (1)..(105): Homolog of NCBI NO: 34894528 NR Description: putative pectinesterase [Oryza sativa (japonica group)] >gi|20805092|dbj|BAB92764.1| putative pectinesterase
  misc_feature (125)..(476): Homolog of NCBI NO: 27363394 NR Description: At2g47550/T30B22.15 [Arabidopsis thaliana]
MDYLLTSFETVNDTSAKTSFKPLSFPKADDIQTLLSAALTNEQTCLEGLTTAASYSATWTVRTGVALPLVNDTKLLGVSLALFTKGWVPKKKKRAGFAWAQPRSGSSTHTKPFRLFRNGALPLKMTEKTKAVYESLSRRKLADGDSNGDGDDGSMVLISDIVTVSQDGTGNFTNITAAVAAAPNNTDGSAGFFLIYVTAGIYEEYISIAKNKRYMMMIGDGINQTVVTGNRSVVDGWTTFNSATFAVTAPNFVAVNITFRNTAGPEKHQAVALRSGADFSIFYSCSFEAYQDTLYTHSLRQFYRECDVYGTVDFIFGNAAVVFQNCNLYPRKPMPNQFNAITAQGRSDPNQNTGTSIQNCTIKPADDLVSSNYTVKTYLGRPWKEYSRTVYMQSYIDGFVEPVGWREWNGDFALSTLYYAEYNNTGPGSNTTNRVTWPGYHVINSTDAANFTVTGLFIEADWIWKTGVPYTSGLIS

SEQ ID NO: 80670 - protein, 352 aa, Arabidopsis thaliana
  peptide (1)..(352): Ceres Seq. ID no. 12656763
  misc_feature (38)..(337): Pfam Name: Pectinesterase Pfam Description: Pectinesterase
  misc_feature (1)..(352): Homolog of NCBI NO: 18379010 NR Description: pectinesterase family; protein id: At1g02810.1
  misc_feature (1)..(352): Homolog of NCBI NO: 18411914 NR Description: hypothetical protein; protein id: At4g02330.1, by cDNA: gi_19424044 [Arabidopsis thaliana]
  misc_feature (1)..(352): Homolog of NCBI NO: 19424045 NR Description: unknown protein [Arabidopsis thaliana]
  misc_feature (1)..(352): Homolog of NCBI NO: 18407388 NR Description: pectinesterase family; protein id: At2g47550.1, by cDNA: 111254., supported by cDNA: gi_16604401 [Arabidopsis >gi|20196963|gb|AAC62855.2| putative pectinesterase [Arabidopsis
  misc_feature (35)..(352): Homolog of NCBI NO: 7447370 NR Description: probable pectinesterase (EC 3.1.1.11) T30B22.15 -
  misc_feature (28)..(350): Homolog of NCBI NO: 34894528 NR Description: putative pectinesterase [Oryza sativa (japonica group)] >gi|20805092|dbj|BAB92764.1| putative pectinesterase
  misc_feature (1)..(352): Homolog of NCBI NO: 27363394 NR Description: At2g47550/T30B22.15 [Arabidopsis thaliana]
  misc_feature (1)..(352): Homolog of NCBI NO: 16604402 NR Description: At2g47550/T30B22.15 [Arabidopsis thaliana]
  misc_feature (1)..(352): Homolog of NCBI NO: 6630558 NR Description: putative pectinesterase [Arabidopsis thaliana]
  misc_feature (1)..(352): Homolog of NCBI NO: 30681457 NR Description: pectinesterase, putative [Arabidopsis thaliana]
MTEKTKAVYESLSRRKLADGDSNGDGDDGSMVLISDIVTVSQDGTGNFTNITAAVAAAPNNTDGSAGFFLIYVTAGIYEEYISIAKNKRYMMMIGDGINQTVVTGNRSVVDGWTTFNSATFAVTAPNFVAVNITFRNTAGPEKHQAVALRSGADFSIFYSCSFEAYQDTLYTHSLRQFYRECDVYGTVDFIFGNAAVVFQNCNLYPRKPMPNQFNAITAQGRSDPNQNTGTSIQNCTIKPADDLVSSNYTVKTYLGRPWKEYSRTVYMQSYIDGFVEPVGWREWNGDFALSTLYYAEYNNTGPGSNTTNRVTWPGYHVINSTDAANFTVTGLFIEADWIWKTGVPYTSGLIS

SEQ ID NO: 80671 - DNA, 917 bp, Arabidopsis thaliana
  misc_feature (1)..(917): Ceres Seq. ID no. 12656791
  misc_feature: MA Experiment ID: 20000573 Result: Down-regulated in Transcription
  misc_feature: MA Experiment 20000573 PARAMETER Experiment Name: At_100uM_ABA_Mutants__P Parameter: Organism Value: A. thaliana
  misc_feature: MA Experiment 20000573 PARAMETER Experiment Name: At_100uM_ABA_Mutants__P Parameter: Plant Line Value: CS22 vs. Ler wt
  misc_feature: MA Experiment 20000573 PARAMETER Experiment Name: At_100uM_ABA_Mutants__P Parameter: Timepoint (hr) Value: N/A
  misc_feature: MA Experiment 20000573 PARAMETER Experiment Name: At_100uM_ABA_Mutants__P Parameter: Tissue Value: Whole Plant
  misc_feature: MA Experiment 20000573 PARAMETER Experiment Name: At_100uM_ABA_Mutants__P Parameter: Treatment Value: None
  misc_feature: MA Experiment ID: 20001248 Result: Down-regulated in Transcription
  misc_feature: MA Experiment 20001248 PARAMETER Experiment Name: At_Far-red-induction_P Parameter: Age (day) Value: 7
  misc_feature: MA Experiment 20001248 PARAMETER Experiment Name: At_Far-red-induction_P Parameter: Light Value: Far-red vs. White
  misc_feature: MA Experiment 20001248 PARAMETER Experiment Name: At_Far-red-induction_P Parameter: Organism Value: A. thaliana
  misc_feature: MA Experiment 20001248 PARAMETER Experiment Name: At_Far-red-induction_P Parameter: Plant Line Value: Columbia
  misc_feature: MA Experiment 20001248 PARAMETER Experiment Name: At_Far-red-induction_P Parameter: Timepoint (hr) Value: 4
  misc_feature: MA Experiment 20001248 PARAMETER Experiment Name: At_Far-red-induction_P Parameter: Tissue Value: Whole Plant
  misc_feature: MA Experiment ID: 20001451 Result: Up-regulated in Transcription
  misc_feature: MA Experiment 20001451 PARAMETER Experiment Name: At_Far-red-induction_P Parameter: Age (day) Value: 7
  misc_feature: MA Experiment 20001451 PARAMETER Experiment Name: At_Far-red-induction_P Parameter: Light Value: Far-red vs. White
  misc_feature: MA Experiment 20001451 PARAMETER Experiment Name: At_Far-red-induction_P Parameter: Organism Value: A. thaliana
  misc_feature: MA Experiment 20001451 PARAMETER Experiment Name: At_Far-red-induction_P Parameter: Plant Line Value: Columbia
  misc_feature: MA Experiment 20001451 PARAMETER Experiment Name: At_Far-red-induction_P Parameter: Timepoint (hr) Value: 24
  misc_feature: MA Experiment 20001451 PARAMETER Experiment Name: At_Far-red-induction_P Parameter: Tissue Value: Whole Plant
gccaaaaactcttcttctacccaaaaaaaaaacaaaagatatgaacactaagctatcactttctcagaccaaaatcttcactttcacaacttggttcaacgatactcgaagtggcttagatagacgctcaagcatttccccgactctctgttcaaagcccgtctactccggaaaactcaaggctgcaaaagagacagcaagaatcgagacatcgaatacgaagaatgcgagtattgaggacagcttcttctcgaaaattgcaattaattatctatcaaagaatcttcaagacgcagctgggattagtagtagcagtaagagtaccgattatgataggttagtggatacggcaactagggtttcgcgtaactttgacaccaagcaacaacatgagtttgttcttagctctttggacagagcattaccgacagtaataagctccttgatcaaaatggcatttccaccttcaaaagtctcgagggagctcttcgctctattcacgacaatatctttcgcttggcttgttggaccttcagaggtgagggagactgaggttaatggaagaaaagagaagagtgttgtgtacatagagaagtgcaggtttcttgaacagtcaaattgtgttggcatgtgcactcatatttgtaaaattccatcccaaatcttcatcaaaaactcactgggaatgcctatctacatggagcccgattttaatgatcttagctgtaaaatgatgtttggtcgggagcctccagagatcgaagatgatcctgctatgaaacaaccatgctttgaattctgcaaatcaaacaaaagctacggtgtgaagcattagaactagtactagagcgattagataaattgtgatatcaaaacatatttaagtttttcttttaaagtcataccagagattacaa

SEQ ID NO: 80672 - protein, 277 aa, Arabidopsis thaliana
  peptide (1)..(277): Ceres Seq. ID no. 12656792
  misc_feature (14)..(277): Homolog of NCBI NO: 18379048 NR Description: Expressed protein; protein id: At1g03055.1,
  misc_feature (109)..(272): Homolog of NCBI NO: 18408106 NR Description: expressed protein; protein id: At1g64680.1, by cDNA: 101924. [Arabidopsis thaliana] >gi|25373196|pir||H96669
  misc_feature (80)..(267): Homolog of NCBI NO: 22328234 NR Description: unknown protein; protein id: At4g01995.1, by cDNA: gi_17065173, supported by cDNA: gi_20259951 [Arabidopsis >gi|17065174|gb|AAL32741.1| Unknown protein [Arabidopsis
  misc_feature (98)..(265): Homolog of NCBI NO: 22299485 NR Description: ORF_ID:tll1942~hypothetical protein
PKTLLLPKKKTKDMNTKLSLSQTKIFTFTTWFNDTRSGLDRRSSISPTLCSKPVYSGKLKAAKETARIETSNTKNASIEDSFFSKIAINYLSKNLQDAAGISSSSKSTDYDRLVDTATRVSRNFDTKQQHEFVLSSLDRALPTVISSLIKMAFPPSKVSRELFALFTTISFAWLVGPSEVRETEVNGRKEKSVVYIEKCRFLEQSNCVGMCTHICKIPSQIFIKNSLGMPIYMEPDFNDLSCKMMFGREPPEIEDDPAMKQPCFEFCKSNKSYGVKH

SEQ ID NO: 80673 - protein, 264 aa, Arabidopsis thaliana
  peptide (1)..(264): Ceres Seq. ID no. 12656793
  misc_feature (1)..(264): Homolog of NCBI NO: 18379048 NR Description: Expressed protein; protein id: At1g03055.1,
  misc_feature (96)..(259): Homolog of NCBI NO: 18408106 NR Description: expressed protein; protein id: At1g64680.1, by cDNA: 101924. [Arabidopsis thaliana] >gi|25373196|pir||H96669
  misc_feature (67)..(254): Homolog of NCBI NO: 22328234 NR Description: unknown protein; protein id: At4g01995.1, by cDNA: gi_17065173, supported by cDNA: gi_20259951 [Arabidopsis >gi|17065174|gb|AAL32741.1| Unknown protein [Arabidopsis
  misc_feature (85)..(252): Homolog of NCBI NO: 22299485 NR Description: ORF_ID:tll1942~hypothetical protein
MNTKLSLSQTKIFTFTTWFNDTRSGLDRRSSISPTLCSKPVYSGKLKAAKETARIETSNTKNASIEDSFFSKIAINYLSKNLQDAAGISSSSKSTDYDRLVDTATRVSRNFDTKQQHEFVLSSLDRALPTVISSLIKMAFPPSKVSRELFALFTTISFAWLVGPSEVRETEVNGRKEKSVVYIEKCRFLEQSNCVGMCTHICKIPSQIFIKNSLGMPIYMEPDFNDLSCKMMFGREPPEIEDDPAMKQPCFEFCKSNKSYGVKH

SEQ ID NO: 80674 - DNA, 744 bp, Arabidopsis thaliana
  misc_feature (1)..(744): Ceres Seq. ID no. 12656794
  misc_feature: MA Experiment ID: 20000327 Result: Up-regulated in Transcription
  misc_feature: MA Experiment 20000327 PARAMETER Experiment Name: At_42deg_Heat_Sub_P Parameter: Age (day) Value: 14
  misc_feature: MA Experiment 20000327 PARAMETER Experiment Name: At_42deg_Heat_Sub_P Parameter: Organism Value: A. thaliana
  misc_feature: MA Experiment 20000327 PARAMETER Experiment Name: At_42deg_Heat_Sub_P Parameter: Plant Line Value: WS
  misc_feature: MA Experiment 20000327 PARAMETER Experiment Name: At_42deg_Heat_Sub_P Parameter: Temperature (deg C) Value: 42 vs. 22
  misc_feature: MA Experiment 20000327 PARAMETER Experiment Name: At_42deg_Heat_Sub_P Parameter: Timepoint (hr) Value: 1
  misc_feature: MA Experiment 20000327 PARAMETER Experiment Name: At_42deg_Heat_Sub_P Parameter: Tissue Value: Aerial
  misc_feature: MA Experiment ID: 20000328 Result: Up-regulated in Transcription
  misc_feature: MA Experiment 20000328 PARAMETER Experiment Name: At_42deg_Heat_Sub_P Parameter: Age (day) Value: 14
  misc_feature: MA Experiment 20000328 PARAMETER Experiment Name: At_42deg_Heat_Sub_P Parameter: Organism Value: A. thaliana
  misc_feature: MA Experiment 20000328 PARAMETER Experiment Name: At_42deg_Heat_Sub_P Parameter: Plant Line Value: WS
  misc_feature: MA Experiment 20000328 PARAMETER Experiment Name: At_42deg_Heat_Sub_P Parameter: Temperature (deg C) Value: 42 vs. 22
  misc_feature: MA Experiment 20000328 PARAMETER Experiment Name: At_42deg_Heat_Sub_P Parameter: Timepoint (hr) Value: 6
  misc_feature: MA Experiment 20000328 PARAMETER Experiment Name: At_42deg_Heat_Sub_P Parameter: Tissue Value: Aerial
atgtataagtggaatcttccttaccgaaaagatgacgtggagaccggccgtgaaggcggtgagagatctctgtatccgactatgcttgagagccccgaactccgatggggtttcatcagaaaggtatattccataatcgcattccagcttttagcaaccatcgccgtcgcctccacggtggtttttgtccgtccgatcgccgtgttcttcgccactactagtgccggtctcgctctctggattgtcttaatcatcacgcctcttatagtaatgtgtcctttgtactattaccaccagaaacatccagtgaattatttgcttctagggattttcacggtagctttggctttcgccgtcggattaacatgtgctttcaccagcgggaaagtgattcttgaggcagcgattttgacaacagtagtggtgctttccttaaccgtctacaccttttgggcagcaaagaaaggatatgactttaacttcctcggtccattcttgtttggtgctctcatcgttctcatggtctttgcccttattcagattttcttcccgttgggacggatctcagtgatgatctatggatgtttggctgcgataatattctgcgggtacatagtttacgatacagacaatctcatcaaacgttacagctacgatgagtatatttgggcagcagtttcgctctacttagatattatcaacctcttcttggctctccttaccattttcagagctgccgagtga

SEQ ID NO: 80675 - protein, 247 aa, Arabidopsis thaliana
  peptide (1)..(247): Ceres Seq. ID no. 12656795
  misc_feature (31)..(247): Pfam Name: Uncharacterised protein family UPF0005 Pfam Description: Uncharacterised protein family UPF0005
  misc_feature (1)..(247): Homolog of NCBI NO: 15218701 NR Description: putative glutamate/aspartate-binding peptide;
  misc_feature (1)..(247): Homolog of NCBI NO: 15235466 NR Description: putative glutamate-/aspartate-binding peptide; id: At4g02690.1 [Arabidopsis thaliana] >gi|7486855|pir||T01080
  misc_feature (4)..(247): Homolog of NCBI NO: 15229411 NR Description: putative protein; protein id: At3g63310.1
  misc_feature (22)..(247): Homolog of NCBI NO: 14626300 NR Description: putative receptor-associated protein [Oryza
  misc_feature (8)..(247): Homolog of NCBI NO: 34393841 NR Description: putative z-protein [Oryza sativa (japonica
  misc_feature (10)..(247): Homolog of NCBI NO: 18414455 NR Description: Expressed protein; protein id: At4g15470.1, by cDNA: gi_15215826, supported by cDNA: gi_15810200, supported cDNA: gi_20453266 [Arabidopsis thaliana]
  misc_feature (28)..(247): Homolog of NCBI NO: 34393840 NR Description: putative z-protein [Oryza sativa (japonica
  misc_feature (10)..(208): Homolog of NCBI NO: 15810201 NR Description: AT4g15470/dl3775w [Arabidopsis thaliana]
  misc_feature (34)..(242): Homolog of NCBI NO: 3676056 NR Description: unknown [Emericella nidulans]
  misc_feature (31)..(245): Homolog of NCBI NO: 40018604 NR Description: Unknown (protein for MGC:73002) [Rattus >gi|38014718|gb|AAH60596.1| Unknown (protein for MGC:73002)
MYKWNLPYRKDDVETGREGGERSLYPTMLESPELRWGFIRKVYSIIAFQLLATIAVASTVVFVRPIAVFFATTSAGLALWIVLIITPLIVMCPLYYYHQKHPVNYLLLGIFTVALAFAVGLTCAFTSGKVILEAAILTTVVVLSLTVYTFWAAKKGYDFNFLGPFLFGALIVLMVFALIQIFFPLGRISVMIYGCLAAIIFCGYIVYDTDNLIKRYSYDEYIWAAVSLYLDIINLFLALLTIFRAAE

SEQ ID NO: 80676 - protein, 220 aa, Arabidopsis thaliana
  peptide (1)..(220): Ceres Seq. ID no. 12656796
  misc_feature (4)..(220): Pfam Name: Uncharacterised protein family UPF0005 Pfam Description: Uncharacterised protein family UPF0005
  misc_feature (1)..(220): Homolog of NCBI NO: 15218701 NR Description: putative glutamate/aspartate-binding peptide;
  misc_feature (1)..(220): Homolog of NCBI NO: 15235466 NR Description: putative glutamate-/aspartate-binding peptide; id: At4g02690.1 [Arabidopsis thaliana] >gi|7486855|pir||T01080
  misc_feature (1)..(220): Homolog of NCBI NO: 15229411 NR Description: putative protein; protein id: At3g63310.1
  misc_feature (1)..(220): Homolog of NCBI NO: 14626300 NR Description: putative receptor-associated protein [Oryza
  misc_feature (1)..(220): Homolog of NCBI NO: 34393841 NR Description: putative z-protein [Oryza sativa (japonica
  misc_feature (1)..(220): Homolog of NCBI NO: 18414455 NR Description: Expressed protein; protein id: At4g15470.1, by cDNA: gi_15215826, supported by cDNA: gi_15810200, supported cDNA: gi_20453266 [Arabidopsis thaliana]
  misc_feature (1)..(220): Homolog of NCBI NO: 34393840 NR Description: putative z-protein [Oryza sativa (japonica
  misc_feature (1)..(181): Homolog of NCBI NO: 15810201 NR Description: AT4g15470/dl3775w [Arabidopsis thaliana]
  misc_feature (7)..(215): Homolog of NCBI NO: 3676056 NR Description: unknown [Emericella nidulans]
  misc_feature (4)..(218): Homolog of NCBI NO: 40018604 NR Description: Unknown (protein for MGC:73002) [Rattus >gi|38014718|gb|AAH60596.1| Unknown (protein for MGC:73002)
MLESPELRWGFIRKVYSIIAFQLLATIAVASTVVFVRPIAVFFATTSAGLALWIVLIITPLIVMCPLYYYHQKHPVNYLLLGIFTVALAFAVGLTCAFTSGKVILEAAILTTVVVLSLTVYTFWAAKKGYDFNFLGPFLFGALIVLMVFALIQIFFPLGRISVMIYGCLAAIIFCGYIVYDTDNLIKRYSYDEYIWAAVSLYLDIINLFLALLTIFRAAE

SEQ ID NO: 80677 - protein, 157 aa, Arabidopsis thaliana
  peptide (1)..(157): Ceres Seq. ID no. 12656797
  misc_feature (1)..(157): Pfam Name: Uncharacterised protein family UPF0005 Pfam Description: Uncharacterised protein family UPF0005
  misc_feature (1)..(157): Homolog of NCBI NO: 15218701 NR Description: putative glutamate/aspartate-binding peptide;
  misc_feature (1)..(157): Homolog of NCBI NO: 15235466 NR Description: putative glutamate-/aspartate-binding peptide; id: At4g02690.1 [Arabidopsis thaliana] >gi|7486855|pir||T01080
  misc_feature (1)..(157): Homolog of NCBI NO: 15229411 NR Description: putative protein; protein id: At3g63310.1
  misc_feature (1)..(157): Homolog of NCBI NO: 14626300 NR Description: putative receptor-associated protein [Oryza
  misc_feature (1)..(157): Homolog of NCBI NO: 34393841 NR Description: putative z-protein [Oryza sativa (japonica
  misc_feature (1)..(157): Homolog of NCBI NO: 18414455 NR Description: Expressed protein; protein id: At4g15470.1, by cDNA: gi_15215826, supported by cDNA: gi_15810200, supported cDNA: gi_20453266 [Arabidopsis thaliana]
  misc_feature (1)..(157): Homolog of NCBI NO: 34393840 NR Description: putative z-protein [Oryza sativa (japonica
  misc_feature (1)..(118): Homolog of NCBI NO: 15810201 NR Description: AT4g15470/dl3775w [Arabidopsis thaliana]
  misc_feature (1)..(152): Homolog of NCBI NO: 3676056 NR Description: unknown [Emericella nidulans]
  misc_feature (1)..(155): Homolog of NCBI NO: 40018604 NR Description: Unknown (protein for MGC:73002) [Rattus >gi|38014718|gb|AAH60596.1| Unknown (protein for MGC:73002)
MCPLYYYHQKHPVNYLLLGIFTVALAFAVGLTCAFTSGKVILEAAILTTVVVLSLTVYTFWAAKKGYDFNFLGPFLFGALIVLMVFALIQIFFPLGRISVMIYGCLAAIIFCGYIVYDTDNLIKRYSYDEYIWAAVSLYLDIINLFLALLTIFRAAE

SEQ ID NO: 80678 - DNA, 810 bp, Arabidopsis thaliana
  misc_feature (1)..(810): Ceres Seq. ID no. 12656813
  misc_feature: MA Experiment ID: 20000328 Result: Down-regulated in Transcription
  misc_feature: MA Experiment 20000328 PARAMETER Experiment Name: At_42deg_Heat_Sub_P Parameter: Age (day) Value: 14
  misc_feature: MA Experiment 20000328 PARAMETER Experiment Name: At_42deg_Heat_Sub_P Parameter: Organism Value: A. thaliana
  misc_feature: MA Experiment 20000328 PARAMETER Experiment Name: At_42deg_Heat_Sub_P Parameter: Plant Line Value: WS
  misc_feature: MA Experiment 20000328 PARAMETER Experiment Name: At_42deg_Heat_Sub_P Parameter: Temperature (deg C) Value: 42 vs. 22
  misc_feature: MA Experiment 20000328 PARAMETER Experiment Name: At_42deg_Heat_Sub_P Parameter: Timepoint (hr) Value: 6
  misc_feature: MA Experiment 20000328 PARAMETER Experiment Name: At_42deg_Heat_Sub_P Parameter: Tissue Value: Aerial
atgtcctttactccgtccacttttcgaatcgctatctcgttgctccttcttgttgctatcgtctccgccgtcatttttctcccgaaattgaaggacttcttgttatggattaaggaagatcttggaccttttggtccacttgcattggctttggcttatattcctctcacaattgtggcggttcctgcttctgtactcacgctaggtggtggttacctttttggcctgccagtaggatttgtagccgactctcttggagctacattaggtgcaacagcggcatttctgcttggtagaacgattggtaaatcttatgtcacttcaaaaataaagcattacccaaagtttcaagctgtttccgttgcaattcaaaaatctggcttcaagatagtcttgctgctacgcgttgtccccatactgcccttcaatatgttgaattacctcctatctgtaactcctgttcgcttaggggaatacatgctggccacttggttgggaatgatgcagcccattacatttgcgctagtatatgttggaactactctgaaagatctttctgatattacacatggatggcatgaggtgtcagtatttcgttgggtaattatgatggttggcgtagctctagctgtaattctgataatatgcataacaagagtggcgaaatcatccttggacaaagcattggctgagaatggtactgaattagatgggaagaagaatgacgacgcttccgtactcccgatcgcagagccaccaccggatctacaagagcctctcgttatcagaatcgacccatccaatacttga

SEQ ID NO: 80679 - protein, 269 aa, Arabidopsis thaliana
  peptide (1)..(269): Ceres Seq. ID no. 12656814
  misc_feature (1)..(269): Homolog of NCBI NO: 25406732 NR Description: protein F15K9.14 [imported] - Arabidopsis
  misc_feature (1)..(269): Homolog of NCBI NO: 30678508 NR Description: expressed protein [Arabidopsis thaliana]
  misc_feature (1)..(269): Homolog of NCBI NO: 40823094 NR Description: At1g03260 [Arabidopsis thaliana]
  misc_feature (5)..(268): Homolog of NCBI NO: 23617115 NR Description: contains EST AU173803(R3795)~integral membrane
  misc_feature (1)..(265): Homolog of NCBI NO: 30687125 NR Description: expressed protein [Arabidopsis thaliana]
  misc_feature (6)..(246): Homolog of NCBI NO: 23128176 NR Description: hypothetical protein [Nostoc punctiforme]
  misc_feature (30)..(240): Homolog of NCBI NO: 17229699 NR Description: hypothetical protein [Nostoc sp. PCC 7120]
  misc_feature (30)..(229): Homolog of NCBI NO: 23128177 NR Description: hypothetical protein [Nostoc punctiforme]
  misc_feature (30)..(230): Homolog of NCBI NO: 23042280 NR Description: hypothetical protein [Trichodesmium erythraeum
  misc_feature (30)..(229): Homolog of NCBI NO: 16331873 NR Description: hypothetical protein [Synechocystis sp. PCC 6803]
MSFTPSTFRIAISLLLLVAIVSAVIFLPKLKDFLLWIKEDLGPFGPLALALAYIPLTIVAVPASVLTLGGGYLFGLPVGFVADSLGATLGATAAFLLGRTIGKSYVTSKIKHYPKFQAVSVAIQKSGFKIVLLLRVVPILPFNMLNYLLSVTPVRLGEYMLATWLGMMQPITFALVYVGTTLKDLSDITHGWHEVSVFRWVIMMVGVALAVILIICITRVAKSSLDKALAENGTELDGKKNDDASVLPIAEPPPDLQEPLVIRIDPSNT

SEQ ID NO: 80680 - DNA, 1386 bp, Arabidopsis thaliana
  misc_feature (1)..(1386): Ceres Seq. ID no. 12656826
  misc_feature: MA Experiment ID: 20001451 Result: Up-regulated in Transcription
  misc_feature: MA Experiment 20001451 PARAMETER Experiment Name: At_Far-red-induction_P Parameter: Age (day) Value: 7
  misc_feature: MA Experiment 20001451 PARAMETER Experiment Name: At_Far-red-induction_P Parameter: Light Value: Far-red vs. White
  misc_feature: MA Experiment 20001451 PARAMETER Experiment Name: At_Far-red-induction_P Parameter: Organism Value: A. thaliana
  misc_feature: MA Experiment 20001451 PARAMETER Experiment Name: At_Far-red-induction_P Parameter: Plant Line Value: Columbia
  misc_feature: MA Experiment 20001451 PARAMETER Experiment Name: At_Far-red-induction_P Parameter: Timepoint (hr) Value: 24
  misc_feature: MA Experiment 20001451 PARAMETER Experiment Name: At_Far-red-induction_P Parameter: Tissue Value: Whole Plant
atggcttcttgcatccaagaacttcatttcactcacctccatatcccagtcaccatcaaccagcaatttcttgtacatccatcaagtccaacacctgcaaatcaatctcctcaccatagtctctatctatcaaacctagatgatataatcggagcacgagttttcactccctccgtttatttctatccatcaaccaataatcgagaatcttttgtactgaaacggcttcaagatgctcttagtgaggttttagttccgtattatccactctctggtaggttaagagaagtggaaaatgggaaactggaagttttctttggagaagagcaaggtgtgttaatggtgtcggcaaattcatcaatggatttagctgatcttggagatcttacagttccaaatccagcttggttaccattaatctttcgaaacccaggagaagaagcttacaagatcctcgaaatgccgttacttatagctcaagtaacgtttttcacctgtggtggatttagcctcgggattagactttgccattgcatttgtgatggttttggagctatgcagtttctcggctcgtgggcagctacagcgaaaaccggaaaattgattgcagatcctgagccggtttgggatagagagactttcaaaccaagaaaccctccaatggtgaaatacccacatcatgagtatcttccaattgaagaaagatcgaatttgacgaactccttgtgggatacaaagccattgcagaaatgttacaggataagcaaagagtttcagtgtcgtgttaaaagcattgctcaaggagaagatccaaccttagtttgtagcacgtttgatgcaatggctgcacacatatggagatcatgggtcaaagcacttgatgtgaagccactggattacaatctcaggctcacgttttcagtcaacgtaagaacaagactagaaaccctaaagttaagaaaaggtttttacggcaatgtggtgtgtttggcttgcgcaatgagcagtgtcgagagtcttattaacgattctctttctaagacaacacgtttggttcaggatgcgagacttagggtttcagaggattacttgcgttctatggtggattacgttgatgtaaagaggccaaagaggttagagtttggtgggaagctaacgataacgcaatggacccggtttgaaatgtatgagactgcggattttggatggggtaaaccggtttatgcagggccaattgacttgaggcctacgccacaggtttgcgtgttgttgccacaaggaggagttgagtctggcaatgaccaaagcatggtggtttgcctttgcttgcctcctactgctgttcatacctttactcggcttctatctttaaatgatcataaataa

SEQ ID NO: 80681 - protein, 461 aa, Arabidopsis thaliana
  peptide (1)..(461): Ceres Seq. ID no. 12656827
  misc_feature (15)..(458): Pfam Name: Transferase family Pfam Description: Transferase family
  misc_feature (1)..(461): Homolog of NCBI NO: 15218793 NR Description: hypothetical protein; protein id: At1g03390.1
  misc_feature (11)..(451): Homolog of NCBI NO: 30693723 NR Description: transferase family [Arabidopsis thaliana]
  misc_feature (11)..(451): Homolog of NCBI NO: 30693725 NR Description: transferase family [Arabidopsis thaliana]
  misc_feature (20)..(448): Homolog of NCBI NO: 15217644 NR Description: putative hypersensitivity-related protein; id: At1g27620.1 [Arabidopsis thaliana]
  misc_feature (20)..(457): Homolog of NCBI NO: 15229017 NR Description: putative protein; protein id: At3g48720.1
  misc_feature (20)..(457): Homolog of NCBI NO: 34222064 NR Description: At3g48720 [Arabidopsis thaliana]
  misc_feature (17)..(457): Homolog of NCBI NO: 15242820 NR Description: acyltransferase-like protein; protein id: supported by cDNA: 157547., supported by cDNA: gi_14334863
  misc_feature (17)..(457): Homolog of NCBI NO: 21553692 NR Description: acyltransferase-like protein [Arabidopsis
  misc_feature (27)..(455): Homolog of NCBI NO: 20161743 NR Description: N-hydroxycinnamoyl/benzoyltransferase-like
  misc_feature (31)..(451): Homolog of NCBI NO: 34894074 NR Description: putative benzoyltransferase [Oryza sativa
MASCIQELHFTHLHIPVTINQQFLVHPSSPTPANQSPHHSLYLSNLDDIIGARVFTPSVYFYPSTNNRESFVLKRLQDALSEVLVPYYPLSGRLREVENGKLEVFFGEEQGVLMVSANSSMDLADLGDLTVPNPAWLPLIFRNPGEEAYKILEMPLLIAQVTFFTCGGFSLGIRLCHCICDGFGAMQFLGSWAATAKTGKLIADPEPVWDRETFKPRNPPMVKYPHHEYLPIEERSNLTNSLWDTKPLQKCYRISKEFQCRVKSIAQGEDPTLVCSTFDAMAAHIWRSWVKALDVKPLDYNLRLTFSVNVRTRLETLKLRKGFYGNVVCLACAMSSVESLINDSLSKTTRLVQDARLRVSEDYLRSMVDYVDVKRPKRLEFGGKLTITQWTRFEMYETADFGWGKPVYAGPIDLRPTPQVCVLLPQGGVESGNDQSMVVCLCLPPTAVHTFTRLLSLNDHK

SEQ ID NO: 80682 - protein, 348 aa, Arabidopsis thaliana
  peptide (1)..(348): Ceres Seq. ID no. 12656828
  misc_feature (1)..(345): Pfam Name: Transferase family Pfam Description: Transferase family
  misc_feature (1)..(348): Homolog of NCBI NO: 15218793 NR Description: hypothetical protein; protein id: At1g03390.1
  misc_feature (1)..(338): Homolog of NCBI NO: 30693723 NR Description: transferase family [Arabidopsis thaliana]
  misc_feature (1)..(338): Homolog of NCBI NO: 30693725 NR Description: transferase family [Arabidopsis thaliana]
  misc_feature (1)..(335): Homolog of NCBI NO: 15217644 NR Description: putative hypersensitivity-related protein; id: At1g27620.1 [Arabidopsis thaliana]
  misc_feature (1)..(344): Homolog of NCBI NO: 15229017 NR Description: putative protein; protein id: At3g48720.1
  misc_feature (1)..(344): Homolog of NCBI NO: 34222064 NR Description: At3g48720 [Arabidopsis thaliana]
  misc_feature (1)..(344): Homolog of NCBI NO: 15242820 NR Description: acyltransferase-like protein; protein id: supported by cDNA: 157547., supported by cDNA: gi_14334863
  misc_feature (1)..(344): Homolog of NCBI NO: 21553692 NR Description: acyltransferase-like protein [Arabidopsis
  misc_feature (1)..(342): Homolog of NCBI NO: 20161743 NR Description: N-hydroxycinnamoyl/benzoyltransferase-like
  misc_feature (1)..(338): Homolog of NCBI NO: 34894074 NR Description: putative benzoyltransferase [Oryza sativa
MVSANSSMDLADLGDLTVPNPAWLPLIFRNPGEEAYKILEMPLLIAQVTFFTCGGFSLGIRLCHCICDGFGAMQFLGSWAATAKTGKLIADPEPVWDRETFKPRNPPMVKYPHHEYLPIEERSNLTNSLWDTKPLQKCYRISKEFQCRVKSIAQGEDPTLVCSTFDAMAAHIWRSWVKALDVKPLDYNLRLTFSVNVRTRLETLKLRKGFYGNVVCLACAMSSVESLINDSLSKTTRLVQDARLRVSEDYLRSMVDYVDVKRPKRLEFGGKLTITQWTRFEMYETADFGWGKPVYAGPIDLRPTPQVCVLLPQGGVESGNDQSMVVCLCLPPTAVHTFTRLLSLNDHK

SEQ ID NO: 80683 - protein, 341 aa, Arabidopsis thaliana
  peptide (1)..(341): Ceres Seq. ID no. 12656829
  misc_feature (1)..(338): Pfam Name: Transferase family Pfam Description: Transferase family
  misc_feature (1)..(341): Homolog of NCBI NO: 15218793 NR Description: hypothetical protein; protein id: At1g03390.1
  misc_feature (1)..(331): Homolog of NCBI NO: 30693723 NR Description: transferase family [Arabidopsis thaliana]
  misc_feature (1)..(331): Homolog of NCBI NO: 30693725 NR Description: transferase family [Arabidopsis thaliana]
  misc_feature (1)..(328): Homolog of NCBI NO: 15217644 NR Description: putative hypersensitivity-related protein; id: At1g27620.1 [Arabidopsis thaliana]
  misc_feature (1)..(337): Homolog of NCBI NO: 15229017 NR Description: putative protein; protein id: At3g48720.1
  misc_feature (1)..(337): Homolog of NCBI NO: 34222064 NR Description: At3g48720 [Arabidopsis thaliana]
  misc_feature (1)..(337): Homolog of NCBI NO: 15242820 NR Description: acyltransferase-like protein; protein id: supported by cDNA: 157547., supported by cDNA: gi_14334863
  misc_feature (1)..(337): Homolog of NCBI NO: 21553692 NR Description: acyltransferase-like protein [Arabidopsis
  misc_feature (1)..(335): Homolog of NCBI NO: 20161743 NR Description: N-hydroxycinnamoyl/benzoyltransferase-like
  misc_feature (1)..(331): Homolog of NCBI NO: 34894074 NR Description: putative benzoyltransferase [Oryza sativa
MDLADLGDLTVPNPAWLPLIFRNPGEEAYKILEMPLLIAQVTFFTCGGFSLGIRLCHCICDGFGAMQFLGSWAATAKTGKLIADPEPVWDRETFKPRNPPMVKYPHHEYLPIEERSNLTNSLWDTKPLQKCYRISKEFQCRVKSIAQGEDPTLVCSTFDAMAAHIWRSWVKALDVKPLDYNLRLTFSVNVRTRLETLKLRKGFYGNVVCLACAMSSVESLINDSLSKTTRLVQDARLRVSEDYLRSMVDYVDVKRPKRLEFGGKLTITQWTRFEMYETADFGWGKPVYAGPIDLRPTPQVCVLLPQGGVESGNDQSMVVCLCLPPTAVHTFTRLLSLNDHK

SEQ ID NO: 80684 - DNA, 1210 bp, Arabidopsis thaliana
  misc_feature (1)..(1210): Ceres Seq. ID no. 12656830
  misc_feature: MA Experiment ID: 20000182 Result: Up-regulated in Transcription
  misc_feature: MA Experiment 20000182 PARAMETER Experiment Name: At_2mM_SA_P Parameter: Age (day) Value: 14
  misc_feature: MA Experiment 20000182 PARAMETER Experiment Name: At_2mM_SA_P Parameter: Organism Value: A. thaliana
  misc_feature: MA Experiment 20000182 PARAMETER Experiment Name: At_2mM_SA_P Parameter: Plant Line Value: WS
  misc_feature: MA Experiment 20000182 PARAMETER Experiment Name: At_2mM_SA_P Parameter: Timepoint (hr) Value: 6
  misc_feature: MA Experiment 20000182 PARAMETER Experiment Name: At_2mM_SA_P Parameter: Tissue Value: Aerial
  misc_feature: MA Experiment 20000182 PARAMETER Experiment Name: At_2mM_SA_P Parameter: Treatment Value: 2mM SA vs. No Treatment
  misc_feature: MA Experiment ID: 20000185 Result: Down-regulated in Transcription
  misc_feature: MA Experiment 20000185 PARAMETER Experiment Name: At_Roots__P Parameter: Age (day) Value: 7 vs. 21
  misc_feature: MA Experiment 20000185 PARAMETER Experiment Name: At_Roots__P Parameter: Organism Value: A. thaliana
  misc_feature: MA Experiment 20000185 PARAMETER Experiment Name: At_Roots__P Parameter: Tissue Value: Roots vs. Whole Plant
  misc_feature: MA Experiment ID: 20000234 Result: Down-regulated in Transcription
  misc_feature: MA Experiment 20000234 PARAMETER Experiment Name: At_Siliques_P Parameter: Age (day) Value: 21
  misc_feature: MA Experiment 20000234 PARAMETER Experiment Name: At_Siliques_P Parameter: Organism Value: A. thaliana
  misc_feature: MA Experiment 20000234 PARAMETER Experiment Name: At_Siliques_P Parameter: Plant Line Value: WS
  misc_feature: MA Experiment 20000234 PARAMETER Experiment Name: At_Siliques_P Parameter: Tissue Value: Less Than 5mm Siliques vs. Whole Plant
  misc_feature: MA Experiment ID: 20000235 Result: Down-regulated in Transcription
  misc_feature: MA Experiment 20000235 PARAMETER Experiment Name: At_Siliques_P Parameter: Age (day) Value: 21
  misc_feature: MA Experiment 20000235 PARAMETER Experiment Name: At_Siliques_P Parameter: Organism Value: A. thaliana
  misc_feature: MA Experiment 20000235 PARAMETER Experiment Name: At_Siliques_P Parameter: Plant Line Value: WS
  misc_feature: MA Experiment 20000235 PARAMETER Experiment Name: At_Siliques_P Parameter: Tissue Value: 5-10mm Siliques vs. Whole Plant
  misc_feature: MA Experiment ID: 20000264 Result: Down-regulated in Transcription
  misc_feature: MA Experiment 20000264 PARAMETER Experiment Name: At_Open_Flower_P Parameter: Age (day) Value: 21
  misc_feature: MA Experiment 20000264 PARAMETER Experiment Name: At_Open_Flower_P Parameter: Plant Line Value: WS
  misc_feature: MA Experiment 20000264 PARAMETER Experiment Name: At_Open_Flower_P Parameter: Tissue Value: Open Flower vs. Whole Plant
  misc_feature: MA Experiment ID: 20000265 Result: Down-regulated in Transcription
  misc_feature: MA Experiment 20000265 PARAMETER Experiment Name: At_Open_Flower_P Parameter: Age (day) Value: 21
  misc_feature: MA Experiment 20000265 PARAMETER Experiment Name: At_Open_Flower_P Parameter: Plant Line Value: WS
  misc_feature: MA Experiment 20000265 PARAMETER Experiment Name: At_Open_Flower_P Parameter: Tissue Value: Closed Flower vs. Whole Plant
  misc_feature: MA Experiment ID: 20000286 Result: Down-regulated in Transcription
  misc_feature: MA Experiment 20000286 PARAMETER Experiment Name: At_Open_Flower_P Parameter: Age (day) Value: 21
  misc_feature: MA Experiment 20000286 PARAMETER Experiment Name: At_Open_Flower_P Parameter: Plant Line Value: WS
  misc_feature: MA Experiment 20000286 PARAMETER Experiment Name: At_Open_Flower_P Parameter: Tissue Value: Half Open vs. Whole Plant
  misc_feature: MA Experiment ID: 20000439 Result: Down-regulated in Transcription
  misc_feature: MA Experiment 20000439 PARAMETER Experiment Name: At_Roots__P Parameter: Age (day) Value: 14 vs. 21
  misc_feature: MA Experiment 20000439 PARAMETER Experiment Name: At_Roots__P Parameter: Organism Value: A. thaliana
  misc_feature: MA Experiment 20000439 PARAMETER Experiment Name: At_Roots__P Parameter: Tissue Value: Roots vs. Whole Plant
  misc_feature: MA Experiment ID: 20000794 Result: Down-regulated in Transcription
  misc_feature: MA Experiment 20000794 PARAMETER Experiment Name: At_Petals_P Parameter: Age (day) Value: 23-25 days
  misc_feature: MA Experiment 20000794 PARAMETER Experiment Name: At_Petals_P Parameter: Plant Line Value: WS
  misc_feature: MA Experiment 20000794 PARAMETER Experiment Name: At_Petals_P Parameter: Tissue Value: Petals vs. Whole plant
  misc_feature: MA Experiment ID: 20001247 Result: Up-regulated in Transcription
  misc_feature: MA Experiment 20001247 PARAMETER Experiment Name: At_Far-red-induction_P Parameter: Age (day) Value: 7
  misc_feature: MA Experiment 20001247 PARAMETER Experiment Name: At_Far-red-induction_P Parameter: Light Value: Far-red vs. White
  misc_feature: MA Experiment 20001247 PARAMETER Experiment Name: At_Far-red-induction_P Parameter: Organism Value: A. thaliana
  misc_feature: MA Experiment 20001247 PARAMETER Experiment Name: At_Far-red-induction_P Parameter: Plant Line Value: Columbia
  misc_feature: MA Experiment 20001247 PARAMETER Experiment Name: At_Far-red-induction_P Parameter: Timepoint (hr) Value: 1
  misc_feature: MA Experiment 20001247 PARAMETER Experiment Name: At_Far-red-induction_P Parameter: Tissue Value: Whole Plant
  misc_feature: MA Experiment ID: 20001450 Result: Up-regulated in Transcription
  misc_feature: MA Experiment 20001450 PARAMETER Experiment Name: At_Far-red-induction_P Parameter: Age (day) Value: 7
  misc_feature: MA Experiment 20001450 PARAMETER Experiment Name: At_Far-red-induction_P Parameter: Light Value: Far-red vs. White
  misc_feature: MA Experiment 20001450 PARAMETER Experiment Name: At_Far-red-induction_P Parameter: Organism Value: A. thaliana
  misc_feature: MA Experiment 20001450 PARAMETER Experiment Name: At_Far-red-induction_P Parameter: Plant Line Value: Columbia
  misc_feature: MA Experiment 20001450 PARAMETER Experiment Name: At_Far-red-induction_P Parameter: Timepoint (hr) Value: 8
  misc_feature: MA Experiment 20001450 PARAMETER Experiment Name: At_Far-red-induction_P Parameter: Tissue Value: Whole Plant
  misc_feature: MA Experiment ID: 20001555 Result: Down-regulated in Transcription
  misc_feature: MA Experiment 20001555 PARAMETER Experiment Name: At_Drought_Soil_Dry_P Parameter: Age (day) Value: 24
  misc_feature: MA Experiment 20001555 PARAMETER Experiment Name: At_Drought_Soil_Dry_P Parameter: Organism Value: A. thaliana
  misc_feature: MA Experiment 20001555 PARAMETER Experiment Name: At_Drought_Soil_Dry_P Parameter: Plant Line Value: WS
  misc_feature: MA Experiment 20001555 PARAMETER Experiment Name: At_Drought_Soil_Dry_P Parameter: Post Timepoint (hr) Value: None
  misc_feature: MA Experiment 20001555 PARAMETER Experiment Name: At_Drought_Soil_Dry_P Parameter: Post-Treatment Value: None
  misc_feature: MA Experiment 20001555 PARAMETER Experiment Name: At_Drought_Soil_Dry_P Parameter: Timepoint (day) Value: 10
  misc_feature: MA Experiment 20001555 PARAMETER Experiment Name: At_Drought_Soil_Dry_P Parameter: Treatment Value: Drought vs. No Drought
  misc_feature: MA Experiment ID: 20001556 Result: Down-regulated in Transcription
  misc_feature: MA Experiment 20001556 PARAMETER Experiment Name: At_Drought_Soil_Dry_P Parameter: Age (day) Value: 26
  misc_feature: MA Experiment 20001556 PARAMETER Experiment Name: At_Drought_Soil_Dry_P Parameter: Organism Value: A. thaliana
  misc_feature: MA Experiment 20001556 PARAMETER Experiment Name: At_Drought_Soil_Dry_P Parameter: Plant Line Value: WS
  misc_feature: MA Experiment 20001556 PARAMETER Experiment Name: At_Drought_Soil_Dry_P Parameter: Post Timepoint (hr) Value: None
  misc_feature: MA Experiment 20001556 PARAMETER Experiment Name: At_Drought_Soil_Dry_P Parameter: Post-Treatment Value: None
  misc_feature: MA Experiment 20001556 PARAMETER Experiment Name: At_Drought_Soil_Dry_P Parameter: Timepoint (day) Value: 12
  misc_feature: MA Experiment 20001556 PARAMETER Experiment Name: At_Drought_Soil_Dry_P Parameter: Treatment Value: Drought vs. No Drought
  misc_feature: MA Experiment ID: 20001557 Result: Down-regulated in Transcription
  misc_feature: MA Experiment 20001557 PARAMETER Experiment Name: At_Drought_Soil_Dry_P Parameter: Age (day) Value: 27
  misc_feature: MA Experiment 20001557 PARAMETER Experiment Name: At_Drought_Soil_Dry_P Parameter: Organism Value: A. thaliana
  misc_feature: MA Experiment 20001557 PARAMETER Experiment Name: At_Drought_Soil_Dry_P Parameter: Plant Line Value: WS
  misc_feature: MA Experiment 20001557 PARAMETER Experiment Name: At_Drought_Soil_Dry_P Parameter: Post Timepoint (hr) Value: 3
  misc_feature: MA Experiment 20001557 PARAMETER Experiment Name: At_Drought_Soil_Dry_P Parameter: Post-Treatment Value: Re-Water vs. No Drought
  misc_feature: MA Experiment 20001557 PARAMETER Experiment Name: At_Drought_Soil_Dry_P Parameter: Timepoint (day) Value: 13
  misc_feature: MA Experiment 20001557 PARAMETER Experiment Name: At_Drought_Soil_Dry_P Parameter: Treatment Value: Drought vs. No Drought
  misc_feature: MA Experiment ID: 20001558 Result: Down-regulated in Transcription
  misc_feature: MA Experiment 20001558 PARAMETER Experiment Name: At_Drought_Soil_Dry_P Parameter: Age (day) Value: 27
  misc_feature: MA Experiment 20001558 PARAMETER Experiment Name: At_Drought_Soil_Dry_P Parameter: Organism Value: A. thaliana
  misc_feature: MA Experiment 20001558 PARAMETER Experiment Name: At_Drought_Soil_Dry_P Parameter: Plant Line Value: WS
  misc_feature: MA Experiment 20001558 PARAMETER Experiment Name: At_Drought_Soil_Dry_P Parameter: Post Timepoint (hr) Value: 6
  misc_feature: MA Experiment 20001558 PARAMETER Experiment Name: At_Drought_Soil_Dry_P Parameter: Post-Treatment Value: Re-Water vs. No Drought
  misc_feature: MA Experiment 20001558 PARAMETER Experiment Name: At_Drought_Soil_Dry_P Parameter: Timepoint (day) Value: 13
  misc_feature: MA Experiment 20001558 PARAMETER Experiment Name: At_Drought_Soil_Dry_P Parameter: Treatment Value: Drought vs. No Drought
  misc_feature: MA Experiment ID: 20001559 Result: Down-regulated in Transcription
  misc_feature: MA Experiment 20001559 PARAMETER Experiment Name: At_Drought_Soil_Dry_P Parameter: Age (day) Value: 28
  misc_feature: MA Experiment 20001559 PARAMETER Experiment Name: At_Drought_Soil_Dry_P Parameter: Organism Value: A. thaliana
  misc_feature: MA Experiment 20001559 PARAMETER Experiment Name: At_Drought_Soil_Dry_P Parameter: Plant Line Value: WS
  misc_feature: MA Experiment 20001559 PARAMETER Experiment Name: At_Drought_Soil_Dry_P Parameter: Post Timepoint (hr) Value: 29
  misc_feature: MA Experiment 20001559 PARAMETER Experiment Name: At_Drought_Soil_Dry_P Parameter: Post-Treatment Value: Re-Water vs. No Drought
  misc_feature: MA Experiment 20001559 PARAMETER Experiment Name: At_Drought_Soil_Dry_P Parameter: Timepoint (day) Value: 14
  misc_feature: MA Experiment 20001559 PARAMETER Experiment Name: At_Drought_Soil_Dry_P Parameter: Treatment Value: Drought vs. No Drought
  misc_feature: MA Experiment ID: 20001560 Result: Down-regulated in Transcription
  misc_feature: MA Experiment 20001560 PARAMETER Experiment Name: At_Drought_Soil_Dry_P Parameter: Age (day) Value: 28
  misc_feature: MA Experiment 20001560 PARAMETER Experiment Name: At_Drought_Soil_Dry_P Parameter: Organism Value: A. thaliana
  misc_feature: MA Experiment 20001560 PARAMETER Experiment Name: At_Drought_Soil_Dry_P Parameter: Plant Line Value: WS
  misc_feature: MA Experiment 20001560 PARAMETER Experiment Name: At_Drought_Soil_Dry_P Parameter: Post Timepoint (hr) Value: None
  misc_feature: MA Experiment 20001560 PARAMETER Experiment Name: At_Drought_Soil_Dry_P Parameter: Post-Treatment Value: None
  misc_feature: MA Experiment 20001560 PARAMETER Experiment Name: At_Drought_Soil_Dry_P Parameter: Timepoint (day) Value: 14
  misc_feature: MA Experiment 20001560 PARAMETER Experiment Name: At_Drought_Soil_Dry_P Parameter: Treatment Value: Drought vs. No Drought
  misc_feature: MA Experiment ID: 20001905 Result: Down-regulated in Transcription
  misc_feature: MA Experiment 20001905 PARAMETER Experiment Name: At_Drought_Reproduction_P Parameter: Age (day) Value: 40
  misc_feature: MA Experiment 20001905 PARAMETER Experiment Name: At_Drought_Reproduction_P Parameter: Organism Value: A. thaliana
  misc_feature: MA Experiment 20001905 PARAMETER Experiment Name: At_Drought_Reproduction_P Parameter: Plant Line Value: WS
  misc_feature: MA Experiment 20001905 PARAMETER Experiment Name: At_Drought_Reproduction_P Parameter: Timepoint (day) Value: 10
  misc_feature: MA Experiment 20001905 PARAMETER Experiment Name: At_Drought_Reproduction_P Parameter: Tissue Value: Rosettes
  misc_feature: MA Experiment 20001905 PARAMETER Experiment Name: At_Drought_Reproduction_P Parameter: Treatment Value: Drought vs. No Drought
aagaagcaatggagtcaactgatcgttcaagtcaagcaaaagctttcgacgaggccaaaatcggtgtgaaagggcttgtggattcaggaatcacagagattccggccctgttccgtgcaacgccggctactcttgcaagcctgaagtcgccaccacctccaaagcatctcaccatccctaccgttgatctcaaaggagcaagcgtggtggagaagatcggagaagctgctgagaaatggggattattccatttggtgaatcacggcatcccggtggaggttctggagaggatgattcaagggattcgcgggtttcacgagcaagaacctgaagccaagaaacgcttctactctagggatcacactagagacgtgctttactttagcaatcatgatctccaaaactccgaggccgccagttggagagacactctcggttgttataccgcacccgagcctcccagattagaggatttgcccgcggtttgcggggagattatgctggagtactcaaaggaaataatgagtttaggtgaaaggctatttgagcttctatcagaggctttggggttgaactctcatcatctcaaggacatggactgtgccaagtctcaatatatggttggccaacactacccaccttgccctcagcctgaccttactataggcataaacaagcacaccgatatttcctttctcaccgttcttcttcaagacaatgttggagggcttcaagttttccatgaacagtattggattgatgttactcctgtccctggggctctagtcattaacattggagattttcttcagcttataaccaatgataagttcataagcgcggagcatagggtgatagccaatggatcttctgaaccgcggacttccgtggcaattgttttcagcacgttcatgagggcgtattctcgagtatatgggccaatcaaagatctcctgtctgcagaaaaccctgctaagtatagagactgcaccctcaccgaattttcaaccatcttcagctcaaaaacgctcgatgctcctaagttacaccatttcaaaatctaagacatttgggtttagaccttttttgtctactaatctatcaaactctctcggtacacaatgaaaactggtacttcatatgtaagccatgatataatacgatagtgtacatttcgaagcttattggcctcgcattcatcctcatccac

SEQ ID NO: 80685 - protein, 353 aa, Arabidopsis thaliana
  peptide (1)..(353): Ceres Seq. ID no. 12656831
  misc_feature (202)..(302): Pfam Name: 2OG-Fe(II) oxygenase superfamily Pfam Description: 2OG-Fe(II) oxygenase superfamily
  misc_feature (3)..(353): Homolog of NCBI NO: 15218794 NR Description: putative 1-aminocyclopropane-1-carboxylate protein id: At1g03400.1, supported by cDNA: gi_15146295
  misc_feature (30)..(271): Homolog of NCBI NO: 9280671 NR Description: F21B7.3 [Arabidopsis thaliana]
  misc_feature (269)..(353): Homolog of NCBI NO: 9280671 NR Description: F21B7.3 [Arabidopsis thaliana]
  misc_feature (3)..(353): Homolog of NCBI NO: 15218795 NR Description: putative 1-aminocyclopropane-1-carboxylate
  misc_feature (3)..(343): Homolog of NCBI NO: 9280671 NR Description: F21B7.3 [Arabidopsis thaliana]
  misc_feature (7)..(353): Homolog of NCBI NO: 30679748 NR Description: 2-oxoglutarate-dependent dioxygenase, putative thaliana] >gi|30102640|gb|AAP21238.1| At1g06620 [Arabidopsis
  misc_feature (2)..(353): Homolog of NCBI NO: 15233096 NR Description: 1-aminocyclopropane-1-carboxylate oxidase-like
  misc_feature (7)..(186): Homolog of NCBI NO: 25406927 NR Description: protein F12K11.6 [imported] - Arabidopsis >gi|6692693|gb|AAF24827.1|AC007592_20 F12K11.6 [Arabidopsis
  misc_feature (254)..(353): Homolog of NCBI NO: 25406927 NR Description: protein F12K11.6 [imported] - Arabidopsis >gi|6692693|gb|AAF24827.1|AC007592_20 F12K11.6 [Arabidopsis
  misc_feature (164)..(252): Homolog of NCBI NO: 25406927 NR Description: protein F12K11.6 [imported] - Arabidopsis >gi|6692693|gb|AAF24827.1|AC007592_20 F12K11.6 [Arabidopsis
EAMESTDRSSQAKAFDEAKIGVKGLVDSGITEIPALFRATPATLASLKSPPPPKHLTIPTVDLKGASVVEKIGEAAEKWGLFHLVNHGIPVEVLERMIQGIRGFHEQEPEAKKRFYSRDHTRDVLYFSNHDLQNSEAASWRDTLGCYTAPEPPRLEDLPAVCGEIMLEYSKEIMSLGERLFELLSEALGLNSHHLKDMDCAKSQYMVGQHYPPCPQPDLTIGINKHTDISFLTVLLQDNVGGLQVFHEQYWIDVTPVPGALVINIGDFLQLITNDKFISAEHRVIANGSSEPRTSVAIVFSTFMRAYSRVYGPIKDLLSAENPAKYRDCTLTEFSTIFSSKTLDAPKLHHFKI

SEQ ID NO: 80686 - protein, 351 aa, Arabidopsis thaliana
  peptide (1)..(351): Ceres Seq. ID no. 12656832
  misc_feature (200)..(300): Pfam Name: 2OG-Fe(II) oxygenase superfamily Pfam Description: 2OG-Fe(II) oxygenase superfamily
  misc_feature (1)..(351): Homolog of NCBI NO: 15218794 NR Description: putative 1-aminocyclopropane-1-carboxylate protein id: At1g03400.1, supported by cDNA: gi_15146295
  misc_feature (28)..(269): Homolog of NCBI NO: 9280671 NR Description: F21B7.3 [Arabidopsis thaliana]
  misc_feature (267)..(351): Homolog of NCBI NO: 9280671 NR Description: F21B7.3 [Arabidopsis thaliana]
  misc_feature (1)..(351): Homolog of NCBI NO: 15218795 NR Description: putative 1-aminocyclopropane-1-carboxylate
  misc_feature (1)..(341): Homolog of NCBI NO: 9280671 NR Description: F21B7.3 [Arabidopsis thaliana]
  misc_feature (5)..(351): Homolog of NCBI NO: 30679748 NR Description: 2-oxoglutarate-dependent dioxygenase, putative thaliana] >gi|30102640|gb|AAP21238.1| At1g06620 [Arabidopsis
  misc_feature (1)..(351): Homolog of NCBI NO: 15233096 NR Description: 1-aminocyclopropane-1-carboxylate oxidase-like
  misc_feature (5)..(184): Homolog of NCBI NO: 25406927 NR Description: protein F12K11.6 [imported] - Arabidopsis >gi|6692693|gb|AAF24827.1|AC007592_20 F12K11.6 [Arabidopsis
  misc_feature (252)..(351): Homolog of NCBI NO: 25406927 NR Description: protein F12K11.6 [imported] - Arabidopsis >gi|6692693|gb|AAF24827.1|AC007592_20 F12K11.6 [Arabidopsis
  misc_feature (162)..(250): Homolog of NCBI NO: 25406927 NR Description: protein F12K11.6 [imported] - Arabidopsis >gi|6692693|gb|AAF24827.1|AC007592_20 F12K11.6 [Arabidopsis
MESTDRSSQAKAFDEAKIGVKGLVDSGITEIPALFRATPATLASLKSPPPPKHLTIPTVDLKGASVVEKIGEAAEKWGLFHLVNHGIPVEVLERMIQGIRGFHEQEPEAKKRFYSRDHTRDVLYFSNHDLQNSEAASWRDTLGCYTAPEPPRLEDLPAVCGEIMLEYSKEIMSLGERLFELLSEALGLNSHHLKDMDCAKSQYMVGQHYPPCPQPDLTIGINKHTDISFLTVLLQDNVGGLQVFHEQYWIDVTPVPGALVINIGDFLQLITNDKFISAEHRVIANGSSEPRTSVAIVFSTFMRAYSRVYGPIKDLLSAENPAKYRDCTLTEFSTIFSSKTLDAPKLHHFKI

SEQ ID NO: 80687 - protein, 257 aa, Arabidopsis thaliana
  peptide (1)..(257): Ceres Seq. ID no. 12656833
  misc_feature (106)..(206): Pfam Name: 2OG-Fe(II) oxygenase superfamily Pfam Description: 2OG-Fe(II) oxygenase superfamily
  misc_feature (1)..(257): Homolog of NCBI NO: 15218794 NR Description: putative 1-aminocyclopropane-1-carboxylate protein id: At1g03400.1, supported by cDNA: gi_15146295
  misc_feature (1)..(175): Homolog of NCBI NO: 9280671 NR Description: F21B7.3 [Arabidopsis thaliana]
  misc_feature (173)..(257): Homolog of NCBI NO: 9280671 NR Description: F21B7.3 [Arabidopsis thaliana]
  misc_feature (1)..(257): Homolog of NCBI NO: 15218795 NR Description: putative 1-aminocyclopropane-1-carboxylate
  misc_feature (1)..(247): Homolog of NCBI NO: 9280671 NR Description: F21B7.3 [Arabidopsis thaliana]
  misc_feature (1)..(257): Homolog of NCBI NO: 30679748 NR Description: 2-oxoglutarate-dependent dioxygenase, putative thaliana] >gi|30102640|gb|AAP21238.1| At1g06620 [Arabidopsis
  misc_feature (1)..(257): Homolog of NCBI NO: 15233096 NR Description: 1-aminocyclopropane-1-carboxylate oxidase-like
  misc_feature (1)..(90): Homolog of NCBI NO: 25406927 NR Description: protein F12K11.6 [imported] - Arabidopsis >gi|6692693|gb|AAF24827.1|AC007592_20 F12K11.6 [Arabidopsis
  misc_feature (158)..(257): Homolog of NCBI NO: 25406927 NR Description: protein F12K11.6 [imported] - Arabidopsis >gi|6692693|gb|AAF24827.1|AC007592_20 F12K11.6 [Arabidopsis
  misc_feature (68)..(156): Homolog of NCBI NO: 25406927 NR Description: protein F12K11.6 [imported] - Arabidopsis >gi|6692693|gb|AAF24827.1|AC007592_20 F12K11.6 [Arabidopsis
MIQGIRGFHEQEPEAKKRFYSRDHTRDVLYFSNHDLQNSEAASWRDTLGCYTAPEPPRLEDLPAVCGEIMLEYSKEIMSLGERLFELLSEALGLNSHHLKDMDCAKSQYMVGQHYPPCPQPDLTIGINKHTDISFLTVLLQDNVGGLQVFHEQYWIDVTPVPGALVINIGDFLQLITNDKFISAEHRVIANGSSEPRTSVAIVFSTFMRAYSRVYGPIKDLLSAENPAKYRDCTLTEFSTIFSSKTLDAPKLHHFKI

SEQ ID NO: 80688 - DNA, 2394 bp, Arabidopsis thaliana
  misc_feature (1)..(2394): Ceres Seq. ID no. 12656841
atgccattcaagaaatttcgtcggagtctaaacttcattatttgcttaccaaaactaaaagagtgcgctcgtggacaaattttaggctataaaatggagacgaaggcgattggatttcaccacctttctccaccacaaaatattgtgttatggctcctgatcaatcttatcaatatccatctccttcgtatgaatcgatacagaccttttacgatacctgatgaggattggccgggtcctagatgcggccatactctcacggcggttttcgtcaacaattcccatcagcttatcctcttcggcggcagtactactgccgtcgccaaccataactcctccttacccgagatcagtttagatggcgtcaccaattcggtccattcttttgatgttttgaccaggaagtggacaaggcttaatccgattggtgacgttccgtctcccagggcttgtcatgctgccgctttatatggcaccttgatccttattcagggtgggattggtccatccggaccttctgatggagatgtctacatgcttgacatgactaataacaagtggattaagtttctggttggaggggagactccaagccctcgctatggccatgttatggatatagctgctcagaggtggcttgtcatattcagcgggaataatggtatgcttcaggtagttctcgagaagatgacactgggagatacttacgggctgaaaatggatagcgataatgtttggactcctgttccagctgtagctccttccccgagatatcaacatactgcggttttcggaggttcaaaactgcatgtcattgggggtatactgaatagggctcgcctaatcgatggtgaagcagttgttgctgtgcttgatactgagactggtgaatgggtagataccaatcaaccagagacctctgcgagcggcgccaatagacaaaatcaatatcaacttatgcgacgttgtcaccatgctgctgcatcgtttggcagccacctatatgtgcatggcgggattagagaagatgtattgctcgacgatttgctagttgctgaaacatcccagtcttcaagtcctgaaccagaagaagataatcctgataattatatgttgctcgacgactatctaatggatgaacctaagcctttaagttctgaaccagaagcttcatcctttataatgaggagcacaagtgaaattgcgatggatagattggcagaggcacataacttaccaactatcgaaaatgctttttatgatagtgctattgaaggatacgttccacttcaacatggagctgagacggttggaaatcgaggtggcttggtgagaactgcaagcttggatcaatctactcaagacttgcataagaaggtcatttcgacactgttgagacctaaaacctggacgcctcctgccaacagagattttttcttgagttatttagaagttaagcatttgtgcgatgaggtagagaaaatatttatgaatgaaccaacacttcttcagctcaaagttccaatcaaagtcttcggcgatatccatggacaatacggggatttgatgcgtttatttcatgaatatggacatccttcagtggaaggagatatcacccatatagactatttgtttttgggagattatgttgaccgtggacaacacagcttggagatcatcatgttgctgtttgctttgaagatagaatatccgaagaacatccacttgattcgtggaaatcatgagtctcttgcaatgaatagaatttatggttttcttacagaatgcgaagaaagaatgggcgagtcctatgggttcgaagcatggttaaagattaatcaagtttttgattatcttccgcttgctgcacttctagaaaagaaagttttgtgtgtccatggcggaattgggagggcagttacgatcgaagaaattgaaaatatcgaaaggccggcattcccggatactggatcaatggtcttgaaagacatcttatggtcagatcctacgatgaatgacactgttttgggtatagtagacaatgccagaggagaaggtgttgtctcatttgggcctgatatagtcaaggcatttctagaaaggaatggtctggagatgatactaagagcacacgagtgtgttattgacggctttgaaagattcgctgacggacggcttataacagtcttttctgctacaaattactgtggaactgcacaaaatgcgggagcaatattggtaattggtagagatatggtaatttatcctaagctgattcatcctcaccctcctcccatctcatcttcagaagaagactatacagacaaagcatggatgcaggagctgaacatcgagatgccgcctactccagctcgaggggagtcaagtgaataa

SEQ ID NO: 80689 - protein, 797 aa, Arabidopsis thaliana
  peptide (1)..(797): Ceres Seq. ID no. 12656842
  misc_feature (507)..(715): Pfam Name: Calcineurin-like phosphoesterase Pfam Description: Calcineurin-like phosphoesterase
  misc_feature (456)..(793): Homolog of NCBI NO: 30683436 NR Description: phospho protein phosphatase -related [Arabidopsis
  misc_feature (75)..(353): Homolog of NCBI NO: 30683436 NR Description: phospho protein phosphatase -related [Arabidopsis
  misc_feature (456)..(780): Homolog of NCBI NO: 25513447 NR Description: probable phosphoprotein phosphatase (EC 3.1.3.16)
  misc_feature (75)..(311): Homolog of NCBI NO: 25513447 NR Description: probable phosphoprotein phosphatase (EC 3.1.3.16)
  misc_feature (452)..(793): Homolog of NCBI NO: 15223207 NR Description: protein serine/threonine phosphatase alpha,
  misc_feature (75)..(339): Homolog of NCBI NO: 15223207 NR Description: protein serine/threonine phosphatase alpha,
  misc_feature (126)..(353): Homolog of NCBI NO: 15223207 NR Description: protein serine/threonine phosphatase alpha,
  misc_feature (561)..(793): Homolog of NCBI NO: 25513585 NR Description: probable phosphoprotein phosphatase (EC 3.1.3.16) - Arabidopsis thaliana >gi|6664307|gb|AAF22889.1|AC006932_6
  misc_feature (161)..(353): Homolog of NCBI NO: 25513585 NR Description: probable phosphoprotein phosphatase (EC 3.1.3.16) - Arabidopsis thaliana >gi|6664307|gb|AAF22889.1|AC006932_6
  misc_feature (452)..(568): Homolog of NCBI NO: 25513585 NR Description: probable phosphoprotein phosphatase (EC 3.1.3.16) - Arabidopsis thaliana >gi|6664307|gb|AAF22889.1|AC006932_6
MPFKKFRRSLNFIICLPKLKECARGQILGYKMETKAIGFHHLSPPQNIVLWLLINLINIHLLRMNRYRPFTIPDEDWPGPRCGHTLTAVFVNNSHQLILFGGSTTAVANHNSSLPEISLDGVTNSVHSFDVLTRKWTRLNPIGDVPSPRACHAAALYGTLILIQGGIGPSGPSDGDVYMLDMTNNKWIKFLVGGETPSPRYGHVMDIAAQRWLVIFSGNNGMLQVVLEKMTLGDTYGLKMDSDNVWTPVPAVAPSPRYQHTAVFGGSKLHVIGGILNRARLIDGEAVVAVLDTETGEWVDTNQPETSASGANRQNQYQLMRRCHHAAASFGSHLYVHGGIREDVLLDDLLVAETSQSSSPEPEEDNPDNYMLLDDYLMDEPKPLSSEPEASSFIMRSTSEIAMDRLAEAHNLPTIENAFYDSAIEGYVPLQHGAETVGNRGGLVRTASLDQSTQDLHKKVISTLLRPKTWTPPANRDFFLSYLEVKHLCDEVEKIFMNEPTLLQLKVPIKVFGDIHGQYGDLMRLFHEYGHPSVEGDITHIDYLFLGDYVDRGQHSLEIIMLLFALKIEYPKNIHLIRGNHESLAMNRIYGFLTECEERMGESYGFEAWLKINQVFDYLPLAALLEKKVLCVHGGIGRAVTIEEIENIERPAFPDTGSMVLKDILWSDPTMNDTVLGIVDNARGEGVVSFGPDIVKAFLERNGLEMILRAHECVIDGFERFADGRLITVFSATNYCGTAQNAGAILVIGRDMVIYPKLIHPHPPPISSSEEDYTDKAWMQELNIEMPPTPARGESSE

SEQ ID NO: 80690 - protein, 766 aa, Arabidopsis thaliana
  peptide (1)..(766): Ceres Seq. ID no. 12656843
  misc_feature (476)..(684): Pfam Name: Calcineurin-like phosphoesterase Pfam Description: Calcineurin-like phosphoesterase
  misc_feature (425)..(762): Homolog of NCBI NO: 30683436 NR Description: phospho protein phosphatase -related [Arabidopsis
  misc_feature (44)..(322): Homolog of NCBI NO: 30683436 NR Description: phospho protein phosphatase -related [Arabidopsis
  misc_feature (425)..(749): Homolog of NCBI NO: 25513447 NR Description: probable phosphoprotein phosphatase (EC 3.1.3.16)
  misc_feature (44)..(280): Homolog of NCBI NO: 25513447 NR Description: probable phosphoprotein phosphatase (EC 3.1.3.16)
  misc_feature (421)..(762): Homolog of NCBI NO: 15223207 NR Description: protein serine/threonine phosphatase alpha,
  misc_feature (44)..(308): Homolog of NCBI NO: 15223207 NR Description: protein serine/threonine phosphatase alpha,
  misc_feature (95)..(322): Homolog of NCBI NO: 15223207 NR Description: protein serine/threonine phosphatase alpha,
  misc_feature (530)..(762): Homolog of NCBI NO: 25513585 NR Description: probable phosphoprotein phosphatase (EC 3.1.3.16) - Arabidopsis thaliana >gi|6664307|gb|AAF22889.1|AC006932_6
  misc_feature (130)..(322): Homolog of NCBI NO: 25513585 NR Description: probable phosphoprotein phosphatase (EC 3.1.3.16) - Arabidopsis thaliana >gi|6664307|gb|AAF22889.1|AC006932_6
  misc_feature (421)..(537): Homolog of NCBI NO: 25513585 NR Description: probable phosphoprotein phosphatase (EC 3.1.3.16) - Arabidopsis thaliana >gi|6664307|gb|AAF22889.1|AC006932_6
METKAIGFHHLSPPQNIVLWLLINLINIHLLRMNRYRPFTIPDEDWPGPRCGHTLTAVFVNNSHQLILFGGSTTAVANHNSSLPEISLDGVTNSVHSFDVLTRKWTRLNPIGDVPSPRACHAAALYGTLILIQGGIGPSGPSDGDVYMLDMTNNKWIKFLVGGETPSPRYGHVMDIAAQRWLVIFSGNNGMLQVVLEKMTLGDTYGLKMDSDNVWTPVPAVAPSPRYQHTAVFGGSKLHVIGGILNRARLIDGEAVVAVLDTETGEWVDTNQPETSASGANRQNQYQLMRRCHHAAASFGSHLYVHGGIREDVLLDDLLVAETSQSSSPEPEEDNPDNYMLLDDYLMDEPKPLSSEPEASSFIMRSTSEIAMDRLAEAHNLPTIENAFYDSAIEGYVPLQHGAETVGNRGGLVRTASLDQSTQDLHKKVISTLLRPKTWTPPANRDFFLSYLEVKHLCDEVEKIFMNEPTLLQLKVPIKVFGDIHGQYGDLMRLFHEYGHPSVEGDITHIDYLFLGDYVDRGQHSLEIIMLLFALKIEYPKNIHLIRGNHESLAMNRIYGFLTECEERMGESYGFEAWLKINQVFDYLPLAALLEKKVLCVHGGIGRAVTIEEIENIERPAFPDTGSMVLKDILWSDPTMNDTVLGIVDNARGEGVVSFGPDIVKAFLERNGLEMILRAHECVIDGFERFADGRLITVFSATNYCGTAQNAGAILVIGRDMVIYPKLIHPHPPPISSSEEDYTDKAWMQELNIEMPPTPARGESSE

SEQ ID NO: 80691 - protein, 734 aa, Arabidopsis thaliana
  peptide (1)..(734): Ceres Seq. ID no. 12656844
  misc_feature (444)..(652): Pfam Name: Calcineurin-like phosphoesterase Pfam Description: Calcineurin-like phosphoesterase
  misc_feature (393)..(730): Homolog of NCBI NO: 30683436 NR Description: phospho protein phosphatase -related [Arabidopsis
  misc_feature (12)..(290): Homolog of NCBI NO: 30683436 NR Description: phospho protein phosphatase -related [Arabidopsis
  misc_feature (393)..(717): Homolog of NCBI NO: 25513447 NR Description: probable phosphoprotein phosphatase (EC 3.1.3.16)
  misc_feature (12)..(248): Homolog of NCBI NO: 25513447 NR Description: probable phosphoprotein phosphatase (EC 3.1.3.16)
  misc_feature (389)..(730): Homolog of NCBI NO: 15223207 NR Description: protein serine/threonine phosphatase alpha,
  misc_feature (12)..(276): Homolog of NCBI NO: 15223207 NR Description: protein serine/threonine phosphatase alpha,
  misc_feature (63)..(290): Homolog of NCBI NO: 15223207 NR Description: protein serine/threonine phosphatase alpha,
  misc_feature (498)..(730): Homolog of NCBI NO: 25513585 NR Description: probable phosphoprotein phosphatase (EC 3.1.3.16) - Arabidopsis thaliana >gi|6664307|gb|AAF22889.1|AC006932_6
  misc_feature (98)..(290): Homolog of NCBI NO: 25513585 NR Description: probable phosphoprotein phosphatase (EC 3.1.3.16) - Arabidopsis thaliana >gi|6664307|gb|AAF22889.1|AC006932_6
  misc_feature (389)..(505): Homolog of NCBI NO: 25513585 NR Description: probable phosphoprotein phosphatase (EC 3.1.3.16) - Arabidopsis thaliana >gi|6664307|gb|AAF22889.1|AC006932_6
MNRYRPFTIPDEDWPGPRCGHTLTAVFVNNSHQLILFGGSTTAVANHNSSLPEISLDGVTNSVHSFDVLTRKWTRLNPIGDVPSPRACHAAALYGTLILIQGGIGPSGPSDGDVYMLDMTNNKWIKFLVGGETPSPRYGHVMDIAAQRWLVIFSGNNGMLQVVLEKMTLGDTYGLKMDSDNVWTPVPAVAPSPRYQHTAVFGGSKLHVIGGILNRARLIDGEAVVAVLDTETGEWVDTNQPETSASGANRQNQYQLMRRCHHAAASFGSHLYVHGGIREDVLLDDLLVAETSQSSSPEPEEDNPDNYMLLDDYLMDEPKPLSSEPEASSFIMRSTSEIAMDRLAEAHNLPTIENAFYDSAIEGYVPLQHGAETVGNRGGLVRTASLDQSTQDLHKKVISTLLRPKTWTPPANRDFFLSYLEVKHLCDEVEKIFMNEPTLLQLKVPIKVFGDIHGQYGDLMRLFHEYGHPSVEGDITHIDYLFLGDYVDRGQHSLEIIMLLFALKIEYPKNIHLIRGNHESLAMNRIYGFLTECEERMGESYGFEAWLKINQVFDYLPLAALLEKKVLCVHGGIGRAVTIEEIENIERPAFPDTGSMVLKDILWSDPTMNDTVLGIVDNARGEGVVSFGPDIVKAFLERNGLEMILRAHECVIDGFERFADGRLITVFSATNYCGTAQNAGAILVIGRDMVIYPKLIHPHPPPISSSEEDYTDKAWMQELNIEMPPTPARGESSE

SEQ ID NO: 80692 - DNA, 1188 bp, Arabidopsis thaliana
  misc_feature (1)..(1188): Ceres Seq. ID no. 12656845
  misc_feature: MA Experiment ID: 20000179 Result: Down-regulated in Transcription
  misc_feature: MA Experiment 20000179 PARAMETER Experiment Name: At_Germinating_Seeds_P Parameter: Age (hr) Value: 6 vs. 0
  misc_feature: MA Experiment 20000179 PARAMETER Experiment Name: At_Germinating_Seeds_P Parameter: Tissue Value: Germinating Seeds
  misc_feature: MA Experiment ID: 20000180 Result: Down-regulated in Transcription
  misc_feature: MA Experiment 20000180 PARAMETER Experiment Name: At_Germinating_Seeds_P Parameter: Age (hr) Value: 24 vs. 0
  misc_feature: MA Experiment 20000180 PARAMETER Experiment Name: At_Germinating_Seeds_P Parameter: Tissue Value: Germinating Seeds
  misc_feature: MA Experiment ID: 20000184 Result: Up-regulated in Transcription
  misc_feature: MA Experiment 20000184 PARAMETER Experiment Name: At_Shoots__P Parameter: Age (day) Value: 7
  misc_feature: MA Experiment 20000184 PARAMETER Experiment Name: At_Shoots__P Parameter: Tissue Value: Shoots vs. Whole Plant
  misc_feature: MA Experiment ID: 20000437 Result: Down-regulated in Transcription
  misc_feature: MA Experiment 20000437 PARAMETER Experiment Name: At_Drought_P Parameter: Age (day) Value: 8
  misc_feature: MA Experiment 20000437 PARAMETER Experiment Name: At_Drought_P Parameter: Organism Value: A. thaliana
  misc_feature: MA Experiment 20000437 PARAMETER Experiment Name: At_Drought_P Parameter: Plant Line Value: WS
  misc_feature: MA Experiment 20000437 PARAMETER Experiment Name: At_Drought_P Parameter: Timepoint (hr) Value: 24
  misc_feature: MA Experiment 20000437 PARAMETER Experiment Name: At_Drought_P Parameter: Tissue Value: Whole Plant
  misc_feature: MA Experiment 20000437 PARAMETER Experiment Name: At_Drought_P Parameter: Treatment Value: Drought vs. No Drought
  misc_feature: MA Experiment ID: 20000438 Result: Up-regulated in Transcription
  misc_feature: MA Experiment 20000438 PARAMETER Experiment Name: At_Shoots__P Parameter: Age (day) Value: 14
  misc_feature: MA Experiment 20000438 PARAMETER Experiment Name: At_Shoots__P Parameter: Tissue Value: Shoots vs. Whole Plant
  misc_feature: MA Experiment ID: 20001248 Result: Down-regulated in Transcription
  misc_feature: MA Experiment 20001248 PARAMETER Experiment Name: At_Far-red-induction_P Parameter: Age (day) Value: 7
  misc_feature: MA Experiment 20001248 PARAMETER Experiment Name: At_Far-red-induction_P Parameter: Light Value: Far-red vs. White
  misc_feature: MA Experiment 20001248 PARAMETER Experiment Name: At_Far-red-induction_P Parameter: Organism Value: A. thaliana
  misc_feature: MA Experiment 20001248 PARAMETER Experiment Name: At_Far-red-induction_P Parameter: Plant Line Value: Columbia
  misc_feature: MA Experiment 20001248 PARAMETER Experiment Name: At_Far-red-induction_P Parameter: Timepoint (hr) Value: 4
  misc_feature: MA Experiment 20001248 PARAMETER Experiment Name: At_Far-red-induction_P Parameter: Tissue Value: Whole Plant
atgagatttaccaagttggtttggtgtttgatgttcctgcttcgattcggcttcttcacggaggcgattctcgacccagttgatttcttggctctgcaagctattcgtaaatccctcgatgacttgccaggttccaagttcttcgagtcttgggatttcacttctgatccatgcggcttcgctggcgtctactgcaacggagataaagtaatctctctcaatctcggcgatcctagagccggttcacccggtttatcgggtcggatcgacccagcaataggcaaactctctgcactcactgagctctccattgtccccggcagaatcatgggtgcgttaccggcaacaatctctcagctaaaagaccttcgttttctcgcaatcagccggaatttcatctccggcgagattccggcgagtctcggcgaggttcgtggtctcagaacactggatttaagctataatcaattaaccggaactatctctccgtcaatcggatcgttaccggagctctccaatttgattctctgccacaaccacttaaccggatcaataccaccgtttctctcacaaactctaacccgaatcgatctcaaacgcaacagcctcaccggctcaatctcaccggcgtctctccctccgtcgcttcaatacctctcactcgcttggaaccagttaaccggatcggtataccatgttttactccggttgaaccagcttaactaccttgatctcagcttaaaccggttcaccggtacaatccccgctcgagtcttcgccttcccgatcacaaatcttcagttacaacgcaatttcttcttcggtttaattcagccggcgaatcaagtgacgatctccaccgtcgatctcagctacaatcgattctccggtgggatatctccgcttctctcaagcgttgagaatctctacttaaacagcaatcgtttcaccggtgaagtcccggcgagtttcgtggagaggttgttatcggcgaacatacagactctgtatctacagcataatttcttgacgggaatacagattagcccggcggcggaaatcccggtgagcagctcgctgtgtctgcagtataactgtatggtgccgccgttacaaaccccgtgtccgctaaaggccggcccacaaaagactaggcccactacacaatgcaccgagtggcgagggtag

SEQ ID NO: 80693 - protein, 395 aa, Arabidopsis thaliana
  peptide (1)..(395): Ceres Seq. ID no. 12656846
  misc_feature (239)..(262): Pfam Name: Leucine Rich Repeat Pfam Description: Leucine Rich Repeat
  misc_feature (1)..(395): Homolog of NCBI NO: 25406734 NR Description: protein F21B7.6 [imported] - Arabidopsis thaliana F21B7.6 [Arabidopsis thaliana]
  misc_feature (1)..(395): Homolog of NCBI NO: 30678566 NR Description: leucine rich repeat protein family [Arabidopsis
  misc_feature (1)..(395): Homolog of NCBI NO: 15236232 NR Description: leucine rich repeat protein family; protein id:
  misc_feature (11)..(393): Homolog of NCBI NO: 15229088 NR Description: leucine rich repeat protein family; protein id:
  misc_feature (7)..(391): Homolog of NCBI NO: 15231699 NR Description: leucine rich repeat protein family; protein id:
  misc_feature (31)..(371): Homolog of NCBI NO: 15241760 NR Description: putative protein; protein id: At5g62230.1
  misc_feature (32)..(350): Homolog of NCBI NO: 15225286 NR Description: putative receptor-like protein kinase, ERECTA; id: At2g26330.1, supported by cDNA: gi_1345131, supported by
  misc_feature (31)..(345): Homolog of NCBI NO: 8809636 NR Description: receptor-like protein kinase [Arabidopsis
  misc_feature (85)..(345): Homolog of NCBI NO: 3894385 NR Description: Hcr2-0A [Lycopersicon esculentum]
  misc_feature (10)..(295): Homolog of NCBI NO: 15217600 NR Description: leucine rich repeat protein family; protein id: [Arabidopsis thaliana] >gi|25511729|pir||A86460 99.9K
MRFTKLVWCLMFLLRFGFFTEAILDPVDFLALQAIRKSLDDLPGSKFFESWDFTSDPCGFAGVYCNGDKVISLNLGDPRAGSPGLSGRIDPAIGKLSALTELSIVPGRIMGALPATISQLKDLRFLAISRNFISGEIPASLGEVRGLRTLDLSYNQLTGTISPSIGSLPELSNLILCHNHLTGSIPPFLSQTLTRIDLKRNSLTGSISPASLPPSLQYLSLAWNQLTGSVYHVLLRLNQLNYLDLSLNRFTGTIPARVFAFPITNLQLQRNFFFGLIQPANQVTISTVDLSYNRFSGGISPLLSSVENLYLNSNRFTGEVPASFVERLLSANIQTLYLQHNFLTGIQISPAAEIPVSSSLCLQYNCMVPPLQTPCPLKAGPQKTRPTTQCTEWRG

SEQ ID NO: 80694 - protein, 385 aa, Arabidopsis thaliana
  peptide (1)..(385): Ceres Seq. ID no. 12656847
  misc_feature (229)..(252): Pfam Name: Leucine Rich Repeat Pfam Description: Leucine Rich Repeat
  misc_feature (1)..(385): Homolog of NCBI NO: 25406734 NR Description: protein F21B7.6 [imported] - Arabidopsis thaliana F21B7.6 [Arabidopsis thaliana]
  misc_feature (1)..(385): Homolog of NCBI NO: 30678566 NR Description: leucine rich repeat protein family [Arabidopsis
  misc_feature (1)..(385): Homolog of NCBI NO: 15236232 NR Description: leucine rich repeat protein family; protein id:
  misc_feature (1)..(383): Homolog of NCBI NO: 15229088 NR Description: leucine rich repeat protein family; protein id:
  misc_feature (1)..(381): Homolog of NCBI NO: 15231699 NR Description: leucine rich repeat protein family; protein id:
  misc_feature (21)..(361): Homolog of NCBI NO: 15241760 NR Description: putative protein; protein id: At5g62230.1
  misc_feature (22)..(340): Homolog of NCBI NO: 15225286 NR Description: putative receptor-like protein kinase, ERECTA; id: At2g26330.1, supported by cDNA: gi_1345131, supported by
  misc_feature (21)..(335): Homolog of NCBI NO: 8809636 NR Description: receptor-like protein kinase [Arabidopsis
  misc_feature (75)..(335): Homolog of NCBI NO: 3894385 NR Description: Hcr2-0A [Lycopersicon esculentum]
  misc_feature (1)..(285): Homolog of NCBI NO: 15217600 NR Description: leucine rich repeat protein family; protein id: [Arabidopsis thaliana] >gi|25511729|pir||A86460 99.9K
MFLLRFGFFTEAILDPVDFLALQAIRKSLDDLPGSKFFESWDFTSDPCGFAGVYCNGDKVISLNLGDPRAGSPGLSGRIDPAIGKLSALTELSIVPGRIMGALPATISQLKDLRFLAISRNFISGEIPASLGEVRGLRTLDLSYNQLTGTISPSIGSLPELSNLILCHNHLTGSIPPFLSQTLTRIDLKRNSLTGSISPASLPPSLQYLSLAWNQLTGSVYHVLLRLNQLNYLDLSLNRFTGTIPARVFAFPITNLQLQRNFFFGLIQPANQVTISTVDLSYNRFSGGISPLLSSVENLYLNSNRFTGEVPASFVERLLSANIQTLYLQHNFLTGIQISPAAEIPVSSSLCLQYNCMVPPLQTPCPLKAGPQKTRPTTQCTEWRG

SEQ ID NO: 80695 - protein, 286 aa, Arabidopsis thaliana
  peptide (1)..(286): Ceres Seq. ID no. 12656848
  misc_feature (130)..(153): Pfam Name: Leucine Rich Repeat Pfam Description: Leucine Rich Repeat
  misc_feature (1)..(286): Homolog of NCBI NO: 25406734 NR Description: protein F21B7.6 [imported] - Arabidopsis thaliana F21B7.6 [Arabidopsis thaliana]
  misc_feature (1)..(286): Homolog of NCBI NO: 30678566 NR Description: leucine rich repeat protein family [Arabidopsis
  misc_feature (1)..(286): Homolog of NCBI NO: 15236232 NR Description: leucine rich repeat protein family; protein id:
  misc_feature (1)..(284): Homolog of NCBI NO: 15229088 NR Description: leucine rich repeat protein family; protein id:
  misc_feature (1)..(282): Homolog of NCBI NO: 15231699 NR Description: leucine rich repeat protein family; protein id:
  misc_feature (1)..(262): Homolog of NCBI NO: 15241760 NR Description: putative protein; protein id: At5g62230.1
  misc_feature (1)..(241): Homolog of NCBI NO: 15225286 NR Description: putative receptor-like protein kinase, ERECTA; id: At2g26330.1, supported by cDNA: gi_1345131, supported by
  misc_feature (1)..(236): Homolog of NCBI NO: 8809636 NR Description: receptor-like protein kinase [Arabidopsis
  misc_feature (1)..(236): Homolog of NCBI NO: 3894385 NR Description: Hcr2-0A [Lycopersicon esculentum]
  misc_feature (1)..(186): Homolog of NCBI NO: 15217600 NR Description: leucine rich repeat protein family; protein id: [Arabidopsis thaliana] >gi|25511729|pir||A86460 99.9K
MGALPATISQLKDLRFLAISRNFISGEIPASLGEVRGLRTLDLSYNQLTGTISPSIGSLPELSNLILCHNHLTGSIPPFLSQTLTRIDLKRNSLTGSISPASLPPSLQYLSLAWNQLTGSVYHVLLRLNQLNYLDLSLNRFTGTIPARVFAFPITNLQLQRNFFFGLIQPANQVTISTVDLSYNRFSGGISPLLSSVENLYLNSNRFTGEVPASFVERLLSANIQTLYLQHNFLTGIQISPAAEIPVSSSLCLQYNCMVPPLQTPCPLKAGPQKTRPTTQCTEWRG

SEQ ID NO: 80696 - DNA, 1698 bp, Arabidopsis thaliana
  misc_feature (1)..(1698): Ceres Seq. ID no. 12656853
  misc_feature: MA Experiment ID: 20000171 Result: Down-regulated in Transcription
  misc_feature: MA Experiment 20000171 PARAMETER Experiment Name: At_42deg_Heat_P Parameter: Age (day) Value: 14
  misc_feature: MA Experiment 20000171 PARAMETER Experiment Name: At_42deg_Heat_P Parameter: Organism Value: A. thaliana
  misc_feature: MA Experiment 20000171 PARAMETER Experiment Name: At_42deg_Heat_P Parameter: Plant Line Value: WS
  misc_feature: MA Experiment 20000171 PARAMETER Experiment Name: At_42deg_Heat_P Parameter: Temperature (deg C) Value: 42 vs. 22
  misc_feature: MA Experiment 20000171 PARAMETER Experiment Name: At_42deg_Heat_P Parameter: Timepoint (hr) Value: 1
  misc_feature: MA Experiment 20000171 PARAMETER Experiment Name: At_42deg_Heat_P Parameter: Tissue Value: Aerial
  misc_feature: MA Experiment ID: 20000173 Result: Down-regulated in Transcription
  misc_feature: MA Experiment 20000173 PARAMETER Experiment Name: At_42deg_Heat_P Parameter: Age (day) Value: 14
  misc_feature: MA Experiment 20000173 PARAMETER Experiment Name: At_42deg_Heat_P Parameter: Organism Value: A. thaliana
  misc_feature: MA Experiment 20000173 PARAMETER Experiment Name: At_42deg_Heat_P Parameter: Plant Line Value: WS
  misc_feature: MA Experiment 20000173 PARAMETER Experiment Name: At_42deg_Heat_P Parameter: Temperature (deg C) Value: 42 vs. 22
  misc_feature: MA Experiment 20000173 PARAMETER Experiment Name: At_42deg_Heat_P Parameter: Timepoint (hr) Value: 6
  misc_feature: MA Experiment 20000173 PARAMETER Experiment Name: At_42deg_Heat_P Parameter: Tissue Value: Aerial
  misc_feature: MA Experiment ID: 20000437 Result: Up-regulated in Transcription
  misc_feature: MA Experiment 20000437 PARAMETER Experiment Name: At_Drought_P Parameter: Age (day) Value: 8
  misc_feature: MA Experiment 20000437 PARAMETER Experiment Name: At_Drought_P Parameter: Organism Value: A. thaliana
  misc_feature: MA Experiment 20000437 PARAMETER Experiment Name: At_Drought_P Parameter: Plant Line Value: WS
  misc_feature: MA Experiment 20000437 PARAMETER Experiment Name: At_Drought_P Parameter: Timepoint (hr) Value: 24
  misc_feature: MA Experiment 20000437 PARAMETER Experiment Name: At_Drought_P Parameter: Tissue Value: Whole Plant
  misc_feature: MA Experiment 20000437 PARAMETER Experiment Name: At_Drought_P Parameter: Treatment Value: Drought vs. No Drought
  misc_feature: MA Experiment ID: 20000495 Result: Up-regulated in Transcription
  misc_feature: MA Experiment 20000495 PARAMETER Experiment Name: At_Guard_Cells_P Parameter: Harvest Date Value: 8/2/2002
  misc_feature: MA Experiment 20000495 PARAMETER Experiment Name: At_Guard_Cells_P Parameter: Organism Value: A. thaliana
  misc_feature: MA Experiment 20000495 PARAMETER Experiment Name: At_Guard_Cells_P Parameter: Tissue Value: Guard Cells vs. Leaves
  misc_feature: MA Experiment ID: 20000794 Result: Up-regulated in Transcription
  misc_feature: MA Experiment 20000794 PARAMETER Experiment Name: At_Petals_P Parameter: Age (day) Value: 23-25 days
  misc_feature: MA Experiment 20000794 PARAMETER Experiment Name: At_Petals_P Parameter: Plant Line Value: WS
  misc_feature: MA Experiment 20000794 PARAMETER Experiment Name: At_Petals_P Parameter: Tissue Value: Petals vs. Whole plant
  misc_feature: MA Experiment ID: 20001247 Result: Up-regulated in Transcription
  misc_feature: MA Experiment 20001247 PARAMETER Experiment Name: At_Far-red-induction_P Parameter: Age (day) Value: 7
  misc_feature: MA Experiment 20001247 PARAMETER Experiment Name: At_Far-red-induction_P Parameter: Light Value: Far-red vs. White
  misc_feature: MA Experiment 20001247 PARAMETER Experiment Name: At_Far-red-induction_P Parameter: Organism Value: A. thaliana
  misc_feature: MA Experiment 20001247 PARAMETER Experiment Name: At_Far-red-induction_P Parameter: Plant Line Value: Columbia
  misc_feature: MA Experiment 20001247 PARAMETER Experiment Name: At_Far-red-induction_P Parameter: Timepoint (hr) Value: 1
  misc_feature: MA Experiment 20001247 PARAMETER Experiment Name: At_Far-red-induction_P Parameter: Tissue Value: Whole Plant
  misc_feature: MA Experiment ID: 20001248 Result: Up-regulated in Transcription
  misc_feature: MA Experiment 20001248 PARAMETER Experiment Name: At_Far-red-induction_P Parameter: Age (day) Value: 7
  misc_feature: MA Experiment 20001248 PARAMETER Experiment Name: At_Far-red-induction_P Parameter: Light Value: Far-red vs. White
  misc_feature: MA Experiment 20001248 PARAMETER Experiment Name: At_Far-red-induction_P Parameter: Organism Value: A. thaliana
  misc_feature: MA Experiment 20001248 PARAMETER Experiment Name: At_Far-red-induction_P Parameter: Plant Line Value: Columbia
  misc_feature: MA Experiment 20001248 PARAMETER Experiment Name: At_Far-red-induction_P Parameter: Timepoint (hr) Value: 4
  misc_feature: MA Experiment 20001248 PARAMETER Experiment Name: At_Far-red-induction_P Parameter: Tissue Value: Whole Plant
  misc_feature: MA Experiment ID: 20001450 Result: Up-regulated in Transcription
  misc_feature: MA Experiment 20001450 PARAMETER Experiment Name: At_Far-red-induction_P Parameter: Age (day) Value: 7
  misc_feature: MA Experiment 20001450 PARAMETER Experiment Name: At_Far-red-induction_P Parameter: Light Value: Far-red vs. White
  misc_feature: MA Experiment 20001450 PARAMETER Experiment Name: At_Far-red-induction_P Parameter: Organism Value: A. thaliana
  misc_feature: MA Experiment 20001450 PARAMETER Experiment Name: At_Far-red-induction_P Parameter: Plant Line Value: Columbia
  misc_feature: MA Experiment 20001450 PARAMETER Experiment Name: At_Far-red-induction_P Parameter: Timepoint (hr) Value: 8
  misc_feature: MA Experiment 20001450 PARAMETER Experiment Name: At_Far-red-induction_P Parameter: Tissue Value: Whole Plant
  misc_feature: MA Experiment ID: 20001451 Result: Up-regulated in Transcription
  misc_feature: MA Experiment 20001451 PARAMETER Experiment Name: At_Far-red-induction_P Parameter: Age (day) Value: 7
  misc_feature: MA Experiment 20001451 PARAMETER Experiment Name: At_Far-red-induction_P Parameter: Light Value: Far-red vs. White
  misc_feature: MA Experiment 20001451 PARAMETER Experiment Name: At_Far-red-induction_P Parameter: Organism Value: A. thaliana
  misc_feature: MA Experiment 20001451 PARAMETER Experiment Name: At_Far-red-induction_P Parameter: Plant Line Value: Columbia
  misc_feature: MA Experiment 20001451 PARAMETER Experiment Name: At_Far-red-induction_P Parameter: Timepoint (hr) Value: 24
  misc_feature: MA Experiment 20001451 PARAMETER Experiment Name: At_Far-red-induction_P Parameter: Tissue Value: Whole Plant
gctttcgcctttggattgttgattccctagtggatgttctttatctctttaaaaaggtcctctcttttaaatcaatttttgctgaacttgcccaattcggaaactttgttgcaagtctcctcttggtctctggtaatcgttttcgcatcaatccttatattgatttgaatctgtaatcagattcgatctttgatgctaatttggtattctatagaagacaacatatctgaattgggtttcttcgttggataggataagtggttagggaatgagaaaattgtataggaagctggtttcattcagagacccatttgctagggtcaagagacatgttagttcacattcagggtttagagctttcagcgacagaaaatggttgttcccttttctagctagcttgatcatgtccattactcttctgattttgttaatttctggccaattcgacaacttctttggggaagaagatcaattaccagttgatgttgtttcagagtctaatgactactttgtagaatcagatttcaagcaatctatgaattcgacggctgatgttaatccagagcctcctagattagcttatttaatatcgggaacaaaaggcgatagtcataggatgatgaggactttacaagctgtgtaccatcctagaaaccagtatgttctgcatttggatcttgaggctccacctcgagaacggatggagctggccatgtccgtgaagactgatccgactttccgtgaaatggagaatgttcgtgtgatggctcagtctaatcttgttacttataaaggccctacaatgattgcttgtactcttcaagccgtttcaatcttgctaagagaaagcttacattgggattggtttcttaaccttagtgcctcggattatcctctagtaacacaagatgatttgttgtatgtcttctcaaatctgtctcggaatgtcaatttcatcgagaatatgcagctcaccggatggaaactgaatcagagggctaaatcaatcattgttgatcctgccctatacctatcgaagaaatccgatatcgcttggactactcaacggcgatcacttccaaattctttcaggctattcactggctcagcttggataatgttgactcggtctttcctcgagtactgcatttggggatgggataatttcccaagaacaatactaatgtactacacaaatttcgtatcttctcctgaaggatacttccacacagtaatctgcaacagcaaagagtttatcaacactgcaatcggtcacgaccttcactacattgcttgggacagtcctccaaagcaacaccctagatctctctcgttgaaggattttgacaatatggtcaagagcaaagctccatttgcacgcaagttccacaaaaacgatcctgcgttagacaagatcgataaagagctattgggacggacacaccggtttgcaccaggaggatggtgtgtcgggagttcagctaatggcaatgatcagtgctctgtgcaaggtgacgactcggtgttgaaaccaggacctggttctgagaggttgcaggagcttgttcaaacactttcctctgaagaatttaggcgaaaacagtgttcttgaagttatctactgatgacgcaaaatataacgttgtacagtatattgttttgtttgattataaatttttggttatagaaatttcttcg

SEQ ID NO: 80697 - protein, 447 aa, Arabidopsis thaliana
  peptide (1)..(447): Ceres Seq. ID no. 12656854
  misc_feature (103)..(328): Pfam Name: Core-2/I-Branching enzyme Pfam Description: Core-2/I-Branching enzyme
  misc_feature (1)..(447): Homolog of NCBI NO: 15218824 NR Description: N-acetylglucosaminyltransferase family enzyme family); protein id: At1g03520.1, supported by cDNA: supported by cDNA: gi_20465790 [Arabidopsis thaliana] thaliana
  misc_feature (1)..(447): Homolog of NCBI NO: 15236287 NR Description: N-acetylglucosaminyltransferase family
  misc_feature (33)..(446): Homolog of NCBI NO: 15242199 NR Description: N-acetylglucosaminyltransferase family enzyme family); protein id: At5g15050.1, supported by cDNA: supported by cDNA: gi_16209673 [Arabidopsis thaliana]
  misc_feature (21)..(446): Homolog of NCBI NO: 15242532 NR Description: N-acetylglucosaminyltransferase family
  misc_feature (32)..(446): Homolog of NCBI NO: 30687610 NR Description: N-acetylglucosaminyltransferase family
  misc_feature (71)..(446): Homolog of NCBI NO: 7486258 NR Description: hypothetical protein F27G19.80 - Arabidopsis >gi|4972073|emb|CAB43880.1| putative protein [Arabidopsis >gi|7269602|emb|CAB81398.1| putative protein [Arabidopsis
  misc_feature (33)..(439): Homolog of NCBI NO: 15146308 NR Description: AT3g15350/K7L4_15 [Arabidopsis thaliana]
  misc_feature (33)..(439): Homolog of NCBI NO: 18400725 NR Description: N-acetylglucosaminyltransferase family enzyme family); protein id: At3g15350.1, supported by cDNA:
  misc_feature (33)..(446): Homolog of NCBI NO: 15219202 NR Description: N-acetylglucosaminyltransferase family
  misc_feature (98)..(446): Homolog of NCBI NO: 34903664 NR Description: B1015E06.17 [Oryza sativa (japonica
MRKLYRKLVSFRDPFARVKRHVSSHSGFRAFSDRKWLFPFLASLIMSITLLILLISGQFDNFFGEEDQLPVDVVSESNDYFVESDFKQSMNSTADVNPEPPRLAYLISGTKGDSHRMMRTLQAVYHPRNQYVLHLDLEAPPRERMELAMSVKTDPTFREMENVRVMAQSNLVTYKGPTMIACTLQAVSILLRESLHWDWFLNLSASDYPLVTQDDLLYVFSNLSRNVNFIENMQLTGWKLNQRAKSIIVDPALYLSKKSDIAWTTQRRSLPNSFRLFTGSAWIMLTRSFLEYCIWGWDNFPRTILMYYTNFVSSPEGYFHTVICNSKEFINTAIGHDLHYIAWDSPPKQHPRSLSLKDFDNMVKSKAPFARKFHKNDPALDKIDKELLGRTHRFAPGGWCVGSSANGNDQCSVQGDDSVLKPGPGSERLQELVQTLSSEEFRRKQCS

SEQ ID NO: 80698 - protein, 402 aa, Arabidopsis thaliana
  peptide (1)..(402): Ceres Seq. ID no. 12656855
  misc_feature (58)..(283): Pfam Name: Core-2/I-Branching enzyme Pfam Description: Core-2/I-Branching enzyme
  misc_feature (1)..(402): Homolog of NCBI NO: 15218824 NR Description: N-acetylglucosaminyltransferase family enzyme family); protein id: At1g03520.1, supported by cDNA: supported by cDNA: gi_20465790 [Arabidopsis thaliana] thaliana
  misc_feature (1)..(402): Homolog of NCBI NO: 15236287 NR Description: N-acetylglucosaminyltransferase family
  misc_feature (1)..(401): Homolog of NCBI NO: 15242199 NR Description: N-acetylglucosaminyltransferase family enzyme family); protein id: At5g15050.1, supported by cDNA: supported by cDNA: gi_16209673 [Arabidopsis thaliana]
  misc_feature (1)..(401): Homolog of NCBI NO: 15242532 NR Description: N-acetylglucosaminyltransferase family
  misc_feature (1)..(401): Homolog of NCBI NO: 30687610 NR Description: N-acetylglucosaminyltransferase family
  misc_feature (26)..(401): Homolog of NCBI NO: 7486258 NR Description: hypothetical protein F27G19.80 - Arabidopsis >gi|4972073|emb|CAB43880.1| putative protein [Arabidopsis >gi|7269602|emb|CAB81398.1| putative protein [Arabidopsis
  misc_feature (1)..(394): Homolog of NCBI NO: 15146308 NR Description: AT3g15350/K7L4_15 [Arabidopsis thaliana]
  misc_feature (1)..(394): Homolog of NCBI NO: 18400725 NR Description: N-acetylglucosaminyltransferase family enzyme family); protein id: At3g15350.1, supported by cDNA:
  misc_feature (1)..(401): Homolog of NCBI NO: 15219202 NR Description: N-acetylglucosaminyltransferase family
  misc_feature (53)..(401): Homolog of NCBI NO: 34903664 NR Description: B1015E06.17 [Oryza sativa (japonica
MSITLLILLISGQFDNFFGEEDQLPVDVVSESNDYFVESDFKQSMNSTADVNPEPPRLAYLISGTKGDSHRMMRTLQAVYHPRNQYVLHLDLEAPPRERMELAMSVKTDPTFREMENVRVMAQSNLVTYKGPTMIACTLQAVSILLRESLHWDWFLNLSASDYPLVTQDDLLYVFSNLSRNVNFIENMQLTGWKLNQRAKSIIVDPALYLSKKSDIAWTTQRRSLPNSFRLFTGSAWIMLTRSFLEYCIWGWDNFPRTILMYYTNFVSSPEGYFHTVICNSKEFINTAIGHDLHYIAWDSPPKQHPRSLSLKDFDNMVKSKAPFARKFHKNDPALDKIDKELLGRTHRFAPGGWCVGSSANGNDQCSVQGDDSVLKPGPGSERLQELVQTLSSEEFRRKQCS

SEQ ID NO: 80699 - protein, 358 aa, Arabidopsis thaliana
  peptide (1)..(358): Ceres Seq. ID no. 12656856
  misc_feature (14)..(239): Pfam Name: Core-2/I-Branching enzyme Pfam Description: Core-2/I-Branching enzyme
  misc_feature (1)..(358): Homolog of NCBI NO: 15218824 NR Description: N-acetylglucosaminyltransferase family enzyme family); protein id: At1g03520.1, supported by cDNA: supported by cDNA: gi_20465790 [Arabidopsis thaliana] thaliana
  misc_feature (1)..(358): Homolog of NCBI NO: 15236287 NR Description: N-acetylglucosaminyltransferase family
  misc_feature (1)..(357): Homolog of NCBI NO: 15242199 NR Description: N-acetylglucosaminyltransferase family enzyme family); protein id: At5g15050.1, supported by cDNA: supported by cDNA: gi_16209673 [Arabidopsis thaliana]
  misc_feature (1)..(357): Homolog of NCBI NO: 15242532 NR Description: N-acetylglucosaminyltransferase family
  misc_feature (1)..(357): Homolog of NCBI NO: 30687610 NR Description: N-acetylglucosaminyltransferase family
  misc_feature (1)..(357): Homolog of NCBI NO: 7486258 NR Description: hypothetical protein F27G19.80 - Arabidopsis >gi|4972073|emb|CAB43880.1| putative protein [Arabidopsis >gi|7269602|emb|CAB81398.1| putative protein [Arabidopsis
  misc_feature (1)..(350): Homolog of NCBI NO: 15146308 NR Description: AT3g15350/K7L4_15 [Arabidopsis thaliana]
  misc_feature (1)..(350): Homolog of NCBI NO: 18400725 NR Description: N-acetylglucosaminyltransferase family enzyme family); protein id: At3g15350.1, supported by cDNA:
  misc_feature (1)..(357): Homolog of NCBI NO: 15219202 NR Description: N-acetylglucosaminyltransferase family
  misc_feature (9)..(357): Homolog of NCBI NO: 34903664 NR Description: B1015E06.17 [Oryza sativa (japonica
MNSTADVNPEPPRLAYLISGTKGDSHRMMRTLQAVYHPRNQYVLHLDLEAPPRERMELAMSVKTDPTFREMENVRVMAQSNLVTYKGPTMIACTLQAVSILLRESLHWDWFLNLSASDYPLVTQDDLLYVFSNLSRNVNFIENMQLTGWKLNQRAKSIIVDPALYLSKKSDIAWTTQRRSLPNSFRLFTGSAWIMLTRSFLEYCIWGWDNFPRTILMYYTNFVSSPEGYFHTVICNSKEFINTAIGHDLHYIAWDSPPKQHPRSLSLKDFDNMVKSKAPFARKFHKNDPALDKIDKELLGRTHRFAPGGWCVGSSANGNDQCSVQGDDSVLKPGPGSERLQELVQTLSSEEFRRKQCS

SEQ ID NO: 80700 - DNA, 2746 bp, Arabidopsis thaliana
  misc_feature (1)..(2746): Ceres Seq. ID no. 12656869
  misc_feature: MA Experiment ID: 20000171 Result: Down-regulated in Transcription
  misc_feature: MA Experiment 20000171 PARAMETER Experiment Name: At_42deg_Heat_P Parameter: Age (day) Value: 14
  misc_feature: MA Experiment 20000171 PARAMETER Experiment Name: At_42deg_Heat_P Parameter: Organism Value: A. thaliana
  misc_feature: MA Experiment 20000171 PARAMETER Experiment Name: At_42deg_Heat_P Parameter: Plant Line Value: WS
  misc_feature: MA Experiment 20000171 PARAMETER Experiment Name: At_42deg_Heat_P Parameter: Temperature (deg C) Value: 42 vs. 22
  misc_feature: MA Experiment 20000171 PARAMETER Experiment Name: At_42deg_Heat_P Parameter: Timepoint (hr) Value: 1
  misc_feature: MA Experiment 20000171 PARAMETER Experiment Name: At_42deg_Heat_P Parameter: Tissue Value: Aerial
  misc_feature: MA Experiment ID: 20000173 Result: Down-regulated in Transcription
  misc_feature: MA Experiment 20000173 PARAMETER Experiment Name: At_42deg_Heat_P Parameter: Age (day) Value: 14
  misc_feature: MA Experiment 20000173 PARAMETER Experiment Name: At_42deg_Heat_P Parameter: Organism Value: A. thaliana
  misc_feature: MA Experiment 20000173 PARAMETER Experiment Name: At_42deg_Heat_P Parameter: Plant Line Value: WS
  misc_feature: MA Experiment 20000173 PARAMETER Experiment Name: At_42deg_Heat_P Parameter: Temperature (deg C) Value: 42 vs. 22
  misc_feature: MA Experiment 20000173 PARAMETER Experiment Name: At_42deg_Heat_P Parameter: Timepoint (hr) Value: 6
  misc_feature: MA Experiment 20000173 PARAMETER Experiment Name: At_42deg_Heat_P Parameter: Tissue Value: Aerial
  misc_feature: MA Experiment ID: 20000184 Result: Down-regulated in Transcription
  misc_feature: MA Experiment 20000184 PARAMETER Experiment Name: At_Shoots__P Parameter: Age (day) Value: 7
  misc_feature: MA Experiment 20000184 PARAMETER Experiment Name: At_Shoots__P Parameter: Tissue Value: Shoots vs. Whole Plant
  misc_feature: MA Experiment ID: 20000234 Result: Down-regulated in Transcription
  misc_feature: MA Experiment 20000234 PARAMETER Experiment Name: At_Siliques_P Parameter: Age (day) Value: 21
  misc_feature: MA Experiment 20000234 PARAMETER Experiment Name: At_Siliques_P Parameter: Organism Value: A. thaliana
  misc_feature: MA Experiment 20000234 PARAMETER Experiment Name: At_Siliques_P Parameter: Plant Line Value: WS
  misc_feature: MA Experiment 20000234 PARAMETER Experiment Name: At_Siliques_P Parameter: Tissue Value: Less Than 5mm Siliques vs. Whole Plant
  misc_feature: MA Experiment ID: 20000264 Result: Down-regulated in Transcription
  misc_feature: MA Experiment 20000264 PARAMETER Experiment Name: At_Open_Flower_P Parameter: Age (day) Value: 21
  misc_feature: MA Experiment 20000264 PARAMETER Experiment Name: At_Open_Flower_P Parameter: Plant Line Value: WS
  misc_feature: MA Experiment 20000264 PARAMETER Experiment Name: At_Open_Flower_P Parameter: Tissue Value: Open Flower vs. Whole Plant
  misc_feature: MA Experiment ID: 20000265 Result: Down-regulated in Transcription
  misc_feature: MA Experiment 20000265 PARAMETER Experiment Name: At_Open_Flower_P Parameter: Age (day) Value: 21
  misc_feature: MA Experiment 20000265 PARAMETER Experiment Name: At_Open_Flower_P Parameter: Plant Line Value: WS
  misc_feature: MA Experiment 20000265 PARAMETER Experiment Name: At_Open_Flower_P Parameter: Tissue Value: Closed Flower vs. Whole Plant
  misc_feature: MA Experiment ID: 20000286 Result: Down-regulated in Transcription
  misc_feature: MA Experiment 20000286 PARAMETER Experiment Name: At_Open_Flower_P Parameter: Age (day) Value: 21
  misc_feature: MA Experiment 20000286 PARAMETER Experiment Name: At_Open_Flower_P Parameter: Plant Line Value: WS
  misc_feature: MA Experiment 20000286 PARAMETER Experiment Name: At_Open_Flower_P Parameter: Tissue Value: Half Open vs. Whole Plant
  misc_feature: MA Experiment ID: 20000438 Result: Down-regulated in Transcription
  misc_feature: MA Experiment 20000438 PARAMETER Experiment Name: At_Shoots__P Parameter: Age (day) Value: 14
  misc_feature: MA Experiment 20000438 PARAMETER Experiment Name: At_Shoots__P Parameter: Tissue Value: Shoots vs. Whole Plant
  misc_feature: MA Experiment ID: 20001248 Result: Up-regulated in Transcription
  misc_feature: MA Experiment 20001248 PARAMETER Experiment Name: At_Far-red-induction_P Parameter: Age (day) Value: 7
  misc_feature: MA Experiment 20001248 PARAMETER Experiment Name: At_Far-red-induction_P Parameter: Light Value: Far-red vs. White
  misc_feature: MA Experiment 20001248 PARAMETER Experiment Name: At_Far-red-induction_P Parameter: Organism Value: A. thaliana
  misc_feature: MA Experiment 20001248 PARAMETER Experiment Name: At_Far-red-induction_P Parameter: Plant Line Value: Columbia
  misc_feature: MA Experiment 20001248 PARAMETER Experiment Name: At_Far-red-induction_P Parameter: Timepoint (hr) Value: 4
  misc_feature: MA Experiment 20001248 PARAMETER Experiment Name: At_Far-red-induction_P Parameter: Tissue Value: Whole Plant
  misc_feature: MA Experiment ID: 20001555 Result: Down-regulated in Transcription
  misc_feature: MA Experiment 20001555 PARAMETER Experiment Name: At_Drought_Soil_Dry_P Parameter: Age (day) Value: 24
  misc_feature: MA Experiment 20001555 PARAMETER Experiment Name: At_Drought_Soil_Dry_P Parameter: Organism Value: A. thaliana
  misc_feature: MA Experiment 20001555 PARAMETER Experiment Name: At_Drought_Soil_Dry_P Parameter: Plant Line Value: WS
  misc_feature: MA Experiment 20001555 PARAMETER Experiment Name: At_Drought_Soil_Dry_P Parameter: Post Timepoint (hr) Value: None
  misc_feature: MA Experiment 20001555 PARAMETER Experiment Name: At_Drought_Soil_Dry_P Parameter: Post-Treatment Value: None
  misc_feature: MA Experiment 20001555 PARAMETER Experiment Name: At_Drought_Soil_Dry_P Parameter: Timepoint (day) Value: 10
  misc_feature: MA Experiment 20001555 PARAMETER Experiment Name: At_Drought_Soil_Dry_P Parameter: Treatment Value: Drought vs. No Drought
  misc_feature: MA Experiment ID: 20001556 Result: Down-regulated in Transcription
  misc_feature: MA Experiment 20001556 PARAMETER Experiment Name: At_Drought_Soil_Dry_P Parameter: Age (day) Value: 26
  misc_feature: MA Experiment 20001556 PARAMETER Experiment Name: At_Drought_Soil_Dry_P Parameter: Organism Value: A. thaliana
  misc_feature: MA Experiment 20001556 PARAMETER Experiment Name: At_Drought_Soil_Dry_P Parameter: Plant Line Value: WS
  misc_feature: MA Experiment 20001556 PARAMETER Experiment Name: At_Drought_Soil_Dry_P Parameter: Post Timepoint (hr) Value: None
  misc_feature: MA Experiment 20001556 PARAMETER Experiment Name: At_Drought_Soil_Dry_P Parameter: Post-Treatment Value: None
  misc_feature: MA Experiment 20001556 PARAMETER Experiment Name: At_Drought_Soil_Dry_P Parameter: Timepoint (day) Value: 12
  misc_feature: MA Experiment 20001556 PARAMETER Experiment Name: At_Drought_Soil_Dry_P Parameter: Treatment Value: Drought vs. No Drought
  misc_feature: MA Experiment ID: 20001558 Result: Down-regulated in Transcription
  misc_feature: MA Experiment 20001558 PARAMETER Experiment Name: At_Drought_Soil_Dry_P Parameter: Age (day) Value: 27
  misc_feature: MA Experiment 20001558 PARAMETER Experiment Name: At_Drought_Soil_Dry_P Parameter: Organism Value: A. thaliana
  misc_feature: MA Experiment 20001558 PARAMETER Experiment Name: At_Drought_Soil_Dry_P Parameter: Plant Line Value: WS
  misc_feature: MA Experiment 20001558 PARAMETER Experiment Name: At_Drought_Soil_Dry_P Parameter: Post Timepoint (hr) Value: 6
  misc_feature: MA Experiment 20001558 PARAMETER Experiment Name: At_Drought_Soil_Dry_P Parameter: Post-Treatment Value: Re-Water vs. No Drought
  misc_feature: MA Experiment 20001558 PARAMETER Experiment Name: At_Drought_Soil_Dry_P Parameter: Timepoint (day) Value: 13
  misc_feature: MA Experiment 20001558 PARAMETER Experiment Name: At_Drought_Soil_Dry_P Parameter: Treatment Value: Drought vs. No Drought
  misc_feature: MA Experiment ID: 20001560 Result: Down-regulated in Transcription
  misc_feature: MA Experiment 20001560 PARAMETER Experiment Name: At_Drought_Soil_Dry_P Parameter: Age (day) Value: 28
  misc_feature: MA Experiment 20001560 PARAMETER Experiment Name: At_Drought_Soil_Dry_P Parameter: Organism Value: A. thaliana
  misc_feature: MA Experiment 20001560 PARAMETER Experiment Name: At_Drought_Soil_Dry_P Parameter: Plant Line Value: WS
  misc_feature: MA Experiment 20001560 PARAMETER Experiment Name: At_Drought_Soil_Dry_P Parameter: Post Timepoint (hr) Value: None
  misc_feature: MA Experiment 20001560 PARAMETER Experiment Name: At_Drought_Soil_Dry_P Parameter: Post-Treatment Value: None
  misc_feature: MA Experiment 20001560 PARAMETER Experiment Name: At_Drought_Soil_Dry_P Parameter: Timepoint (day) Value: 14
  misc_feature: MA Experiment 20001560 PARAMETER Experiment Name: At_Drought_Soil_Dry_P Parameter: Treatment Value: Drought vs. No Drought
  misc_feature: MA Experiment ID: 20001904 Result: Down-regulated in Transcription
  misc_feature: MA Experiment 20001904 PARAMETER Experiment Name: At_Drought_Reproduction_P Parameter: Age (day) Value: 37
  misc_feature: MA Experiment 20001904 PARAMETER Experiment Name: At_Drought_Reproduction_P Parameter: Organism Value: A. thaliana
  misc_feature: MA Experiment 20001904 PARAMETER Experiment Name: At_Drought_Reproduction_P Parameter: Plant Line Value: WS
  misc_feature: MA Experiment 20001904 PARAMETER Experiment Name: At_Drought_Reproduction_P Parameter: Timepoint (day) Value: 7
  misc_feature: MA Experiment 20001904 PARAMETER Experiment Name: At_Drought_Reproduction_P Parameter: Tissue Value: Rosettes
  misc_feature: MA Experiment 20001904 PARAMETER Experiment Name: At_Drought_Reproduction_P Parameter: Treatment Value: Drought vs. No Drought
  misc_feature: MA Experiment ID: 20001905 Result: Down-regulated in Transcription
  misc_feature: MA Experiment 20001905 PARAMETER Experiment Name: At_Drought_Reproduction_P Parameter: Age (day) Value: 40
  misc_feature: MA Experiment 20001905 PARAMETER Experiment Name: At_Drought_Reproduction_P Parameter: Organism Value: A. thaliana
  misc_feature: MA Experiment 20001905 PARAMETER Experiment Name: At_Drought_Reproduction_P Parameter: Plant Line Value: WS
  misc_feature: MA Experiment 20001905 PARAMETER Experiment Name: At_Drought_Reproduction_P Parameter: Timepoint (day) Value: 10
  misc_feature: MA Experiment 20001905 PARAMETER Experiment Name: At_Drought_Reproduction_P Parameter: Tissue Value: Rosettes
  misc_feature: MA Experiment 20001905 PARAMETER Experiment Name: At_Drought_Reproduction_P Parameter: Treatment Value: Drought vs. No Drought
attcaacgctttgcctaaagtcaatcttcatcaatttctctccattccttcactcaattccggccaaagttttgatttttccggttcgaatcactctttctggggatttcacagtgtactgtgtgtggtcttccgaagaagaagaagaattcaaaaatacgatcttgttggttttcgtgaattgggtatttcccgctgagccgttgaagttgtgtgtttgttctgagtggattgaaattagggtttagattttagggaagtgaatggattgggttgtgaataataaaggttaagtttttctgtagattggttatgtgtgtagattcatgttctagagagcatacgaatgggttgtgtgaattctaggcataggccttttagaagaaagtcaacaacactgaaagagtcatcagaggagaaacgttcctctcggattgattcgtcgaggaggattgatgattggattcaaccggaagatgggtttgatagattgagtaacagtggagatgctaaagttaggttgattgaatccgaaatgtttagtacaagtaggtgtcatgatcatcagattgggaagatattagagaatcctgcgacagttgctcatatggatagagttgtgcatgatcaggaattgagaagggcctctagtgctgttgtagactcggacttggatattgatccaaaggttgttaaggccaagctagatagatggaatagcaaagattccaaagttcggttgattgaatctgaaaagttgagttctagcatgttttctgagcatcatcagatagagaagggagtagagaaacctgaggttgaagcttcggttcgagtggttcatcgggaactgaagaggggttcaagcattgttagtccaaaggatgcagagcggaagcaagtggcagcaggatggccgtcttggctggtctctgttgctggtgagtcactagtggattgggctccacgacgagcaaatacttttgaaaagctggagaaaattggccaaggaacatatagcagcgtatacagagctcgcgatcttcttcataacaagattgttgcgctaaaaaaagtccggtttgatcttaacgatatggaaagtgttaagtttatggcaagagagatcatagtaatgcgacggcttgatcatcctaatgtcctgaaattggaaggattgatcactgcccctgtctcatcgtccctttacttagtttttgagtacatggatcatgatctcttaggactttcttcactacctggtgtcaagtttacagagcctcaggttaaatgttacatgcgacaacttctaagtgggcttgaacattgtcacagccgtggcgttcttcaccgtgatataaaaggctcaaacctactaattgacagtaagggagtcttgaagatagcagattttgggttagcaacttttttcgaccctgcaaaaagtgtttcattgactagccatgttgtcactctttggtaccggccaccagaacttttgcttggagcctctcattacggtgttggggttgatttatggagcacaggttgcatcttaggtgaattatatgccggtaaaccgatcctccctggaaaaaccgaggtagaacaattgcataaaatcttcaagctttgcggttcaccaacagaaaattactggagaaaacagaagttaccatcttcagctggattcaaaaccgcgattccttataggcggaaagtatcagagatgtttaaggactttcctgcaagtgttctttcacttttagagactttactctccatagatcctgatcaccggagctctgcagatcgtgcccttgagagtgagtacttcaaaaccaagccgtttgcttgcgatccatcgaacttaccaaaatatcctcctagtaaagagattgatgcgaaaatgcgtgatgaagcgaaaaggcaacaacctatgagggcggagaaacaagaagacaagactctatgacgagaatatcacacgagagaaaatttgtaccaccggtcaaagcaaataactctctgtcaatgacaatggagaaacaatataaagatttgaggagtaggaacgatagtttcaagtcgtttaaggaggagaggactcctcatggaccagttcctgattatcaaaatatgcagcacaacagaaacaatcaaactggtgtgagaatttcacactcaggtccattgatgagcaaccggaacatggctaagtcaacaatgcatgtgaaggagaatgcacttcctagataccctccagctagagtaaacccgaagatgttatcaggctcagtctcctccaaaacattattagaacggcaagatcaaccagtcacgaaccaaagaagaagagatcggcgagcatacaatagagctgatactatggatagtagacatatgacagcaccaattgacccatcttggtataatcctagtgatagcaagatttacatgtcaggaccattgttggctcagccaagcagagtggaccagatgcttgaagaacatgacagacagcttcaggaattcaatagacaggcactcaagacaccacaaggctgaaatcattggaagagccaaattattgagcgttctaaaaagccgaatcagttgagtcagatttgtcactataatctattggtttcataaattgagttgatgtgatcggcttaaaggcataaaccactactgttcgtatagagttcgctgtgtgtacatatatacaaaatccctttgaatt

SEQ ID NO: 80701 - protein, 542 aa, Arabidopsis thaliana
  peptide (1)..(542): Ceres Seq. ID no. 12656870
  misc_feature (213)..(497): Pfam Name: Protein kinase domain Pfam Description: Protein kinase domain
  misc_feature (1)..(542): Homolog of NCBI NO: 15218897 NR Description: putative protein kinase; protein id: At1g03740.1, by cDNA: gi_13430451, supported by cDNA: gi_14532735 [Arabidopsis
  misc_feature (95)..(542): Homolog of NCBI NO: 15983485 NR Description: AT5g44290/K9L2_5 [Arabidopsis thaliana]
  misc_feature (95)..(542): Homolog of NCBI NO: 15241455 NR Description: cyclin-dependent protein kinase-like protein; id: At5g44290.1, supported by cDNA: gi_15983484 [Arabidopsis
  misc_feature (174)..(530): Homolog of NCBI NO: 15219169 NR Description: cell division-related protein, putative; protein At1g53050.1 [Arabidopsis thaliana] >gi|25405618|pir||A96571
  misc_feature (174)..(530): Homolog of NCBI NO: 28393523 NR Description: putative cell division-related protein
  misc_feature (175)..(542): Homolog of NCBI NO: 15217565 NR Description: putative protein kinase; protein id: At1g09600.1
  misc_feature (175)..(542): Homolog of NCBI NO: 25402555 NR Description: hypothetical protein [imported] - Arabidopsis >gi|3482933|gb|AAC33218.1| Similar to cdc2 protein kinases
  misc_feature (150)..(542): Homolog of NCBI NO: 7671528 NR Description: CRK1 protein [Beta vulgaris]
  misc_feature (179)..(538): Homolog of NCBI NO: 33146814 NR Description: putative cyclin-dependent kinase CDC2C [Oryza
  misc_feature (167)..(542): Homolog of NCBI NO: 15221868 NR Description: CRK1 protein, putative; protein id: At1g54610.1, by cDNA: gi_13877618 [Arabidopsis thaliana]
MGCVNSRHRPFRRKSTTLKESSEEKRSSRIDSSRRIDDWIQPEDGFDRLSNSGDAKVRLIESEMFSTSRCHDHQIGKILENPATVAHMDRVVHDQELRRASSAVVDSDLDIDPKVVKAKLDRWNSKDSKVRLIESEKLSSSMFSEHHQIEKGVEKPEVEASVRVVHRELKRGSSIVSPKDAERKQVAAGWPSWLVSVAGESLVDWAPRRANTFEKLEKIGQGTYSSVYRARDLLHNKIVALKKVRFDLNDMESVKFMAREIIVMRRLDHPNVLKLEGLITAPVSSSLYLVFEYMDHDLLGLSSLPGVKFTEPQVKCYMRQLLSGLEHCHSRGVLHRDIKGSNLLIDSKGVLKIADFGLATFFDPAKSVSLTSHVVTLWYRPPELLLGASHYGVGVDLWSTGCILGELYAGKPILPGKTEVEQLHKIFKLCGSPTENYWRKQKLPSSAGFKTAIPYRRKVSEMFKDFPASVLSLLETLLSIDPDHRSSADRALESEYFKTKPFACDPSNLPKYPPSKEIDAKMRDEAKRQQPMRAEKQEDKTL

SEQ ID NO: 80702 - protein, 479 aa, Arabidopsis thaliana
  peptide (1)..(479): Ceres Seq. ID no. 12656871
  misc_feature (150)..(434): Pfam Name: Protein kinase domain Pfam Description: Protein kinase domain
  misc_feature (1)..(479): Homolog of NCBI NO: 15218897 NR Description: putative protein kinase; protein id: At1g03740.1, by cDNA: gi_13430451, supported by cDNA: gi_14532735 [Arabidopsis
  misc_feature (32)..(479): Homolog of NCBI NO: 15983485 NR Description: AT5g44290/K9L2_5 [Arabidopsis thaliana]
  misc_feature (32)..(479): Homolog of NCBI NO: 15241455 NR Description: cyclin-dependent protein kinase-like protein; id: At5g44290.1, supported by cDNA: gi_15983484 [Arabidopsis
  misc_feature (111)..(467): Homolog of NCBI NO: 15219169 NR Description: cell division-related protein, putative; protein At1g53050.1 [Arabidopsis thaliana] >gi|25405618|pir||A96571
  misc_feature (111)..(467): Homolog of NCBI NO: 28393523 NR Description: putative cell division-related protein
  misc_feature (112)..(479): Homolog of NCBI NO: 15217565 NR Description: putative protein kinase; protein id: At1g09600.1
  misc_feature (112)..(479): Homolog of NCBI NO: 25402555 NR Description: hypothetical protein [imported] - Arabidopsis >gi|3482933|gb|AAC33218.1| Similar to cdc2 protein kinases
  misc_feature (87)..(479): Homolog of NCBI NO: 7671528 NR Description: CRK1 protein [Beta vulgaris]
  misc_feature (116)..(475): Homolog of NCBI NO: 33146814 NR Description: putative cyclin-dependent kinase CDC2C [Oryza
  misc_feature (104)..(479): Homolog of NCBI NO: 15221868 NR Description: CRK1 protein, putative; protein id: At1g54610.1, by cDNA: gi_13877618 [Arabidopsis thaliana]
MFSTSRCHDHQIGKILENPATVAHMDRVVHDQELRRASSAVVDSDLDIDPKVVKAKLDRWNSKDSKVRLIESEKLSSSMFSEHHQIEKGVEKPEVEASVRVVHRELKRGSSIVSPKDAERKQVAAGWPSWLVSVAGESLVDWAPRRANTFEKLEKIGQGTYSSVYRARDLLHNKIVALKKVRFDLNDMESVKFMAREIIVMRRLDHPNVLKLEGLITAPVSSSLYLVFEYMDHDLLGLSSLPGVKFTEPQVKCYMRQLLSGLEHCHSRGVLHRDIKGSNLLIDSKGVLKIADFGLATFFDPAKSVSLTSHVVTLWYRPPELLLGASHYGVGVDLWSTGCILGELYAGKPILPGKTEVEQLHKIFKLCGSPTENYWRKQKLPSSAGFKTAIPYRRKVSEMFKDFPASVLSLLETLLSIDPDHRSSADRALESEYFKTKPFACDPSNLPKYPPSKEIDAKMRDEAKRQQPMRAEKQEDKTL

SEQ ID NO: 80703 - protein, 455 aa, Arabidopsis thaliana
  peptide (1)..(455): Ceres Seq. ID no. 12656872
  misc_feature (126)..(410): Pfam Name: Protein kinase domain Pfam Description: Protein kinase domain
  misc_feature (1)..(455): Homolog of NCBI NO: 15218897 NR Description: putative protein kinase; protein id: At1g03740.1, by cDNA: gi_13430451, supported by cDNA: gi_14532735 [Arabidopsis
  misc_feature (8)..(455): Homolog of NCBI NO: 15983485 NR Description: AT5g44290/K9L2_5 [Arabidopsis thaliana]
  misc_feature (8)..(455): Homolog of NCBI NO: 15241455 NR Description: cyclin-dependent protein kinase-like protein; id: At5g44290.1, supported by cDNA: gi_15983484 [Arabidopsis
  misc_feature (87)..(443): Homolog of NCBI NO: 15219169 NR Description: cell division-related protein, putative; protein At1g53050.1 [Arabidopsis thaliana] >gi|25405618|pir||A96571
  misc_feature (87)..(443): Homolog of NCBI NO: 28393523 NR Description: putative cell division-related protein
  misc_feature (88)..(455): Homolog of NCBI NO: 15217565 NR Description: putative protein kinase; protein id: At1g09600.1
  misc_feature (88)..(455): Homolog of NCBI NO: 25402555 NR Description: hypothetical protein [imported] - Arabidopsis >gi|3482933|gb|AAC33218.1| Similar to cdc2 protein kinases
  misc_feature (63)..(455): Homolog of NCBI NO: 7671528 NR Description: CRK1 protein [Beta vulgaris]
  misc_feature (92)..(451): Homolog of NCBI NO: 33146814 NR Description: putative cyclin-dependent kinase CDC2C [Oryza
  misc_feature (80)..(455): Homolog of NCBI NO: 15221868 NR Description: CRK1 protein, putative; protein id: At1g54610.1, by cDNA: gi_13877618 [Arabidopsis thaliana]
MDRVVHDQELRRASSAVVDSDLDIDPKVVKAKLDRWNSKDSKVRLIESEKLSSSMFSEHHQIEKGVEKPEVEASVRVVHRELKRGSSIVSPKDAERKQVAAGWPSWLVSVAGESLVDWAPRRANTFEKLEKIGQGTYSSVYRARDLLHNKIVALKKVRFDLNDMESVKFMAREIIVMRRLDHPNVLKLEGLITAPVSSSLYLVFEYMDHDLLGLSSLPGVKFTEPQVKCYMRQLLSGLEHCHSRGVLHRDIKGSNLLIDSKGVLKIADFGLATFFDPAKSVSLTSHVVTLWYRPPELLLGASHYGVGVDLWSTGCILGELYAGKPILPGKTEVEQLHKIFKLCGSPTENYWRKQKLPSSAGFKTAIPYRRKVSEMFKDFPASVLSLLETLLSIDPDHRSSADRALESEYFKTKPFACDPSNLPKYPPSKEIDAKMRDEAKRQQPMRAEKQEDKTL

SEQ ID NO: 80704 - DNA, 1410 bp, Arabidopsis thaliana
  misc_feature (1)..(1410): Ceres Seq. ID no. 12656897
  misc_feature: MA Experiment ID: 20000264 Result: Up-regulated in Transcription
  misc_feature: MA Experiment 20000264 PARAMETER Experiment Name: At_Open_Flower_P Parameter: Age (day) Value: 21
  misc_feature: MA Experiment 20000264 PARAMETER Experiment Name: At_Open_Flower_P Parameter: Plant Line Value: WS
  misc_feature: MA Experiment 20000264 PARAMETER Experiment Name: At_Open_Flower_P Parameter: Tissue Value: Open Flower vs. Whole Plant
  misc_feature: MA Experiment ID: 20000436 Result: Up-regulated in Transcription
  misc_feature: MA Experiment 20000436 PARAMETER Experiment Name: At_Drought_P Parameter: Age (day) Value: 7
  misc_feature: MA Experiment 20000436 PARAMETER Experiment Name: At_Drought_P Parameter: Organism Value: A. thaliana
  misc_feature: MA Experiment 20000436 PARAMETER Experiment Name: At_Drought_P Parameter: Plant Line Value: WS
  misc_feature: MA Experiment 20000436 PARAMETER Experiment Name: At_Drought_P Parameter: Timepoint (hr) Value: 12
  misc_feature: MA Experiment 20000436 PARAMETER Experiment Name: At_Drought_P Parameter: Tissue Value: Whole Plant
  misc_feature: MA Experiment 20000436 PARAMETER Experiment Name: At_Drought_P Parameter: Treatment Value: Drought vs. No Drought
  misc_feature: MA Experiment ID: 20001458 Result: Down-regulated in Transcription
  misc_feature: MA Experiment 20001458 PARAMETER Experiment Name: At_50mM_NH4NO3_L-to-H_P Parameter: Age (day) Value: Undefined
  misc_feature: MA Experiment 20001458 PARAMETER Experiment Name: At_50mM_NH4NO3_L-to-H_P Parameter: Organism Value: Undefined
  misc_feature: MA Experiment 20001458 PARAMETER Experiment Name: At_50mM_NH4NO3_L-to-H_P Parameter: Plant Line Value: Undefined
  misc_feature: MA Experiment 20001458 PARAMETER Experiment Name: At_50mM_NH4NO3_L-to-H_P Parameter: Timepoint (hr) Value: 2
  misc_feature: MA Experiment 20001458 PARAMETER Experiment Name: At_50mM_NH4NO3_L-to-H_P Parameter: Tissue Value: Siliques
  misc_feature: MA Experiment 20001458 PARAMETER Experiment Name: At_50mM_NH4NO3_L-to-H_P Parameter: Treatment Value: 50mM NH4NO3 vs. 100mM Manitol
  misc_feature: MA Experiment ID: 20001757 Result: Down-regulated in Transcription
  misc_feature: MA Experiment 20001757 PARAMETER Experiment Name: At_50mM_NH4NO3_L-to-H_P Parameter: Timepoint (hr) Value: 6
  misc_feature: MA Experiment 20001757 PARAMETER Experiment Name: At_50mM_NH4NO3_L-to-H_P Parameter: Tissue Value: Leaf
  misc_feature: MA Experiment 20001757 PARAMETER Experiment Name: At_50mM_NH4NO3_L-to-H_P Parameter: Treatment Value: 50mM NH4NO3 vs 100mM Mannitol
  misc_feature: MA Experiment ID: 20001904 Result: Up-regulated in Transcription
  misc_feature: MA Experiment 20001904 PARAMETER Experiment Name: At_Drought_Reproduction_P Parameter: Age (day) Value: 37
  misc_feature: MA Experiment 20001904 PARAMETER Experiment Name: At_Drought_Reproduction_P Parameter: Organism Value: A. thaliana
  misc_feature: MA Experiment 20001904 PARAMETER Experiment Name: At_Drought_Reproduction_P Parameter: Plant Line Value: WS
  misc_feature: MA Experiment 20001904 PARAMETER Experiment Name: At_Drought_Reproduction_P Parameter: Timepoint (day) Value: 7
  misc_feature: MA Experiment 20001904 PARAMETER Experiment Name: At_Drought_Reproduction_P Parameter: Tissue Value: Rosettes
  misc_feature: MA Experiment 20001904 PARAMETER Experiment Name: At_Drought_Reproduction_P Parameter: Treatment Value: Drought vs. No Drought
atggtggctcatcttcaacctcctaagatcatcgagacctgtcacatctctcccccaaagggcaccgttccatcaaccactcttcctctcaccttcttcgatgccccctggctctctctcccactcgccgattctctcttcttcttctcttaccaaaactcaactgaatctttcctccaagactttgtacccaacctcaaacattccctctccatcactctccaacatttcttcccttacgccggtaaactgattatcccgcctcgtcccgaccctccatatttacactacaacgatggccaagactctcttgttttcaccgtagcagagtctactgaaaccgacttcgaccaactgaagtctgattcccctaaagatatcagtgtgttgcatggcgtcttgcccaagttacctcctcctcacgtctctccggaaggaattcagatgcgaccaataatggctatgcaagtcaccatcttccctggagctggaatctgtataggcaactcagctacacatgttgtagcagatggagtcaccttcagtcatttcatgaagtattggatgtcattgaccaaatccagcggtaaagatcccgccacggttcttctaccctctctgcctattcacagctgcagaaacatgatcaaggacccaggcgaggtaggcgcaggacatttggagcggttttggagccaaaactctgcaaaacacagttcacatgttacgcctgagaacatggtcagagccacttttacattgagccggaagcagatagataatctaaaaagttgggttacagagcagtctgagaatcaatctcctgtttctaccttcgtggtgactctagctttcatttgggtaagcttgatcaagacacttgtacaagacagtgaaacaaaggccaacgaggaagacaaggatgaagtatttcacttgatgatcaatgtggattgcaggaatcgcctcaagtacacacaaccaataccacaaacatactttggcaactgtatggctcctggtatcgtatcagtcaagaaacacgatttgctaggagaaaaatgcgttttggcggcttcagatgcaatcacagcgagaatcaaagatatgttatcaagcgatctgttgaagacagcaccaagatggggacaaggagtacgtaaatgggtcatgtcccattatccaacctcaattgcaggagctccgaaattgggactgtatgacatggattttggattaggaaagccctgcaaaatggagatcgtgcacatagaaacaggtggttctatcgcattctcagagtccagagacggcagcaatggagttgagattggaatagcactagagaagaagaaaatggatgtgtttgactcaattctacaacaggggatcaagaaattcgcaacgtag

SEQ ID NO: 80705 - protein, 469 aa, Arabidopsis thaliana
  peptide (1)..(469): Ceres Seq. ID no. 12656898
  misc_feature (3)..(463): Pfam Name: Transferase family Pfam Description: Transferase family
  misc_feature (1)..(469): Homolog of NCBI NO: 15219594 NR Description: hypothetical protein; protein id: At1g03940.1
  misc_feature (1)..(469): Homolog of NCBI NO: 25406735 NR Description: protein F21B7.12 [imported] - Arabidopsis >gi|9280644|gb|AAF86513.1|AC002560_6 F21B7.12 [Arabidopsis
  misc_feature (1)..(289): Homolog of NCBI NO: 15218822 NR Description: hypothetical protein; protein id: At1g03495.1
  misc_feature (346)..(469): Homolog of NCBI NO: 15218822 NR Description: hypothetical protein; protein id: At1g03495.1
  misc_feature (10)..(464): Homolog of NCBI NO: 7415646 NR Description: anthocyanin acyltransferase [Perilla frutescens]
  misc_feature (10)..(465): Homolog of NCBI NO: 28396175 NR Description: malonyl-coenzyme A: anthocyanidin
  misc_feature (10)..(465): Homolog of NCBI NO: 27372443 NR Description: malonyl CoA:anthocyanin 3-O-glucoside-6''-O-
  misc_feature (5)..(463): Homolog of NCBI NO: 38503267 NR Description: Anthocyanin 5-aromatic acyltransferase (5AT)
  misc_feature (7)..(459): Homolog of NCBI NO: 27372445 NR Description: putative malonyl CoA:anthocyanidin
  misc_feature (10)..(465): Homolog of NCBI NO: 38679123 NR Description: putative acyltransferase [Salvia splendens]
MVAHLQPPKIIETCHISPPKGTVPSTTLPLTFFDAPWLSLPLADSLFFFSYQNSTESFLQDFVPNLKHSLSITLQHFFPYAGKLIIPPRPDPPYLHYNDGQDSLVFTVAESTETDFDQLKSDSPKDISVLHGVLPKLPPPHVSPEGIQMRPIMAMQVTIFPGAGICIGNSATHVVADGVTFSHFMKYWMSLTKSSGKDPATVLLPSLPIHSCRNMIKDPGEVGAGHLERFWSQNSAKHSSHVTPENMVRATFTLSRKQIDNLKSWVTEQSENQSPVSTFVVTLAFIWVSLIKTLVQDSETKANEEDKDEVFHLMINVDCRNRLKYTQPIPQTYFGNCMAPGIVSVKKHDLLGEKCVLAASDAITARIKDMLSSDLLKTAPRWGQGVRKWVMSHYPTSIAGAPKLGLYDMDFGLGKPCKMEIVHIETGGSIAFSESRDGSNGVEIGIALEKKKMDVFDSILQQGIKKFAT

SEQ ID NO: 80706 - protein, 321 aa, Arabidopsis thaliana
  peptide (1)..(321): Ceres Seq. ID no. 12656899
  misc_feature (1)..(315): Pfam Name: Transferase family Pfam Description: Transferase family
  misc_feature (1)..(321): Homolog of NCBI NO: 15219594 NR Description: hypothetical protein; protein id: At1g03940.1
  misc_feature (1)..(321): Homolog of NCBI NO: 25406735 NR Description: protein F21B7.12 [imported] - Arabidopsis >gi|9280644|gb|AAF86513.1|AC002560_6 F21B7.12 [Arabidopsis
  misc_feature (1)..(141): Homolog of NCBI NO: 15218822 NR Description: hypothetical protein; protein id: At1g03495.1
  misc_feature (198)..(321): Homolog of NCBI NO: 15218822 NR Description: hypothetical protein; protein id: At1g03495.1
  misc_feature (1)..(316): Homolog of NCBI NO: 7415646 NR Description: anthocyanin acyltransferase [Perilla frutescens]
  misc_feature (1)..(317): Homolog of NCBI NO: 28396175 NR Description: malonyl-coenzyme A: anthocyanidin
  misc_feature (1)..(317): Homolog of NCBI NO: 27372443 NR Description: malonyl CoA:anthocyanin 3-O-glucoside-6''-O-
  misc_feature (1)..(315): Homolog of NCBI NO: 38503267 NR Description: Anthocyanin 5-aromatic acyltransferase (5AT)
  misc_feature (1)..(311): Homolog of NCBI NO: 27372445 NR Description: putative malonyl CoA:anthocyanidin
  misc_feature (1)..(317): Homolog of NCBI NO: 38679123 NR Description: putative acyltransferase [Salvia splendens]
MRPIMAMQVTIFPGAGICIGNSATHVVADGVTFSHFMKYWMSLTKSSGKDPATVLLPSLPIHSCRNMIKDPGEVGAGHLERFWSQNSAKHSSHVTPENMVRATFTLSRKQIDNLKSWVTEQSENQSPVSTFVVTLAFIWVSLIKTLVQDSETKANEEDKDEVFHLMINVDCRNRLKYTQPIPQTYFGNCMAPGIVSVKKHDLLGEKCVLAASDAITARIKDMLSSDLLKTAPRWGQGVRKWVMSHYPTSIAGAPKLGLYDMDFGLGKPCKMEIVHIETGGSIAFSESRDGSNGVEIGIALEKKKMDVFDSILQQGIKKFAT

SEQ ID NO: 80707 - protein, 317 aa, Arabidopsis thaliana
  peptide (1)..(317): Ceres Seq. ID no. 12656900
  misc_feature (1)..(311): Pfam Name: Transferase family Pfam Description: Transferase family
  misc_feature (1)..(317): Homolog of NCBI NO: 15219594 NR Description: hypothetical protein; protein id: At1g03940.1
  misc_feature (1)..(317): Homolog of NCBI NO: 25406735 NR Description: protein F21B7.12 [imported] - Arabidopsis >gi|9280644|gb|AAF86513.1|AC002560_6 F21B7.12 [Arabidopsis
  misc_feature (1)..(137): Homolog of NCBI NO: 15218822 NR Description: hypothetical protein; protein id: At1g03495.1
  misc_feature (194)..(317): Homolog of NCBI NO: 15218822 NR Description: hypothetical protein; protein id: At1g03495.1
  misc_feature (1)..(312): Homolog of NCBI NO: 7415646 NR Description: anthocyanin acyltransferase [Perilla frutescens]
  misc_feature (1)..(313): Homolog of NCBI NO: 28396175 NR Description: malonyl-coenzyme A: anthocyanidin
  misc_feature (1)..(313): Homolog of NCBI NO: 27372443 NR Description: malonyl CoA:anthocyanin 3-O-glucoside-6''-O-
  misc_feature (1)..(311): Homolog of NCBI NO: 38503267 NR Description: Anthocyanin 5-aromatic acyltransferase (5AT)
  misc_feature (1)..(307): Homolog of NCBI NO: 27372445 NR Description: putative malonyl CoA:anthocyanidin
  misc_feature (1)..(313): Homolog of NCBI NO: 38679123 NR Description: putative acyltransferase [Salvia splendens]
MAMQVTIFPGAGICIGNSATHVVADGVTFSHFMKYWMSLTKSSGKDPATVLLPSLPIHSCRNMIKDPGEVGAGHLERFWSQNSAKHSSHVTPENMVRATFTLSRKQIDNLKSWVTEQSENQSPVSTFVVTLAFIWVSLIKTLVQDSETKANEEDKDEVFHLMINVDCRNRLKYTQPIPQTYFGNCMAPGIVSVKKHDLLGEKCVLAASDAITARIKDMLSSDLLKTAPRWGQGVRKWVMSHYPTSIAGAPKLGLYDMDFGLGKPCKMEIVHIETGGSIAFSESRDGSNGVEIGIALEKKKMDVFDSILQQGIKKFAT

SEQ ID NO: 80708 - DNA, 1938 bp, Arabidopsis thaliana
  misc_feature (1)..(1938): Ceres Seq. ID no. 12656939
  misc_feature: MA Experiment ID: 20000180 Result: Up-regulated in Transcription
  misc_feature: MA Experiment 20000180 PARAMETER Experiment Name: At_Germinating_Seeds_P Parameter: Age (hr) Value: 24 vs. 0
  misc_feature: MA Experiment 20000180 PARAMETER Experiment Name: At_Germinating_Seeds_P Parameter: Tissue Value: Germinating Seeds
  misc_feature: MA Experiment ID: 20000286 Result: Up-regulated in Transcription
  misc_feature: MA Experiment 20000286 PARAMETER Experiment Name: At_Open_Flower_P Parameter: Age (day) Value: 21
  misc_feature: MA Experiment 20000286 PARAMETER Experiment Name: At_Open_Flower_P Parameter: Plant Line Value: WS
  misc_feature: MA Experiment 20000286 PARAMETER Experiment Name: At_Open_Flower_P Parameter: Tissue Value: Half Open vs. Whole Plant
  misc_feature: MA Experiment ID: 20001248 Result: Up-regulated in Transcription
  misc_feature: MA Experiment 20001248 PARAMETER Experiment Name: At_Far-red-induction_P Parameter: Age (day) Value: 7
  misc_feature: MA Experiment 20001248 PARAMETER Experiment Name: At_Far-red-induction_P Parameter: Light Value: Far-red vs. White
  misc_feature: MA Experiment 20001248 PARAMETER Experiment Name: At_Far-red-induction_P Parameter: Organism Value: A. thaliana
  misc_feature: MA Experiment 20001248 PARAMETER Experiment Name: At_Far-red-induction_P Parameter: Plant Line Value: Columbia
  misc_feature: MA Experiment 20001248 PARAMETER Experiment Name: At_Far-red-induction_P Parameter: Timepoint (hr) Value: 4
  misc_feature: MA Experiment 20001248 PARAMETER Experiment Name: At_Far-red-induction_P Parameter: Tissue Value: Whole Plant
  misc_feature: MA Experiment ID: 20001905 Result: Up-regulated in Transcription
  misc_feature: MA Experiment 20001905 PARAMETER Experiment Name: At_Drought_Reproduction_P Parameter: Age (day) Value: 40
  misc_feature: MA Experiment 20001905 PARAMETER Experiment Name: At_Drought_Reproduction_P Parameter: Organism Value: A. thaliana
  misc_feature: MA Experiment 20001905 PARAMETER Experiment Name: At_Drought_Reproduction_P Parameter: Plant Line Value: WS
  misc_feature: MA Experiment 20001905 PARAMETER Experiment Name: At_Drought_Reproduction_P Parameter: Timepoint (day) Value: 10
  misc_feature: MA Experiment 20001905 PARAMETER Experiment Name: At_Drought_Reproduction_P Parameter: Tissue Value: Rosettes
  misc_feature: MA Experiment 20001905 PARAMETER Experiment Name: At_Drought_Reproduction_P Parameter: Treatment Value: Drought vs. No Drought
atgttaaagacattgttagtccaatggcttgtcttcttcttcttcttcttaatcggttccgtcgtcaccgccgcagaagacgacggtagcttgtcgttatgcaactgcgacgacgaagacagtctctttagctacgagacaatcctcaactcgcaaaaagtcggcgactttcttatcgcaatcgcttatttctcgatcccaatcgagctggtttacttcgtgagccgcaccaatgtgccttcaccttacaattgggtggtctgcgagtttatagccttcattgttctctgcggcatgacccatttgctcgctggtttcacctacgggcctcactggccttgggtcatgacagctgtcactgtcttcaagatgctgactggtatcgtctctttcctcacggcactctcgttagtcactctcttaccattgcttcttaaggctaaggttcgtgagtttatgttgagtaagaagaccagagagcttgatcgtgaggttgggatcattatgaagcagactgagacgagtttgcatgttcgtatgctcactaccaagattaggacgtctcttgatcgacacaccattctatacactacgcttgtggagttgtccaagactctggggctcaagaactgtgcggtttggatcccgaatgagatcaagacggagatgaatcttactcatgagttaagaccgaggattgatgatgagaatgagaatgagcattttggtggttatgctgggttctcgataccgattagtgagtctgatgttgtgaggattaagagaagcgaagaggtgaatatgttgagccctggttctgtgcttgcctcagtgactagccgagggaagtcaggtcctacggttgggataagagtccctatgcttcgggtttgtaactttaaaggcgggacaccagaggcgattcacatgtgttatgcgatattggtgtgtgtgcttccattgagacagccgcaggcttggacttatcaagagcttgagattgttaaggtggtggctgatcaagtggcggttgcaatctctcacgccgtgattcttgaagaatctcagcttatgagagagaaactcgctgaacagaaccgagcgcttcaggttgcgagggagaacgcactgagagctaatcaagccaaggctgcgttcgagcagatgatgagcgatgcaatgaggtgtcctgtgcggtccattctcgggttgcttcctttgatacttcaggatgggaagttacccgagaaccagactgttatcgttgatgcaatgaggagaaccagcgagttacttgtacagcttgtaaacaatgccggagatataaacaatgggacaatccgcgctgcagagactcattatttcagtttgcattcggttgtgaaagagtcagcttgcgtggcgaggtgtttatgcatggcaaatggttttggtttctcagctgaagtttatagagcattgcctgactacgtcgtaggtgatgatagaaaggtctttcaagcgattttgcatatgcttggggttctaatgaatcgaaagatcaaagggaatgtgactttctgggtttttccggaaagcgggaactcagacgtatcagagaggaaagatattcaagaagcggtttggcgacattgctattcgaaagaatacatggaagttagattcggattcgaggtaactgctgaaggtgaagagagtagtagtagtagtagtggtagtaacctggaggaggaggaagagaatccgagtctcaacgcttgccaaaacattgtaaagtatatgcaagggaatattcgggttgttgaggacggtctaggtttggtgaaaagcgtctcagttgttttccggtttcaactccggcgatcgatgatgtcgagaggcggtggatattctggagaaacgtttagaacctcaactcctccgtctactagccactga

SEQ ID NO: 80709 - protein, 645 aa, Arabidopsis thaliana
  peptide (1)..(645): Ceres Seq. ID no. 12656940
  misc_feature (190)..(346): Pfam Name: GAF domain Pfam Description: GAF domain
  misc_feature (21)..(638): Homolog of NCBI NO: 15131533 NR Description: ethylene receptor [Fragaria x ananassa]
  misc_feature (10)..(629): Homolog of NCBI NO: 29824097 NR Description: ethylene receptor [Brassica oleracea]
  misc_feature (12)..(623): Homolog of NCBI NO: 6136818 NR Description: ethylene receptor CS-ETR2 [Cucumis sativus]
  misc_feature (1)..(644): Homolog of NCBI NO: 3687654 NR Description: putative ethylene receptor; ETR2 [Arabidopsis
  misc_feature (1)..(644): Homolog of NCBI NO: 15228976 NR Description: ethylene receptor, putative (ETR2); protein id:
  misc_feature (1)..(580): Homolog of NCBI NO: 7939523 NR Description: ethylene receptor [Arabidopsis thaliana]
  misc_feature (1)..(642): Homolog of NCBI NO: 5733831 NR Description: ethylene receptor homolog [Nicotiana tabacum]
  misc_feature (1)..(642): Homolog of NCBI NO: 4877651 NR Description: ethylene receptor homolog [Lycopersicon
  misc_feature (5)..(626): Homolog of NCBI NO: 4877653 NR Description: ethylene receptor homolog [Lycopersicon
  misc_feature (6)..(622): Homolog of NCBI NO: 22209014 NR Description: putative ethylene receptor [Nicotiana tabacum]
MLKTLLVQWLVFFFFFLIGSVVTAAEDDGSLSLCNCDDEDSLFSYETILNSQKVGDFLIAIAYFSIPIELVYFVSRTNVPSPYNWVVCEFIAFIVLCGMTHLLAGFTYGPHWPWVMTAVTVFKMLTGIVSFLTALSLVTLLPLLLKAKVREFMLSKKTRELDREVGIIMKQTETSLHVRMLTTKIRTSLDRHTILYTTLVELSKTLGLKNCAVWIPNEIKTEMNLTHELRPRIDDENENEHFGGYAGFSIPISESDVVRIKRSEEVNMLSPGSVLASVTSRGKSGPTVGIRVPMLRVCNFKGGTPEAIHMCYAILVCVLPLRQPQAWTYQELEIVKVVADQVAVAISHAVILEESQLMREKLAEQNRALQVARENALRANQAKAAFEQMMSDAMRCPVRSILGLLPLILQDGKLPENQTVIVDAMRRTSELLVQLVNNAGDINNGTIRAAETHYFSLHSVVKESACVARCLCMANGFGFSAEVYRALPDYVVGDDRKVFQAILHMLGVLMNRKIKGNVTFWVFPESGNSDVSERKDIQEAVWRHCYSKEYMEVRFGFEVTAEGEESSSSSSGSNLEEEEENPSLNACQNIVKYMQGNIRVVEDGLGLVKSVSVVFRFQLRRSMMSRGGGYSGETFRTSTPPSTSH

SEQ ID NO: 80710 - protein, 547 aa, Arabidopsis thaliana
  peptide (1)..(547): Ceres Seq. ID no. 12656941
  misc_feature (92)..(248): Pfam Name: GAF domain Pfam Description: GAF domain
  misc_feature (1)..(540): Homolog of NCBI NO: 15131533 NR Description: ethylene receptor [Fragaria x ananassa]
  misc_feature (1)..(531): Homolog of NCBI NO: 29824097 NR Description: ethylene receptor [Brassica oleracea]
  misc_feature (1)..(525): Homolog of NCBI NO: 6136818 NR Description: ethylene receptor CS-ETR2 [Cucumis sativus]
  misc_feature (1)..(546): Homolog of NCBI NO: 3687654 NR Description: putative ethylene receptor; ETR2 [Arabidopsis
  misc_feature (1)..(546): Homolog of NCBI NO: 15228976 NR Description: ethylene receptor, putative (ETR2); protein id:
  misc_feature (1)..(482): Homolog of NCBI NO: 7939523 NR Description: ethylene receptor [Arabidopsis thaliana]
  misc_feature (1)..(544): Homolog of NCBI NO: 5733831 NR Description: ethylene receptor homolog [Nicotiana tabacum]
  misc_feature (1)..(544): Homolog of NCBI NO: 4877651 NR Description: ethylene receptor homolog [Lycopersicon
  misc_feature (1)..(528): Homolog of NCBI NO: 4877653 NR Description: ethylene receptor homolog [Lycopersicon
  misc_feature (1)..(524): Homolog of NCBI NO: 22209014 NR Description: putative ethylene receptor [Nicotiana tabacum]
MTHLLAGFTYGPHWPWVMTAVTVFKMLTGIVSFLTALSLVTLLPLLLKAKVREFMLSKKTRELDREVGIIMKQTETSLHVRMLTTKIRTSLDRHTILYTTLVELSKTLGLKNCAVWIPNEIKTEMNLTHELRPRIDDENENEHFGGYAGFSIPISESDVVRIKRSEEVNMLSPGSVLASVTSRGKSGPTVGIRVPMLRVCNFKGGTPEAIHMCYAILVCVLPLRQPQAWTYQELEIVKVVADQVAVAISHAVILEESQLMREKLAEQNRALQVARENALRANQAKAAFEQMMSDAMRCPVRSILGLLPLILQDGKLPENQTVIVDAMRRTSELLVQLVNNAGDINNGTIRAAETHYFSLHSVVKESACVARCLCMANGFGFSAEVYRALPDYVVGDDRKVFQAILHMLGVLMNRKIKGNVTFWVFPESGNSDVSERKDIQEAVWRHCYSKEYMEVRFGFEVTAEGEESSSSSSGSNLEEEEENPSLNACQNIVKYMQGNIRVVEDGLGLVKSVSVVFRFQLRRSMMSRGGGYSGETFRTSTPPSTSH

SEQ ID NO: 80711 - protein, 530 aa, Arabidopsis thaliana
  peptide (1)..(530): Ceres Seq. ID no. 12656942
  misc_feature (75)..(231): Pfam Name: GAF domain Pfam Description: GAF domain
  misc_feature (1)..(523): Homolog of NCBI NO: 15131533 NR Description: ethylene receptor [Fragaria x ananassa]
  misc_feature (1)..(514): Homolog of NCBI NO: 29824097 NR Description: ethylene receptor [Brassica oleracea]
  misc_feature (1)..(508): Homolog of NCBI NO: 6136818 NR Description: ethylene receptor CS-ETR2 [Cucumis sativus]
  misc_feature (1)..(529): Homolog of NCBI NO: 3687654 NR Description: putative ethylene receptor; ETR2 [Arabidopsis
  misc_feature (1)..(529): Homolog of NCBI NO: 15228976 NR Description: ethylene receptor, putative (ETR2); protein id:
  misc_feature (1)..(465): Homolog of NCBI NO: 7939523 NR Description: ethylene receptor [Arabidopsis thaliana]
  misc_feature (1)..(527): Homolog of NCBI NO: 5733831 NR Description: ethylene receptor homolog [Nicotiana tabacum]
  misc_feature (1)..(527): Homolog of NCBI NO: 4877651 NR Description: ethylene receptor homolog [Lycopersicon
  misc_feature (1)..(511): Homolog of NCBI NO: 4877653 NR Description: ethylene receptor homolog [Lycopersicon
  misc_feature (1)..(507): Homolog of NCBI NO: 22209014 NR Description: putative ethylene receptor [Nicotiana tabacum]
MTAVTVFKMLTGIVSFLTALSLVTLLPLLLKAKVREFMLSKKTRELDREVGIIMKQTETSLHVRMLTTKIRTSLDRHTILYTTLVELSKTLGLKNCAVWIPNEIKTEMNLTHELRPRIDDENENEHFGGYAGFSIPISESDVVRIKRSEEVNMLSPGSVLASVTSRGKSGPTVGIRVPMLRVCNFKGGTPEAIHMCYAILVCVLPLRQPQAWTYQELEIVKVVADQVAVAISHAVILEESQLMREKLAEQNRALQVARENALRANQAKAAFEQMMSDAMRCPVRSILGLLPLILQDGKLPENQTVIVDAMRRTSELLVQLVNNAGDINNGTIRAAETHYFSLHSVVKESACVARCLCMANGFGFSAEVYRALPDYVVGDDRKVFQAILHMLGVLMNRKIKGNVTFWVFPESGNSDVSERKDIQEAVWRHCYSKEYMEVRFGFEVTAEGEESSSSSSGSNLEEEEENPSLNACQNIVKYMQGNIRVVEDGLGLVKSVSVVFRFQLRRSMMSRGGGYSGETFRTSTPPSTSH

SEQ ID NO: 80712 - DNA, 1806 bp, Arabidopsis thaliana
  misc_feature (1)..(1806): Ceres Seq. ID no. 12656963
  misc_feature: MA Experiment ID: 20000327 Result: Up-regulated in Transcription
  misc_feature: MA Experiment 20000327 PARAMETER Experiment Name: At_42deg_Heat_Sub_P Parameter: Age (day) Value: 14
  misc_feature: MA Experiment 20000327 PARAMETER Experiment Name: At_42deg_Heat_Sub_P Parameter: Organism Value: A. thaliana
  misc_feature: MA Experiment 20000327 PARAMETER Experiment Name: At_42deg_Heat_Sub_P Parameter: Plant Line Value: WS
  misc_feature: MA Experiment 20000327 PARAMETER Experiment Name: At_42deg_Heat_Sub_P Parameter: Temperature (deg C) Value: 42 vs. 22
  misc_feature: MA Experiment 20000327 PARAMETER Experiment Name: At_42deg_Heat_Sub_P Parameter: Timepoint (hr) Value: 1
  misc_feature: MA Experiment 20000327 PARAMETER Experiment Name: At_42deg_Heat_Sub_P Parameter: Tissue Value: Aerial
  misc_feature: MA Experiment ID: 20000355 Result: Up-regulated in Transcription
  misc_feature: MA Experiment 20000355 PARAMETER Experiment Name: At_Siliques_Sub_P Parameter: Age (day) Value: 21
  misc_feature: MA Experiment 20000355 PARAMETER Experiment Name: At_Siliques_Sub_P Parameter: Organism Value: A. thaliana
  misc_feature: MA Experiment 20000355 PARAMETER Experiment Name: At_Siliques_Sub_P Parameter: Plant Line Value: WS
  misc_feature: MA Experiment 20000355 PARAMETER Experiment Name: At_Siliques_Sub_P Parameter: Tissue Value: Less Than 5mm Siliques vs. Whole Plant
  misc_feature: MA Experiment ID: 20000440 Result: Up-regulated in Transcription
  misc_feature: MA Experiment 20000440 PARAMETER Experiment Name: At_Closed-Flower__Sub_P Parameter: Tissue Value: Closed Flower vs. Whole Plant
  misc_feature: MA Experiment ID: 20001807 Result: Down-regulated in Transcription
  misc_feature: MA Experiment 20001807 PARAMETER Experiment Name: At_50mM_NH4NO3_L-to-H_Sub_P Parameter: Timepoint (hr) Value: 6
  misc_feature: MA Experiment 20001807 PARAMETER Experiment Name: At_50mM_NH4NO3_L-to-H_Sub_P Parameter: Tissue Value: Leaf
  misc_feature: MA Experiment 20001807 PARAMETER Experiment Name: At_50mM_NH4NO3_L-to-H_Sub_P Parameter: Treatment Value: 50mM NH4NO3 vs 100mM Mannitol
atgtcgatgatgttcccatcgtttcagttgctagaacttaacataatatcagctcaggacttggctcccgtcgcacgcaagacaaagacttatgcggttgcttgggttcattccgaacgtaaacttaccacccgtgtcgactataatggcggaacaaacccaacttggaacgacaaattcgtattcagagtcaacgaagaatttctctacgctgatacttcagcagtggttatcgaaatatacgccttgcattggttcagagatgttcatgtaggaacagttcgtgtcctcattagcaacctcattcctcctaatcgccgtccaggatacagaaccagcaacaatgaatatcgtcgtaccccacctccaggaatgagatttgttgcgcttcaagttcgtcgtacttcaggtcgacctcaggggattttgaacattggtgttggattaattgatggttctatgcggagtatgccgctttatacgcatatggattcatctgctgtgggatatagagatttgctcggagaagaagatcatcatctacaacatttgcatttaaatagcaacaaagggagctcaaagaatccacaatctccatcttctcgacagtaccaatccgtaatctcaaggcctgagctccgtcgtacgaagagcgatacaagttctatggttgtttcggatcttcttagcagggctgaacggagtcgtttagctaatagacaaccagcgagtgcaatagtgagcagtgaatctgaaactcttcccaccacgacagattctgatgagaaaaaatcgagtgagtatacacctcctagtaaaaaccttagagttccaaggcaacgatacaattcgattgaatcagatctcataaatccgtcgccaatggagaaccaccatgtggtagtgtcgagaagggagagacatgatgttatgccgtatagttcgtatcaacaaacaggtaagacaccgaggaagaagacaaggatcgagaaacaaagatcagtgaaagattacgatcgtggccgagcttccccgtacttatcgaagcacggaacaccattgagatcaaacattatcgcatctactccgatgagatctaacggagttggatcaactcctatgagatccaacatcatcgcaatgtcaccgatgcatcccaacatggttggatcgactccaatgcgaactcctatgcggtctaacatggttggttcgactccaatgagatcaaacatcgtcggatcaaccccgatccgatcaaactacatggctacaccgatgagaactcatcacgattttggtacaccagtgaggaatttagctggaagacgaatcttaactgaatcggagttaggaccatcgccatctgaagtggctgacaaattggcgaaagatagatcgcacgaaacggaaagttcaatactcagcgaatggagcatcgatgaatctagcatcgaaggattgcgatcaaaactcgagagatggcgaacagagcttccaccgttgtacgacataggatcaagccatataagtagcactgattacgatggcgcgagcgttccagctgcaactgccgggggaggaatgagttcaagacggaaaactccgacgacgaaaaagcataaccgccgtcacacagatggaggtaatggacttttctcgtgttttagtaagatttgtggtgtggaatgcagtttcgtatgcggtggtggtggtgggccgatggtctcagaaggatctactaagaaaggtggagccggacgtgtgcaacgcacatattccgctgacgatctgagctttgtgtga

SEQ ID NO: 80713 - protein, 601 aa, Arabidopsis thaliana
  peptide (1)..(601): Ceres Seq. ID no. 12656964
  misc_feature (11)..(95): Pfam Name: C2 domain Pfam Description: C2 domain
  misc_feature (4)..(548): Homolog of NCBI NO: 25372827 NR Description: hypothetical protein [imported] - Arabidopsis >gi|2494130|gb|AAB80639.1| Contains similarity to Glycine SRC2
  misc_feature (4)..(601): Homolog of NCBI NO: 15225835 NR Description: hypothetical protein; protein id: At2g33320.1
  misc_feature (388)..(583): Homolog of NCBI NO: 15225023 NR Description: hypothetical protein; protein id: At2g13350.1
  misc_feature (1)..(143): Homolog of NCBI NO: 15225023 NR Description: hypothetical protein; protein id: At2g13350.1
  misc_feature (10)..(204): Homolog of NCBI NO: 21618096 NR Description: unknown [Arabidopsis thaliana]
  misc_feature (446)..(583): Homolog of NCBI NO: 21618096 NR Description: unknown [Arabidopsis thaliana]
  misc_feature (10)..(204): Homolog of NCBI NO: 18396861 NR Description: expressed protein; protein id: At3g04360.1 thaliana] >gi|6721150|gb|AAF26778.1|AC016829_2 hypothetical
  misc_feature (9)..(153): Homolog of NCBI NO: 15234097 NR Description: hypothetical protein; protein id: At4g01200.1, by cDNA: gi_19424080, supported by cDNA: gi_21281234 [Arabidopsis >gi|25407092|pir||G85015 hypothetical protein AT4g01200
  misc_feature (9)..(246): Homolog of NCBI NO: 34912020 NR Description: P0684E06.19 [Oryza sativa (japonica
  misc_feature (11)..(163): Homolog of NCBI NO: 15228227 NR Description: unknown protein; protein id: At3g16510.1 thaliana] >gi|9279650|dbj|BAB01150.1| contains similarity to SRC2
MSMMFPSFQLLELNIISAQDLAPVARKTKTYAVAWVHSERKLTTRVDYNGGTNPTWNDKFVFRVNEEFLYADTSAVVIEIYALHWFRDVHVGTVRVLISNLIPPNRRPGYRTSNNEYRRTPPPGMRFVALQVRRTSGRPQGILNIGVGLIDGSMRSMPLYTHMDSSAVGYRDLLGEEDHHLQHLHLNSNKGSSKNPQSPSSRQYQSVISRPELRRTKSDTSSMVVSDLLSRAERSRLANRQPASAIVSSESETLPTTTDSDEKKSSEYTPPSKNLRVPRQRYNSIESDLINPSPMENHHVVVSRRERHDVMPYSSYQQTGKTPRKKTRIEKQRSVKDYDRGRASPYLSKHGTPLRSNIIASTPMRSNGVGSTPMRSNIIAMSPMHPNMVGSTPMRTPMRSNMVGSTPMRSNIVGSTPIRSNYMATPMRTHHDFGTPVRNLAGRRILTESELGPSPSEVADKLAKDRSHETESSILSEWSIDESSIEGLRSKLERWRTELPPLYDIGSSHISSTDYDGASVPAATAGGGMSSRRKTPTTKKHNRRHTDGGNGLFSCFSKICGVECSFVCGGGGGPMVSEGSTKKGGAGRVQRTYSADDLSFV

SEQ ID NO: 80714 - protein, 599 aa, Arabidopsis thaliana
  peptide (1)..(599): Ceres Seq. ID no. 12656965
  misc_feature (9)..(93): Pfam Name: C2 domain Pfam Description: C2 domain
  misc_feature (2)..(546): Homolog of NCBI NO: 25372827 NR Description: hypothetical protein [imported] - Arabidopsis >gi|2494130|gb|AAB80639.1| Contains similarity to Glycine SRC2
  misc_feature (2)..(599): Homolog of NCBI NO: 15225835 NR Description: hypothetical protein; protein id: At2g33320.1
  misc_feature (386)..(581): Homolog of NCBI NO: 15225023 NR Description: hypothetical protein; protein id: At2g13350.1
  misc_feature (1)..(141): Homolog of NCBI NO: 15225023 NR Description: hypothetical protein; protein id: At2g13350.1
  misc_feature (8)..(202): Homolog of NCBI NO: 21618096 NR Description: unknown [Arabidopsis thaliana]
  misc_feature (444)..(581): Homolog of NCBI NO: 21618096 NR Description: unknown [Arabidopsis thaliana]
  misc_feature (8)..(202): Homolog of NCBI NO: 18396861 NR Description: expressed protein; protein id: At3g04360.1 thaliana] >gi|6721150|gb|AAF26778.1|AC016829_2 hypothetical
  misc_feature (7)..(151): Homolog of NCBI NO: 15234097 NR Description: hypothetical protein; protein id: At4g01200.1, by cDNA: gi_19424080, supported by cDNA: gi_21281234 [Arabidopsis >gi|25407092|pir||G85015 hypothetical protein AT4g01200
  misc_feature (7)..(244): Homolog of NCBI NO: 34912020 NR Description: P0684E06.19 [Oryza sativa (japonica
  misc_feature (9)..(161): Homolog of NCBI NO: 15228227 NR Description: unknown protein; protein id: At3g16510.1 thaliana] >gi|9279650|dbj|BAB01150.1| contains similarity to SRC2
MMFPSFQLLELNIISAQDLAPVARKTKTYAVAWVHSERKLTTRVDYNGGTNPTWNDKFVFRVNEEFLYADTSAVVIEIYALHWFRDVHVGTVRVLISNLIPPNRRPGYRTSNNEYRRTPPPGMRFVALQVRRTSGRPQGILNIGVGLIDGSMRSMPLYTHMDSSAVGYRDLLGEEDHHLQHLHLNSNKGSSKNPQSPSSRQYQSVISRPELRRTKSDTSSMVVSDLLSRAERSRLANRQPASAIVSSESETLPTTTDSDEKKSSEYTPPSKNLRVPRQRYNSIESDLINPSPMENHHVVVSRRERHDVMPYSSYQQTGKTPRKKTRIEKQRSVKDYDRGRASPYLSKHGTPLRSNIIASTPMRSNGVGSTPMRSNIIAMSPMHPNMVGSTPMRTPMRSNMVGSTPMRSNIVGSTPIRSNYMATPMRTHHDFGTPVRNLAGRRILTESELGPSPSEVADKLAKDRSHETESSILSEWSIDESSIEGLRSKLERWRTELPPLYDIGSSHISSTDYDGASVPAATAGGGMSSRRKTPTTKKHNRRHTDGGNGLFSCFSKICGVECSFVCGGGGGPMVSEGSTKKGGAGRVQRTYSADDLSFV

SEQ ID NO: 80715 - protein, 598 aa, Arabidopsis thaliana
  peptide (1)..(598): Ceres Seq. ID no. 12656966
  misc_feature (8)..(92): Pfam Name: C2 domain Pfam Description: C2 domain
  misc_feature (1)..(545): Homolog of NCBI NO: 25372827 NR Description: hypothetical protein [imported] - Arabidopsis >gi|2494130|gb|AAB80639.1| Contains similarity to Glycine SRC2
  misc_feature (1)..(598): Homolog of NCBI NO: 15225835 NR Description: hypothetical protein; protein id: At2g33320.1
  misc_feature (385)..(580): Homolog of NCBI NO: 15225023 NR Description: hypothetical protein; protein id: At2g13350.1
  misc_feature (1)..(140): Homolog of NCBI NO: 15225023 NR Description: hypothetical protein; protein id: At2g13350.1
  misc_feature (7)..(201): Homolog of NCBI NO: 21618096 NR Description: unknown [Arabidopsis thaliana]
  misc_feature (443)..(580): Homolog of NCBI NO: 21618096 NR Description: unknown [Arabidopsis thaliana]
  misc_feature (7)..(201): Homolog of NCBI NO: 18396861 NR Description: expressed protein; protein id: At3g04360.1 thaliana] >gi|6721150|gb|AAF26778.1|AC016829_2 hypothetical
  misc_feature (6)..(150): Homolog of NCBI NO: 15234097 NR Description: hypothetical protein; protein id: At4g01200.1, by cDNA: gi_19424080, supported by cDNA: gi_21281234 [Arabidopsis >gi|25407092|pir||G85015 hypothetical protein AT4g01200
  misc_feature (6)..(243): Homolog of NCBI NO: 34912020 NR Description: P0684E06.19 [Oryza sativa (japonica
  misc_feature (8)..(160): Homolog of NCBI NO: 15228227 NR Description: unknown protein; protein id: At3g16510.1 thaliana] >gi|9279650|dbj|BAB01150.1| contains similarity to SRC2
MFPSFQLLELNIISAQDLAPVARKTKTYAVAWVHSERKLTTRVDYNGGTNPTWNDKFVFRVNEEFLYADTSAVVIEIYALHWFRDVHVGTVRVLISNLIPPNRRPGYRTSNNEYRRTPPPGMRFVALQVRRTSGRPQGILNIGVGLIDGSMRSMPLYTHMDSSAVGYRDLLGEEDHHLQHLHLNSNKGSSKNPQSPSSRQYQSVISRPELRRTKSDTSSMVVSDLLSRAERSRLANRQPASAIVSSESETLPTTTDSDEKKSSEYTPPSKNLRVPRQRYNSIESDLINPSPMENHHVVVSRRERHDVMPYSSYQQTGKTPRKKTRIEKQRSVKDYDRGRASPYLSKHGTPLRSNIIASTPMRSNGVGSTPMRSNIIAMSPMHPNMVGSTPMRTPMRSNMVGSTPMRSNIVGSTPIRSNYMATPMRTHHDFGTPVRNLAGRRILTESELGPSPSEVADKLAKDRSHETESSILSEWSIDESSIEGLRSKLERWRTELPPLYDIGSSHISSTDYDGASVPAATAGGGMSSRRKTPTTKKHNRRHTDGGNGLFSCFSKICGVECSFVCGGGGGPMVSEGSTKKGGAGRVQRTYSADDLSFV

SEQ ID NO: 80716 - DNA, 802 bp, Arabidopsis thaliana
  misc_feature (1)..(802): Ceres Seq. ID no. 12656967
  misc_feature: MA Experiment ID: 20000179 Result: Down-regulated in Transcription
  misc_feature: MA Experiment 20000179 PARAMETER Experiment Name: At_Germinating_Seeds_P Parameter: Age (hr) Value: 6 vs. 0
  misc_feature: MA Experiment 20000179 PARAMETER Experiment Name: At_Germinating_Seeds_P Parameter: Tissue Value: Germinating Seeds
  misc_feature: MA Experiment ID: 20000180 Result: Down-regulated in Transcription
  misc_feature: MA Experiment 20000180 PARAMETER Experiment Name: At_Germinating_Seeds_P Parameter: Age (hr) Value: 24 vs. 0
  misc_feature: MA Experiment 20000180 PARAMETER Experiment Name: At_Germinating_Seeds_P Parameter: Tissue Value: Germinating Seeds
  misc_feature: MA Experiment ID: 20000184 Result: Up-regulated in Transcription
  misc_feature: MA Experiment 20000184 PARAMETER Experiment Name: At_Shoots__P Parameter: Age (day) Value: 7
  misc_feature: MA Experiment 20000184 PARAMETER Experiment Name: At_Shoots__P Parameter: Tissue Value: Shoots vs. Whole Plant
  misc_feature: MA Experiment ID: 20000436 Result: Up-regulated in Transcription
  misc_feature: MA Experiment 20000436 PARAMETER Experiment Name: At_Drought_P Parameter: Age (day) Value: 7
  misc_feature: MA Experiment 20000436 PARAMETER Experiment Name: At_Drought_P Parameter: Organism Value: A. thaliana
  misc_feature: MA Experiment 20000436 PARAMETER Experiment Name: At_Drought_P Parameter: Plant Line Value: WS
  misc_feature: MA Experiment 20000436 PARAMETER Experiment Name: At_Drought_P Parameter: Timepoint (hr) Value: 12
  misc_feature: MA Experiment 20000436 PARAMETER Experiment Name: At_Drought_P Parameter: Tissue Value: Whole Plant
  misc_feature: MA Experiment 20000436 PARAMETER Experiment Name: At_Drought_P Parameter: Treatment Value: Drought vs. No Drought
  misc_feature: MA Experiment ID: 20000437 Result: Up-regulated in Transcription
  misc_feature: MA Experiment 20000437 PARAMETER Experiment Name: At_Drought_P Parameter: Age (day) Value: 8
  misc_feature: MA Experiment 20000437 PARAMETER Experiment Name: At_Drought_P Parameter: Organism Value: A. thaliana
  misc_feature: MA Experiment 20000437 PARAMETER Experiment Name: At_Drought_P Parameter: Plant Line Value: WS
  misc_feature: MA Experiment 20000437 PARAMETER Experiment Name: At_Drought_P Parameter: Timepoint (hr) Value: 24
  misc_feature: MA Experiment 20000437 PARAMETER Experiment Name: At_Drought_P Parameter: Tissue Value: Whole Plant
  misc_feature: MA Experiment 20000437 PARAMETER Experiment Name: At_Drought_P Parameter: Treatment Value: Drought vs. No Drought
  misc_feature: MA Experiment ID: 20000438 Result: Up-regulated in Transcription
  misc_feature: MA Experiment 20000438 PARAMETER Experiment Name: At_Shoots__P Parameter: Age (day) Value: 14
  misc_feature: MA Experiment 20000438 PARAMETER Experiment Name: At_Shoots__P Parameter: Tissue Value: Shoots vs. Whole Plant
  misc_feature: MA Experiment ID: 20000451 Result: Up-regulated in Transcription
  misc_feature: MA Experiment 20000451 PARAMETER Experiment Name: At_CS6879_Shoots-Roots_P Parameter: Age (day) Value: 14
  misc_feature: MA Experiment 20000451 PARAMETER Experiment Name: At_CS6879_Shoots-Roots_P Parameter: Organism Value: A. thaliana
  misc_feature: MA Experiment 20000451 PARAMETER Experiment Name: At_CS6879_Shoots-Roots_P Parameter: Plant Line Value: CS6879 vs. WS
  misc_feature: MA Experiment 20000451 PARAMETER Experiment Name: At_CS6879_Shoots-Roots_P Parameter: Tissue Value: Roots
  misc_feature: MA Experiment ID: 20000452 Result: Up-regulated in Transcription
  misc_feature: MA Experiment 20000452 PARAMETER Experiment Name: At_CS6879_Shoots-Roots_P Parameter: Age (day) Value: 14
  misc_feature: MA Experiment 20000452 PARAMETER Experiment Name: At_CS6879_Shoots-Roots_P Parameter: Organism Value: A. thaliana
  misc_feature: MA Experiment 20000452 PARAMETER Experiment Name: At_CS6879_Shoots-Roots_P Parameter: Plant Line Value: CS6879 vs. WS
  misc_feature: MA Experiment 20000452 PARAMETER Experiment Name: At_CS6879_Shoots-Roots_P Parameter: Tissue Value: Shoots
  misc_feature: MA Experiment ID: 20001451 Result: Up-regulated in Transcription
  misc_feature: MA Experiment 20001451 PARAMETER Experiment Name: At_Far-red-induction_P Parameter: Age (day) Value: 7
  misc_feature: MA Experiment 20001451 PARAMETER Experiment Name: At_Far-red-induction_P Parameter: Light Value: Far-red vs. White
  misc_feature: MA Experiment 20001451 PARAMETER Experiment Name: At_Far-red-induction_P Parameter: Organism Value: A. thaliana
  misc_feature: MA Experiment 20001451 PARAMETER Experiment Name: At_Far-red-induction_P Parameter: Plant Line Value: Columbia
  misc_feature: MA Experiment 20001451 PARAMETER Experiment Name: At_Far-red-induction_P Parameter: Timepoint (hr) Value: 24
  misc_feature: MA Experiment 20001451 PARAMETER Experiment Name: At_Far-red-induction_P Parameter: Tissue Value: Whole Plant
  misc_feature: MA Experiment ID: 20001457 Result: Down-regulated in Transcription
  misc_feature: MA Experiment 20001457 PARAMETER Experiment Name: At_50mM_NH4NO3_L-to-H_P Parameter: Age (day) Value: Undefined
  misc_feature: MA Experiment 20001457 PARAMETER Experiment Name: At_50mM_NH4NO3_L-to-H_P Parameter: Organism Value: Undefined
  misc_feature: MA Experiment 20001457 PARAMETER Experiment Name: At_50mM_NH4NO3_L-to-H_P Parameter: Plant Line Value: Undefined
  misc_feature: MA Experiment 20001457 PARAMETER Experiment Name: At_50mM_NH4NO3_L-to-H_P Parameter: Timepoint (hr) Value: 0.5
  misc_feature: MA Experiment 20001457 PARAMETER Experiment Name: At_50mM_NH4NO3_L-to-H_P Parameter: Tissue Value: Siliques
  misc_feature: MA Experiment 20001457 PARAMETER Experiment Name: At_50mM_NH4NO3_L-to-H_P Parameter: Treatment Value: 50mM NH4NO3 vs. 100mM Manitol
  misc_feature: MA Experiment ID: 20001459 Result: Down-regulated in Transcription
  misc_feature: MA Experiment 20001459 PARAMETER Experiment Name: At_50mM_NH4NO3_L-to-H_P Parameter: Age (day) Value: Undefined
  misc_feature: MA Experiment 20001459 PARAMETER Experiment Name: At_50mM_NH4NO3_L-to-H_P Parameter: Organism Value: Undefined
  misc_feature: MA Experiment 20001459 PARAMETER Experiment Name: At_50mM_NH4NO3_L-to-H_P Parameter: Plant Line Value: Undefined
  misc_feature: MA Experiment 20001459 PARAMETER Experiment Name: At_50mM_NH4NO3_L-to-H_P Parameter: Timepoint (hr) Value: 4
  misc_feature: MA Experiment 20001459 PARAMETER Experiment Name: At_50mM_NH4NO3_L-to-H_P Parameter: Tissue Value: Siliques
  misc_feature: MA Experiment 20001459 PARAMETER Experiment Name: At_50mM_NH4NO3_L-to-H_P Parameter: Treatment Value: 50mM NH4NO3 vs. 100mM Manitol
  misc_feature: MA Experiment ID: 20001556 Result: Up-regulated in Transcription
  misc_feature: MA Experiment 20001556 PARAMETER Experiment Name: At_Drought_Soil_Dry_P Parameter: Age (day) Value: 26
  misc_feature: MA Experiment 20001556 PARAMETER Experiment Name: At_Drought_Soil_Dry_P Parameter: Organism Value: A. thaliana
  misc_feature: MA Experiment 20001556 PARAMETER Experiment Name: At_Drought_Soil_Dry_P Parameter: Plant Line Value: WS
  misc_feature: MA Experiment 20001556 PARAMETER Experiment Name: At_Drought_Soil_Dry_P Parameter: Post Timepoint (hr) Value: None
  misc_feature: MA Experiment 20001556 PARAMETER Experiment Name: At_Drought_Soil_Dry_P Parameter: Post-Treatment Value: None
  misc_feature: MA Experiment 20001556 PARAMETER Experiment Name: At_Drought_Soil_Dry_P Parameter: Timepoint (day) Value: 12
  misc_feature: MA Experiment 20001556 PARAMETER Experiment Name: At_Drought_Soil_Dry_P Parameter: Treatment Value: Drought vs. No Drought
  misc_feature: MA Experiment ID: 20001557 Result: Up-regulated in Transcription
  misc_feature: MA Experiment 20001557 PARAMETER Experiment Name: At_Drought_Soil_Dry_P Parameter: Age (day) Value: 27
  misc_feature: MA Experiment 20001557 PARAMETER Experiment Name: At_Drought_Soil_Dry_P Parameter: Organism Value: A. thaliana
  misc_feature: MA Experiment 20001557 PARAMETER Experiment Name: At_Drought_Soil_Dry_P Parameter: Plant Line Value: WS
  misc_feature: MA Experiment 20001557 PARAMETER Experiment Name: At_Drought_Soil_Dry_P Parameter: Post Timepoint (hr) Value: 3
  misc_feature: MA Experiment 20001557 PARAMETER Experiment Name: At_Drought_Soil_Dry_P Parameter: Post-Treatment Value: Re-Water vs. No Drought
  misc_feature: MA Experiment 20001557 PARAMETER Experiment Name: At_Drought_Soil_Dry_P Parameter: Timepoint (day) Value: 13
  misc_feature: MA Experiment 20001557 PARAMETER Experiment Name: At_Drought_Soil_Dry_P Parameter: Treatment Value: Drought vs. No Drought
  misc_feature: MA Experiment ID: 20001559 Result: Up-regulated in Transcription
  misc_feature: MA Experiment 20001559 PARAMETER Experiment Name: At_Drought_Soil_Dry_P Parameter: Age (day) Value: 28
  misc_feature: MA Experiment 20001559 PARAMETER Experiment Name: At_Drought_Soil_Dry_P Parameter: Organism Value: A. thaliana
  misc_feature: MA Experiment 20001559 PARAMETER Experiment Name: At_Drought_Soil_Dry_P Parameter: Plant Line Value: WS
  misc_feature: MA Experiment 20001559 PARAMETER Experiment Name: At_Drought_Soil_Dry_P Parameter: Post Timepoint (hr) Value: 29
  misc_feature: MA Experiment 20001559 PARAMETER Experiment Name: At_Drought_Soil_Dry_P Parameter: Post-Treatment Value: Re-Water vs. No Drought
  misc_feature: MA Experiment 20001559 PARAMETER Experiment Name: At_Drought_Soil_Dry_P Parameter: Timepoint (day) Value: 14
  misc_feature: MA Experiment 20001559 PARAMETER Experiment Name: At_Drought_Soil_Dry_P Parameter: Treatment Value: Drought vs. No Drought
  misc_feature: MA Experiment ID: 20001759 Result: Down-regulated in Transcription
  misc_feature: MA Experiment 20001759 PARAMETER Experiment Name: At_50mM_NH4NO3_L-to-H_P Parameter: Timepoint (hr) Value: 1
  misc_feature: MA Experiment 20001759 PARAMETER Experiment Name: At_50mM_NH4NO3_L-to-H_P Parameter: Tissue Value: Siliques
  misc_feature: MA Experiment 20001759 PARAMETER Experiment Name: At_50mM_NH4NO3_L-to-H_P Parameter: Treatment Value: 50mM NH4NO3 vs 100mM Mannitol
  misc_feature: MA Experiment ID: 20001904 Result: Up-regulated in Transcription
  misc_feature: MA Experiment 20001904 PARAMETER Experiment Name: At_Drought_Reproduction_P Parameter: Age (day) Value: 37
  misc_feature: MA Experiment 20001904 PARAMETER Experiment Name: At_Drought_Reproduction_P Parameter: Organism Value: A. thaliana
  misc_feature: MA Experiment 20001904 PARAMETER Experiment Name: At_Drought_Reproduction_P Parameter: Plant Line Value: WS
  misc_feature: MA Experiment 20001904 PARAMETER Experiment Name: At_Drought_Reproduction_P Parameter: Timepoint (day) Value: 7
  misc_feature: MA Experiment 20001904 PARAMETER Experiment Name: At_Drought_Reproduction_P Parameter: Tissue Value: Rosettes
  misc_feature: MA Experiment 20001904 PARAMETER Experiment Name: At_Drought_Reproduction_P Parameter: Treatment Value: Drought vs. No Drought
  misc_feature: MA Experiment ID: 20001905 Result: Up-regulated in Transcription
  misc_feature: MA Experiment 20001905 PARAMETER Experiment Name: At_Drought_Reproduction_P Parameter: Age (day) Value: 40
  misc_feature: MA Experiment 20001905 PARAMETER Experiment Name: At_Drought_Reproduction_P Parameter: Organism Value: A. thaliana
  misc_feature: MA Experiment 20001905 PARAMETER Experiment Name: At_Drought_Reproduction_P Parameter: Plant Line Value: WS
  misc_feature: MA Experiment 20001905 PARAMETER Experiment Name: At_Drought_Reproduction_P Parameter: Timepoint (day) Value: 10
  misc_feature: MA Experiment 20001905 PARAMETER Experiment Name: At_Drought_Reproduction_P Parameter: Tissue Value: Rosettes
  misc_feature: MA Experiment 20001905 PARAMETER Experiment Name: At_Drought_Reproduction_P Parameter: Treatment Value: Drought vs. No Drought
  misc_feature: MA Experiment ID: 20001906 Result: Up-regulated in Transcription
  misc_feature: MA Experiment 20001906 PARAMETER Experiment Name: At_Drought_Reproduction_P Parameter: Age (day) Value: 35
  misc_feature: MA Experiment 20001906 PARAMETER Experiment Name: At_Drought_Reproduction_P Parameter: Organism Value: A. thaliana
  misc_feature: MA Experiment 20001906 PARAMETER Experiment Name: At_Drought_Reproduction_P Parameter: Plant Line Value: WS
  misc_feature: MA Experiment 20001906 PARAMETER Experiment Name: At_Drought_Reproduction_P Parameter: Timepoint (day) Value: 5
  misc_feature: MA Experiment 20001906 PARAMETER Experiment Name: At_Drought_Reproduction_P Parameter: Tissue Value: Siliques
  misc_feature: MA Experiment 20001906 PARAMETER Experiment Name: At_Drought_Reproduction_P Parameter: Treatment Value: Drought vs. No Drought
  misc_feature: MA Experiment ID: 20001907 Result: Up-regulated in Transcription
  misc_feature: MA Experiment 20001907 PARAMETER Experiment Name: At_Drought_Reproduction_P Parameter: Age (day) Value: 37
  misc_feature: MA Experiment 20001907 PARAMETER Experiment Name: At_Drought_Reproduction_P Parameter: Organism Value: A. thaliana
  misc_feature: MA Experiment 20001907 PARAMETER Experiment Name: At_Drought_Reproduction_P Parameter: Plant Line Value: WS
  misc_feature: MA Experiment 20001907 PARAMETER Experiment Name: At_Drought_Reproduction_P Parameter: Timepoint (day) Value: 7
  misc_feature: MA Experiment 20001907 PARAMETER Experiment Name: At_Drought_Reproduction_P Parameter: Tissue Value: Siliques
  misc_feature: MA Experiment 20001907 PARAMETER Experiment Name: At_Drought_Reproduction_P Parameter: Treatment Value: Drought vs. No Drought
  misc_feature: MA Experiment ID: 20001908 Result: Up-regulated in Transcription
  misc_feature: MA Experiment 20001908 PARAMETER Experiment Name: At_Drought_Reproduction_P Parameter: Age (day) Value: 40
  misc_feature: MA Experiment 20001908 PARAMETER Experiment Name: At_Drought_Reproduction_P Parameter: Organism Value: A. thaliana
  misc_feature: MA Experiment 20001908 PARAMETER Experiment Name: At_Drought_Reproduction_P Parameter: Plant Line Value: WS
  misc_feature: MA Experiment 20001908 PARAMETER Experiment Name: At_Drought_Reproduction_P Parameter: Timepoint (day) Value: 10
  misc_feature: MA Experiment 20001908 PARAMETER Experiment Name: At_Drought_Reproduction_P Parameter: Tissue Value: Siliques
  misc_feature: MA Experiment 20001908 PARAMETER Experiment Name: At_Drought_Reproduction_P Parameter: Treatment Value: Drought vs. No Drought
  misc_feature: MA Experiment ID: 20001910 Result: Up-regulated in Transcription
  misc_feature: MA Experiment 20001910 PARAMETER Experiment Name: At_Drought_Reproduction_P Parameter: Age (day) Value: 37
  misc_feature: MA Experiment 20001910 PARAMETER Experiment Name: At_Drought_Reproduction_P Parameter: Organism Value: A. thaliana
  misc_feature: MA Experiment 20001910 PARAMETER Experiment Name: At_Drought_Reproduction_P Parameter: Plant Line Value: WS
  misc_feature: MA Experiment 20001910 PARAMETER Experiment Name: At_Drought_Reproduction_P Parameter: Timepoint (day) Value: 7
  misc_feature: MA Experiment 20001910 PARAMETER Experiment Name: At_Drought_Reproduction_P Parameter: Tissue Value: Flowers
  misc_feature: MA Experiment 20001910 PARAMETER Experiment Name: At_Drought_Reproduction_P Parameter: Treatment Value: Drought vs. No Drought
gttgcaaagagaagaaaggtttcgagtagcaaaagagtaaaactagatctttaggagaaggtaaaagaagcaattgatggcgacgacagtgggaagaaacatagcagcaccattgctgttcttgaatcttgttatgtacctgattgtgcttggttttgcaagttggtgtctcaataaatacatcaacggccaaactaaccacccaagttttggaggcaatggagcaacaccgttcttcttgacgttttcgatattggcggctgtggtaggagtagcgtcgaagttggccggagcaaatcatattaggttttggaggaatgatagtttagccgctgctggagcttcttccatcgttgcatgggctatcacagctcttgccatggggttggcatgcaaacaaataaacataggaggatggagaggatggagactgaagatgattgaagccttcattatcattttgacgttcacgcagcttctctacctcatgttgatccatgccggttcactcagcagcaaatatggtcctggatacagagaccaagactatgctacaggccaagctcatggtcatggtcatgtaccacacactgtgggagagcacaaggctggtgttggatctaccatggcagtctgatgaaaatctgtgtcttttaattgtgttttgacgtttggttaagaagtacttattatagtttatgttttttcaagttatgtaataatgtaattcctatccatctgacaaacgaacgaatcttgtgtgttcttttgttaattagttaaatggagatgtgtttctttg

SEQ ID NO: 80717 - protein, 186 aa, Arabidopsis thaliana
  peptide (1)..(186): Ceres Seq. ID no. 12656968
  misc_feature (15)..(144): Pfam Name: AWPM-19-like family Pfam Description: AWPM-19-like family
  misc_feature (1)..(186): Homolog of NCBI NO: 18390408 NR Description: expressed protein; protein id: At1g04560.1, by cDNA: gi_13507554, supported by cDNA: gi_15293292 [Arabidopsis
  misc_feature (4)..(183): Homolog of NCBI NO: 7488688 NR Description: maturation protein PM3 - soybean a Lea protein with hydrophobic domain, high pI value (11.6); 15kD
  misc_feature (5)..(167): Homolog of NCBI NO: 4097340 NR Description: hydrophobic LEA-like protein [Oryza sativa]
  misc_feature (5)..(182): Homolog of NCBI NO: 6851373 NR Description: plasma membrane associated protein [Hordeum
  misc_feature (5)..(180): Homolog of NCBI NO: 7489659 NR Description: ABA-induced plasma membrane protein PM 19 - wheat
  misc_feature (1)..(143): Homolog of NCBI NO: 34911480 NR Description: putative plasma membrane associated protein
  misc_feature (9)..(141): Homolog of NCBI NO: 15218953 NR Description: plasma membrane associated protein, putative; id: At1g29520.1, supported by cDNA: gi_18377740, supported by gi_20465528 [Arabidopsis thaliana] >gi|25354594|pir||B86418
  misc_feature (1)..(111): Homolog of NCBI NO: 34904644 NR Description: putative ABA-induced plasma membrane protein
  misc_feature (122)..(144): Homolog of NCBI NO: 34904644 NR Description: putative ABA-induced plasma membrane protein
  misc_feature (1)..(143): Homolog of NCBI NO: 15239619 NR Description: plasma membrane associated protein -like; protein
MATTVGRNIAAPLLFLNLVMYLIVLGFASWCLNKYINGQTNHPSFGGNGATPFFLTFSILAAVVGVASKLAGANHIRFWRNDSLAAAGASSIVAWAITALAMGLACKQINIGGWRGWRLKMIEAFIIILTFTQLLYLMLIHAGSLSSKYGPGYRDQDYATGQAHGHGHVPHTVGEHKAGVGSTMAV

SEQ ID NO: 80718 - protein, 167 aa, Arabidopsis thaliana
  peptide (1)..(167): Ceres Seq. ID no. 12656969
  misc_feature (1)..(125): Pfam Name: AWPM-19-like family Pfam Description: AWPM-19-like family
  misc_feature (1)..(167): Homolog of NCBI NO: 18390408 NR Description: expressed protein; protein id: At1g04560.1, by cDNA: gi_13507554, supported by cDNA: gi_15293292 [Arabidopsis
  misc_feature (1)..(164): Homolog of NCBI NO: 7488688 NR Description: maturation protein PM3 - soybean a Lea protein with hydrophobic domain, high pI value (11.6); 15kD
  misc_feature (1)..(148): Homolog of NCBI NO: 4097340 NR Description: hydrophobic LEA-like protein [Oryza sativa]
  misc_feature (1)..(163): Homolog of NCBI NO: 6851373 NR Description: plasma membrane associated protein [Hordeum
  misc_feature (1)..(161): Homolog of NCBI NO: 7489659 NR Description: ABA-induced plasma membrane protein PM 19 - wheat
  misc_feature (1)..(124): Homolog of NCBI NO: 34911480 NR Description: putative plasma membrane associated protein
  misc_feature (1)..(122): Homolog of NCBI NO: 15218953 NR Description: plasma membrane associated protein, putative; id: At1g29520.1, supported by cDNA: gi_18377740, supported by gi_20465528 [Arabidopsis thaliana] >gi|25354594|pir||B86418
  misc_feature (1)..(92): Homolog of NCBI NO: 34904644 NR Description: putative ABA-induced plasma membrane protein
  misc_feature (103)..(125): Homolog of NCBI NO: 34904644 NR Description: putative ABA-induced plasma membrane protein
  misc_feature (1)..(124): Homolog of NCBI NO: 15239619 NR Description: plasma membrane associated protein -like; protein
MYLIVLGFASWCLNKYINGQTNHPSFGGNGATPFFLTFSILAAVVGVASKLAGANHIRFWRNDSLAAAGASSIVAWAITALAMGLACKQINIGGWRGWRLKMIEAFIIILTFTQLLYLMLIHAGSLSSKYGPGYRDQDYATGQAHGHGHVPHTVGEHKAGVGSTMAV

SEQ ID NO: 80719 - DNA, 663 bp, Arabidopsis thaliana
  misc_feature (1)..(663): Ceres Seq. ID no. 12656974
  misc_feature: MA Experiment ID: 20000440 Result: Up-regulated in Transcription
  misc_feature: MA Experiment 20000440 PARAMETER Experiment Name: At_Closed-Flower__Sub_P Parameter: Tissue Value: Closed Flower vs. Whole Plant
atgggacaacaatcgttgatctacagcttcgtcgctcgcggtacggtgatcctcgccgagtataccgagttcaagggcaatttcacctccgtcgccgctcagtgtctccagaaacttccgtcctcgaacaacaaatttacctacaattgcgacggtcacactttcaattatctcgctgataatggcttcacctattgtgttgttgttattgaatctgctgggaggcagataccaatggctttcttggagagagtcaaggaggatttcaacaagagatacggtggtggaaaagcttccactgctaaagccaacagcttgaacaaagaattcgggtctaaattgaaggagcacatgcagtactgtgcggatcatcctgaggagattagcaaactttccaaagttaaggctcaggtgactgaagtgaagggtgttatgatggagaatattgagaaggtccttgaccgtggagagaaaatcgagctattagtagacaaaactgagaaccttcgctcacaggcacaagattttagaacacaaggaacaaagatgaaaagaaagttgtggttcgaaaacatgaagataaagctcatagtctttggcatcattgtcgctttgattctcatcatcattttgtcggtttgccatggcttcaagtgtacttaa

SEQ ID NO: 80720 - protein, 220 aa, Arabidopsis thaliana
  peptide (1)..(220): Ceres Seq. ID no. 12656975
  misc_feature (127)..(215): Pfam Name: Synaptobrevin Pfam Description: Synaptobrevin
  misc_feature (1)..(220): Homolog of NCBI NO: 15220315 NR Description: synaptobrevin 7B, putative; protein id:
  misc_feature (1)..(220): Homolog of NCBI NO: 27805765 NR Description: Putative vesicle-associated membrane protein 726
  misc_feature (1)..(220): Homolog of NCBI NO: 27805753 NR Description: Vesicle-associated membrane protein 725
  misc_feature (1)..(220): Homolog of NCBI NO: 30685375 NR Description: synaptobrevin -related [Arabidopsis thaliana] putative synaptobrevin [Arabidopsis thaliana]
  misc_feature (1)..(219): Homolog of NCBI NO: 15225796 NR Description: putative synaptobrevin; protein id: At2g33120.1, by cDNA: 2443., supported by cDNA: gi_16930420, supported by
  misc_feature (1)..(219): Homolog of NCBI NO: 15220943 NR Description: synaptobrevin 7B, putative; protein id:
  misc_feature (1)..(219): Homolog of NCBI NO: 600710 NR Description: formerly called HAT24; synaptobrevin-related
  misc_feature (1)..(219): Homolog of NCBI NO: 29150380 NR Description: synaptobrevin-like protein [Oryza sativa
  misc_feature (1)..(194): Homolog of NCBI NO: 33347409 NR Description: synptobrevin-related protein [Pyrus pyrifolia]
  misc_feature (1)..(220): Homolog of NCBI NO: 27805752 NR Description: Vesicle-associated membrane protein 724
MGQQSLIYSFVARGTVILAEYTEFKGNFTSVAAQCLQKLPSSNNKFTYNCDGHTFNYLADNGFTYCVVVIESAGRQIPMAFLERVKEDFNKRYGGGKASTAKANSLNKEFGSKLKEHMQYCADHPEEISKLSKVKAQVTEVKGVMMENIEKVLDRGEKIELLVDKTENLRSQAQDFRTQGTKMKRKLWFENMKIKLIVFGIIVALILIIILSVCHGFKCT

SEQ ID NO: 80721 - protein, 142 aa, Arabidopsis thaliana
  peptide (1)..(142): Ceres Seq. ID no. 12656976
  misc_feature (49)..(137): Pfam Name: Synaptobrevin Pfam Description: Synaptobrevin
  misc_feature (1)..(142): Homolog of NCBI NO: 15220315 NR Description: synaptobrevin 7B, putative; protein id:
  misc_feature (1)..(142): Homolog of NCBI NO: 27805765 NR Description: Putative vesicle-associated membrane protein 726
  misc_feature (1)..(142): Homolog of NCBI NO: 27805753 NR Description: Vesicle-associated membrane protein 725
  misc_feature (1)..(142): Homolog of NCBI NO: 30685375 NR Description: synaptobrevin -related [Arabidopsis thaliana] putative synaptobrevin [Arabidopsis thaliana]
  misc_feature (1)..(141): Homolog of NCBI NO: 15225796 NR Description: putative synaptobrevin; protein id: At2g33120.1, by cDNA: 2443., supported by cDNA: gi_16930420, supported by
  misc_feature (1)..(141): Homolog of NCBI NO: 15220943 NR Description: synaptobrevin 7B, putative; protein id:
  misc_feature (1)..(141): Homolog of NCBI NO: 600710 NR Description: formerly called HAT24; synaptobrevin-related
  misc_feature (1)..(141): Homolog of NCBI NO: 29150380 NR Description: synaptobrevin-like protein [Oryza sativa
  misc_feature (1)..(116): Homolog of NCBI NO: 33347409 NR Description: synptobrevin-related protein [Pyrus pyrifolia]
  misc_feature (1)..(142): Homolog of NCBI NO: 27805752 NR Description: Vesicle-associated membrane protein 724
MAFLERVKEDFNKRYGGGKASTAKANSLNKEFGSKLKEHMQYCADHPEEISKLSKVKAQVTEVKGVMMENIEKVLDRGEKIELLVDKTENLRSQAQDFRTQGTKMKRKLWFENMKIKLIVFGIIVALILIIILSVCHGFKCT

SEQ ID NO: 80722 - DNA, 1998 bp, Arabidopsis thaliana
  misc_feature (1)..(1998): Ceres Seq. ID no. 12656981
  misc_feature: MA Experiment ID: 20000307 Result: Down-regulated in Transcription
  misc_feature: MA Experiment 20000307 PARAMETER Experiment Name: At_Germinating_Seeds_Sub_P Parameter: Age (hr) Value: 24 vs. 0
  misc_feature: MA Experiment 20000307 PARAMETER Experiment Name: At_Germinating_Seeds_Sub_P Parameter: Organism Value: A. thaliana
  misc_feature: MA Experiment 20000307 PARAMETER Experiment Name: At_Germinating_Seeds_Sub_P Parameter: Plant Line Value: WS
  misc_feature: MA Experiment 20000307 PARAMETER Experiment Name: At_Germinating_Seeds_Sub_P Parameter: Tissue Value: Germinating Seeds
  misc_feature: MA Experiment ID: 20000440 Result: Up-regulated in Transcription
  misc_feature: MA Experiment 20000440 PARAMETER Experiment Name: At_Closed-Flower__Sub_P Parameter: Tissue Value: Closed Flower vs. Whole Plant
atgaaatcgctttctgttatttttaaaccgaaatcttctcccgctaaaatctattttccggccgatcgtcaagcctcaccggacgagtctcacttcatatctctgattcacgcctgtaaagacaccgcaagtctccgccatgttcacgcccagatcctccgtcgcggcgtcctcagtagccgcgtcgctgctcagctcgtatcttgctcttcgcttctcaagtccccggattatagcctctcgattttcagaaattctgaagagaggaatccttttgttttaaatgctttgatccgtggtttgacggagaatgctcgtttcgagtcttcggttcgtcatttcattctcatgttaaggcttggtgtgaaacccgatcggctaacttttccgtttgtactcaagtctaattctaaattaggttttagatggttgggtagggctcttcatgccgcgactttgaagaatttcgttgactgtgactccttcgtcaggttatcattggttgatatgtacgccaaaaccggacaattaaaacatgccttccaagtgttcgaagaaagtcctgatagaatcaaaaaggagagtattttgatatggaatgttttgattaatgggtattgtcgagccaaggatatgcatatggctacaacactttttcgatccatgcctgagagaaattcaggatcttggagtactttgatcaagggttatgttgatagcggcgagttgaacagagcaaagcagctttttgaattaatgccagagaaaaatgtggtgtcttggacaacattaattaatgggttttctcaaactggcgactatgaaactgcgatttctacctatttcgagatgctagagaagggcttaaagcctaatgaatacacaattgctgctgtgctctctgcatgttcaaaatctggtgctcttggatcaggaataagaattcatggttatattttggacaatgggattaagttggatagagccatagggacagctctcgtagacatgtatgcaaaatgtggggaacttgactgtgcggctactgtgttcagtaatatgaaccataaggatattctttcttggactgctatgatacaaggttgggcggttcatggacgctttcatcaggctatccaatgttttagacaaatgatgtattccggagagaagccagatgaggttgtgtttctcgcggttctaactgcatgcttgaactcaagcgaagttgacctgggacttaatttctttgatagcatgaggcttgactatgcaattgaacccacgctgaaacattatgtgttagtcgttgatctgctaggtagagcagggaagttgaacgaagcacatgagcttgtagaaaatatgccgataaatcctgatcttacaacatgggctgcactctatcgtgcttgcaaagcgcacaagggttatagaagggctgaaagtgtgtcacaaaatcttttggagcttgatccagagctttgtggtagttacattttcttagacaaaacacatgcgtctaaagggaacattcaagatgtagagaaaagaagattatcattgcagaagagaatcaaagaaagatcattgggatggagttatatcgaattggacggtcaactgaacaaattttcagctggtgattattctcataagctaacacaggagattggtttgaagcttgatgagatcatatcgcttgccattcagaaaggatacaatccaggagctgattggtcaattcatgacattgaagaagaagagaaggaaaatgttacgggaatccatagtgagaaactggctcttacacttgggtttctaagaactgctcctgggaccacgataaggatcattaagaaccttagaatctgcggagattgtcattctttaatgaaatatgttagtaagatcagccaaagagatattctactgagagatgcaagacagtttcatcatttcaaagatggaagatgttcatgtggtgattattggtga

SEQ ID NO: 80723 - protein, 665 aa, Arabidopsis thaliana
  peptide (1)..(665): Ceres Seq. ID no. 12656982
  misc_feature (360)..(394): Pfam Name: PPR repeat Pfam Description: PPR repeat
  misc_feature (31)..(665): Homolog of NCBI NO: 15221306 NR Description: hypothetical protein; protein id: At1g74630.1
  misc_feature (231)..(665): Homolog of NCBI NO: 30694644 NR Description: pentatricopeptide (PPR) repeat-containing protein
  misc_feature (231)..(665): Homolog of NCBI NO: 30794008 NR Description: unknown protein [Arabidopsis thaliana]
  misc_feature (46)..(226): Homolog of NCBI NO: 30694644 NR Description: pentatricopeptide (PPR) repeat-containing protein
  misc_feature (46)..(226): Homolog of NCBI NO: 30794008 NR Description: unknown protein [Arabidopsis thaliana]
  misc_feature (145)..(665): Homolog of NCBI NO: 15228590 NR Description: hypothetical protein; protein id: At3g03580.1 thaliana] >gi|6091764|gb|AAF03474.1|AC009327_13 hypothetical [Arabidopsis thaliana] >gi|28393735|gb|AAO42278.1| unknown
  misc_feature (30)..(206): Homolog of NCBI NO: 15228590 NR Description: hypothetical protein; protein id: At3g03580.1 thaliana] >gi|6091764|gb|AAF03474.1|AC009327_13 hypothetical [Arabidopsis thaliana] >gi|28393735|gb|AAO42278.1| unknown
  misc_feature (231)..(665): Homolog of NCBI NO: 11281371 NR Description: hypothetical protein T8H10.30 - Arabidopsis >gi|6706414|emb|CAB66100.1| putative protein [Arabidopsis
  misc_feature (117)..(226): Homolog of NCBI NO: 11281371 NR Description: hypothetical protein T8H10.30 - Arabidopsis >gi|6706414|emb|CAB66100.1| putative protein [Arabidopsis
  misc_feature (160)..(665): Homolog of NCBI NO: 15235498 NR Description: hypothetical protein; protein id: At4g02750.1
MKSLSVIFKPKSSPAKIYFPADRQASPDESHFISLIHACKDTASLRHVHAQILRRGVLSSRVAAQLVSCSSLLKSPDYSLSIFRNSEERNPFVLNALIRGLTENARFESSVRHFILMLRLGVKPDRLTFPFVLKSNSKLGFRWLGRALHAATLKNFVDCDSFVRLSLVDMYAKTGQLKHAFQVFEESPDRIKKESILIWNVLINGYCRAKDMHMATTLFRSMPERNSGSWSTLIKGYVDSGELNRAKQLFELMPEKNVVSWTTLINGFSQTGDYETAISTYFEMLEKGLKPNEYTIAAVLSACSKSGALGSGIRIHGYILDNGIKLDRAIGTALVDMYAKCGELDCAATVFSNMNHKDILSWTAMIQGWAVHGRFHQAIQCFRQMMYSGEKPDEVVFLAVLTACLNSSEVDLGLNFFDSMRLDYAIEPTLKHYVLVVDLLGRAGKLNEAHELVENMPINPDLTTWAALYRACKAHKGYRRAESVSQNLLELDPELCGSYIFLDKTHASKGNIQDVEKRRLSLQKRIKERSLGWSYIELDGQLNKFSAGDYSHKLTQEIGLKLDEIISLAIQKGYNPGADWSIHDIEEEEKENVTGIHSEKLALTLGFLRTAPGTTIRIIKNLRICGDCHSLMKYVSKISQRDILLRDARQFHHFKDGRCSCGDYW

SEQ ID NO: 80724 - protein, 549 aa, Arabidopsis thaliana
  peptide (1)..(549): Ceres Seq. ID no. 12656983
  misc_feature (244)..(278): Pfam Name: PPR repeat Pfam Description: PPR repeat
  misc_feature (1)..(549): Homolog of NCBI NO: 15221306 NR Description: hypothetical protein; protein id: At1g74630.1
  misc_feature (115)..(549): Homolog of NCBI NO: 30694644 NR Description: pentatricopeptide (PPR) repeat-containing protein
  misc_feature (115)..(549): Homolog of NCBI NO: 30794008 NR Description: unknown protein [Arabidopsis thaliana]
  misc_feature (1)..(110): Homolog of NCBI NO: 30694644 NR Description: pentatricopeptide (PPR) repeat-containing protein
  misc_feature (1)..(110): Homolog of NCBI NO: 30794008 NR Description: unknown protein [Arabidopsis thaliana]
  misc_feature (29)..(549): Homolog of NCBI NO: 15228590 NR Description: hypothetical protein; protein id: At3g03580.1 thaliana] >gi|6091764|gb|AAF03474.1|AC009327_13 hypothetical [Arabidopsis thaliana] >gi|28393735|gb|AAO42278.1| unknown
  misc_feature (1)..(90): Homolog of NCBI NO: 15228590 NR Description: hypothetical protein; protein id: At3g03580.1 thaliana] >gi|6091764|gb|AAF03474.1|AC009327_13 hypothetical [Arabidopsis thaliana] >gi|28393735|gb|AAO42278.1| unknown
  misc_feature (115)..(549): Homolog of NCBI NO: 11281371 NR Description: hypothetical protein T8H10.30 - Arabidopsis >gi|6706414|emb|CAB66100.1| putative protein [Arabidopsis
  misc_feature (1)..(110): Homolog of NCBI NO: 11281371 NR Description: hypothetical protein T8H10.30 - Arabidopsis >gi|6706414|emb|CAB66100.1| putative protein [Arabidopsis
  misc_feature (44)..(549): Homolog of NCBI NO: 15235498 NR Description: hypothetical protein; protein id: At4g02750.1
MLRLGVKPDRLTFPFVLKSNSKLGFRWLGRALHAATLKNFVDCDSFVRLSLVDMYAKTGQLKHAFQVFEESPDRIKKESILIWNVLINGYCRAKDMHMATTLFRSMPERNSGSWSTLIKGYVDSGELNRAKQLFELMPEKNVVSWTTLINGFSQTGDYETAISTYFEMLEKGLKPNEYTIAAVLSACSKSGALGSGIRIHGYILDNGIKLDRAIGTALVDMYAKCGELDCAATVFSNMNHKDILSWTAMIQGWAVHGRFHQAIQCFRQMMYSGEKPDEVVFLAVLTACLNSSEVDLGLNFFDSMRLDYAIEPTLKHYVLVVDLLGRAGKLNEAHELVENMPINPDLTTWAALYRACKAHKGYRRAESVSQNLLELDPELCGSYIFLDKTHASKGNIQDVEKRRLSLQKRIKERSLGWSYIELDGQLNKFSAGDYSHKLTQEIGLKLDEIISLAIQKGYNPGADWSIHDIEEEEKENVTGIHSEKLALTLGFLRTAPGTTIRIIKNLRICGDCHSLMKYVSKISQRDILLRDARQFHHFKDGRCSCGDYW

SEQ ID NO: 80725 - protein, 496 aa, Arabidopsis thaliana
  peptide (1)..(496): Ceres Seq. ID no. 12656984
  misc_feature (191)..(225): Pfam Name: PPR repeat Pfam Description: PPR repeat
  misc_feature (1)..(496): Homolog of NCBI NO: 15221306 NR Description: hypothetical protein; protein id: At1g74630.1
  misc_feature (62)..(496): Homolog of NCBI NO: 30694644 NR Description: pentatricopeptide (PPR) repeat-containing protein
  misc_feature (62)..(496): Homolog of NCBI NO: 30794008 NR Description: unknown protein [Arabidopsis thaliana]
  misc_feature (1)..(57): Homolog of NCBI NO: 30694644 NR Description: pentatricopeptide (PPR) repeat-containing protein
  misc_feature (1)..(57): Homolog of NCBI NO: 30794008 NR Description: unknown protein [Arabidopsis thaliana]
  misc_feature (1)..(496): Homolog of NCBI NO: 15228590 NR Description: hypothetical protein; protein id: At3g03580.1 thaliana] >gi|6091764|gb|AAF03474.1|AC009327_13 hypothetical [Arabidopsis thaliana] >gi|28393735|gb|AAO42278.1| unknown
  misc_feature (1)..(37): Homolog of NCBI NO: 15228590 NR Description: hypothetical protein; protein id: At3g03580.1 thaliana] >gi|6091764|gb|AAF03474.1|AC009327_13 hypothetical [Arabidopsis thaliana] >gi|28393735|gb|AAO42278.1| unknown
  misc_feature (62)..(496): Homolog of NCBI NO: 11281371 NR Description: hypothetical protein T8H10.30 - Arabidopsis >gi|6706414|emb|CAB66100.1| putative protein [Arabidopsis
  misc_feature (1)..(57): Homolog of NCBI NO: 11281371 NR Description: hypothetical protein T8H10.30 - Arabidopsis >gi|6706414|emb|CAB66100.1| putative protein [Arabidopsis
  misc_feature (1)..(496): Homolog of NCBI NO: 15235498 NR Description: hypothetical protein; protein id: At4g02750.1
MYAKTGQLKHAFQVFEESPDRIKKESILIWNVLINGYCRAKDMHMATTLFRSMPERNSGSWSTLIKGYVDSGELNRAKQLFELMPEKNVVSWTTLINGFSQTGDYETAISTYFEMLEKGLKPNEYTIAAVLSACSKSGALGSGIRIHGYILDNGIKLDRAIGTALVDMYAKCGELDCAATVFSNMNHKDILSWTAMIQGWAVHGRFHQAIQCFRQMMYSGEKPDEVVFLAVLTACLNSSEVDLGLNFFDSMRLDYAIEPTLKHYVLVVDLLGRAGKLNEAHELVENMPINPDLTTWAALYRACKAHKGYRRAESVSQNLLELDPELCGSYIFLDKTHASKGNIQDVEKRRLSLQKRIKERSLGWSYIELDGQLNKFSAGDYSHKLTQEIGLKLDEIISLAIQKGYNPGADWSIHDIEEEEKENVTGIHSEKLALTLGFLRTAPGTTIRIIKNLRICGDCHSLMKYVSKISQRDILLRDARQFHHFKDGRCSCGDYW

SEQ ID NO: 80726 - DNA, 1108 bp, Arabidopsis thaliana
  misc_feature (1)..(1108): Ceres Seq. ID no. 12656989
  misc_feature: MA Experiment ID: 20000314 Result: Up-regulated in Transcription
  misc_feature: MA Experiment 20000314 PARAMETER Experiment Name: At_14day_Shoots-Roots_Sub_P Parameter: Age (day) Value: 14
  misc_feature: MA Experiment 20000314 PARAMETER Experiment Name: At_14day_Shoots-Roots_Sub_P Parameter: Organism Value: A. thaliana
  misc_feature: MA Experiment 20000314 PARAMETER Experiment Name: At_14day_Shoots-Roots_Sub_P Parameter: Plant Line Value: WS
  misc_feature: MA Experiment 20000314 PARAMETER Experiment Name: At_14day_Shoots-Roots_Sub_P Parameter: Tissue Value: Roots vs. Whole Plant
agtactgatcagggaaaatacatcaaatagtgaccaccctgctggttaatcaacaccaagagaccttgtaatatataagttaggaagatgagagagaagtgggaaatgaaaagagatgaaatgggacatcgatgttgtggaaaacacaaagtgaagagaggtctttggtctccagaggaagacgagaagcttcttcgttatatcaccactcatggtcatcctagttggagttccgttccaaagcttgccgggttgcagagatgtgggaagagttgcagattaaggtggataaactatctaaggcctgatctgaggagaggttcgtttaatgaggaagaagagcagattatcatcgacgtacatcgtattcttggtaacaaatgggctcagattgctaagcacttacctggacgcactgataatgaagtcaagaacttttggaactcatgcattaagaagaaacttctttctcaaggcttagatccttctacacataatcttatgccttcacacaaaagatcttcttcttcaaacaataataatatccccaagccaaacaaaacgacgtccatcatgaagaaccctactgatcttgatcaatcaaccactgctttttcaatcacaaacatcaatccacccacttccactaaaccaaacaaacttaaatctcctaaccagactacaatcccatctcaaaccgtgatccctatcaatgataacatgtcaagtactcaaaccatgatccctatcaatgatcccatgtcaagtcttttagatgatgagaatatgattcctcactggtcagatgttgatggaatggcgatccacgaagctccgatgttgcctagtgataaggcagtagtgggagtggatgatgatgatctcaacatggacattttgtttaacactccttcttcttctgcttttgatcctgattttgcttccattttctcctctgcaatgtctatcgatttcaatcccatggatgatcttggcagctggaccttttagcttttactctacaatattttcattttctcaagtgtatatatatgaataattgccactttctgcttttcactagttttgaaaagctgagaattttcca

SEQ ID NO: 80727 - protein, 307 aa, Arabidopsis thaliana
  peptide (1)..(307): Ceres Seq. ID no. 12656990
  misc_feature (24)..(71): Pfam Name: Myb-like DNA-binding domain Pfam Description: Myb-like DNA-binding domain
  misc_feature (1)..(307): Homolog of NCBI NO: 18399724 NR Description: myb family transcription factor; protein id: supported by cDNA: gi_14517437, supported by cDNA: gi_20908077
  misc_feature (12)..(174): Homolog of NCBI NO: 33320067 NR Description: transcription factor Myb [Capsicum annuum]
  misc_feature (12)..(180): Homolog of NCBI NO: 34901838 NR Description: putative myb-related protein [Oryza sativa
  misc_feature (14)..(300): Homolog of NCBI NO: 15223612 NR Description: myb family transcription factor; protein id: supported by cDNA: 250386. [Arabidopsis thaliana]
  misc_feature (12)..(242): Homolog of NCBI NO: 11994360 NR Description: transcription factor-like protein [Arabidopsis
  misc_feature (12)..(226): Homolog of NCBI NO: 2280530 NR Description: ATMYB4 [Arabidopsis thaliana]
  misc_feature (12)..(226): Homolog of NCBI NO: 30690317 NR Description: myb transcription factor (ATMYB4) [Arabidopsis >gi|20466622|gb|AAM20628.1| transcription factor ATMYB4 thaliana] >gi|30984580|gb|AAP42753.1| At5g26655 [Arabidopsis
  misc_feature (12)..(184): Homolog of NCBI NO: 34910458 NR Description: putative transcription factor [Oryza sativa
  misc_feature (12)..(185): Homolog of NCBI NO: 15234262 NR Description: myb family transcription factor; protein id: supported by cDNA: gi_15375280, supported by cDNA: gi_15450989
  misc_feature (12)..(229): Homolog of NCBI NO: 34902542 NR Description: putative transcription factor (myb) [Oryza sativa
MREKWEMKRDEMGHRCCGKHKVKRGLWSPEEDEKLLRYITTHGHPSWSSVPKLAGLQRCGKSCRLRWINYLRPDLRRGSFNEEEEQIIIDVHRILGNKWAQIAKHLPGRTDNEVKNFWNSCIKKKLLSQGLDPSTHNLMPSHKRSSSSNNNNIPKPNKTTSIMKNPTDLDQSTTAFSITNINPPTSTKPNKLKSPNQTTIPSQTVIPINDNMSSTQTMIPINDPMSSLLDDENMIPHWSDVDGMAIHEAPMLPSDKAVVGVDDDDLNMDILFNTPSSSAFDPDFASIFSSAMSIDFNPMDDLGSWTF

SEQ ID NO: 80728 - protein, 301 aa, Arabidopsis thaliana
  peptide (1)..(301): Ceres Seq. ID no. 12656991
  misc_feature (18)..(65): Pfam Name: Myb-like DNA-binding domain Pfam Description: Myb-like DNA-binding domain
  misc_feature (1)..(301): Homolog of NCBI NO: 18399724 NR Description: myb family transcription factor; protein id: supported by cDNA: gi_14517437, supported by cDNA: gi_20908077
  misc_feature (6)..(168): Homolog of NCBI NO: 33320067 NR Description: transcription factor Myb [Capsicum annuum]
  misc_feature (6)..(174): Homolog of NCBI NO: 34901838 NR Description: putative myb-related protein [Oryza sativa
  misc_feature (8)..(294): Homolog of NCBI NO: 15223612 NR Description: myb family transcription factor; protein id: supported by cDNA: 250386. [Arabidopsis thaliana]
  misc_feature (6)..(236): Homolog of NCBI NO: 11994360 NR Description: transcription factor-like protein [Arabidopsis
  misc_feature (6)..(220): Homolog of NCBI NO: 2280530 NR Description: ATMYB4 [Arabidopsis thaliana]
  misc_feature (6)..(220): Homolog of NCBI NO: 30690317 NR Description: myb transcription factor (ATMYB4) [Arabidopsis >gi|20466622|gb|AAM20628.1| transcription factor ATMYB4 thaliana] >gi|30984580|gb|AAP42753.1| At5g26655 [Arabidopsis
  misc_feature (6)..(178): Homolog of NCBI NO: 34910458 NR Description: putative transcription factor [Oryza sativa
  misc_feature (6)..(179): Homolog of NCBI NO: 15234262 NR Description: myb family transcription factor; protein id: supported by cDNA: gi_15375280, supported by cDNA: gi_15450989
  misc_feature (6)..(223): Homolog of NCBI NO: 34902542 NR Description: putative transcription factor (myb) [Oryza sativa
MKRDEMGHRCCGKHKVKRGLWSPEEDEKLLRYITTHGHPSWSSVPKLAGLQRCGKSCRLRWINYLRPDLRRGSFNEEEEQIIIDVHRILGNKWAQIAKHLPGRTDNEVKNFWNSCIKKKLLSQGLDPSTHNLMPSHKRSSSSNNNNIPKPNKTTSIMKNPTDLDQSTTAFSITNINPPTSTKPNKLKSPNQTTIPSQTVIPINDNMSSTQTMIPINDPMSSLLDDENMIPHWSDVDGMAIHEAPMLPSDKAVVGVDDDDLNMDILFNTPSSSAFDPDFASIFSSAMSIDFNPMDDLGSWTF

SEQ ID NO: 80729 - protein, 296 aa, Arabidopsis thaliana
  peptide (1)..(296): Ceres Seq. ID no. 12656992
  misc_feature (13)..(60): Pfam Name: Myb-like DNA-binding domain Pfam Description: Myb-like DNA-binding domain
  misc_feature (1)..(296): Homolog of NCBI NO: 18399724 NR Description: myb family transcription factor; protein id: supported by cDNA: gi_14517437, supported by cDNA: gi_20908077
  misc_feature (1)..(163): Homolog of NCBI NO: 33320067 NR Description: transcription factor Myb [Capsicum annuum]
  misc_feature (1)..(169): Homolog of NCBI NO: 34901838 NR Description: putative myb-related protein [Oryza sativa
  misc_feature (3)..(289): Homolog of NCBI NO: 15223612 NR Description: myb family transcription factor; protein id: supported by cDNA: 250386. [Arabidopsis thaliana]
  misc_feature (1)..(231): Homolog of NCBI NO: 11994360 NR Description: transcription factor-like protein [Arabidopsis
  misc_feature (1)..(215): Homolog of NCBI NO: 2280530 NR Description: ATMYB4 [Arabidopsis thaliana]
  misc_feature (1)..(215): Homolog of NCBI NO: 30690317 NR Description: myb transcription factor (ATMYB4) [Arabidopsis >gi|20466622|gb|AAM20628.1| transcription factor ATMYB4 thaliana] >gi|30984580|gb|AAP42753.1| At5g26655 [Arabidopsis
  misc_feature (1)..(173): Homolog of NCBI NO: 34910458 NR Description: putative transcription factor [Oryza sativa
  misc_feature (1)..(174): Homolog of NCBI NO: 15234262 NR Description: myb family transcription factor; protein id: supported by cDNA: gi_15375280, supported by cDNA: gi_15450989
  misc_feature (1)..(218): Homolog of NCBI NO: 34902542 NR Description: putative transcription factor (myb) [Oryza sativa
MGHRCCGKHKVKRGLWSPEEDEKLLRYITTHGHPSWSSVPKLAGLQRCGKSCRLRWINYLRPDLRRGSFNEEEEQIIIDVHRILGNKWAQIAKHLPGRTDNEVKNFWNSCIKKKLLSQGLDPSTHNLMPSHKRSSSSNNNNIPKPNKTTSIMKNPTDLDQSTTAFSITNINPPTSTKPNKLKSPNQTTIPSQTVIPINDNMSSTQTMIPINDPMSSLLDDENMIPHWSDVDGMAIHEAPMLPSDKAVVGVDDDDLNMDILFNTPSSSAFDPDFASIFSSAMSIDFNPMDDLGSWTF

SEQ ID NO: 80730 - DNA, 6135 bp, Arabidopsis thaliana
  misc_feature (1)..(6135): Ceres Seq. ID no. 12657005
  misc_feature: MA Experiment ID: 20000306 Result: Down-regulated in Transcription
  misc_feature: MA Experiment 20000306 PARAMETER Experiment Name: At_Germinating_Seeds_Sub_P Parameter: Age (hr) Value: 6 vs. 0
  misc_feature: MA Experiment 20000306 PARAMETER Experiment Name: At_Germinating_Seeds_Sub_P Parameter: Organism Value: A. thaliana
  misc_feature: MA Experiment 20000306 PARAMETER Experiment Name: At_Germinating_Seeds_Sub_P Parameter: Plant Line Value: WS
  misc_feature: MA Experiment 20000306 PARAMETER Experiment Name: At_Germinating_Seeds_Sub_P Parameter: Tissue Value: Germinating Seeds
  misc_feature: MA Experiment ID: 20000307 Result: Down-regulated in Transcription
  misc_feature: MA Experiment 20000307 PARAMETER Experiment Name: At_Germinating_Seeds_Sub_P Parameter: Age (hr) Value: 24 vs. 0
  misc_feature: MA Experiment 20000307 PARAMETER Experiment Name: At_Germinating_Seeds_Sub_P Parameter: Organism Value: A. thaliana
  misc_feature: MA Experiment 20000307 PARAMETER Experiment Name: At_Germinating_Seeds_Sub_P Parameter: Plant Line Value: WS
  misc_feature: MA Experiment 20000307 PARAMETER Experiment Name: At_Germinating_Seeds_Sub_P Parameter: Tissue Value: Germinating Seeds
  misc_feature: MA Experiment ID: 20000314 Result: Up-regulated in Transcription
  misc_feature: MA Experiment 20000314 PARAMETER Experiment Name: At_14day_Shoots-Roots_Sub_P Parameter: Age (day) Value: 14
  misc_feature: MA Experiment 20000314 PARAMETER Experiment Name: At_14day_Shoots-Roots_Sub_P Parameter: Organism Value: A. thaliana
  misc_feature: MA Experiment 20000314 PARAMETER Experiment Name: At_14day_Shoots-Roots_Sub_P Parameter: Plant Line Value: WS
  misc_feature: MA Experiment 20000314 PARAMETER Experiment Name: At_14day_Shoots-Roots_Sub_P Parameter: Tissue Value: Roots vs. Whole Plant
  misc_feature: MA Experiment ID: 20000315 Result: Down-regulated in Transcription
  misc_feature: MA Experiment 20000315 PARAMETER Experiment Name: At_14day_Shoots-Roots_Sub_P Parameter: Age (day) Value: 14
  misc_feature: MA Experiment 20000315 PARAMETER Experiment Name: At_14day_Shoots-Roots_Sub_P Parameter: Organism Value: A. thaliana
  misc_feature: MA Experiment 20000315 PARAMETER Experiment Name: At_14day_Shoots-Roots_Sub_P Parameter: Plant Line Value: WS
  misc_feature: MA Experiment 20000315 PARAMETER Experiment Name: At_14day_Shoots-Roots_Sub_P Parameter: Tissue Value: Shoots vs. Whole Plant
  misc_feature: MA Experiment ID: 20000355 Result: Up-regulated in Transcription
  misc_feature: MA Experiment 20000355 PARAMETER Experiment Name: At_Siliques_Sub_P Parameter: Age (day) Value: 21
  misc_feature: MA Experiment 20000355 PARAMETER Experiment Name: At_Siliques_Sub_P Parameter: Organism Value: A. thaliana
  misc_feature: MA Experiment 20000355 PARAMETER Experiment Name: At_Siliques_Sub_P Parameter: Plant Line Value: WS
  misc_feature: MA Experiment 20000355 PARAMETER Experiment Name: At_Siliques_Sub_P Parameter: Tissue Value: Less Than 5mm Siliques vs. Whole Plant
  misc_feature: MA Experiment ID: 20000440 Result: Up-regulated in Transcription
  misc_feature: MA Experiment 20000440 PARAMETER Experiment Name: At_Closed-Flower__Sub_P Parameter: Tissue Value: Closed Flower vs. Whole Plant
atggcgtctaaaggtggtaaatctaaacctgatatagtaatggcgtccaagagtgggaaatctaaacctgataatgaatccagagctaagcgtcagaagacgctcgaagctcctaaagaaccacgtcgtcctaaaactcactgggaccatgtattggaggagatggcttggctgtcaaaggactttgagtctgagaggaaatggaagctggcgcaggcgaagaaggttgctttgagagccagcaaaggaatgctagatcaggcatctagggaagaaaggaagctaaaggaagaagaacagcgacttcggaaagtagccctcaatatctcgaaagacatgaaaaagttttggatgaaagttgagaagctggtgctttacaagcatcagttggtacgcaatgagaagaagaagaaggctatggacaagcaacttgaatttctgttaggccaaactgagaggtactcaaccatgttggcagaaaatttagtggagccttataaacagggccaaaatactccttcaaaacctctactaactatcgaatcaaaaagtgatgaggagagggcagaacagatacctccagagataaattcttgtcttgaatcaggaagtcctgaactcgatgaggattatgatctaaaatctgaggatgagaccgatgaaaaacacttcaccaaacgtgaaagacaggaagagttggaagctttgcaaaatgaagtggatctaccagttgaggagctgctcagacgttatacctctggaagagttagccgagaaaccagcccagtaaaagatgaaaatgaggacaatctgacctcagttagccgagtaaccagcccagtaaaagatgaaaatcaggacaatctggcctcagtaggtcaagatcatggagaggacaagaacaatcttgcagcttctgaagaaactgaagggaacccaagtgttcgtcgttctaatgatagctatggtcatttggcaatatccgagacccattcacatgaccttgagccaggcatgacgactgcatctgtgaagtccagaaaggaagatcatacctatgattttaacgatgaacaggaagatgttgactttgttcttgccaatggtgaggaaaaggatgatgaggcgacattggctgtcgaagaggaactggcgaaagcagataatgaagatcatgtcgaagagattgccctgctgcaaaaagagagtgaaatgcctattgaagtactacttgcaaggtataaggaggatttcggtggcaaggatatatctgaggatgaatctgaatcttcatttgctgtatctgaagactctatagtagactctgacgaaaataggcagcaagctgatttagatgatgacaacgttgatttaacagaatgtaagctagatccagagccttgctcagaaaatgttgaaggcacattccatgaagtagcagaagataatgataaagatagtagtgataaaattgctgatgcagcagcagcagcaagatctgcccagccaactggatttacatactccacaacaaaagttcgaacgaaactgccgtttctacttaagcattctctgcgtgagtaccaacacattggtttggactggcttgtcacgatgtatgagaaaaagttgaacggtattctggctgatgaaatgggtcttggaaagacaattatgaccattgctcttctagctcaccttgcatgtgataagggaatatggggtccccatctgattgtggttcctacaagtgtgatgcttaattgggagactgagtttcttaaatggtgtcctgcatttaaaattctcacctactttggtagtgcaaaggagcggaaactcaagagacaaggatggatgaagcttaactcatttcatgtatgcataacaacctataggctagttattcaggacagtaaaatgttcaagcgcaagaagtggaaatacttgattcttgacgaagcccatttaattaagaattggaagtctcagagatggcagacactattgaacttcaattctaaacgcagaattttgttgactggtacacccctgcagaatgatcttatggaactgtggtcacttatgcactttctgatgccacatgtctttcagtctcaccaggaattcaaagactggttctgtaacccaatagcagggatggtcgagggacaagaaaaaatcaacaaagaagttattgatcgcttacataatgtcctccgtcctttccttctacggcgcctaaaaagggatgtggagaagcaacttccttcgaaacatgagcatgttattttctgtagactgtctaagaggcagcgcaacttgtatgaggacttcatagcaagcacagaaacacaggctacgcttaccagtggaagcttttttgggatgataagtatcataatgcagttgcggaaagtttgtaatcatcctgatctctttgagggtcgtcctattgtaagttcttttgatatggctggcattgatgtgcagttgagttcaacaatctgttcgctactattggaaagtccgttttccaaggttgatcttgaggctttgggattcttattcacccatcttgatttttctatgacttcttgggaaggagatgagatcaaagctatttcaacaccctcagaattaatcaaacagcgtgtgaacttgaaggatgatctagaagcaatccctttgagtccaaaaaaccgcaaaaatctgcaagggacaaatatttttgaagaaattcgtaaggctgtctttgaggaaaggatacaagaatctaaggatcgggcagcagccattgcatggtggaattctttgagatgccagagaaagccgacttactctacatcactaagaactcttttaaccattaagggtcctcttgatgatcttaaagctaactgttcatcttacatgtattcatcaatcctcgctgacatagtcctttcaccaatcgagcgttttcagaagatgattgagctagttgaagctttcacatttgcgattccagctgcacgagtgccttcacctacttgctggtgcagtaaaagtgactctcctgtttttcttagtccatcgtacaaggaaaaagttacagatttattgtcacctcttttatctccaattagacctgcaatcgttaggagacaagtatattttccagataggcgactgatacagtttgattgtggtaagctgcaggagcttgctatgttattgaggaaattaaaatttgggggtcacagagcgttgatattcacgcaaatgaccaagatgcttgacgtcttggaggctttcattaatttatatggttatacctacatgcgtcttgatggctctacacctccagaagagaggcagacgttaatgcagcggtttaatacaaatcccaagatctttcttttcattttgtcaacccgaagtgggggcgttggcatcaaccttgtgggtgcggacacagttatattctatgacagtgactggaatcctgctatggatcaacaagctcaagatcgctgccacaggataggtcagacacgtgaagtgcatatataccggttgataagtgagagcaccattgaggagaatatcttaaagaaagcaaaccagaagcgtgtgcttgataacctagtaattcaaaacggtgagtataacaccgaatttttcaagaagctcgatcccatggaattgttctctgggcataaggctctgactacaaaggatgaaaaggaaacaagcaagcattgtggggcggatatacctctatcaaatgcagatgttgaggctgctctaaaacaggccgaagatgaggcagattatatggctctcaaaagagtagaacaagaagaagctgtggacaatcaagagttcacagaagaacctgtagagagaccagaagacgatgagctagtaaatgaagatgacataaaggctgatgagcctgctgatcaaggtttagttgcagcagggccggccaaagaagaaatgtcattgttacatagtgatatcagggatgagagagctgttatcactacttcaagccaagaagatgacactgatgtattagatgatgtcaagcaaatggctgcagcagcggctgatgctggacaagctatctcatcttttgagaatcagctacgtcctattgatagatatgcgattagatttttagagctttgggaccccatcattgttgaggctgcaatggaaaatgaagcaggatttgaagagaaagaatgggaacttgaccacattgagaagtacaaggaggaaatggaagctgagattgatgatggggaagagcctcttgtttacgagaaatgggatgctgattttgcaactgaggcatacaggcagcaagtggaagtcttagctcagcaccagttaatggaagatttggaaaatgaagctagagagagggaagcggcagaggtggctgaaatggttttgacacagaacgaaagtgctcatgtactgaagcctaagaagaagaaaaaggcgaagaaagccaaatataaatccctgaagaaaggatcactggctgccgaatcaaaacatgtgaagtcagttgtgaaaattgaagattctactgatgatgataatgaagaattcggctatgtgagtagcagtgactcggatatggttacaccgctttcgcggatgcatatgaagggcaagaaaagagatttaattgttgacactgatgaagagaagacctcaaagaagaaagcaaagaagcacaagaagtctctcccgaattcagatatcaaatataagcaaacaagtgcactacttgatgaactggaaccatcaaagccgtctgacagtatggttgttgataatgagttgaaattgacgaacaggggtaaaactgtagggaaaaaattcatcacttccatgccaataaagcgtgttcttatgatcaagccagagaaattgaagaaaggaaatctgtggtctagagattgtgttccctcgcctgattcttggttgccgcaggaagatgctatattgtgtgccatggttcatgaatatgggcctaactggaattttgttagcggaactctttatggaatgacagctggtggggcttacagaggacggtatcggcatcctgcatattgttgtgagagatatagagagcttattcaacgacatattttgtctgcttccgacagtgcagtgaacgagaagaacctcaacacaggttctgggaaggctctccttaaagtcactgaggaaaatattcggacactcctaaatgttgcagctgagcagccagatacggagatgctcctacaaaaacatttttcttgcttgctgtcatcaatttggaggacgtctacccgcactgggaatgatcaaatgctctccttaaacagtcctattttcaacagacagtttatgggttccgtgaatcacacccaagatttagctagaaagccttggcaggggatgaaggtcaccagcttaagtagaaagttgttagaatccgctctccaggattctggcccgagtcagccagacaatactatttcccgttctaggttgcaggagactcaacctatcaataaattgggattagagttaaccttggaattcccacgtggcaatgatgattccctgaatcagtttccaccgatgattagtctgtccattgatgggtcagattcattaaattatgtgaacgagcccccaggggaagatgttctaaaaggttctagggttgctgcagagaaccgttacaggaatgctgcaaatgcttgtattgaagattcatttggatgggcttcaaacacgttcccagccaatgatctgaagtcaagaacaggcacgaaagcacagtccctggggaaacacaagctatccgcctcagactcagccaagtctacaaaaagcaaacaccgcaaactcttagcagagcaattggaaggggcatgggttaggccaaatgatccgaatctcaagtttgatttcacacctggtgatagggaggaggaggaggagcaggaggtggatgagaaagcgaattcagcagagatagagatgataagctgttcacaatggtatgatccattctttacctcaggccttgatgattgctcattagcttcggatatctcagaaatagagtag

SEQ ID NO: 80731 - protein, 2044 aa, Arabidopsis thaliana
  peptide (1)..(2044): Ceres Seq. ID no. 12657006
  misc_feature (528)..(814): Pfam Name: SNF2 family N-terminal domain Pfam Description: SNF2 family N-terminal domain
  misc_feature (109)..(889): Homolog of NCBI NO: 5730067 NR Description: Snf2-related CBP activator protein [Homo sapiens]
  misc_feature (920)..(1371): Homolog of NCBI NO: 5730067 NR Description: Snf2-related CBP activator protein [Homo sapiens]
  misc_feature (216)..(924): Homolog of NCBI NO: 28573600 NR Description: domino CG9696-PE >gi|28380650|gb|AAM70872.2|
  misc_feature (966)..(1300): Homolog of NCBI NO: 28573600 NR Description: domino CG9696-PE >gi|28380650|gb|AAM70872.2|
  misc_feature (216)..(924): Homolog of NCBI NO: 24656962 NR Description: domino CG9696-PD >gi|21645213|gb|AAM70870.1|
  misc_feature (966)..(1300): Homolog of NCBI NO: 24656962 NR Description: domino CG9696-PD >gi|21645213|gb|AAM70870.1|
  misc_feature (216)..(924): Homolog of NCBI NO: 24656966 NR Description: domino CG9696-PA >gi|21645214|gb|AAM70871.1|
  misc_feature (966)..(1300): Homolog of NCBI NO: 24656966 NR Description: domino CG9696-PA >gi|21645214|gb|AAM70871.1|
  misc_feature (216)..(924): Homolog of NCBI NO: 14090511 NR Description: DOMINO B [Drosophila melanogaster]
  misc_feature (1025)..(1300): Homolog of NCBI NO: 14090511 NR Description: DOMINO B [Drosophila melanogaster]
MASKGGKSKPDIVMASKSGKSKPDNESRAKRQKTLEAPKEPRRPKTHWDHVLEEMAWLSKDFESERKWKLAQAKKVALRASKGMLDQASREERKLKEEEQRLRKVALNISKDMKKFWMKVEKLVLYKHQLVRNEKKKKAMDKQLEFLLGQTERYSTMLAENLVEPYKQGQNTPSKPLLTIESKSDEERAEQIPPEINSCLESGSPELDEDYDLKSEDETDEKHFTKRERQEELEALQNEVDLPVEELLRRYTSGRVSRETSPVKDENEDNLTSVSRVTSPVKDENQDNLASVGQDHGEDKNNLAASEETEGNPSVRRSNDSYGHLAISETHSHDLEPGMTTASVKSRKEDHTYDFNDEQEDVDFVLANGEEKDDEATLAVEEELAKADNEDHVEEIALLQKESEMPIEVLLARYKEDFGGKDISEDESESSFAVSEDSIVDSDENRQQADLDDDNVDLTECKLDPEPCSENVEGTFHEVAEDNDKDSSDKIADAAAAARSAQPTGFTYSTTKVRTKLPFLLKHSLREYQHIGLDWLVTMYEKKLNGILADEMGLGKTIMTIALLAHLACDKGIWGPHLIVVPTSVMLNWETEFLKWCPAFKILTYFGSAKERKLKRQGWMKLNSFHVCITTYRLVIQDSKMFKRKKWKYLILDEAHLIKNWKSQRWQTLLNFNSKRRILLTGTPLQNDLMELWSLMHFLMPHVFQSHQEFKDWFCNPIAGMVEGQEKINKEVIDRLHNVLRPFLLRRLKRDVEKQLPSKHEHVIFCRLSKRQRNLYEDFIASTETQATLTSGSFFGMISIIMQLRKVCNHPDLFEGRPIVSSFDMAGIDVQLSSTICSLLLESPFSKVDLEALGFLFTHLDFSMTSWEGDEIKAISTPSELIKQRVNLKDDLEAIPLSPKNRKNLQGTNIFEEIRKAVFEERIQESKDRAAAIAWWNSLRCQRKPTYSTSLRTLLTIKGPLDDLKANCSSYMYSSILADIVLSPIERFQKMIELVEAFTFAIPAARVPSPTCWCSKSDSPVFLSPSYKEKVTDLLSPLLSPIRPAIVRRQVYFPDRRLIQFDCGKLQELAMLLRKLKFGGHRALIFTQMTKMLDVLEAFINLYGYTYMRLDGSTPPEERQTLMQRFNTNPKIFLFILSTRSGGVGINLVGADTVIFYDSDWNPAMDQQAQDRCHRIGQTREVHIYRLISESTIEENILKKANQKRVLDNLVIQNGEYNTEFFKKLDPMELFSGHKALTTKDEKETSKHCGADIPLSNADVEAALKQAEDEADYMALKRVEQEEAVDNQEFTEEPVERPEDDELVNEDDIKADEPADQGLVAAGPAKEEMSLLHSDIRDERAVITTSSQEDDTDVLDDVKQMAAAAADAGQAISSFENQLRPIDRYAIRFLELWDPIIVEAAMENEAGFEEKEWELDHIEKYKEEMEAEIDDGEEPLVYEKWDADFATEAYRQQVEVLAQHQLMEDLENEAREREAAEVAEMVLTQNESAHVLKPKKKKKAKKAKYKSLKKGSLAAESKHVKSVVKIEDSTDDDNEEFGYVSSSDSDMVTPLSRMHMKGKKRDLIVDTDEEKTSKKKAKKHKKSLPNSDIKYKQTSALLDELEPSKPSDSMVVDNELKLTNRGKTVGKKFITSMPIKRVLMIKPEKLKKGNLWSRDCVPSPDSWLPQEDAILCAMVHEYGPNWNFVSGTLYGMTAGGAYRGRYRHPAYCCERYRELIQRHILSASDSAVNEKNLNTGSGKALLKVTEENIRTLLNVAAEQPDTEMLLQKHFSCLLSSIWRTSTRTGNDQMLSLNSPIFNRQFMGSVNHTQDLARKPWQGMKVTSLSRKLLESALQDSGPSQPDNTISRSRLQETQPINKLGLELTLEFPRGNDDSLNQFPPMISLSIDGSDSLNYVNEPPGEDVLKGSRVAAENRYRNAANACIEDSFGWASNTFPANDLKSRTGTKAQSLGKHKLSASDSAKSTKSKHRKLLAEQLEGAWVRPNDPNLKFDFTPGDREEEEEQEVDEKANSAEIEMISCSQWYDPFFTSGLDDCSLASDISEIE

SEQ ID NO: 80732 - protein, 2031 aa, Arabidopsis thaliana
  peptide (1)..(2031): Ceres Seq. ID no. 12657007
  misc_feature (515)..(801): Pfam Name: SNF2 family N-terminal domain Pfam Description: SNF2 family N-terminal domain
  misc_feature (96)..(876): Homolog of NCBI NO: 5730067 NR Description: Snf2-related CBP activator protein [Homo sapiens]
  misc_feature (907)..(1358): Homolog of NCBI NO: 5730067 NR Description: Snf2-related CBP activator protein [Homo sapiens]
  misc_feature (203)..(911): Homolog of NCBI NO: 28573600 NR Description: domino CG9696-PE >gi|28380650|gb|AAM70872.2|
  misc_feature (953)..(1287): Homolog of NCBI NO: 28573600 NR Description: domino CG9696-PE >gi|28380650|gb|AAM70872.2|
  misc_feature (203)..(911): Homolog of NCBI NO: 24656962 NR Description: domino CG9696-PD >gi|21645213|gb|AAM70870.1|
  misc_feature (953)..(1287): Homolog of NCBI NO: 24656962 NR Description: domino CG9696-PD >gi|21645213|gb|AAM70870.1|
  misc_feature (203)..(911): Homolog of NCBI NO: 24656966 NR Description: domino CG9696-PA >gi|21645214|gb|AAM70871.1|
  misc_feature (953)..(1287): Homolog of NCBI NO: 24656966 NR Description: domino CG9696-PA >gi|21645214|gb|AAM70871.1|
  misc_feature (203)..(911): Homolog of NCBI NO: 14090511 NR Description: DOMINO B [Drosophila melanogaster]
  misc_feature (1012)..(1287): Homolog of NCBI NO: 14090511 NR Description: DOMINO B [Drosophila melanogaster]
MASKSGKSKPDNESRAKRQKTLEAPKEPRRPKTHWDHVLEEMAWLSKDFESERKWKLAQAKKVALRASKGMLDQASREERKLKEEEQRLRKVALNISKDMKKFWMKVEKLVLYKHQLVRNEKKKKAMDKQLEFLLGQTERYSTMLAENLVEPYKQGQNTPSKPLLTIESKSDEERAEQIPPEINSCLESGSPELDEDYDLKSEDETDEKHFTKRERQEELEALQNEVDLPVEELLRRYTSGRVSRETSPVKDENEDNLTSVSRVTSPVKDENQDNLASVGQDHGEDKNNLAASEETEGNPSVRRSNDSYGHLAISETHSHDLEPGMTTASVKSRKEDHTYDFNDEQEDVDFVLANGEEKDDEATLAVEEELAKADNEDHVEEIALLQKESEMPIEVLLARYKEDFGGKDISEDESESSFAVSEDSIVDSDENRQQADLDDDNVDLTECKLDPEPCSENVEGTFHEVAEDNDKDSSDKIADAAAAARSAQPTGFTYSTTKVRTKLPFLLKHSLREYQHIGLDWLVTMYEKKLNGILADEMGLGKTIMTIALLAHLACDKGIWGPHLIVVPTSVMLNWETEFLKWCPAFKILTYFGSAKERKLKRQGWMKLNSFHVCITTYRLVIQDSKMFKRKKWKYLILDEAHLIKNWKSQRWQTLLNFNSKRRILLTGTPLQNDLMELWSLMHFLMPHVFQSHQEFKDWFCNPIAGMVEGQEKINKEVIDRLHNVLRPFLLRRLKRDVEKQLPSKHEHVIFCRLSKRQRNLYEDFIASTETQATLTSGSFFGMISIIMQLRKVCNHPDLFEGRPIVSSFDMAGIDVQLSSTICSLLLESPFSKVDLEALGFLFTHLDFSMTSWEGDEIKAISTPSELIKQRVNLKDDLEAIPLSPKNRKNLQGTNIFEEIRKAVFEERIQESKDRAAAIAWWNSLRCQRKPTYSTSLRTLLTIKGPLDDLKANCSSYMYSSILADIVLSPIERFQKMIELVEAFTFAIPAARVPSPTCWCSKSDSPVFLSPSYKEKVTDLLSPLLSPIRPAIVRRQVYFPDRRLIQFDCGKLQELAMLLRKLKFGGHRALIFTQMTKMLDVLEAFINLYGYTYMRLDGSTPPEERQTLMQRFNTNPKIFLFILSTRSGGVGINLVGADTVIFYDSDWNPAMDQQAQDRCHRIGQTREVHIYRLISESTIEENILKKANQKRVLDNLVIQNGEYNTEFFKKLDPMELFSGHKALTTKDEKETSKHCGADIPLSNADVEAALKQAEDEADYMALKRVEQEEAVDNQEFTEEPVERPEDDELVNEDDIKADEPADQGLVAAGPAKEEMSLLHSDIRDERAVITTSSQEDDTDVLDDVKQMAAAAADAGQAISSFENQLRPIDRYAIRFLELWDPIIVEAAMENEAGFEEKEWELDHIEKYKEEMEAEIDDGEEPLVYEKWDADFATEAYRQQVEVLAQHQLMEDLENEAREREAAEVAEMVLTQNESAHVLKPKKKKKAKKAKYKSLKKGSLAAESKHVKSVVKIEDSTDDDNEEFGYVSSSDSDMVTPLSRMHMKGKKRDLIVDTDEEKTSKKKAKKHKKSLPNSDIKYKQTSALLDELEPSKPSDSMVVDNELKLTNRGKTVGKKFITSMPIKRVLMIKPEKLKKGNLWSRDCVPSPDSWLPQEDAILCAMVHEYGPNWNFVSGTLYGMTAGGAYRGRYRHPAYCCERYRELIQRHILSASDSAVNEKNLNTGSGKALLKVTEENIRTLLNVAAEQPDTEMLLQKHFSCLLSSIWRTSTRTGNDQMLSLNSPIFNRQFMGSVNHTQDLARKPWQGMKVTSLSRKLLESALQDSGPSQPDNTISRSRLQETQPINKLGLELTLEFPRGNDDSLNQFPPMISLSIDGSDSLNYVNEPPGEDVLKGSRVAAENRYRNAANACIEDSFGWASNTFPANDLKSRTGTKAQSLGKHKLSASDSAKSTKSKHRKLLAEQLEGAWVRPNDPNLKFDFTPGDREEEEEQEVDEKANSAEIEMISCSQWYDPFFTSGLDDCSLASDISEIE

SEQ ID NO: 80733 - protein, 1990 aa, Arabidopsis thaliana
  peptide (1)..(1990): Ceres Seq. ID no. 12657008
  misc_feature (474)..(760): Pfam Name: SNF2 family N-terminal domain Pfam Description: SNF2 family N-terminal domain
  misc_feature (55)..(835): Homolog of NCBI NO: 5730067 NR Description: Snf2-related CBP activator protein [Homo sapiens]
  misc_feature (866)..(1317): Homolog of NCBI NO: 5730067 NR Description: Snf2-related CBP activator protein [Homo sapiens]
  misc_feature (162)..(870): Homolog of NCBI NO: 28573600 NR Description: domino CG9696-PE >gi|28380650|gb|AAM70872.2|
  misc_feature (912)..(1246): Homolog of NCBI NO: 28573600 NR Description: domino CG9696-PE >gi|28380650|gb|AAM70872.2|
  misc_feature (162)..(870): Homolog of NCBI NO: 24656962 NR Description: domino CG9696-PD >gi|21645213|gb|AAM70870.1|
  misc_feature (912)..(1246): Homolog of NCBI NO: 24656962 NR Description: domino CG9696-PD >gi|21645213|gb|AAM70870.1|
  misc_feature (162)..(870): Homolog of NCBI NO: 24656966 NR Description: domino CG9696-PA >gi|21645214|gb|AAM70871.1|
  misc_feature (912)..(1246): Homolog of NCBI NO: 24656966 NR Description: domino CG9696-PA >gi|21645214|gb|AAM70871.1|
  misc_feature (162)..(870): Homolog of NCBI NO: 14090511 NR Description: DOMINO B [Drosophila melanogaster]
  misc_feature (971)..(1246): Homolog of NCBI NO: 14090511 NR Description: DOMINO B [Drosophila melanogaster]
MAWLSKDFESERKWKLAQAKKVALRASKGMLDQASREERKLKEEEQRLRKVALNISKDMKKFWMKVEKLVLYKHQLVRNEKKKKAMDKQLEFLLGQTERYSTMLAENLVEPYKQGQNTPSKPLLTIESKSDEERAEQIPPEINSCLESGSPELDEDYDLKSEDETDEKHFTKRERQEELEALQNEVDLPVEELLRRYTSGRVSRETSPVKDENEDNLTSVSRVTSPVKDENQDNLASVGQDHGEDKNNLAASEETEGNPSVRRSNDSYGHLAISETHSHDLEPGMTTASVKSRKEDHTYDFNDEQEDVDFVLANGEEKDDEATLAVEEELAKADNEDHVEEIALLQKESEMPIEVLLARYKEDFGGKDISEDESESSFAVSEDSIVDSDENRQQADLDDDNVDLTECKLDPEPCSENVEGTFHEVAEDNDKDSSDKIADAAAAARSAQPTGFTYSTTKVRTKLPFLLKHSLREYQHIGLDWLVTMYEKKLNGILADEMGLGKTIMTIALLAHLACDKGIWGPHLIVVPTSVMLNWETEFLKWCPAFKILTYFGSAKERKLKRQGWMKLNSFHVCITTYRLVIQDSKMFKRKKWKYLILDEAHLIKNWKSQRWQTLLNFNSKRRILLTGTPLQNDLMELWSLMHFLMPHVFQSHQEFKDWFCNPIAGMVEGQEKINKEVIDRLHNVLRPFLLRRLKRDVEKQLPSKHEHVIFCRLSKRQRNLYEDFIASTETQATLTSGSFFGMISIIMQLRKVCNHPDLFEGRPIVSSFDMAGIDVQLSSTICSLLLESPFSKVDLEALGFLFTHLDFSMTSWEGDEIKAISTPSELIKQRVNLKDDLEAIPLSPKNRKNLQGTNIFEEIRKAVFEERIQESKDRAAAIAWWNSLRCQRKPTYSTSLRTLLTIKGPLDDLKANCSSYMYSSILADIVLSPIERFQKMIELVEAFTFAIPAARVPSPTCWCSKSDSPVFLSPSYKEKVTDLLSPLLSPIRPAIVRRQVYFPDRRLIQFDCGKLQELAMLLRKLKFGGHRALIFTQMTKMLDVLEAFINLYGYTYMRLDGSTPPEERQTLMQRFNTNPKIFLFILSTRSGGVGINLVGADTVIFYDSDWNPAMDQQAQDRCHRIGQTREVHIYRLISESTIEENILKKANQKRVLDNLVIQNGEYNTEFFKKLDPMELFSGHKALTTKDEKETSKHCGADIPLSNADVEAALKQAEDEADYMALKRVEQEEAVDNQEFTEEPVERPEDDELVNEDDIKADEPADQGLVAAGPAKEEMSLLHSDIRDERAVITTSSQEDDTDVLDDVKQMAAAAADAGQAISSFENQLRPIDRYAIRFLELWDPIIVEAAMENEAGFEEKEWELDHIEKYKEEMEAEIDDGEEPLVYEKWDADFATEAYRQQVEVLAQHQLMEDLENEAREREAAEVAEMVLTQNESAHVLKPKKKKKAKKAKYKSLKKGSLAAESKHVKSVVKIEDSTDDDNEEFGYVSSSDSDMVTPLSRMHMKGKKRDLIVDTDEEKTSKKKAKKHKKSLPNSDIKYKQTSALLDELEPSKPSDSMVVDNELKLTNRGKTVGKKFITSMPIKRVLMIKPEKLKKGNLWSRDCVPSPDSWLPQEDAILCAMVHEYGPNWNFVSGTLYGMTAGGAYRGRYRHPAYCCERYRELIQRHILSASDSAVNEKNLNTGSGKALLKVTEENIRTLLNVAAEQPDTEMLLQKHFSCLLSSIWRTSTRTGNDQMLSLNSPIFNRQFMGSVNHTQDLARKPWQGMKVTSLSRKLLESALQDSGPSQPDNTISRSRLQETQPINKLGLELTLEFPRGNDDSLNQFPPMISLSIDGSDSLNYVNEPPGEDVLKGSRVAAENRYRNAANACIEDSFGWASNTFPANDLKSRTGTKAQSLGKHKLSASDSAKSTKSKHRKLLAEQLEGAWVRPNDPNLKFDFTPGDREEEEEQEVDEKANSAEIEMISCSQWYDPFFTSGLDDCSLASDISEIE

SEQ ID NO: 80734 - DNA, 399 bp, Arabidopsis thaliana
  misc_feature (1)..(399): Ceres Seq. ID no. 12657009
  misc_feature: MA Experiment ID: 20000173 Result: Down-regulated in Transcription
  misc_feature: MA Experiment 20000173 PARAMETER Experiment Name: At_42deg_Heat_P Parameter: Age (day) Value: 14
  misc_feature: MA Experiment 20000173 PARAMETER Experiment Name: At_42deg_Heat_P Parameter: Organism Value: A. thaliana
  misc_feature: MA Experiment 20000173 PARAMETER Experiment Name: At_42deg_Heat_P Parameter: Plant Line Value: WS
  misc_feature: MA Experiment 20000173 PARAMETER Experiment Name: At_42deg_Heat_P Parameter: Temperature (deg C) Value: 42 vs. 22
  misc_feature: MA Experiment 20000173 PARAMETER Experiment Name: At_42deg_Heat_P Parameter: Timepoint (hr) Value: 6
  misc_feature: MA Experiment 20000173 PARAMETER Experiment Name: At_42deg_Heat_P Parameter: Tissue Value: Aerial
  misc_feature: MA Experiment ID: 20000180 Result: Up-regulated in Transcription
  misc_feature: MA Experiment 20000180 PARAMETER Experiment Name: At_Germinating_Seeds_P Parameter: Age (hr) Value: 24 vs. 0
  misc_feature: MA Experiment 20000180 PARAMETER Experiment Name: At_Germinating_Seeds_P Parameter: Tissue Value: Germinating Seeds
  misc_feature: MA Experiment ID: 20000227 Result: Down-regulated in Transcription
  misc_feature: MA Experiment 20000227 PARAMETER Experiment Name: At_Root-Tips-vs-Tops_P Parameter: Tissue Value: Root Tips vs. Root Tops
  misc_feature: MA Experiment ID: 20000234 Result: Down-regulated in Transcription
  misc_feature: MA Experiment 20000234 PARAMETER Experiment Name: At_Siliques_P Parameter: Age (day) Value: 21
  misc_feature: MA Experiment 20000234 PARAMETER Experiment Name: At_Siliques_P Parameter: Organism Value: A. thaliana
  misc_feature: MA Experiment 20000234 PARAMETER Experiment Name: At_Siliques_P Parameter: Plant Line Value: WS
  misc_feature: MA Experiment 20000234 PARAMETER Experiment Name: At_Siliques_P Parameter: Tissue Value: Less Than 5mm Siliques vs. Whole Plant
  misc_feature: MA Experiment ID: 20000235 Result: Down-regulated in Transcription
  misc_feature: MA Experiment 20000235 PARAMETER Experiment Name: At_Siliques_P Parameter: Age (day) Value: 21
  misc_feature: MA Experiment 20000235 PARAMETER Experiment Name: At_Siliques_P Parameter: Organism Value: A. thaliana
  misc_feature: MA Experiment 20000235 PARAMETER Experiment Name: At_Siliques_P Parameter: Plant Line Value: WS
  misc_feature: MA Experiment 20000235 PARAMETER Experiment Name: At_Siliques_P Parameter: Tissue Value: 5-10mm Siliques vs. Whole Plant
  misc_feature: MA Experiment ID: 20000264 Result: Down-regulated in Transcription
  misc_feature: MA Experiment 20000264 PARAMETER Experiment Name: At_Open_Flower_P Parameter: Age (day) Value: 21
  misc_feature: MA Experiment 20000264 PARAMETER Experiment Name: At_Open_Flower_P Parameter: Plant Line Value: WS
  misc_feature: MA Experiment 20000264 PARAMETER Experiment Name: At_Open_Flower_P Parameter: Tissue Value: Open Flower vs. Whole Plant
  misc_feature: MA Experiment ID: 20000265 Result: Down-regulated in Transcription
  misc_feature: MA Experiment 20000265 PARAMETER Experiment Name: At_Open_Flower_P Parameter: Age (day) Value: 21
  misc_feature: MA Experiment 20000265 PARAMETER Experiment Name: At_Open_Flower_P Parameter: Plant Line Value: WS
  misc_feature: MA Experiment 20000265 PARAMETER Experiment Name: At_Open_Flower_P Parameter: Tissue Value: Closed Flower vs. Whole Plant
  misc_feature: MA Experiment ID: 20000436 Result: Up-regulated in Transcription
  misc_feature: MA Experiment 20000436 PARAMETER Experiment Name: At_Drought_P Parameter: Age (day) Value: 7
  misc_feature: MA Experiment 20000436 PARAMETER Experiment Name: At_Drought_P Parameter: Organism Value: A. thaliana
  misc_feature: MA Experiment 20000436 PARAMETER Experiment Name: At_Drought_P Parameter: Plant Line Value: WS
  misc_feature: MA Experiment 20000436 PARAMETER Experiment Name: At_Drought_P Parameter: Timepoint (hr) Value: 12
  misc_feature: MA Experiment 20000436 PARAMETER Experiment Name: At_Drought_P Parameter: Tissue Value: Whole Plant
  misc_feature: MA Experiment 20000436 PARAMETER Experiment Name: At_Drought_P Parameter: Treatment Value: Drought vs. No Drought
  misc_feature: MA Experiment ID: 20000438 Result: Down-regulated in Transcription
  misc_feature: MA Experiment 20000438 PARAMETER Experiment Name: At_Shoots__P Parameter: Age (day) Value: 14
  misc_feature: MA Experiment 20000438 PARAMETER Experiment Name: At_Shoots__P Parameter: Tissue Value: Shoots vs. Whole Plant
  misc_feature: MA Experiment ID: 20000453 Result: Up-regulated in Transcription
  misc_feature: MA Experiment 20000453 PARAMETER Experiment Name: At_100uM_ABA_P Parameter: Age (day) Value: 15
  misc_feature: MA Experiment 20000453 PARAMETER Experiment Name: At_100uM_ABA_P Parameter: Organism Value: A. thaliana
  misc_feature: MA Experiment 20000453 PARAMETER Experiment Name: At_100uM_ABA_P Parameter: Plant Line Value: WS
  misc_feature: MA Experiment 20000453 PARAMETER Experiment Name: At_100uM_ABA_P Parameter: Timepoint (hr) Value: 24
  misc_feature: MA Experiment 20000453 PARAMETER Experiment Name: At_100uM_ABA_P Parameter: Tissue Value: Aerial
  misc_feature: MA Experiment 20000453 PARAMETER Experiment Name: At_100uM_ABA_P Parameter: Treatment Value: 100uM ABA vs. No Treatment
  misc_feature: MA Experiment ID: 20000794 Result: Down-regulated in Transcription
  misc_feature: MA Experiment 20000794 PARAMETER Experiment Name: At_Petals_P Parameter: Age (day) Value: 23-25 days
  misc_feature: MA Experiment 20000794 PARAMETER Experiment Name: At_Petals_P Parameter: Plant Line Value: WS
  misc_feature: MA Experiment 20000794 PARAMETER Experiment Name: At_Petals_P Parameter: Tissue Value: Petals vs. Whole plant
atgaagcaactaatccgtcgtctctctcgcgtcgctgattccgctcaatacagtctcctccgttccgattcacagcgacctagccgccgttccgaatccttcctccgttcttcggtgactcgccgctcaaagaagcaaacctcctctgttcccgaaggacacgtaccggtctacgtaggtgacgagatggagaggttcgtcgttagcgcggagctacttaaccatccggttttcatcggtttactaaaccgatctgctcaagagtatggttacgagcaaaaaggagttctacaaatcccttgccatgtccttgtcttcgaacgaatcatggaatcgcttcgtcttggacttccggtaccgattgatgttcaggatctaatcggtgacgggactatttga

SEQ ID NO: 80735 - protein, 132 aa, Arabidopsis thaliana
  peptide (1)..(132): Ceres Seq. ID no. 12657010
  misc_feature (4)..(114): Pfam Name: Auxin responsive protein Pfam Description: Auxin responsive protein
  misc_feature (1)..(132): Homolog of NCBI NO: 15230601 NR Description: unknown protein; protein id: At3g12830.1
  misc_feature (1)..(117): Homolog of NCBI NO: 15223462 NR Description: unknown protein; protein id: At1g56150.1
  misc_feature (1)..(116): Homolog of NCBI NO: 15219275 NR Description: putative auxin-induced protein; protein id: supported by cDNA: gi_13194771 [Arabidopsis thaliana]
  misc_feature (1)..(127): Homolog of NCBI NO: 15219296 NR Description: hypothetical protein; protein id: At1g79130.1
  misc_feature (47)..(116): Homolog of NCBI NO: 38345606 NR Description: OSJNBa0093O08.8 [Oryza sativa (japonica
  misc_feature (40)..(112): Homolog of NCBI NO: 15236199 NR Description: putative protein; protein id: At4g34800.1
  misc_feature (47)..(116): Homolog of NCBI NO: 5852079 NR Description: zwh0002.1 [Oryza sativa (indica cultivar-group)]
  misc_feature (36)..(114): Homolog of NCBI NO: 15238919 NR Description: putative protein; protein id: At5g10990.1
  misc_feature (37)..(113): Homolog of NCBI NO: 15228626 NR Description: putative protein; protein id: At3g61900.1
  misc_feature (1)..(121): Homolog of NCBI NO: 15224133 NR Description: auxin-induced protein-related; protein id:
MKQLIRRLSRVADSAQYSLLRSDSQRPSRRSESFLRSSVTRRSKKQTSSVPEGHVPVYVGDEMERFVVSAELLNHPVFIGLLNRSAQEYGYEQKGVLQIPCHVLVFERIMESLRLGLPVPIDVQDLIGDGTI

SEQ ID NO: 80736 - protein, 70 aa, Arabidopsis thaliana
  peptide (1)..(70): Ceres Seq. ID no. 12657011
  misc_feature (1)..(52): Pfam Name: Auxin responsive protein Pfam Description: Auxin responsive protein
  misc_feature (1)..(70): Homolog of NCBI NO: 15230601 NR Description: unknown protein; protein id: At3g12830.1
  misc_feature (1)..(55): Homolog of NCBI NO: 15223462 NR Description: unknown protein; protein id: At1g56150.1
  misc_feature (1)..(54): Homolog of NCBI NO: 15219275 NR Description: putative auxin-induced protein; protein id: supported by cDNA: gi_13194771 [Arabidopsis thaliana]
  misc_feature (1)..(65): Homolog of NCBI NO: 15219296 NR Description: hypothetical protein; protein id: At1g79130.1
  misc_feature (1)..(54): Homolog of NCBI NO: 38345606 NR Description: OSJNBa0093O08.8 [Oryza sativa (japonica
  misc_feature (1)..(50): Homolog of NCBI NO: 15236199 NR Description: putative protein; protein id: At4g34800.1
  misc_feature (1)..(54): Homolog of NCBI NO: 5852079 NR Description: zwh0002.1 [Oryza sativa (indica cultivar-group)]
  misc_feature (1)..(52): Homolog of NCBI NO: 15238919 NR Description: putative protein; protein id: At5g10990.1
  misc_feature (1)..(51): Homolog of NCBI NO: 15228626 NR Description: putative protein; protein id: At3g61900.1
  misc_feature (1)..(59): Homolog of NCBI NO: 15224133 NR Description: auxin-induced protein-related; protein id:
MERFVVSAELLNHPVFIGLLNRSAQEYGYEQKGVLQIPCHVLVFERIMESLRLGLPVPIDVQDLIGDGTI

SEQ ID NO: 80737 - DNA, 1074 bp, Arabidopsis thaliana
  misc_feature (1)..(1074): Ceres Seq. ID no. 12657019
  misc_feature: MA Experiment ID: 20000227 Result: Down-regulated in Transcription
  misc_feature: MA Experiment 20000227 PARAMETER Experiment Name: At_Root-Tips-vs-Tops_P Parameter: Tissue Value: Root Tips vs. Root Tops
  misc_feature: MA Experiment ID: 20000451 Result: Up-regulated in Transcription
  misc_feature: MA Experiment 20000451 PARAMETER Experiment Name: At_CS6879_Shoots-Roots_P Parameter: Age (day) Value: 14
  misc_feature: MA Experiment 20000451 PARAMETER Experiment Name: At_CS6879_Shoots-Roots_P Parameter: Organism Value: A. thaliana
  misc_feature: MA Experiment 20000451 PARAMETER Experiment Name: At_CS6879_Shoots-Roots_P Parameter: Plant Line Value: CS6879 vs. WS
  misc_feature: MA Experiment 20000451 PARAMETER Experiment Name: At_CS6879_Shoots-Roots_P Parameter: Tissue Value: Roots
atgggtatcaatttcgaggaccaaaccacattgttcaatttcgtggtcagagaaggtaacggcgtgaaaggaatgatagactcgggcctctctagtgttccacggcccttcgtccagcctctctctgagcgaatcccgacccaaaaagcccttacgtgtgaggctacccagccaatcgatctttccaacctagacggcccacaacacaaggaggtggccaagcagattgtcgaagctgccgagacacttggcttcttccaggtggtgaaccatggtgtttcggtggagctgctggagttgctaaaatcgtcggctcatgagttttttgcacaagctcctgaggaaaaatcgatgtacctgaaggaagtgagtccaagcaagctggttaagtacggaacgagctttgtgccagataaggagaaggcgattgagtggaaggattatgtgagcatgctttacaccaatgacagtgaggctcttcaacactggcctcaaccatgcagggaggtggcacttgagttcctaaattcatcgatggaaatggtgaaaaatgtagttaacattctgatggagaatgttggagtgacactagaagaagagaaaatgaatggtttgatgggaaccaagatggtcaacatgaactactaccctacttgtccgagccccgagctgaccgtcggcgtcggccgtcactcagacatgggaatgttgaccgttttattacaagacggcattggtggtctctacgttaaactagacaacggtgaatgggccgagatccctcctgtccatggagctttggtcatcaacatcggcgacactttgcagattttgagcaatgggaagtacaaaagtgcggagcatagggttcgaaccacaaacatcggatcaagagtctctgtgcccattttcacggcaccaaatccctcccagaaggtcggtcccttgccggaagttgtgaaacgcgacggagtggctcgttacaaggagtttttgtttcaagactacatgaataacttcttcggccaaccacacgacggcaaaaaatctctcgacttcgcacgtgccgagtga

SEQ ID NO: 80738 - protein, 357 aa, Arabidopsis thaliana
  peptide (1)..(357): Ceres Seq. ID no. 12657020
  misc_feature (207)..(307): Pfam Name: 2OG-Fe(II) oxygenase superfamily Pfam Description: 2OG-Fe(II) oxygenase superfamily
  misc_feature (1)..(357): Homolog of NCBI NO: 15230628 NR Description: hypothetical protein; protein id: At3g12900.1 thaliana] >gi|6997165|gb|AAF34829.1| hypothetical protein thaliana] >gi|9279774|dbj|BAB01419.1| gene_id:MJM20.4~similar to
  misc_feature (7)..(354): Homolog of NCBI NO: 15222690 NR Description: leucoanthocyanidin dioxygenase 2, putative; id: At1g55290.1 [Arabidopsis thaliana] >gi|25285688|pir||H96594
  misc_feature (5)..(355): Homolog of NCBI NO: 15231296 NR Description: unknown protein; protein id: At3g13610.1
  misc_feature (7)..(352): Homolog of NCBI NO: 18416826 NR Description: 1-AMINOCYCLOPROPANE-1-CARBOXYLATE OXIDASE-like
  misc_feature (76)..(352): Homolog of NCBI NO: 11022649 NR Description: 1-aminocyclopropane-1-carboxylate oxidase-like
  misc_feature (21)..(351): Homolog of NCBI NO: 119640 NR Description: 1-AMINOCYCLOPROPANE-1-CARBOXYLATE OXIDASE HOMOLOG
  misc_feature (21)..(351): Homolog of NCBI NO: 7433184 NR Description: ripening protein E8 homolog - tomato
  misc_feature (21)..(351): Homolog of NCBI NO: 13878119 NR Description: putative oxidoreductase [Arabidopsis thaliana]
  misc_feature (21)..(351): Homolog of NCBI NO: 15221545 NR Description: oxidoreductase, putative; protein id: supported by cDNA: gi_13878118 [Arabidopsis thaliana]
  misc_feature (21)..(343): Homolog of NCBI NO: 15218795 NR Description: putative 1-aminocyclopropane-1-carboxylate
MGINFEDQTTLFNFVVREGNGVKGMIDSGLSSVPRPFVQPLSERIPTQKALTCEATQPIDLSNLDGPQHKEVAKQIVEAAETLGFFQVVNHGVSVELLELLKSSAHEFFAQAPEEKSMYLKEVSPSKLVKYGTSFVPDKEKAIEWKDYVSMLYTNDSEALQHWPQPCREVALEFLNSSMEMVKNVVNILMENVGVTLEEEKMNGLMGTKMVNMNYYPTCPSPELTVGVGRHSDMGMLTVLLQDGIGGLYVKLDNGEWAEIPPVHGALVINIGDTLQILSNGKYKSAEHRVRTTNIGSRVSVPIFTAPNPSQKVGPLPEVVKRDGVARYKEFLFQDYMNNFFGQPHDGKKSLDFARAE

SEQ ID NO: 80739 - protein, 333 aa, Arabidopsis thaliana
  peptide (1)..(333): Ceres Seq. ID no. 12657021
  misc_feature (183)..(283): Pfam Name: 2OG-Fe(II) oxygenase superfamily Pfam Description: 2OG-Fe(II) oxygenase superfamily
  misc_feature (1)..(333): Homolog of NCBI NO: 15230628 NR Description: hypothetical protein; protein id: At3g12900.1 thaliana] >gi|6997165|gb|AAF34829.1| hypothetical protein thaliana] >gi|9279774|dbj|BAB01419.1| gene_id:MJM20.4~similar to
  misc_feature (1)..(330): Homolog of NCBI NO: 15222690 NR Description: leucoanthocyanidin dioxygenase 2, putative; id: At1g55290.1 [Arabidopsis thaliana] >gi|25285688|pir||H96594
  misc_feature (1)..(331): Homolog of NCBI NO: 15231296 NR Description: unknown protein; protein id: At3g13610.1
  misc_feature (1)..(328): Homolog of NCBI NO: 18416826 NR Description: 1-AMINOCYCLOPROPANE-1-CARBOXYLATE OXIDASE-like
  misc_feature (52)..(328): Homolog of NCBI NO: 11022649 NR Description: 1-aminocyclopropane-1-carboxylate oxidase-like
  misc_feature (1)..(327): Homolog of NCBI NO: 119640 NR Description: 1-AMINOCYCLOPROPANE-1-CARBOXYLATE OXIDASE HOMOLOG
  misc_feature (1)..(327): Homolog of NCBI NO: 7433184 NR Description: ripening protein E8 homolog - tomato
  misc_feature (1)..(327): Homolog of NCBI NO: 13878119 NR Description: putative oxidoreductase [Arabidopsis thaliana]
  misc_feature (1)..(327): Homolog of NCBI NO: 15221545 NR Description: oxidoreductase, putative; protein id: supported by cDNA: gi_13878118 [Arabidopsis thaliana]
  misc_feature (1)..(319): Homolog of NCBI NO: 15218795 NR Description: putative 1-aminocyclopropane-1-carboxylate
MIDSGLSSVPRPFVQPLSERIPTQKALTCEATQPIDLSNLDGPQHKEVAKQIVEAAETLGFFQVVNHGVSVELLELLKSSAHEFFAQAPEEKSMYLKEVSPSKLVKYGTSFVPDKEKAIEWKDYVSMLYTNDSEALQHWPQPCREVALEFLNSSMEMVKNVVNILMENVGVTLEEEKMNGLMGTKMVNMNYYPTCPSPELTVGVGRHSDMGMLTVLLQDGIGGLYVKLDNGEWAEIPPVHGALVINIGDTLQILSNGKYKSAEHRVRTTNIGSRVSVPIFTAPNPSQKVGPLPEVVKRDGVARYKEFLFQDYMNNFFGQPHDGKKSLDFARAE

SEQ ID NO: 80740 - protein, 240 aa, Arabidopsis thaliana
  peptide (1)..(240): Ceres Seq. ID no. 12657022
  misc_feature (90)..(190): Pfam Name: 2OG-Fe(II) oxygenase superfamily Pfam Description: 2OG-Fe(II) oxygenase superfamily
  misc_feature (1)..(240): Homolog of NCBI NO: 15230628 NR Description: hypothetical protein; protein id: At3g12900.1 thaliana] >gi|6997165|gb|AAF34829.1| hypothetical protein thaliana] >gi|9279774|dbj|BAB01419.1| gene_id:MJM20.4~similar to
  misc_feature (1)..(237): Homolog of NCBI NO: 15222690 NR Description: leucoanthocyanidin dioxygenase 2, putative; id: At1g55290.1 [Arabidopsis thaliana] >gi|25285688|pir||H96594
  misc_feature (1)..(238): Homolog of NCBI NO: 15231296 NR Description: unknown protein; protein id: At3g13610.1
  misc_feature (1)..(235): Homolog of NCBI NO: 18416826 NR Description: 1-AMINOCYCLOPROPANE-1-CARBOXYLATE OXIDASE-like
  misc_feature (1)..(235): Homolog of NCBI NO: 11022649 NR Description: 1-aminocyclopropane-1-carboxylate oxidase-like
  misc_feature (1)..(234): Homolog of NCBI NO: 119640 NR Description: 1-AMINOCYCLOPROPANE-1-CARBOXYLATE OXIDASE HOMOLOG
  misc_feature (1)..(234): Homolog of NCBI NO: 7433184 NR Description: ripening protein E8 homolog - tomato
  misc_feature (1)..(234): Homolog of NCBI NO: 13878119 NR Description: putative oxidoreductase [Arabidopsis thaliana]
  misc_feature (1)..(234): Homolog of NCBI NO: 15221545 NR Description: oxidoreductase, putative; protein id: supported by cDNA: gi_13878118 [Arabidopsis thaliana]
  misc_feature (1)..(226): Homolog of NCBI NO: 15218795 NR Description: putative 1-aminocyclopropane-1-carboxylate
MYLKEVSPSKLVKYGTSFVPDKEKAIEWKDYVSMLYTNDSEALQHWPQPCREVALEFLNSSMEMVKNVVNILMENVGVTLEEEKMNGLMGTKMVNMNYYPTCPSPELTVGVGRHSDMGMLTVLLQDGIGGLYVKLDNGEWAEIPPVHGALVINIGDTLQILSNGKYKSAEHRVRTTNIGSRVSVPIFTAPNPSQKVGPLPEVVKRDGVARYKEFLFQDYMNNFFGQPHDGKKSLDFARAE

SEQ ID NO: 80741 - DNA, 2115 bp, Arabidopsis thaliana
  misc_feature (1)..(2115): Ceres Seq. ID no. 12657034
  misc_feature: MA Experiment ID: 20000173 Result: Down-regulated in Transcription
  misc_feature: MA Experiment 20000173 PARAMETER Experiment Name: At_42deg_Heat_P Parameter: Age (day) Value: 14
  misc_feature: MA Experiment 20000173 PARAMETER Experiment Name: At_42deg_Heat_P Parameter: Organism Value: A. thaliana
  misc_feature: MA Experiment 20000173 PARAMETER Experiment Name: At_42deg_Heat_P Parameter: Plant Line Value: WS
  misc_feature: MA Experiment 20000173 PARAMETER Experiment Name: At_42deg_Heat_P Parameter: Temperature (deg C) Value: 42 vs. 22
  misc_feature: MA Experiment 20000173 PARAMETER Experiment Name: At_42deg_Heat_P Parameter: Timepoint (hr) Value: 6
  misc_feature: MA Experiment 20000173 PARAMETER Experiment Name: At_42deg_Heat_P Parameter: Tissue Value: Aerial
  misc_feature: MA Experiment ID: 20000179 Result: Down-regulated in Transcription
  misc_feature: MA Experiment 20000179 PARAMETER Experiment Name: At_Germinating_Seeds_P Parameter: Age (hr) Value: 6 vs. 0
  misc_feature: MA Experiment 20000179 PARAMETER Experiment Name: At_Germinating_Seeds_P Parameter: Tissue Value: Germinating Seeds
  misc_feature: MA Experiment ID: 20000180 Result: Down-regulated in Transcription
  misc_feature: MA Experiment 20000180 PARAMETER Experiment Name: At_Germinating_Seeds_P Parameter: Age (hr) Value: 24 vs. 0
  misc_feature: MA Experiment 20000180 PARAMETER Experiment Name: At_Germinating_Seeds_P Parameter: Tissue Value: Germinating Seeds
  misc_feature: MA Experiment ID: 20000185 Result: Down-regulated in Transcription
  misc_feature: MA Experiment 20000185 PARAMETER Experiment Name: At_Roots__P Parameter: Age (day) Value: 7 vs. 21
  misc_feature: MA Experiment 20000185 PARAMETER Experiment Name: At_Roots__P Parameter: Organism Value: A. thaliana
  misc_feature: MA Experiment 20000185 PARAMETER Experiment Name: At_Roots__P Parameter: Tissue Value: Roots vs. Whole Plant
  misc_feature: MA Experiment ID: 20000436 Result: Down-regulated in Transcription
  misc_feature: MA Experiment 20000436 PARAMETER Experiment Name: At_Drought_P Parameter: Age (day) Value: 7
  misc_feature: MA Experiment 20000436 PARAMETER Experiment Name: At_Drought_P Parameter: Organism Value: A. thaliana
  misc_feature: MA Experiment 20000436 PARAMETER Experiment Name: At_Drought_P Parameter: Plant Line Value: WS
  misc_feature: MA Experiment 20000436 PARAMETER Experiment Name: At_Drought_P Parameter: Timepoint (hr) Value: 12
  misc_feature: MA Experiment 20000436 PARAMETER Experiment Name: At_Drought_P Parameter: Tissue Value: Whole Plant
  misc_feature: MA Experiment 20000436 PARAMETER Experiment Name: At_Drought_P Parameter: Treatment Value: Drought vs. No Drought
  misc_feature: MA Experiment ID: 20000437 Result: Down-regulated in Transcription
  misc_feature: MA Experiment 20000437 PARAMETER Experiment Name: At_Drought_P Parameter: Age (day) Value: 8
  misc_feature: MA Experiment 20000437 PARAMETER Experiment Name: At_Drought_P Parameter: Organism Value: A. thaliana
  misc_feature: MA Experiment 20000437 PARAMETER Experiment Name: At_Drought_P Parameter: Plant Line Value: WS
  misc_feature: MA Experiment 20000437 PARAMETER Experiment Name: At_Drought_P Parameter: Timepoint (hr) Value: 24
  misc_feature: MA Experiment 20000437 PARAMETER Experiment Name: At_Drought_P Parameter: Tissue Value: Whole Plant
  misc_feature: MA Experiment 20000437 PARAMETER Experiment Name: At_Drought_P Parameter: Treatment Value: Drought vs. No Drought
  misc_feature: MA Experiment ID: 20000439 Result: Down-regulated in Transcription
  misc_feature: MA Experiment 20000439 PARAMETER Experiment Name: At_Roots__P Parameter: Age (day) Value: 14 vs. 21
  misc_feature: MA Experiment 20000439 PARAMETER Experiment Name: At_Roots__P Parameter: Organism Value: A. thaliana
  misc_feature: MA Experiment 20000439 PARAMETER Experiment Name: At_Roots__P Parameter: Tissue Value: Roots vs. Whole Plant
  misc_feature: MA Experiment ID: 20000496 Result: Up-regulated in Transcription
  misc_feature: MA Experiment 20000496 PARAMETER Experiment Name: At_Guard_Cells_P Parameter: Harvest Date Value: 7/19/2002
  misc_feature: MA Experiment 20000496 PARAMETER Experiment Name: At_Guard_Cells_P Parameter: Organism Value: Canola
  misc_feature: MA Experiment 20000496 PARAMETER Experiment Name: At_Guard_Cells_P Parameter: Tissue Value: Guard Cells vs. Leaves
  misc_feature: MA Experiment ID: 20001247 Result: Up-regulated in Transcription
  misc_feature: MA Experiment 20001247 PARAMETER Experiment Name: At_Far-red-induction_P Parameter: Age (day) Value: 7
  misc_feature: MA Experiment 20001247 PARAMETER Experiment Name: At_Far-red-induction_P Parameter: Light Value: Far-red vs. White
  misc_feature: MA Experiment 20001247 PARAMETER Experiment Name: At_Far-red-induction_P Parameter: Organism Value: A. thaliana
  misc_feature: MA Experiment 20001247 PARAMETER Experiment Name: At_Far-red-induction_P Parameter: Plant Line Value: Columbia
  misc_feature: MA Experiment 20001247 PARAMETER Experiment Name: At_Far-red-induction_P Parameter: Timepoint (hr) Value: 1
  misc_feature: MA Experiment 20001247 PARAMETER Experiment Name: At_Far-red-induction_P Parameter: Tissue Value: Whole Plant
  misc_feature: MA Experiment ID: 20001557 Result: Up-regulated in Transcription
  misc_feature: MA Experiment 20001557 PARAMETER Experiment Name: At_Drought_Soil_Dry_P Parameter: Age (day) Value: 27
  misc_feature: MA Experiment 20001557 PARAMETER Experiment Name: At_Drought_Soil_Dry_P Parameter: Organism Value: A. thaliana
  misc_feature: MA Experiment 20001557 PARAMETER Experiment Name: At_Drought_Soil_Dry_P Parameter: Plant Line Value: WS
  misc_feature: MA Experiment 20001557 PARAMETER Experiment Name: At_Drought_Soil_Dry_P Parameter: Post Timepoint (hr) Value: 3
  misc_feature: MA Experiment 20001557 PARAMETER Experiment Name: At_Drought_Soil_Dry_P Parameter: Post-Treatment Value: Re-Water vs. No Drought
  misc_feature: MA Experiment 20001557 PARAMETER Experiment Name: At_Drought_Soil_Dry_P Parameter: Timepoint (day) Value: 13
  misc_feature: MA Experiment 20001557 PARAMETER Experiment Name: At_Drought_Soil_Dry_P Parameter: Treatment Value: Drought vs. No Drought
  misc_feature: MA Experiment ID: 20001558 Result: Up-regulated in Transcription
  misc_feature: MA Experiment 20001558 PARAMETER Experiment Name: At_Drought_Soil_Dry_P Parameter: Age (day) Value: 27
  misc_feature: MA Experiment 20001558 PARAMETER Experiment Name: At_Drought_Soil_Dry_P Parameter: Organism Value: A. thaliana
  misc_feature: MA Experiment 20001558 PARAMETER Experiment Name: At_Drought_Soil_Dry_P Parameter: Plant Line Value: WS
  misc_feature: MA Experiment 20001558 PARAMETER Experiment Name: At_Drought_Soil_Dry_P Parameter: Post Timepoint (hr) Value: 6
  misc_feature: MA Experiment 20001558 PARAMETER Experiment Name: At_Drought_Soil_Dry_P Parameter: Post-Treatment Value: Re-Water vs. No Drought
  misc_feature: MA Experiment 20001558 PARAMETER Experiment Name: At_Drought_Soil_Dry_P Parameter: Timepoint (day) Value: 13
  misc_feature: MA Experiment 20001558 PARAMETER Experiment Name: At_Drought_Soil_Dry_P Parameter: Treatment Value: Drought vs. No Drought
  misc_feature: MA Experiment ID: 20001560 Result: Up-regulated in Transcription
  misc_feature: MA Experiment 20001560 PARAMETER Experiment Name: At_Drought_Soil_Dry_P Parameter: Age (day) Value: 28
  misc_feature: MA Experiment 20001560 PARAMETER Experiment Name: At_Drought_Soil_Dry_P Parameter: Organism Value: A. thaliana
  misc_feature: MA Experiment 20001560 PARAMETER Experiment Name: At_Drought_Soil_Dry_P Parameter: Plant Line Value: WS
  misc_feature: MA Experiment 20001560 PARAMETER Experiment Name: At_Drought_Soil_Dry_P Parameter: Post Timepoint (hr) Value: None
  misc_feature: MA Experiment 20001560 PARAMETER Experiment Name: At_Drought_Soil_Dry_P Parameter: Post-Treatment Value: None
  misc_feature: MA Experiment 20001560 PARAMETER Experiment Name: At_Drought_Soil_Dry_P Parameter: Timepoint (day) Value: 14
  misc_feature: MA Experiment 20001560 PARAMETER Experiment Name: At_Drought_Soil_Dry_P Parameter: Treatment Value: Drought vs. No Drought
atagtattaataactgccaaactccagagctttaagatgtatgactctcaagttttgaaatctaagtaaggcttaccatttcttcctctcttttcaacttctggattttgattcagcaactccttactagttgactgaattttgatcagatacaacccatttctcagacgttcgcattctggaaagaaatttcagggcacagttaccatgtcagagggcagagaaacttgcgaagaatctacgagtggtgaatcttttccatatagatttcaacttgaagaggatgtaaaaagattgcaactgcaactccaacaagaaatagatttgcatacatttctagagagtgtcatggagaaagatccttgggagctatcttattcttctagtgttccacatcctgctcaggaacttctctccaatatagtgacgctagagactgcagtcactaagctcgagcaagaaatgatgtcactgaatttccaacttagccaagagagaaacgagaggagactcgcggaataccagttgacacattcggcttctccactaaattcttcttcttccctaagatatttgaatcagtcagattctgaattacatcaatcagcagaagacagtccatctcaagaccaaatagtccattaccaagaatcttcatctgaatcatctccagcagagtcaactgttgagcaaacactggacccaagtaatgactttcttgaaaagaggctaatgagaaagacaaatgcgaggaagctacctcgaggaatgccacctaagtacctgtgggatcaacctaatctattatctgaagaaatggtgagatgtatgaagaatatcttcatgtctcttgctgatccaacagcaacttcaaaagcttcctcaaacgaaagccacctctcaccagtatcacctcgcgggcatctatcaagctcagcatcctggtggccttcaacagaacggtcaatgatctcctcatgggtgcaaagcccacaaatagatatccaaaataacgccaatgttttggccacaggagatgtctttgatccttatagagttcgtgggaagttaagctgggcggagattgggaactacagtttggcatccgaggtttcttggatgtctgtagggaagaaacagctggagtatgcttccggggcattgaagaagttcaggacactggttgagcaattggctagagtaaatcctattcatttaagctgcaacgagaagcttgctttctggattaacctttataacgcgttgataatgcatgcttatttggcttatggcgtcccaaaaagcgacctgaagcttttctcgttgatgcaaaaggcagcctatacagttggagggcactcatatactgcggcgacaatggaatatgtgatactgaagatgaaaccgcctatgcacaggccacaaattgctttgcttcttgccatccacaagatgaaagtatcagaagaacagcgcagggcaagcattgatacacatgaacctcttctcggctttgctctaagctgtggaatgtactcttcacctgcggtgaggatctactctgcgaaaggagtgaaggaagagatgctagaagcacaaagggacttcatacaagcatcggtagggctgagcagcaaagggaagctcttactacccaaaatgctccattgttatgccaagagtttggtggaggattcgaacttgggggtctggatatcaaggtaccttcctccacatcaagctgcttttgtggagcaatgcatctctcagagaagacaaagccttctcgcttcacggaactgcggaatactccccttcgattctcgtttcagatacctgtttctccccgacgacaacacctcgttgtaataacagttcaaagactctcttctgttgtaaaaaaagctttaaccgacctcataagaacgaacagtgagaggaggctgtttcatgatcatggttactactattattccaacatagcttttggcttatagtgtacatgttattcaggatatgcatattaattctgagaagtctcaatatgttgtgtttcaactttctttcagaaagacataaatggaagagttgagactagtcatctatttaagtgcg

SEQ ID NO: 80742 - protein, 553 aa, Arabidopsis thaliana
  peptide (1)..(553): Ceres Seq. ID no. 12657035
  misc_feature (323)..(468): Pfam Name: Protein of unknown function, DUF547 Pfam Description: Protein of unknown function, DUF547
  misc_feature (1)..(553): Homolog of NCBI NO: 22331037 NR Description: hypothetical protein; protein id: At3g13000.1, by cDNA: gi_20260517 [Arabidopsis thaliana] gb|AAF35949.1~gene_id:MGH6.15~strong similarity to unknown
  misc_feature (81)..(547): Homolog of NCBI NO: 30684987 NR Description: expressed protein [Arabidopsis thaliana] At1g16750/F19K19_26 [Arabidopsis thaliana]
  misc_feature (106)..(547): Homolog of NCBI NO: 25518300 NR Description: hypothetical protein F17F16.4 - Arabidopsis >gi|9954731|gb|AAG09084.1|AC026237_5 Unknown Protein [Arabidopsis
  misc_feature (204)..(547): Homolog of NCBI NO: 21618245 NR Description: unknown [Arabidopsis thaliana]
  misc_feature (280)..(545): Homolog of NCBI NO: 15239037 NR Description: putative protein; protein id: At5g42690.1 thaliana] >gi|10177272|dbj|BAB10625.1|
  misc_feature (23)..(242): Homolog of NCBI NO: 15239037 NR Description: putative protein; protein id: At5g42690.1 thaliana] >gi|10177272|dbj|BAB10625.1|
  misc_feature (23)..(546): Homolog of NCBI NO: 15240016 NR Description: putative protein; protein id: At5g66600.1 thaliana] >gi|10177541|dbj|BAB10936.1|
  misc_feature (301)..(548): Homolog of NCBI NO: 30695170 NR Description: expressed protein [Arabidopsis thaliana]
  misc_feature (278)..(544): Homolog of NCBI NO: 25407787 NR Description: hypothetical protein AT4g37080 [imported] - thaliana >gi|4006868|emb|CAB16786.1| putative protein thaliana] >gi|7270657|emb|CAB80374.1| putative protein
  misc_feature (278)..(544): Homolog of NCBI NO: 30690854 NR Description: expressed protein [Arabidopsis thaliana] AT4g37080/C7A10_280 [Arabidopsis thaliana]
MSEGRETCEESTSGESFPYRFQLEEDVKRLQLQLQQEIDLHTFLESVMEKDPWELSYSSSVPHPAQELLSNIVTLETAVTKLEQEMMSLNFQLSQERNERRLAEYQLTHSASPLNSSSSLRYLNQSDSELHQSAEDSPSQDQIVHYQESSSESSPAESTVEQTLDPSNDFLEKRLMRKTNARKLPRGMPPKYLWDQPNLLSEEMVRCMKNIFMSLADPTATSKASSNESHLSPVSPRGHLSSSASWWPSTERSMISSWVQSPQIDIQNNANVLATGDVFDPYRVRGKLSWAEIGNYSLASEVSWMSVGKKQLEYASGALKKFRTLVEQLARVNPIHLSCNEKLAFWINLYNALIMHAYLAYGVPKSDLKLFSLMQKAAYTVGGHSYTAATMEYVILKMKPPMHRPQIALLLAIHKMKVSEEQRRASIDTHEPLLGFALSCGMYSSPAVRIYSAKGVKEEMLEAQRDFIQASVGLSSKGKLLLPKMLHCYAKSLVEDSNLGVWISRYLPPHQAAFVEQCISQRRQSLLASRNCGILPFDSRFRYLFLPDDNTSL

SEQ ID NO: 80743 - protein, 506 aa, Arabidopsis thaliana
  peptide (1)..(506): Ceres Seq. ID no. 12657036
  misc_feature (276)..(421): Pfam Name: Protein of unknown function, DUF547 Pfam Description: Protein of unknown function, DUF547
  misc_feature (1)..(506): Homolog of NCBI NO: 22331037 NR Description: hypothetical protein; protein id: At3g13000.1, by cDNA: gi_20260517 [Arabidopsis thaliana] gb|AAF35949.1~gene_id:MGH6.15~strong similarity to unknown
  misc_feature (34)..(500): Homolog of NCBI NO: 30684987 NR Description: expressed protein [Arabidopsis thaliana] At1g16750/F19K19_26 [Arabidopsis thaliana]
  misc_feature (59)..(500): Homolog of NCBI NO: 25518300 NR Description: hypothetical protein F17F16.4 - Arabidopsis >gi|9954731|gb|AAG09084.1|AC026237_5 Unknown Protein [Arabidopsis
  misc_feature (157)..(500): Homolog of NCBI NO: 21618245 NR Description: unknown [Arabidopsis thaliana]
  misc_feature (233)..(498): Homolog of NCBI NO: 15239037 NR Description: putative protein; protein id: At5g42690.1 thaliana] >gi|10177272|dbj|BAB10625.1|
  misc_feature (1)..(195): Homolog of NCBI NO: 15239037 NR Description: putative protein; protein id: At5g42690.1 thaliana] >gi|10177272|dbj|BAB10625.1|
  misc_feature (1)..(499): Homolog of NCBI NO: 15240016 NR Description: putative protein; protein id: At5g66600.1 thaliana] >gi|10177541|dbj|BAB10936.1|
  misc_feature (254)..(501): Homolog of NCBI NO: 30695170 NR Description: expressed protein [Arabidopsis thaliana]
  misc_feature (231)..(497): Homolog of NCBI NO: 25407787 NR Description: hypothetical protein AT4g37080 [imported] - thaliana >gi|4006868|emb|CAB16786.1| putative protein thaliana] >gi|7270657|emb|CAB80374.1| putative protein
  misc_feature (231)..(497): Homolog of NCBI NO: 30690854 NR Description: expressed protein [Arabidopsis thaliana] AT4g37080/C7A10_280 [Arabidopsis thaliana]
MEKDPWELSYSSSVPHPAQELLSNIVTLETAVTKLEQEMMSLNFQLSQERNERRLAEYQLTHSASPLNSSSSLRYLNQSDSELHQSAEDSPSQDQIVHYQESSSESSPAESTVEQTLDPSNDFLEKRLMRKTNARKLPRGMPPKYLWDQPNLLSEEMVRCMKNIFMSLADPTATSKASSNESHLSPVSPRGHLSSSASWWPSTERSMISSWVQSPQIDIQNNANVLATGDVFDPYRVRGKLSWAEIGNYSLASEVSWMSVGKKQLEYASGALKKFRTLVEQLARVNPIHLSCNEKLAFWINLYNALIMHAYLAYGVPKSDLKLFSLMQKAAYTVGGHSYTAATMEYVILKMKPPMHRPQIALLLAIHKMKVSEEQRRASIDTHEPLLGFALSCGMYSSPAVRIYSAKGVKEEMLEAQRDFIQASVGLSSKGKLLLPKMLHCYAKSLVEDSNLGVWISRYLPPHQAAFVEQCISQRRQSLLASRNCGILPFDSRFRYLFLPDDNTSL

SEQ ID NO: 80744 - protein, 468 aa, Arabidopsis thaliana
  peptide (1)..(468): Ceres Seq. ID no. 12657037
  misc_feature (238)..(383): Pfam Name: Protein of unknown function, DUF547 Pfam Description: Protein of unknown function, DUF547
  misc_feature (1)..(468): Homolog of NCBI NO: 22331037 NR Description: hypothetical protein; protein id: At3g13000.1, by cDNA: gi_20260517 [Arabidopsis thaliana] gb|AAF35949.1~gene_id:MGH6.15~strong similarity to unknown
  misc_feature (1)..(462): Homolog of NCBI NO: 30684987 NR Description: expressed protein [Arabidopsis thaliana] At1g16750/F19K19_26 [Arabidopsis thaliana]
  misc_feature (21)..(462): Homolog of NCBI NO: 25518300 NR Description: hypothetical protein F17F16.4 - Arabidopsis >gi|9954731|gb|AAG09084.1|AC026237_5 Unknown Protein [Arabidopsis
  misc_feature (119)..(462): Homolog of NCBI NO: 21618245 NR Description: unknown [Arabidopsis thaliana]
  misc_feature (195)..(460): Homolog of NCBI NO: 15239037 NR Description: putative protein; protein id: At5g42690.1 thaliana] >gi|10177272|dbj|BAB10625.1|
  misc_feature (1)..(157): Homolog of NCBI NO: 15239037 NR Description: putative protein; protein id: At5g42690.1 thaliana] >gi|10177272|dbj|BAB10625.1|
  misc_feature (1)..(461): Homolog of NCBI NO: 15240016 NR Description: putative protein; protein id: At5g66600.1 thaliana] >gi|10177541|dbj|BAB10936.1|
  misc_feature (216)..(463): Homolog of NCBI NO: 30695170 NR Description: expressed protein [Arabidopsis thaliana]
  misc_feature (193)..(459): Homolog of NCBI NO: 25407787 NR Description: hypothetical protein AT4g37080 [imported] - thaliana >gi|4006868|emb|CAB16786.1| putative protein thaliana] >gi|7270657|emb|CAB80374.1| putative protein
  misc_feature (193)..(459): Homolog of NCBI NO: 30690854 NR Description: expressed protein [Arabidopsis thaliana] AT4g37080/C7A10_280 [Arabidopsis thaliana]
MMSLNFQLSQERNERRLAEYQLTHSASPLNSSSSLRYLNQSDSELHQSAEDSPSQDQIVHYQESSSESSPAESTVEQTLDPSNDFLEKRLMRKTNARKLPRGMPPKYLWDQPNLLSEEMVRCMKNIFMSLADPTATSKASSNESHLSPVSPRGHLSSSASWWPSTERSMISSWVQSPQIDIQNNANVLATGDVFDPYRVRGKLSWAEIGNYSLASEVSWMSVGKKQLEYASGALKKFRTLVEQLARVNPIHLSCNEKLAFWINLYNALIMHAYLAYGVPKSDLKLFSLMQKAAYTVGGHSYTAATMEYVILKMKPPMHRPQIALLLAIHKMKVSEEQRRASIDTHEPLLGFALSCGMYSSPAVRIYSAKGVKEEMLEAQRDFIQASVGLSSKGKLLLPKMLHCYAKSLVEDSNLGVWISRYLPPHQAAFVEQCISQRRQSLLASRNCGILPFDSRFRYLFLPDDNTSL

SEQ ID NO: 80745 - DNA, 1941 bp, Arabidopsis thaliana
  misc_feature (1)..(1941): Ceres Seq. ID no. 12657042
  misc_feature: MA Experiment ID: 20000264 Result: Up-regulated in Transcription
  misc_feature: MA Experiment 20000264 PARAMETER Experiment Name: At_Open_Flower_P Parameter: Age (day) Value: 21
  misc_feature: MA Experiment 20000264 PARAMETER Experiment Name: At_Open_Flower_P Parameter: Plant Line Value: WS
  misc_feature: MA Experiment 20000264 PARAMETER Experiment Name: At_Open_Flower_P Parameter: Tissue Value: Open Flower vs. Whole Plant
  misc_feature: MA Experiment ID: 20000286 Result: Up-regulated in Transcription
  misc_feature: MA Experiment 20000286 PARAMETER Experiment Name: At_Open_Flower_P Parameter: Age (day) Value: 21
  misc_feature: MA Experiment 20000286 PARAMETER Experiment Name: At_Open_Flower_P Parameter: Plant Line Value: WS
  misc_feature: MA Experiment 20000286 PARAMETER Experiment Name: At_Open_Flower_P Parameter: Tissue Value: Half Open vs. Whole Plant
  misc_feature: MA Experiment ID: 20000437 Result: Up-regulated in Transcription
  misc_feature: MA Experiment 20000437 PARAMETER Experiment Name: At_Drought_P Parameter: Age (day) Value: 8
  misc_feature: MA Experiment 20000437 PARAMETER Experiment Name: At_Drought_P Parameter: Organism Value: A. thaliana
  misc_feature: MA Experiment 20000437 PARAMETER Experiment Name: At_Drought_P Parameter: Plant Line Value: WS
  misc_feature: MA Experiment 20000437 PARAMETER Experiment Name: At_Drought_P Parameter: Timepoint (hr) Value: 24
  misc_feature: MA Experiment 20000437 PARAMETER Experiment Name: At_Drought_P Parameter: Tissue Value: Whole Plant
  misc_feature: MA Experiment 20000437 PARAMETER Experiment Name: At_Drought_P Parameter: Treatment Value: Drought vs. No Drought
  misc_feature: MA Experiment ID: 20000794 Result: Up-regulated in Transcription
  misc_feature: MA Experiment 20000794 PARAMETER Experiment Name: At_Petals_P Parameter: Age (day) Value: 23-25 days
  misc_feature: MA Experiment 20000794 PARAMETER Experiment Name: At_Petals_P Parameter: Plant Line Value: WS
  misc_feature: MA Experiment 20000794 PARAMETER Experiment Name: At_Petals_P Parameter: Tissue Value: Petals vs. Whole plant
  misc_feature: MA Experiment ID: 20001247 Result: Up-regulated in Transcription
  misc_feature: MA Experiment 20001247 PARAMETER Experiment Name: At_Far-red-induction_P Parameter: Age (day) Value: 7
  misc_feature: MA Experiment 20001247 PARAMETER Experiment Name: At_Far-red-induction_P Parameter: Light Value: Far-red vs. White
  misc_feature: MA Experiment 20001247 PARAMETER Experiment Name: At_Far-red-induction_P Parameter: Organism Value: A. thaliana
  misc_feature: MA Experiment 20001247 PARAMETER Experiment Name: At_Far-red-induction_P Parameter: Plant Line Value: Columbia
  misc_feature: MA Experiment 20001247 PARAMETER Experiment Name: At_Far-red-induction_P Parameter: Timepoint (hr) Value: 1
  misc_feature: MA Experiment 20001247 PARAMETER Experiment Name: At_Far-red-induction_P Parameter: Tissue Value: Whole Plant
  misc_feature: MA Experiment ID: 20001450 Result: Up-regulated in Transcription
  misc_feature: MA Experiment 20001450 PARAMETER Experiment Name: At_Far-red-induction_P Parameter: Age (day) Value: 7
  misc_feature: MA Experiment 20001450 PARAMETER Experiment Name: At_Far-red-induction_P Parameter: Light Value: Far-red vs. White
  misc_feature: MA Experiment 20001450 PARAMETER Experiment Name: At_Far-red-induction_P Parameter: Organism Value: A. thaliana
  misc_feature: MA Experiment 20001450 PARAMETER Experiment Name: At_Far-red-induction_P Parameter: Plant Line Value: Columbia
  misc_feature: MA Experiment 20001450 PARAMETER Experiment Name: At_Far-red-induction_P Parameter: Timepoint (hr) Value: 8
  misc_feature: MA Experiment 20001450 PARAMETER Experiment Name: At_Far-red-induction_P Parameter: Tissue Value: Whole Plant
  misc_feature: MA Experiment ID: 20001451 Result: Up-regulated in Transcription
  misc_feature: MA Experiment 20001451 PARAMETER Experiment Name: At_Far-red-induction_P Parameter: Age (day) Value: 7
  misc_feature: MA Experiment 20001451 PARAMETER Experiment Name: At_Far-red-induction_P Parameter: Light Value: Far-red vs. White
  misc_feature: MA Experiment 20001451 PARAMETER Experiment Name: At_Far-red-induction_P Parameter: Organism Value: A. thaliana
  misc_feature: MA Experiment 20001451 PARAMETER Experiment Name: At_Far-red-induction_P Parameter: Plant Line Value: Columbia
  misc_feature: MA Experiment 20001451 PARAMETER Experiment Name: At_Far-red-induction_P Parameter: Timepoint (hr) Value: 24
  misc_feature: MA Experiment 20001451 PARAMETER Experiment Name: At_Far-red-induction_P Parameter: Tissue Value: Whole Plant
  misc_feature: MA Experiment ID: 20001557 Result: Down-regulated in Transcription
  misc_feature: MA Experiment 20001557 PARAMETER Experiment Name: At_Drought_Soil_Dry_P Parameter: Age (day) Value: 27
  misc_feature: MA Experiment 20001557 PARAMETER Experiment Name: At_Drought_Soil_Dry_P Parameter: Organism Value: A. thaliana
  misc_feature: MA Experiment 20001557 PARAMETER Experiment Name: At_Drought_Soil_Dry_P Parameter: Plant Line Value: WS
  misc_feature: MA Experiment 20001557 PARAMETER Experiment Name: At_Drought_Soil_Dry_P Parameter: Post Timepoint (hr) Value: 3
  misc_feature: MA Experiment 20001557 PARAMETER Experiment Name: At_Drought_Soil_Dry_P Parameter: Post-Treatment Value: Re-Water vs. No Drought
  misc_feature: MA Experiment 20001557 PARAMETER Experiment Name: At_Drought_Soil_Dry_P Parameter: Timepoint (day) Value: 13
  misc_feature: MA Experiment 20001557 PARAMETER Experiment Name: At_Drought_Soil_Dry_P Parameter: Treatment Value: Drought vs. No Drought
  misc_feature: MA Experiment ID: 20001558 Result: Down-regulated in Transcription
  misc_feature: MA Experiment 20001558 PARAMETER Experiment Name: At_Drought_Soil_Dry_P Parameter: Age (day) Value: 27
  misc_feature: MA Experiment 20001558 PARAMETER Experiment Name: At_Drought_Soil_Dry_P Parameter: Organism Value: A. thaliana
  misc_feature: MA Experiment 20001558 PARAMETER Experiment Name: At_Drought_Soil_Dry_P Parameter: Plant Line Value: WS
  misc_feature: MA Experiment 20001558 PARAMETER Experiment Name: At_Drought_Soil_Dry_P Parameter: Post Timepoint (hr) Value: 6
  misc_feature: MA Experiment 20001558 PARAMETER Experiment Name: At_Drought_Soil_Dry_P Parameter: Post-Treatment Value: Re-Water vs. No Drought
  misc_feature: MA Experiment 20001558 PARAMETER Experiment Name: At_Drought_Soil_Dry_P Parameter: Timepoint (day) Value: 13
  misc_feature: MA Experiment 20001558 PARAMETER Experiment Name: At_Drought_Soil_Dry_P Parameter: Treatment Value: Drought vs. No Drought
  misc_feature: MA Experiment ID: 20001910 Result: Up-regulated in Transcription
  misc_feature: MA Experiment 20001910 PARAMETER Experiment Name: At_Drought_Reproduction_P Parameter: Age (day) Value: 37
  misc_feature: MA Experiment 20001910 PARAMETER Experiment Name: At_Drought_Reproduction_P Parameter: Organism Value: A. thaliana
  misc_feature: MA Experiment 20001910 PARAMETER Experiment Name: At_Drought_Reproduction_P Parameter: Plant Line Value: WS
  misc_feature: MA Experiment 20001910 PARAMETER Experiment Name: At_Drought_Reproduction_P Parameter: Timepoint (day) Value: 7
  misc_feature: MA Experiment 20001910 PARAMETER Experiment Name: At_Drought_Reproduction_P Parameter: Tissue Value: Flowers
  misc_feature: MA Experiment 20001910 PARAMETER Experiment Name: At_Drought_Reproduction_P Parameter: Treatment Value: Drought vs. No Drought
atgaactctccatcaaaactcaaaggctggtcttcaagcggaggcgatccttgtggcgattcgtgggatggcattacttgcaaaggctcttctgttactgaaataaaagtatctggacgtggactcagtggatctttaggttaccagcttggaaacttgaaatcgctcacttaccttgatgtaagcaagaacaatcttaacggaaacttaccctaccagcttcctgacaagcttacttatctagatggctctgagaatgacttcaacggtaatgtgccatattcggtgtctctcatgaacgacctcagttacctaaaccttggccgtaacaacctcaatggtgaactcagtgacatgtttcaaaagcttccaaaacttgaaacaattgatctttcttccaatcaactcacgggaaaactaccgcagagttttgccaatctaacaggtcttaaaacactgcatttgcaagaaaaccaattcaaaggctctataaatgctctcagggacctccctcagattgatgatgtaaacgtagcaaacaatcaatttactggttggatcccaaacgagttgaagaatattggaaaccttgaaactggaggaaacaagtggtcaagcggtagagctccttcaccacctccgggaacccgtcacatagacagaaactcatcaggaggcggtggaggaagcagcaaggctctgacactaggagttataatagcggtgtcttctataggtggactcattttatttgcagggttgattgcattgatttctcgaagaaagaactctaatgattcttctcactttttcgacgacgagaaaggaaccaaccgaagcaagccactcttcacaccacaatcctctcagatgcttcaattcgataatatggaagaattcaaaaaccagaagacagttgattctaatacttcacttgaaacaaagccttctgttaaaagaacttcttctgtcagtttcaagaactctcctacttttcatctcataccttctacccaagtggctgctacccctgaccgttcctccacctcccaagactctcctgatacacgcggtgtgaaagcgttttcactagcggatttgcagaataccgcgtcttgtttctcgccgaatcgccttcttggtgaaggaaccattggacgtgtttataaagctaaatttcaggatggaaggaaatttgcagtcaaagagattgattcttctctgttaggaaaaggcaatccggaagagttttcacacatagtgtcgagtatctcgagtattcaccacaagaatatggcagaactcgtgggttattgttcagaacaaggaagaaatatgcttgtttatgagtatttcacaagtggatcacttcacagatttcttcacctgtctgatgatttcagcaaaccattgacgtggaacaccagaatccgaatcgctctcggaactgctaaagctatagagtaccttcatgaaacatgttcgcctccgctagttcacaagaacatcaagtcatcaaacattttacttgataatgagctaaatccccgcctctcagactatggcttggcaaactttcaccaccgcacaagtcagaatcttggagttggatacaatgccccagaatgcacagatccctccgcttacacacaaaagagcgacgtgtacagctttggtgtggtgatgcttgagctgctaactggtcgaaagccttatgacagtgggaggccaaaagcagaacagtctttagttcgttgggcaaagccgcagcttaaagacatggatactctggatgaaatggtggatcccgcgttgtgcggactctacgctccagaatctgtatcatcattcgcggatatagtttccatctgcgtaatgacggagcctggacttaggcctccagtgtcaaatgtggtggaggcattgaagaggctagtgtag

SEQ ID NO: 80746 - protein, 646 aa, Arabidopsis thaliana
  peptide (1)..(646): Ceres Seq. ID no. 12657043
  misc_feature (1)..(646): Homolog of NCBI NO: 29367551 NR Description: putative leucine-rich repeat transmembrane
  misc_feature (1)..(646): Homolog of NCBI NO: 15217283 NR Description: Putative leucine-rich repeat transmembrane
  misc_feature (1)..(646): Homolog of NCBI NO: 7489783 NR Description: leucine-rich repeat transmembrane protein kinase
  misc_feature (1)..(646): Homolog of NCBI NO: 7489784 NR Description: leucine-rich repeat transmembrane protein kinase
  misc_feature (1)..(646): Homolog of NCBI NO: 15220928 NR Description: leucine-rich repeat transmembrane protein kinase
  misc_feature (1)..(646): Homolog of NCBI NO: 30683104 NR Description: leucine-rich repeat transmembrane protein kinase, [Arabidopsis thaliana] >gi|9279582|dbj|BAB01040.1|
  misc_feature (1)..(646): Homolog of NCBI NO: 34906746 NR Description: similar to leucine-rich repeat transmembrane
  misc_feature (55)..(441): Homolog of NCBI NO: 37533916 NR Description: putative leucine-rich repeat transmembrane
  misc_feature (400)..(646): Homolog of NCBI NO: 37533916 NR Description: putative leucine-rich repeat transmembrane
  misc_feature (1)..(341): Homolog of NCBI NO: 37533916 NR Description: putative leucine-rich repeat transmembrane
MNSPSKLKGWSSSGGDPCGDSWDGITCKGSSVTEIKVSGRGLSGSLGYQLGNLKSLTYLDVSKNNLNGNLPYQLPDKLTYLDGSENDFNGNVPYSVSLMNDLSYLNLGRNNLNGELSDMFQKLPKLETIDLSSNQLTGKLPQSFANLTGLKTLHLQENQFKGSINALRDLPQIDDVNVANNQFTGWIPNELKNIGNLETGGNKWSSGRAPSPPPGTRHIDRNSSGGGGGSSKALTLGVIIAVSSIGGLILFAGLIALISRRKNSNDSSHFFDDEKGTNRSKPLFTPQSSQMLQFDNMEEFKNQKTVDSNTSLETKPSVKRTSSVSFKNSPTFHLIPSTQVAATPDRSSTSQDSPDTRGVKAFSLADLQNTASCFSPNRLLGEGTIGRVYKAKFQDGRKFAVKEIDSSLLGKGNPEEFSHIVSSISSIHHKNMAELVGYCSEQGRNMLVYEYFTSGSLHRFLHLSDDFSKPLTWNTRIRIALGTAKAIEYLHETCSPPLVHKNIKSSNILLDNELNPRLSDYGLANFHHRTSQNLGVGYNAPECTDPSAYTQKSDVYSFGVVMLELLTGRKPYDSGRPKAEQSLVRWAKPQLKDMDTLDEMVDPALCGLYAPESVSSFADIVSICVMTEPGLRPPVSNVVEALKRLV

SEQ ID NO: 80747 - protein, 548 aa, Arabidopsis thaliana
  peptide (1)..(548): Ceres Seq. ID no. 12657044
  misc_feature (1)..(548): Homolog of NCBI NO: 29367551 NR Description: putative leucine-rich repeat transmembrane
  misc_feature (1)..(548): Homolog of NCBI NO: 15217283 NR Description: Putative leucine-rich repeat transmembrane
  misc_feature (1)..(548): Homolog of NCBI NO: 7489783 NR Description: leucine-rich repeat transmembrane protein kinase
  misc_feature (1)..(548): Homolog of NCBI NO: 7489784 NR Description: leucine-rich repeat transmembrane protein kinase
  misc_feature (1)..(548): Homolog of NCBI NO: 15220928 NR Description: leucine-rich repeat transmembrane protein kinase
  misc_feature (1)..(548): Homolog of NCBI NO: 30683104 NR Description: leucine-rich repeat transmembrane protein kinase, [Arabidopsis thaliana] >gi|9279582|dbj|BAB01040.1|
  misc_feature (1)..(548): Homolog of NCBI NO: 34906746 NR Description: similar to leucine-rich repeat transmembrane
  misc_feature (1)..(343): Homolog of NCBI NO: 37533916 NR Description: putative leucine-rich repeat transmembrane
  misc_feature (302)..(548): Homolog of NCBI NO: 37533916 NR Description: putative leucine-rich repeat transmembrane
  misc_feature (1)..(243): Homolog of NCBI NO: 37533916 NR Description: putative leucine-rich repeat transmembrane
MNDLSYLNLGRNNLNGELSDMFQKLPKLETIDLSSNQLTGKLPQSFANLTGLKTLHLQENQFKGSINALRDLPQIDDVNVANNQFTGWIPNELKNIGNLETGGNKWSSGRAPSPPPGTRHIDRNSSGGGGGSSKALTLGVIIAVSSIGGLILFAGLIALISRRKNSNDSSHFFDDEKGTNRSKPLFTPQSSQMLQFDNMEEFKNQKTVDSNTSLETKPSVKRTSSVSFKNSPTFHLIPSTQVAATPDRSSTSQDSPDTRGVKAFSLADLQNTASCFSPNRLLGEGTIGRVYKAKFQDGRKFAVKEIDSSLLGKGNPEEFSHIVSSISSIHHKNMAELVGYCSEQGRNMLVYEYFTSGSLHRFLHLSDDFSKPLTWNTRIRIALGTAKAIEYLHETCSPPLVHKNIKSSNILLDNELNPRLSDYGLANFHHRTSQNLGVGYNAPECTDPSAYTQKSDVYSFGVVMLELLTGRKPYDSGRPKAEQSLVRWAKPQLKDMDTLDEMVDPALCGLYAPESVSSFADIVSICVMTEPGLRPPVSNVVEALKRLV

SEQ ID NO: 80748 - protein, 528 aa, Arabidopsis thaliana
  peptide (1)..(528): Ceres Seq. ID no. 12657045
  misc_feature (1)..(528): Homolog of NCBI NO: 29367551 NR Description: putative leucine-rich repeat transmembrane
  misc_feature (1)..(528): Homolog of NCBI NO: 15217283 NR Description: Putative leucine-rich repeat transmembrane
  misc_feature (1)..(528): Homolog of NCBI NO: 7489783 NR Description: leucine-rich repeat transmembrane protein kinase
  misc_feature (1)..(528): Homolog of NCBI NO: 7489784 NR Description: leucine-rich repeat transmembrane protein kinase
  misc_feature (1)..(528): Homolog of NCBI NO: 15220928 NR Description: leucine-rich repeat transmembrane protein kinase
  misc_feature (1)..(528): Homolog of NCBI NO: 30683104 NR Description: leucine-rich repeat transmembrane protein kinase, [Arabidopsis thaliana] >gi|9279582|dbj|BAB01040.1|
  misc_feature (1)..(528): Homolog of NCBI NO: 34906746 NR Description: similar to leucine-rich repeat transmembrane
  misc_feature (1)..(323): Homolog of NCBI NO: 37533916 NR Description: putative leucine-rich repeat transmembrane
  misc_feature (282)..(528): Homolog of NCBI NO: 37533916 NR Description: putative leucine-rich repeat transmembrane
  misc_feature (1)..(223): Homolog of NCBI NO: 37533916 NR Description: putative leucine-rich repeat transmembrane
MFQKLPKLETIDLSSNQLTGKLPQSFANLTGLKTLHLQENQFKGSINALRDLPQIDDVNVANNQFTGWIPNELKNIGNLETGGNKWSSGRAPSPPPGTRHIDRNSSGGGGGSSKALTLGVIIAVSSIGGLILFAGLIALISRRKNSNDSSHFFDDEKGTNRSKPLFTPQSSQMLQFDNMEEFKNQKTVDSNTSLETKPSVKRTSSVSFKNSPTFHLIPSTQVAATPDRSSTSQDSPDTRGVKAFSLADLQNTASCFSPNRLLGEGTIGRVYKAKFQDGRKFAVKEIDSSLLGKGNPEEFSHIVSSISSIHHKNMAELVGYCSEQGRNMLVYEYFTSGSLHRFLHLSDDFSKPLTWNTRIRIALGTAKAIEYLHETCSPPLVHKNIKSSNILLDNELNPRLSDYGLANFHHRTSQNLGVGYNAPECTDPSAYTQKSDVYSFGVVMLELLTGRKPYDSGRPKAEQSLVRWAKPQLKDMDTLDEMVDPALCGLYAPESVSSFADIVSICVMTEPGLRPPVSNVVEALKRLV

SEQ ID NO: 80749 - DNA, 4793 bp, Arabidopsis thaliana
  misc_feature (1)..(4793): Ceres Seq. ID no. 12657046
  misc_feature: MA Experiment ID: 20000171 Result: Down-regulated in Transcription
  misc_feature: MA Experiment 20000171 PARAMETER Experiment Name: At_42deg_Heat_P Parameter: Age (day) Value: 14
  misc_feature: MA Experiment 20000171 PARAMETER Experiment Name: At_42deg_Heat_P Parameter: Organism Value: A. thaliana
  misc_feature: MA Experiment 20000171 PARAMETER Experiment Name: At_42deg_Heat_P Parameter: Plant Line Value: WS
  misc_feature: MA Experiment 20000171 PARAMETER Experiment Name: At_42deg_Heat_P Parameter: Temperature (deg C) Value: 42 vs. 22
  misc_feature: MA Experiment 20000171 PARAMETER Experiment Name: At_42deg_Heat_P Parameter: Timepoint (hr) Value: 1
  misc_feature: MA Experiment 20000171 PARAMETER Experiment Name: At_42deg_Heat_P Parameter: Tissue Value: Aerial
  misc_feature: MA Experiment ID: 20000173 Result: Down-regulated in Transcription
  misc_feature: MA Experiment 20000173 PARAMETER Experiment Name: At_42deg_Heat_P Parameter: Age (day) Value: 14
  misc_feature: MA Experiment 20000173 PARAMETER Experiment Name: At_42deg_Heat_P Parameter: Organism Value: A. thaliana
  misc_feature: MA Experiment 20000173 PARAMETER Experiment Name: At_42deg_Heat_P Parameter: Plant Line Value: WS
  misc_feature: MA Experiment 20000173 PARAMETER Experiment Name: At_42deg_Heat_P Parameter: Temperature (deg C) Value: 42 vs. 22
  misc_feature: MA Experiment 20000173 PARAMETER Experiment Name: At_42deg_Heat_P Parameter: Timepoint (hr) Value: 6
  misc_feature: MA Experiment 20000173 PARAMETER Experiment Name: At_42deg_Heat_P Parameter: Tissue Value: Aerial
  misc_feature: MA Experiment ID: 20000179 Result: Down-regulated in Transcription
  misc_feature: MA Experiment 20000179 PARAMETER Experiment Name: At_Germinating_Seeds_P Parameter: Age (hr) Value: 6 vs. 0
  misc_feature: MA Experiment 20000179 PARAMETER Experiment Name: At_Germinating_Seeds_P Parameter: Tissue Value: Germinating Seeds
  misc_feature: MA Experiment ID: 20000180 Result: Down-regulated in Transcription
  misc_feature: MA Experiment 20000180 PARAMETER Experiment Name: At_Germinating_Seeds_P Parameter: Age (hr) Value: 24 vs. 0
  misc_feature: MA Experiment 20000180 PARAMETER Experiment Name: At_Germinating_Seeds_P Parameter: Tissue Value: Germinating Seeds
  misc_feature: MA Experiment ID: 20000182 Result: Up-regulated in Transcription
  misc_feature: MA Experiment 20000182 PARAMETER Experiment Name: At_2mM_SA_P Parameter: Age (day) Value: 14
  misc_feature: MA Experiment 20000182 PARAMETER Experiment Name: At_2mM_SA_P Parameter: Organism Value: A. thaliana
  misc_feature: MA Experiment 20000182 PARAMETER Experiment Name: At_2mM_SA_P Parameter: Plant Line Value: WS
  misc_feature: MA Experiment 20000182 PARAMETER Experiment Name: At_2mM_SA_P Parameter: Timepoint (hr) Value: 6
  misc_feature: MA Experiment 20000182 PARAMETER Experiment Name: At_2mM_SA_P Parameter: Tissue Value: Aerial
  misc_feature: MA Experiment 20000182 PARAMETER Experiment Name: At_2mM_SA_P Parameter: Treatment Value: 2mM SA vs. No Treatment
  misc_feature: MA Experiment ID: 20000184 Result: Down-regulated in Transcription
  misc_feature: MA Experiment 20000184 PARAMETER Experiment Name: At_Shoots__P Parameter: Age (day) Value: 7
  misc_feature: MA Experiment 20000184 PARAMETER Experiment Name: At_Shoots__P Parameter: Tissue Value: Shoots vs. Whole Plant
  misc_feature: MA Experiment ID: 20000308 Result: Up-regulated in Transcription
  misc_feature: MA Experiment 20000308 PARAMETER Experiment Name: At_100mM_NaCl__P Parameter: Age (day) Value: 17
  misc_feature: MA Experiment 20000308 PARAMETER Experiment Name: At_100mM_NaCl__P Parameter: Organism Value: A. thaliana
  misc_feature: MA Experiment 20000308 PARAMETER Experiment Name: At_100mM_NaCl__P Parameter: Plant Line Value: WS
  misc_feature: MA Experiment 20000308 PARAMETER Experiment Name: At_100mM_NaCl__P Parameter: Timepoint (hr) Value: 72
  misc_feature: MA Experiment 20000308 PARAMETER Experiment Name: At_100mM_NaCl__P Parameter: Tissue Value: Whole Plant
  misc_feature: MA Experiment 20000308 PARAMETER Experiment Name: At_100mM_NaCl__P Parameter: Treatment Value: 100mM NaCl vs. No Treatment
  misc_feature: MA Experiment ID: 20000441 Result: Up-regulated in Transcription
  misc_feature: MA Experiment 20000441 PARAMETER Experiment Name: At_1uM_BR-BRZ__P Parameter: Tissue Value: Shoot Apices
  misc_feature: MA Experiment 20000441 PARAMETER Experiment Name: At_1uM_BR-BRZ__P Parameter: Treatment Value: 1uM BR vs. No Treatment
  misc_feature: MA Experiment ID: 20000445 Result: Up-regulated in Transcription
  misc_feature: MA Experiment 20000445 PARAMETER Experiment Name: At_100uM_NAA__P Parameter: Age (day) Value: 14
  misc_feature: MA Experiment 20000445 PARAMETER Experiment Name: At_100uM_NAA__P Parameter: Organism Value: A. thaliana
  misc_feature: MA Experiment 20000445 PARAMETER Experiment Name: At_100uM_NAA__P Parameter: Plant Line Value: WS
  misc_feature: MA Experiment 20000445 PARAMETER Experiment Name: At_100uM_NAA__P Parameter: Timepoint (hr) Value: 6
  misc_feature: MA Experiment 20000445 PARAMETER Experiment Name: At_100uM_NAA__P Parameter: Tissue Value: Aerial
  misc_feature: MA Experiment 20000445 PARAMETER Experiment Name: At_100uM_NAA__P Parameter: Treatment Value: 100uM NAA vs. No Treatment
  misc_feature: MA Experiment ID: 20000456 Result: Up-regulated in Transcription
  misc_feature: MA Experiment 20000456 PARAMETER Experiment Name: At_100uM_BA_P Parameter: Age (day) Value: 14
  misc_feature: MA Experiment 20000456 PARAMETER Experiment Name: At_100uM_BA_P Parameter: Organism Value: A. thaliana
  misc_feature: MA Experiment 20000456 PARAMETER Experiment Name: At_100uM_BA_P Parameter: Plant Line Value: WS
  misc_feature: MA Experiment 20000456 PARAMETER Experiment Name: At_100uM_BA_P Parameter: Timepoint (hr) Value: 6
  misc_feature: MA Experiment 20000456 PARAMETER Experiment Name: At_100uM_BA_P Parameter: Tissue Value: Aerial
  misc_feature: MA Experiment 20000456 PARAMETER Experiment Name: At_100uM_BA_P Parameter: Treatment Value: 100uM BA vs. No Treatment
  misc_feature: MA Experiment ID: 20000527 Result: Down-regulated in Transcription
  misc_feature: MA Experiment 20000527 PARAMETER Experiment Name: At_10percent_PEG_P Parameter: Age (day) Value: 20
  misc_feature: MA Experiment 20000527 PARAMETER Experiment Name: At_10percent_PEG_P Parameter: Organism Value: A. thaliana
  misc_feature: MA Experiment 20000527 PARAMETER Experiment Name: At_10percent_PEG_P Parameter: Plant Line Value: WS
  misc_feature: MA Experiment 20000527 PARAMETER Experiment Name: At_10percent_PEG_P Parameter: Timepoint (day) Value: 20
  misc_feature: MA Experiment 20000527 PARAMETER Experiment Name: At_10percent_PEG_P Parameter: Tissue Value: Whole Plant
  misc_feature: MA Experiment 20000527 PARAMETER Experiment Name: At_10percent_PEG_P Parameter: Treatment Value: 10percent PEG vs. No Treatment
  misc_feature: MA Experiment ID: 20000709 Result: Up-regulated in Transcription
  misc_feature: MA Experiment 20000709 PARAMETER Experiment Name: At_15mM_NH4NO3_L-to-H_P Parameter: Age (hr) Value: 14
  misc_feature: MA Experiment 20000709 PARAMETER Experiment Name: At_15mM_NH4NO3_L-to-H_P Parameter: Organism Value: A. thaliana
  misc_feature: MA Experiment 20000709 PARAMETER Experiment Name: At_15mM_NH4NO3_L-to-H_P Parameter: Plant Line Value: WS
  misc_feature: MA Experiment 20000709 PARAMETER Experiment Name: At_15mM_NH4NO3_L-to-H_P Parameter: Timepoint (hr) Value: 4
  misc_feature: MA Experiment 20000709 PARAMETER Experiment Name: At_15mM_NH4NO3_L-to-H_P Parameter: Tissue Value: Aerial
  misc_feature: MA Experiment 20000709 PARAMETER Experiment Name: At_15mM_NH4NO3_L-to-H_P Parameter: Treatment Value: 15mM NH4NO3 vs. 30mM Mannitol
  misc_feature: MA Experiment ID: 20001451 Result: Down-regulated in Transcription
  misc_feature: MA Experiment 20001451 PARAMETER Experiment Name: At_Far-red-induction_P Parameter: Age (day) Value: 7
  misc_feature: MA Experiment 20001451 PARAMETER Experiment Name: At_Far-red-induction_P Parameter: Light Value: Far-red vs. White
  misc_feature: MA Experiment 20001451 PARAMETER Experiment Name: At_Far-red-induction_P Parameter: Organism Value: A. thaliana
  misc_feature: MA Experiment 20001451 PARAMETER Experiment Name: At_Far-red-induction_P Parameter: Plant Line Value: Columbia
  misc_feature: MA Experiment 20001451 PARAMETER Experiment Name: At_Far-red-induction_P Parameter: Timepoint (hr) Value: 24
  misc_feature: MA Experiment 20001451 PARAMETER Experiment Name: At_Far-red-induction_P Parameter: Tissue Value: Whole Plant
  misc_feature: MA Experiment ID: 20001555 Result: Down-regulated in Transcription
  misc_feature: MA Experiment 20001555 PARAMETER Experiment Name: At_Drought_Soil_Dry_P Parameter: Age (day) Value: 24
  misc_feature: MA Experiment 20001555 PARAMETER Experiment Name: At_Drought_Soil_Dry_P Parameter: Organism Value: A. thaliana
  misc_feature: MA Experiment 20001555 PARAMETER Experiment Name: At_Drought_Soil_Dry_P Parameter: Plant Line Value: WS
  misc_feature: MA Experiment 20001555 PARAMETER Experiment Name: At_Drought_Soil_Dry_P Parameter: Post Timepoint (hr) Value: None
  misc_feature: MA Experiment 20001555 PARAMETER Experiment Name: At_Drought_Soil_Dry_P Parameter: Post-Treatment Value: None
  misc_feature: MA Experiment 20001555 PARAMETER Experiment Name: At_Drought_Soil_Dry_P Parameter: Timepoint (day) Value: 10
  misc_feature: MA Experiment 20001555 PARAMETER Experiment Name: At_Drought_Soil_Dry_P Parameter: Treatment Value: Drought vs. No Drought
  misc_feature: MA Experiment ID: 20001556 Result: Down-regulated in Transcription
  misc_feature: MA Experiment 20001556 PARAMETER Experiment Name: At_Drought_Soil_Dry_P Parameter: Age (day) Value: 26
  misc_feature: MA Experiment 20001556 PARAMETER Experiment Name: At_Drought_Soil_Dry_P Parameter: Organism Value: A. thaliana
  misc_feature: MA Experiment 20001556 PARAMETER Experiment Name: At_Drought_Soil_Dry_P Parameter: Plant Line Value: WS
  misc_feature: MA Experiment 20001556 PARAMETER Experiment Name: At_Drought_Soil_Dry_P Parameter: Post Timepoint (hr) Value: None
  misc_feature: MA Experiment 20001556 PARAMETER Experiment Name: At_Drought_Soil_Dry_P Parameter: Post-Treatment Value: None
  misc_feature: MA Experiment 20001556 PARAMETER Experiment Name: At_Drought_Soil_Dry_P Parameter: Timepoint (day) Value: 12
  misc_feature: MA Experiment 20001556 PARAMETER Experiment Name: At_Drought_Soil_Dry_P Parameter: Treatment Value: Drought vs. No Drought
  misc_feature: MA Experiment ID: 20001559 Result: Down-regulated in Transcription
  misc_feature: MA Experiment 20001559 PARAMETER Experiment Name: At_Drought_Soil_Dry_P Parameter: Age (day) Value: 28
  misc_feature: MA Experiment 20001559 PARAMETER Experiment Name: At_Drought_Soil_Dry_P Parameter: Organism Value: A. thaliana
  misc_feature: MA Experiment 20001559 PARAMETER Experiment Name: At_Drought_Soil_Dry_P Parameter: Plant Line Value: WS
  misc_feature: MA Experiment 20001559 PARAMETER Experiment Name: At_Drought_Soil_Dry_P Parameter: Post Timepoint (hr) Value: 29
  misc_feature: MA Experiment 20001559 PARAMETER Experiment Name: At_Drought_Soil_Dry_P Parameter: Post-Treatment Value: Re-Water vs. No Drought
  misc_feature: MA Experiment 20001559 PARAMETER Experiment Name: At_Drought_Soil_Dry_P Parameter: Timepoint (day) Value: 14
  misc_feature: MA Experiment 20001559 PARAMETER Experiment Name: At_Drought_Soil_Dry_P Parameter: Treatment Value: Drought vs. No Drought
  misc_feature: MA Experiment ID: 20001904 Result: Down-regulated in Transcription
  misc_feature: MA Experiment 20001904 PARAMETER Experiment Name: At_Drought_Reproduction_P Parameter: Age (day) Value: 37
  misc_feature: MA Experiment 20001904 PARAMETER Experiment Name: At_Drought_Reproduction_P Parameter: Organism Value: A. thaliana
  misc_feature: MA Experiment 20001904 PARAMETER Experiment Name: At_Drought_Reproduction_P Parameter: Plant Line Value: WS
  misc_feature: MA Experiment 20001904 PARAMETER Experiment Name: At_Drought_Reproduction_P Parameter: Timepoint (day) Value: 7
  misc_feature: MA Experiment 20001904 PARAMETER Experiment Name: At_Drought_Reproduction_P Parameter: Tissue Value: Rosettes
  misc_feature: MA Experiment 20001904 PARAMETER Experiment Name: At_Drought_Reproduction_P Parameter: Treatment Value: Drought vs. No Drought
  misc_feature: MA Experiment ID: 20001905 Result: Down-regulated in Transcription
  misc_feature: MA Experiment 20001905 PARAMETER Experiment Name: At_Drought_Reproduction_P Parameter: Age (day) Value: 40
  misc_feature: MA Experiment 20001905 PARAMETER Experiment Name: At_Drought_Reproduction_P Parameter: Organism Value: A. thaliana
  misc_feature: MA Experiment 20001905 PARAMETER Experiment Name: At_Drought_Reproduction_P Parameter: Plant Line Value: WS
  misc_feature: MA Experiment 20001905 PARAMETER Experiment Name: At_Drought_Reproduction_P Parameter: Timepoint (day) Value: 10
  misc_feature: MA Experiment 20001905 PARAMETER Experiment Name: At_Drought_Reproduction_P Parameter: Tissue Value: Rosettes
  misc_feature: MA Experiment 20001905 PARAMETER Experiment Name: At_Drought_Reproduction_P Parameter: Treatment Value: Drought vs. No Drought
agagagctcaaagccatggactttctcggttccacgacgggtagcggtacgttagcaatgttgttctcgttttcggaatctattttgcctctggattctaggtctttccttctgaaacctcttttcctgagatggctttctggtttcttacactcggttttgttgctggtcctgtttttctcatgggttcgtaagaaaattaggggggatagtggtgttacggagagtttgaaagataggagggattttgggtttaagtcagctctgttttgtagtttagctctgtctctgcttaatctcgtgttgatgtcgttgagtggtttctattggtacgagagtggctggttagataatgaacagctagtttcctcccttgggtttcttttgggaatggtttcttggggggttttgtcgatttgtttgcatcgctgcagagattgtgagcataaaaaggctccctttttacttaggctatggttggttttctatctagtggtctcttgctactctcttgtggtagattttgtgatgtacgagagacgtgaaaccgtacctgttcaccttctagtgttcgatatagtcgcttttattgctgctgtgtttctcggttacgtggctgtcctcaagaaagatagaagcaacagcaatggagttttggaagagcctctgttgaacggtggtgattctcgtgttggtggtgatgacagcgttgagttaaataaaaccaatgggagtggtgaggctactccttactcgagagctggcattctcagtcttttgactttctcatggatgagtccattaatagacattggaaacaagaaaacccttgatctagaagatgttccgcagcttcatgatactgacagcgtagtcgggttagctcctaagtttcggagtatgcttgaatcaccagatgggggcgagagaagtggcgttaccacgttcaagcttataaaagccttgtattttacggctcagtgggagattctagtgacagccttctttgctttcatctacacggttgcatcatatgttgggccagcactcattgatactttcgtgcaataccttaatggacgtaggcagtataaccatgaaggatatgtgctagtcattactttctttgctgctaagattgtggagtgcctttcacagagacattggttctttaggctacagaaggttggtattaggatgagatcagccttggttgcgatgatatatgaaaagggtctgaccctttcatgtcagtcaaagcaaggacgcacaagtggggagattataaatttcatgactgtggatgcggagaggattggtaatttcagttggtacatgcatgacccctggatggtcttgttacaagtcggtctagctctgtggatcttgtatagaaatcttggactagcatcaatagcggctttagttgctaccattatagtaatgcttataaattttccattcgggagaatgcaagagaggtttcaggagaagttaatggaagctaaggatagccggatgaaatcaacatctgagatcttaagaaacatgaggattctcaagcttcagggatgggaaatgaagtttctctccaagatttttgatcttcggaaatctgaggaaggatggctgaaaaagtatgtgtataactcggctgttattagttttgttttctggggggctcctactctggtgtcagtctccacttttggtgcttgtatacttcttggaatcccccttgaatcaggaaagatactctctgcacttgcaaccttcaggattctacaagagccgatctacaatcttcccgacactatctccatgattgtgcagactaaagtctctcttgatagacttgcatcctacctttgcctggacaatttgcagcctgacattgtagagaggcttcctaagggaagttcagacgtggcagtagaagtgatcaacagcactttatcttgggatgtctcatcctctaacccgactctcaaagacataaatttcaaggtctttcctgggatgaaggttgcagtttgtggtaccgttggctctgggaaatcgagcttactttcatctttactaggagaagtacccaaggtatctggaagtcttaaggtttgtgggacaaaagcgtatgttgcgcaatctccttggattcagagtggtaaaattgaggataacatcttgtttggcaaacctatggaaagagaacgatatgataaggtgcttgaagcatgttcgttgagtaaggatctggagatactttcattcggtgatcagaccgttattggagaacgcggcattaatttgagtggtgggcaaaagcaaaggatacagattgcacgtgctctctaccaagatgctgatatctatctgttcgatgatccttttagcgctgtggatgcacacacagggtcacatctctttaaggaagttctactggggcttttgtgttccaaatcggttatatatgttactcatcaagttgagttcttacctgctgctgatcttatactggtcatgaaagatgggagaatcagccaagctggaaaatacaatgatatcctcaactctggaactgatttcatggagcttataggtgcgcatcaggaggctcttgcagtagttgattctgttgatgccaattctgtttctgagaaatcagctttaggccaagaaaatgtaattgtgaaagatgctatcgctgttgatgagaaactagaaagtcaggatctgaagaatgataaattagaatctgtggagccccaaagacaaattattcaagaggaagagagggagaaaggtagtgtcgctttggatgtgtactggaaatatatcacactggcatatggaggagctcttgtgcctttcatattgttggggcaagttctctttcagcttctacagattggaagcaactactggatggcttgggctactcctgtttctgaggatgtgcaagctcctgtgaaactttccacgttaatgattgtgtatgtggctttggcctttggaagttccctctgcattcttcttagagccacgcttcttgtcactgctggttacaagactgctactgaactgtttcataaaatgcatcactgcatattccgttctcctatgtctttctttgattccactccaagtggaagaatcatgagtagagcttctaccgaccaatccgcagtagatttggaactaccgtatcaatttggatcagttgctatcacagtgattcagcttattggaatcattggagtaatgtctcaagtttcttggctggtttttctcgtcttcatccctgtggttgctgcctccatatggtatcagcggtattacatagctgcagcacgagaactttcgcggttagttggagtatgcaaagctcctctaattcagcatttttctgaaacgatttcaggggcgacaaccattaggagtttcagccaagaatttagattccgttctgacaacatgaggctaagtgatggttactctaggcccaaattctatacagctggagcaatggaatggctttgctttcgccttgatatgttgtcatcacttacatttgtcttttcattggttttcttggtctccatacctactggagtgattgatccaagtctcgcgggattagccgtgacttatggactcagtttgaatactctgcaagcttggctgatttggactctctgtaatcttgagaacaaaatcatatcggtagagaggattcttcaatatgcaagtgttcccagtgaaccacctcttgtgatagaatcaaaccgacctgagcaatcatggccttcacgtggtgaagttgaaatccgtgatcttcaggtccgatatgctccacatatgcctcttgtgttgcgaggaataacatgcacattcaaaggaggtttaagaacaggaattgttggaaggacaggaagcgggaaatcgactttgatacaaactcttttccgcattgtagaaccttcagctggagaaatcaggattgatggagtgaatattttgaccattgggttgcatgacttgcgtttaagactaagcatcataccccaagatccaaccatgtttgaaggaacaatgagaagtaacttggaccctcttgaagagtacacagatgatcaaatctgggaggctcttgacaagtgccaactaggagacgaggtgaggaaaaaagagcaaaagctcgattccagtgtgagcgagaatggagacaattggagtatgggtcagagacaactagtgtgtctcgggagagttcttctcaagagaagcaaaatcttggtgcttgatgaagccactgcttctgttgacactgcaactgacaatctgattcagaaaacgctaagagaacacttctcagactgtacagtgataaccattgcacacaggatatcttcagttattgacagcgacatggttctgcttctaagcaatgggatcattgaggagtatgatacgccagtgagattactggaggataagtcttcctctttttctaagcttgtggctgagtacacctcaagatctagttccagtttcgattgaagcaaagactctgctattttcctgctgatgatgacgatgaagaaaaacttaggatgtctgaatctggtttagccacaacactagctggattatgattcacacaagaagaaacactatcttttgttaaaagcttttgttcttagtttatagcttctactactgttgaacccctaaaaacgattattctacatcgctagtttcaaatcaatgcaataaaagattgttcacttctg

SEQ ID NO: 80750 - protein, 1519 aa, Arabidopsis thaliana
  peptide (1)..(1519): Ceres Seq. ID no. 12657047
  misc_feature (1301)..(1484): Pfam Name: ABC transporter Pfam Description: ABC transporter
  misc_feature (72)..(1515): Homolog of NCBI NO: 15227133 NR Description: glutathione-conjugate transporter AtMRP4; protein
  misc_feature (663)..(1516): Homolog of NCBI NO: 27368875 NR Description: MRP-like ABC transporter [Oryza sativa (japonica
  misc_feature (185)..(656): Homolog of NCBI NO: 27368875 NR Description: MRP-like ABC transporter [Oryza sativa (japonica
  misc_feature (30)..(918): Homolog of NCBI NO: 18031899 NR Description: ATP-binding cassette transporter MRP6
  misc_feature (243)..(1515): Homolog of NCBI NO: 27368877 NR Description: MRP-like ABC transporter [Oryza sativa (japonica
  misc_feature (157)..(656): Homolog of NCBI NO: 27368873 NR Description: MRP-like ABC transporter [Oryza sativa (japonica
  misc_feature (663)..(1103): Homolog of NCBI NO: 27368873 NR Description: MRP-like ABC transporter [Oryza sativa (japonica
  misc_feature (1097)..(1517): Homolog of NCBI NO: 27368873 NR Description: MRP-like ABC transporter [Oryza sativa (japonica
  misc_feature (235)..(917): Homolog of NCBI NO: 19172038 NR Description: ABC transporter ABCC.8 [Dictyostelium discoideum]
  misc_feature (919)..(1519): Homolog of NCBI NO: 19172038 NR Description: ABC transporter ABCC.8 [Dictyostelium discoideum]
RELKAMDFLGSTTGSGTLAMLFSFSESILPLDSRSFLLKPLFLRWLSGFLHSVLLLVLFFSWVRKKIRGDSGVTESLKDRRDFGFKSALFCSLALSLLNLVLMSLSGFYWYESGWLDNEQLVSSLGFLLGMVSWGVLSICLHRCRDCEHKKAPFLLRLWLVFYLVVSCYSLVVDFVMYERRETVPVHLLVFDIVAFIAAVFLGYVAVLKKDRSNSNGVLEEPLLNGGDSRVGGDDSVELNKTNGSGEATPYSRAGILSLLTFSWMSPLIDIGNKKTLDLEDVPQLHDTDSVVGLAPKFRSMLESPDGGERSGVTTFKLIKALYFTAQWEILVTAFFAFIYTVASYVGPALIDTFVQYLNGRRQYNHEGYVLVITFFAAKIVECLSQRHWFFRLQKVGIRMRSALVAMIYEKGLTLSCQSKQGRTSGEIINFMTVDAERIGNFSWYMHDPWMVLLQVGLALWILYRNLGLASIAALVATIIVMLINFPFGRMQERFQEKLMEAKDSRMKSTSEILRNMRILKLQGWEMKFLSKIFDLRKSEEGWLKKYVYNSAVISFVFWGAPTLVSVSTFGACILLGIPLESGKILSALATFRILQEPIYNLPDTISMIVQTKVSLDRLASYLCLDNLQPDIVERLPKGSSDVAVEVINSTLSWDVSSSNPTLKDINFKVFPGMKVAVCGTVGSGKSSLLSSLLGEVPKVSGSLKVCGTKAYVAQSPWIQSGKIEDNILFGKPMERERYDKVLEACSLSKDLEILSFGDQTVIGERGINLSGGQKQRIQIARALYQDADIYLFDDPFSAVDAHTGSHLFKEVLLGLLCSKSVIYVTHQVEFLPAADLILVMKDGRISQAGKYNDILNSGTDFMELIGAHQEALAVVDSVDANSVSEKSALGQENVIVKDAIAVDEKLESQDLKNDKLESVEPQRQIIQEEEREKGSVALDVYWKYITLAYGGALVPFILLGQVLFQLLQIGSNYWMAWATPVSEDVQAPVKLSTLMIVYVALAFGSSLCILLRATLLVTAGYKTATELFHKMHHCIFRSPMSFFDSTPSGRIMSRASTDQSAVDLELPYQFGSVAITVIQLIGIIGVMSQVSWLVFLVFIPVVAASIWYQRYYIAAARELSRLVGVCKAPLIQHFSETISGATTIRSFSQEFRFRSDNMRLSDGYSRPKFYTAGAMEWLCFRLDMLSSLTFVFSLVFLVSIPTGVIDPSLAGLAVTYGLSLNTLQAWLIWTLCNLENKIISVERILQYASVPSEPPLVIESNRPEQSWPSRGEVEIRDLQVRYAPHMPLVLRGITCTFKGGLRTGIVGRTGSGKSTLIQTLFRIVEPSAGEIRIDGVNILTIGLHDLRLRLSIIPQDPTMFEGTMRSNLDPLEEYTDDQIWEALDKCQLGDEVRKKEQKLDSSVSENGDNWSMGQRQLVCLGRVLLKRSKILVLDEATASVDTATDNLIQKTLREHFSDCTVITIAHRISSVIDSDMVLLLSNGIIEEYDTPVRLLEDKSSSFSKLVAEYTSRSSSSFD

SEQ ID NO: 80751 - protein, 1514 aa, Arabidopsis thaliana
  peptide (1)..(1514): Ceres Seq. ID no. 12657048
  misc_feature (1296)..(1479): Pfam Name: ABC transporter Pfam Description: ABC transporter
  misc_feature (67)..(1510): Homolog of NCBI NO: 15227133 NR Description: glutathione-conjugate transporter AtMRP4; protein
  misc_feature (658)..(1511): Homolog of NCBI NO: 27368875 NR Description: MRP-like ABC transporter [Oryza sativa (japonica
  misc_feature (180)..(651): Homolog of NCBI NO: 27368875 NR Description: MRP-like ABC transporter [Oryza sativa (japonica
  misc_feature (25)..(913): Homolog of NCBI NO: 18031899 NR Description: ATP-binding cassette transporter MRP6
  misc_feature (238)..(1510): Homolog of NCBI NO: 27368877 NR Description: MRP-like ABC transporter [Oryza sativa (japonica
  misc_feature (152)..(651): Homolog of NCBI NO: 27368873 NR Description: MRP-like ABC transporter [Oryza sativa (japonica
  misc_feature (658)..(1098): Homolog of NCBI NO: 27368873 NR Description: MRP-like ABC transporter [Oryza sativa (japonica
  misc_feature (1092)..(1512): Homolog of NCBI NO: 27368873 NR Description: MRP-like ABC transporter [Oryza sativa (japonica
  misc_feature (230)..(912): Homolog of NCBI NO: 19172038 NR Description: ABC transporter ABCC.8 [Dictyostelium discoideum]
  misc_feature (914)..(1514): Homolog of NCBI NO: 19172038 NR Description: ABC transporter ABCC.8 [Dictyostelium discoideum]
MDFLGSTTGSGTLAMLFSFSESILPLDSRSFLLKPLFLRWLSGFLHSVLLLVLFFSWVRKKIRGDSGVTESLKDRRDFGFKSALFCSLALSLLNLVLMSLSGFYWYESGWLDNEQLVSSLGFLLGMVSWGVLSICLHRCRDCEHKKAPFLLRLWLVFYLVVSCYSLVVDFVMYERRETVPVHLLVFDIVAFIAAVFLGYVAVLKKDRSNSNGVLEEPLLNGGDSRVGGDDSVELNKTNGSGEATPYSRAGILSLLTFSWMSPLIDIGNKKTLDLEDVPQLHDTDSVVGLAPKFRSMLESPDGGERSGVTTFKLIKALYFTAQWEILVTAFFAFIYTVASYVGPALIDTFVQYLNGRRQYNHEGYVLVITFFAAKIVECLSQRHWFFRLQKVGIRMRSALVAMIYEKGLTLSCQSKQGRTSGEIINFMTVDAERIGNFSWYMHDPWMVLLQVGLALWILYRNLGLASIAALVATIIVMLINFPFGRMQERFQEKLMEAKDSRMKSTSEILRNMRILKLQGWEMKFLSKIFDLRKSEEGWLKKYVYNSAVISFVFWGAPTLVSVSTFGACILLGIPLESGKILSALATFRILQEPIYNLPDTISMIVQTKVSLDRLASYLCLDNLQPDIVERLPKGSSDVAVEVINSTLSWDVSSSNPTLKDINFKVFPGMKVAVCGTVGSGKSSLLSSLLGEVPKVSGSLKVCGTKAYVAQSPWIQSGKIEDNILFGKPMERERYDKVLEACSLSKDLEILSFGDQTVIGERGINLSGGQKQRIQIARALYQDADIYLFDDPFSAVDAHTGSHLFKEVLLGLLCSKSVIYVTHQVEFLPAADLILVMKDGRISQAGKYNDILNSGTDFMELIGAHQEALAVVDSVDANSVSEKSALGQENVIVKDAIAVDEKLESQDLKNDKLESVEPQRQIIQEEEREKGSVALDVYWKYITLAYGGALVPFILLGQVLFQLLQIGSNYWMAWATPVSEDVQAPVKLSTLMIVYVALAFGSSLCILLRATLLVTAGYKTATELFHKMHHCIFRSPMSFFDSTPSGRIMSRASTDQSAVDLELPYQFGSVAITVIQLIGIIGVMSQVSWLVFLVFIPVVAASIWYQRYYIAAARELSRLVGVCKAPLIQHFSETISGATTIRSFSQEFRFRSDNMRLSDGYSRPKFYTAGAMEWLCFRLDMLSSLTFVFSLVFLVSIPTGVIDPSLAGLAVTYGLSLNTLQAWLIWTLCNLENKIISVERILQYASVPSEPPLVIESNRPEQSWPSRGEVEIRDLQVRYAPHMPLVLRGITCTFKGGLRTGIVGRTGSGKSTLIQTLFRIVEPSAGEIRIDGVNILTIGLHDLRLRLSIIPQDPTMFEGTMRSNLDPLEEYTDDQIWEALDKCQLGDEVRKKEQKLDSSVSENGDNWSMGQRQLVCLGRVLLKRSKILVLDEATASVDTATDNLIQKTLREHFSDCTVITIAHRISSVIDSDMVLLLSNGIIEEYDTPVRLLEDKSSSFSKLVAEYTSRSSSSFD

SEQ ID NO: 80752 - protein, 1500 aa, Arabidopsis thaliana
  peptide (1)..(1500): Ceres Seq. ID no. 12657049
  misc_feature (1282)..(1465): Pfam Name: ABC transporter Pfam Description: ABC transporter
  misc_feature (53)..(1496): Homolog of NCBI NO: 15227133 NR Description: glutathione-conjugate transporter AtMRP4; protein
  misc_feature (644)..(1497): Homolog of NCBI NO: 27368875 NR Description: MRP-like ABC transporter [Oryza sativa (japonica
  misc_feature (166)..(637): Homolog of NCBI NO: 27368875 NR Description: MRP-like ABC transporter [Oryza sativa (japonica
  misc_feature (11)..(899): Homolog of NCBI NO: 18031899 NR Description: ATP-binding cassette transporter MRP6
  misc_feature (224)..(1496): Homolog of NCBI NO: 27368877 NR Description: MRP-like ABC transporter [Oryza sativa (japonica
  misc_feature (138)..(637): Homolog of NCBI NO: 27368873 NR Description: MRP-like ABC transporter [Oryza sativa (japonica
  misc_feature (644)..(1084): Homolog of NCBI NO: 27368873 NR Description: MRP-like ABC transporter [Oryza sativa (japonica
  misc_feature (1078)..(1498): Homolog of NCBI NO: 27368873 NR Description: MRP-like ABC transporter [Oryza sativa (japonica
  misc_feature (216)..(898): Homolog of NCBI NO: 19172038 NR Description: ABC transporter ABCC.8 [Dictyostelium discoideum]
  misc_feature (900)..(1500): Homolog of NCBI NO: 19172038 NR Description: ABC transporter ABCC.8 [Dictyostelium discoideum]
MLFSFSESILPLDSRSFLLKPLFLRWLSGFLHSVLLLVLFFSWVRKKIRGDSGVTESLKDRRDFGFKSALFCSLALSLLNLVLMSLSGFYWYESGWLDNEQLVSSLGFLLGMVSWGVLSICLHRCRDCEHKKAPFLLRLWLVFYLVVSCYSLVVDFVMYERRETVPVHLLVFDIVAFIAAVFLGYVAVLKKDRSNSNGVLEEPLLNGGDSRVGGDDSVELNKTNGSGEATPYSRAGILSLLTFSWMSPLIDIGNKKTLDLEDVPQLHDTDSVVGLAPKFRSMLESPDGGERSGVTTFKLIKALYFTAQWEILVTAFFAFIYTVASYVGPALIDTFVQYLNGRRQYNHEGYVLVITFFAAKIVECLSQRHWFFRLQKVGIRMRSALVAMIYEKGLTLSCQSKQGRTSGEIINFMTVDAERIGNFSWYMHDPWMVLLQVGLALWILYRNLGLASIAALVATIIVMLINFPFGRMQERFQEKLMEAKDSRMKSTSEILRNMRILKLQGWEMKFLSKIFDLRKSEEGWLKKYVYNSAVISFVFWGAPTLVSVSTFGACILLGIPLESGKILSALATFRILQEPIYNLPDTISMIVQTKVSLDRLASYLCLDNLQPDIVERLPKGSSDVAVEVINSTLSWDVSSSNPTLKDINFKVFPGMKVAVCGTVGSGKSSLLSSLLGEVPKVSGSLKVCGTKAYVAQSPWIQSGKIEDNILFGKPMERERYDKVLEACSLSKDLEILSFGDQTVIGERGINLSGGQKQRIQIARALYQDADIYLFDDPFSAVDAHTGSHLFKEVLLGLLCSKSVIYVTHQVEFLPAADLILVMKDGRISQAGKYNDILNSGTDFMELIGAHQEALAVVDSVDANSVSEKSALGQENVIVKDAIAVDEKLESQDLKNDKLESVEPQRQIIQEEEREKGSVALDVYWKYITLAYGGALVPFILLGQVLFQLLQIGSNYWMAWATPVSEDVQAPVKLSTLMIVYVALAFGSSLCILLRATLLVTAGYKTATELFHKMHHCIFRSPMSFFDSTPSGRIMSRASTDQSAVDLELPYQFGSVAITVIQLIGIIGVMSQVSWLVFLVFIPVVAASIWYQRYYIAAARELSRLVGVCKAPLIQHFSETISGATTIRSFSQEFRFRSDNMRLSDGYSRPKFYTAGAMEWLCFRLDMLSSLTFVFSLVFLVSIPTGVIDPSLAGLAVTYGLSLNTLQAWLIWTLCNLENKIISVERILQYASVPSEPPLVIESNRPEQSWPSRGEVEIRDLQVRYAPHMPLVLRGITCTFKGGLRTGIVGRTGSGKSTLIQTLFRIVEPSAGEIRIDGVNILTIGLHDLRLRLSIIPQDPTMFEGTMRSNLDPLEEYTDDQIWEALDKCQLGDEVRKKEQKLDSSVSENGDNWSMGQRQLVCLGRVLLKRSKILVLDEATASVDTATDNLIQKTLREHFSDCTVITIAHRISSVIDSDMVLLLSNGIIEEYDTPVRLLEDKSSSFSKLVAEYTSRSSSSFD

SEQ ID NO: 80753 - DNA, 4377 bp, Arabidopsis thaliana
  misc_feature (1)..(4377): Ceres Seq. ID no. 12657050
  misc_feature: MA Experiment ID: 20000315 Result: Down-regulated in Transcription
  misc_feature: MA Experiment 20000315 PARAMETER Experiment Name: At_14day_Shoots-Roots_Sub_P Parameter: Age (day) Value: 14
  misc_feature: MA Experiment 20000315 PARAMETER Experiment Name: At_14day_Shoots-Roots_Sub_P Parameter: Organism Value: A. thaliana
  misc_feature: MA Experiment 20000315 PARAMETER Experiment Name: At_14day_Shoots-Roots_Sub_P Parameter: Plant Line Value: WS
  misc_feature: MA Experiment 20000315 PARAMETER Experiment Name: At_14day_Shoots-Roots_Sub_P Parameter: Tissue Value: Shoots vs. Whole Plant
  misc_feature: MA Experiment ID: 20000347 Result: Up-regulated in Transcription
  misc_feature: MA Experiment 20000347 PARAMETER Experiment Name: At_2mM_SA_Sub_P Parameter: Age (day) Value: 14
  misc_feature: MA Experiment 20000347 PARAMETER Experiment Name: At_2mM_SA_Sub_P Parameter: Organism Value: A. thaliana
  misc_feature: MA Experiment 20000347 PARAMETER Experiment Name: At_2mM_SA_Sub_P Parameter: Plant Line Value: WS
  misc_feature: MA Experiment 20000347 PARAMETER Experiment Name: At_2mM_SA_Sub_P Parameter: Timepoint (hr) Value: 6
  misc_feature: MA Experiment 20000347 PARAMETER Experiment Name: At_2mM_SA_Sub_P Parameter: Tissue Value: Aerial
  misc_feature: MA Experiment 20000347 PARAMETER Experiment Name: At_2mM_SA_Sub_P Parameter: Treatment Value: 2mM SA vs. No Treatment
atgtttggttcctgtgtttacaagaaaaggttgggttgggaaaatagtgatgctttcacgaatgagaggtttaaggatatgtctttaacatacaataaactggtcgttatatgttgtgagactttgtctgccttgaattctgtgttgttgctgttaagttgcttcaacctgcataaaaatggttgggatcgcagcgaactgatgattctcttagatcttttatttacagccctttcttggggtgccatctctttctacatacgtagtcaatttacctattctcatgatcaaaagtttcctattttgcttagagtctggtgggttttgtattttatgttttcttgctaccgtcttttggtagacattgctctatacaagaagcaagaactggtgtcagttcaccttttattgtctgatgtactggccgtaagcgtggggttgtttctctgctattcatgtttgcagaagcaaggacaaggtgaaaggatcaacttattactcgaagaacccctcttgaatggagctgaatctagtgcggctactagtgtgcagttggataaggccgaagatgatgaggttgttacacctttttcgaacgctgggtttctaagccatgtgagtttctcttggatgagtcctttaattgtcttaggaaacgagaaaattatagacagcgaggatgttcctcaagttgacaatagtgacagagccgagaaactattttggatatttaggagtaagcttgaatgggacgatggtgaaagaaggatcaccacgtataagcttattaaggcactcttcttttcagtgtggcgagatattctattgtcaactctgtttgcttttgtctatacagtgtcttgctacgttgcaccgtatctcatggatactttcgttcagtacctgaacggtcaacgacagtattcaaatcaaggggttgttttagtgacaactttttttgttgctaagcttgtagaatgccaagcgcggaggaattggtatttcaggttgcagaaagctgggattggaatgagatcagtcctggtttcaatgatctacgaaaagggcttgacccttccctgttattcaaagcaaggacacaccagtggtgagatcataaatctcatgacagtagatgctgagagaatcagtgcttttagttggtatatgcatgatccatggatacttgtcttacaaatcagtttagcgttattgatcttgtacagaagccttgggctaggatcaattgcagcttttgctgcaacgtttttagttatgctgggaaatattcccttggcaaagttggaagagaagtttcagggaaatttaatggagtctaaagataacaggatgaagaaaacatcggaggccttactgaacatgaggattcttaaacttcaaggatgggagatgaagttccttcataagattcttgaccttagaggcattgaagcaggctggcttaagaaattcgtgtataactctgcggctatcagctctgttctctgggctgcaccttcgttcgtttctgcaacagcttttggagcttgtatgcttctgaagattcctcttgaatcgggaaagataatagctgctcttgcaacttttcgaattctgcaaactccgatatacaaacttcctgatacgatctccatgattgttcagacaaaggtatctcttgataggattgcaacttttctttgccttgatgatttgcagcaagatggtatggagagacttcctagtggaagttcaaaaatggatgtggaagtcagcaatggtgctttctcttgggatgactcttcacccatcccgacgctgaaagacataaggttcaaaatccctcatgggatgaacatcgctatatgtggtactgttggttcagggaaatcaagcttactctcgtccatactaggtgaagttcccaaaatatctggaaatcttaaggtttgtggaagaaaggcatacattgcacagtcgccttggatccagagtggcaaagtcgaagagaacattctgtttggtaagcccatgcaaagagaatggtaccaaagggtgcttgaagcgtgttctttgaataaggacttggaggtatttccgttccgtgatcagacagttattggagaaaggggtatcaatcttagcggtggacagaagcaacggatacagattgcacgtgctctttaccaagacgcagatatctatctgtttgatgacccttttagtgcagtagacgctcatactggatcacatctcttcaaggaagtcctgctggggcttctgagaaacaagacagtcatatatgtcactcatcaacttgaattcctgcctgaagctgatcttatactggtcatgaaagatgggaggatcacgcaagcagggaagtacaatgaaattcttgaatcaggaacagatttcatggaacttgtaggagctcacactgatgccttagctgcagttgattcatatgaaaaaggatctgcttcagcacaatcaacaacaagcaaagaaagcaaagtttccaacgatgaagaaaaacaagaggaagatttgcctagcccgaaaggacaactagttcaagaagaagagcgggagaaaggcaaagttgggttcactgtataccaaaagtatatgaaattggcgtatggaggagcacttgtgcctattatattggttgtacagattctctttcaggttctaaacatcgggagcaactattggatggcttgggtaactcctgtttctaaggatgtgaaacctctagtgagtggctctacattgattctagtctatgtatttctagccactgcgagctccttctgtatacttgtcagagcaatgctgtccgcgatgactggtttcaagatagctactgaactcttcaatcaaatgcattttcgcatttttcgtgcctccatgtcattctttgatgccaccccaattggccgaattttgaatagagcttctacagaccaaagtgccgtggatttgagattaccaagtcaattttcaaatcttgcaattgctgctgtaaacatcttggggattattggagtgatgggacaggttgcttggcaggtccttatcgtcttcatccctgtcatcgctgcatgcacctggtatcggcaatattacatatctgcggctcgggaactagcaagattatctggaataagcagatcgcctttggtgcagcatttttctgaaacactttcagggataacaactataaggagctttgatcaagaaccaagattccgcactgatatcatgagacttaacgattgttattctcggctgaggttccatgccatttctgcaatggagtggctctgcttccgtcttgatctcttatccactgtggcatttgcgctttcgcttgttatcttagtttctgtgcctgaaggagtcattaatccaagctttgcaggattggcggttacatatgcactcaatctaaatagcctgcaagcaactttaatatggacactttgcgatcttgagaacaaaatgatatccgtggagagaatgcttcaatacatagacatccccagtgaaccatctctcgttattgaatcaactaggcctgagaaatcttggccctgtcgcggagagattactatctgtaatctgcaagtacgatatgggccacatctgcctatggtgctgcgtgggctgacatgcacttttcgaggaggcctgaaaacgggaatcgttggaagaacaggatgtggcaaatccactctaattcaaaccctttttaggattgtggaacctgcagctggagaaatcaggatagatggaataaacatcttgaccattgggctgcatgacctgcgttccagactaagtatcatacctcaagaaccaaccatgtttgaaggcacggttcgcagtaacttggaccctcttgaggaatacgctgatgaccaaatctgggaggcactcgacaagtgtcaacttggggatgaaataaggaagaaagaactaaagctagattcccctgtaagtgagaatggacagaactggagtgttggtcagagacaactggtgtgtcttggacgagtcttgctaaagagaagcaaagtattgattcttgatgaagccacagcttctgtagatacagcgactgatactctgatacaggaaacactgagacaacatttctcgggctgtacagtaataacaatcgcacacagaatatcatctgttatagacagtgatatggtactgctcctagaccaagggttaatagaagaacacgattcaccggcgagattgctggaagacaagtcctcgtcattttcaaagcttgtggcagagtacacagcaagttcggattcaagattcaaaagaagttcaatgaaaacaaactag

SEQ ID NO: 80754 - protein, 1458 aa, Arabidopsis thaliana
  peptide (1)..(1458): Ceres Seq. ID no. 12657051
  misc_feature (884)..(1160): Pfam Name: ABC transporter transmembrane region Pfam Description: ABC transporter transmembrane region
  misc_feature (100)..(830): Homolog of NCBI NO: 15228832 NR Description: glutathione-conjugate transporter, putative;
  misc_feature (833)..(1446): Homolog of NCBI NO: 15228832 NR Description: glutathione-conjugate transporter, putative;
  misc_feature (70)..(1446): Homolog of NCBI NO: 15227133 NR Description: glutathione-conjugate transporter AtMRP4; protein
  misc_feature (131)..(1449): Homolog of NCBI NO: 11277356 NR Description: ABC transporter-like protein - Arabidopsis
  misc_feature (131)..(1449): Homolog of NCBI NO: 22331862 NR Description: ABC transporter family protein; protein id:
  misc_feature (70)..(1447): Homolog of NCBI NO: 27368877 NR Description: MRP-like ABC transporter [Oryza sativa (japonica
  misc_feature (600)..(1448): Homolog of NCBI NO: 27368875 NR Description: MRP-like ABC transporter [Oryza sativa (japonica
  misc_feature (197)..(599): Homolog of NCBI NO: 27368875 NR Description: MRP-like ABC transporter [Oryza sativa (japonica
  misc_feature (198)..(1445): Homolog of NCBI NO: 30686160 NR Description: ABC transporter family protein [Arabidopsis
  misc_feature (189)..(850): Homolog of NCBI NO: 19172038 NR Description: ABC transporter ABCC.8 [Dictyostelium discoideum]
MFGSCVYKKRLGWENSDAFTNERFKDMSLTYNKLVVICCETLSALNSVLLLLSCFNLHKNGWDRSELMILLDLLFTALSWGAISFYIRSQFTYSHDQKFPILLRVWWVLYFMFSCYRLLVDIALYKKQELVSVHLLLSDVLAVSVGLFLCYSCLQKQGQGERINLLLEEPLLNGAESSAATSVQLDKAEDDEVVTPFSNAGFLSHVSFSWMSPLIVLGNEKIIDSEDVPQVDNSDRAEKLFWIFRSKLEWDDGERRITTYKLIKALFFSVWRDILLSTLFAFVYTVSCYVAPYLMDTFVQYLNGQRQYSNQGVVLVTTFFVAKLVECQARRNWYFRLQKAGIGMRSVLVSMIYEKGLTLPCYSKQGHTSGEIINLMTVDAERISAFSWYMHDPWILVLQISLALLILYRSLGLGSIAAFAATFLVMLGNIPLAKLEEKFQGNLMESKDNRMKKTSEALLNMRILKLQGWEMKFLHKILDLRGIEAGWLKKFVYNSAAISSVLWAAPSFVSATAFGACMLLKIPLESGKIIAALATFRILQTPIYKLPDTISMIVQTKVSLDRIATFLCLDDLQQDGMERLPSGSSKMDVEVSNGAFSWDDSSPIPTLKDIRFKIPHGMNIAICGTVGSGKSSLLSSILGEVPKISGNLKVCGRKAYIAQSPWIQSGKVEENILFGKPMQREWYQRVLEACSLNKDLEVFPFRDQTVIGERGINLSGGQKQRIQIARALYQDADIYLFDDPFSAVDAHTGSHLFKEVLLGLLRNKTVIYVTHQLEFLPEADLILVMKDGRITQAGKYNEILESGTDFMELVGAHTDALAAVDSYEKGSASAQSTTSKESKVSNDEEKQEEDLPSPKGQLVQEEEREKGKVGFTVYQKYMKLAYGGALVPIILVVQILFQVLNIGSNYWMAWVTPVSKDVKPLVSGSTLILVYVFLATASSFCILVRAMLSAMTGFKIATELFNQMHFRIFRASMSFFDATPIGRILNRASTDQSAVDLRLPSQFSNLAIAAVNILGIIGVMGQVAWQVLIVFIPVIAACTWYRQYYISAARELARLSGISRSPLVQHFSETLSGITTIRSFDQEPRFRTDIMRLNDCYSRLRFHAISAMEWLCFRLDLLSTVAFALSLVILVSVPEGVINPSFAGLAVTYALNLNSLQATLIWTLCDLENKMISVERMLQYIDIPSEPSLVIESTRPEKSWPCRGEITICNLQVRYGPHLPMVLRGLTCTFRGGLKTGIVGRTGCGKSTLIQTLFRIVEPAAGEIRIDGINILTIGLHDLRSRLSIIPQEPTMFEGTVRSNLDPLEEYADDQIWEALDKCQLGDEIRKKELKLDSPVSENGQNWSVGQRQLVCLGRVLLKRSKVLILDEATASVDTATDTLIQETLRQHFSGCTVITIAHRISSVIDSDMVLLLDQGLIEEHDSPARLLEDKSSSFSKLVAEYTASSDSRFKRSSMKTN

SEQ ID NO: 80755 - protein, 1432 aa, Arabidopsis thaliana
  peptide (1)..(1432): Ceres Seq. ID no. 12657052
  misc_feature (858)..(1134): Pfam Name: ABC transporter transmembrane region Pfam Description: ABC transporter transmembrane region
  misc_feature (74)..(804): Homolog of NCBI NO: 15228832 NR Description: glutathione-conjugate transporter, putative;
  misc_feature (807)..(1420): Homolog of NCBI NO: 15228832 NR Description: glutathione-conjugate transporter, putative;
  misc_feature (44)..(1420): Homolog of NCBI NO: 15227133 NR Description: glutathione-conjugate transporter AtMRP4; protein
  misc_feature (105)..(1423): Homolog of NCBI NO: 11277356 NR Description: ABC transporter-like protein - Arabidopsis
  misc_feature (105)..(1423): Homolog of NCBI NO: 22331862 NR Description: ABC transporter family protein; protein id:
  misc_feature (44)..(1421): Homolog of NCBI NO: 27368877 NR Description: MRP-like ABC transporter [Oryza sativa (japonica
  misc_feature (574)..(1422): Homolog of NCBI NO: 27368875 NR Description: MRP-like ABC transporter [Oryza sativa (japonica
  misc_feature (171)..(573): Homolog of NCBI NO: 27368875 NR Description: MRP-like ABC transporter [Oryza sativa (japonica
  misc_feature (172)..(1419): Homolog of NCBI NO: 30686160 NR Description: ABC transporter family protein [Arabidopsis
  misc_feature (163)..(824): Homolog of NCBI NO: 19172038 NR Description: ABC transporter ABCC.8 [Dictyostelium discoideum]
MSLTYNKLVVICCETLSALNSVLLLLSCFNLHKNGWDRSELMILLDLLFTALSWGAISFYIRSQFTYSHDQKFPILLRVWWVLYFMFSCYRLLVDIALYKKQELVSVHLLLSDVLAVSVGLFLCYSCLQKQGQGERINLLLEEPLLNGAESSAATSVQLDKAEDDEVVTPFSNAGFLSHVSFSWMSPLIVLGNEKIIDSEDVPQVDNSDRAEKLFWIFRSKLEWDDGERRITTYKLIKALFFSVWRDILLSTLFAFVYTVSCYVAPYLMDTFVQYLNGQRQYSNQGVVLVTTFFVAKLVECQARRNWYFRLQKAGIGMRSVLVSMIYEKGLTLPCYSKQGHTSGEIINLMTVDAERISAFSWYMHDPWILVLQISLALLILYRSLGLGSIAAFAATFLVMLGNIPLAKLEEKFQGNLMESKDNRMKKTSEALLNMRILKLQGWEMKFLHKILDLRGIEAGWLKKFVYNSAAISSVLWAAPSFVSATAFGACMLLKIPLESGKIIAALATFRILQTPIYKLPDTISMIVQTKVSLDRIATFLCLDDLQQDGMERLPSGSSKMDVEVSNGAFSWDDSSPIPTLKDIRFKIPHGMNIAICGTVGSGKSSLLSSILGEVPKISGNLKVCGRKAYIAQSPWIQSGKVEENILFGKPMQREWYQRVLEACSLNKDLEVFPFRDQTVIGERGINLSGGQKQRIQIARALYQDADIYLFDDPFSAVDAHTGSHLFKEVLLGLLRNKTVIYVTHQLEFLPEADLILVMKDGRITQAGKYNEILESGTDFMELVGAHTDALAAVDSYEKGSASAQSTTSKESKVSNDEEKQEEDLPSPKGQLVQEEEREKGKVGFTVYQKYMKLAYGGALVPIILVVQILFQVLNIGSNYWMAWVTPVSKDVKPLVSGSTLILVYVFLATASSFCILVRAMLSAMTGFKIATELFNQMHFRIFRASMSFFDATPIGRILNRASTDQSAVDLRLPSQFSNLAIAAVNILGIIGVMGQVAWQVLIVFIPVIAACTWYRQYYISAARELARLSGISRSPLVQHFSETLSGITTIRSFDQEPRFRTDIMRLNDCYSRLRFHAISAMEWLCFRLDLLSTVAFALSLVILVSVPEGVINPSFAGLAVTYALNLNSLQATLIWTLCDLENKMISVERMLQYIDIPSEPSLVIESTRPEKSWPCRGEITICNLQVRYGPHLPMVLRGLTCTFRGGLKTGIVGRTGCGKSTLIQTLFRIVEPAAGEIRIDGINILTIGLHDLRSRLSIIPQEPTMFEGTVRSNLDPLEEYADDQIWEALDKCQLGDEIRKKELKLDSPVSENGQNWSVGQRQLVCLGRVLLKRSKVLILDEATASVDTATDTLIQETLRQHFSGCTVITIAHRISSVIDSDMVLLLDQGLIEEHDSPARLLEDKSSSFSKLVAEYTASSDSRFKRSSMKTN

SEQ ID NO: 80756 - protein, 1391 aa, Arabidopsis thaliana
  peptide (1)..(1391): Ceres Seq. ID no. 12657053
  misc_feature (817)..(1093): Pfam Name: ABC transporter transmembrane region Pfam Description: ABC transporter transmembrane region
  misc_feature (33)..(763): Homolog of NCBI NO: 15228832 NR Description: glutathione-conjugate transporter, putative;
  misc_feature (766)..(1379): Homolog of NCBI NO: 15228832 NR Description: glutathione-conjugate transporter, putative;
  misc_feature (3)..(1379): Homolog of NCBI NO: 15227133 NR Description: glutathione-conjugate transporter AtMRP4; protein
  misc_feature (64)..(1382): Homolog of NCBI NO: 11277356 NR Description: ABC transporter-like protein - Arabidopsis
  misc_feature (64)..(1382): Homolog of NCBI NO: 22331862 NR Description: ABC transporter family protein; protein id:
  misc_feature (3)..(1380): Homolog of NCBI NO: 27368877 NR Description: MRP-like ABC transporter [Oryza sativa (japonica
  misc_feature (533)..(1381): Homolog of NCBI NO: 27368875 NR Description: MRP-like ABC transporter [Oryza sativa (japonica
  misc_feature (130)..(532): Homolog of NCBI NO: 27368875 NR Description: MRP-like ABC transporter [Oryza sativa (japonica
  misc_feature (131)..(1378): Homolog of NCBI NO: 30686160 NR Description: ABC transporter family protein [Arabidopsis
  misc_feature (122)..(783): Homolog of NCBI NO: 19172038 NR Description: ABC transporter ABCC.8 [Dictyostelium discoideum]
MILLDLLFTALSWGAISFYIRSQFTYSHDQKFPILLRVWWVLYFMFSCYRLLVDIALYKKQELVSVHLLLSDVLAVSVGLFLCYSCLQKQGQGERINLLLEEPLLNGAESSAATSVQLDKAEDDEVVTPFSNAGFLSHVSFSWMSPLIVLGNEKIIDSEDVPQVDNSDRAEKLFWIFRSKLEWDDGERRITTYKLIKALFFSVWRDILLSTLFAFVYTVSCYVAPYLMDTFVQYLNGQRQYSNQGVVLVTTFFVAKLVECQARRNWYFRLQKAGIGMRSVLVSMIYEKGLTLPCYSKQGHTSGEIINLMTVDAERISAFSWYMHDPWILVLQISLALLILYRSLGLGSIAAFAATFLVMLGNIPLAKLEEKFQGNLMESKDNRMKKTSEALLNMRILKLQGWEMKFLHKILDLRGIEAGWLKKFVYNSAAISSVLWAAPSFVSATAFGACMLLKIPLESGKIIAALATFRILQTPIYKLPDTISMIVQTKVSLDRIATFLCLDDLQQDGMERLPSGSSKMDVEVSNGAFSWDDSSPIPTLKDIRFKIPHGMNIAICGTVGSGKSSLLSSILGEVPKISGNLKVCGRKAYIAQSPWIQSGKVEENILFGKPMQREWYQRVLEACSLNKDLEVFPFRDQTVIGERGINLSGGQKQRIQIARALYQDADIYLFDDPFSAVDAHTGSHLFKEVLLGLLRNKTVIYVTHQLEFLPEADLILVMKDGRITQAGKYNEILESGTDFMELVGAHTDALAAVDSYEKGSASAQSTTSKESKVSNDEEKQEEDLPSPKGQLVQEEEREKGKVGFTVYQKYMKLAYGGALVPIILVVQILFQVLNIGSNYWMAWVTPVSKDVKPLVSGSTLILVYVFLATASSFCILVRAMLSAMTGFKIATELFNQMHFRIFRASMSFFDATPIGRILNRASTDQSAVDLRLPSQFSNLAIAAVNILGIIGVMGQVAWQVLIVFIPVIAACTWYRQYYISAARELARLSGISRSPLVQHFSETLSGITTIRSFDQEPRFRTDIMRLNDCYSRLRFHAISAMEWLCFRLDLLSTVAFALSLVILVSVPEGVINPSFAGLAVTYALNLNSLQATLIWTLCDLENKMISVERMLQYIDIPSEPSLVIESTRPEKSWPCRGEITICNLQVRYGPHLPMVLRGLTCTFRGGLKTGIVGRTGCGKSTLIQTLFRIVEPAAGEIRIDGINILTIGLHDLRSRLSIIPQEPTMFEGTVRSNLDPLEEYADDQIWEALDKCQLGDEIRKKELKLDSPVSENGQNWSVGQRQLVCLGRVLLKRSKVLILDEATASVDTATDTLIQETLRQHFSGCTVITIAHRISSVIDSDMVLLLDQGLIEEHDSPARLLEDKSSSFSKLVAEYTASSDSRFKRSSMKTN

SEQ ID NO: 80757 - DNA, 1656 bp, Arabidopsis thaliana
  misc_feature (1)..(1656): Ceres Seq. ID no. 12657054
  misc_feature: MA Experiment ID: 20000179 Result: Down-regulated in Transcription
  misc_feature: MA Experiment 20000179 PARAMETER Experiment Name: At_Germinating_Seeds_P Parameter: Age (hr) Value: 6 vs. 0
  misc_feature: MA Experiment 20000179 PARAMETER Experiment Name: At_Germinating_Seeds_P Parameter: Tissue Value: Germinating Seeds
  misc_feature: MA Experiment ID: 20000180 Result: Down-regulated in Transcription
  misc_feature: MA Experiment 20000180 PARAMETER Experiment Name: At_Germinating_Seeds_P Parameter: Age (hr) Value: 24 vs. 0
  misc_feature: MA Experiment 20000180 PARAMETER Experiment Name: At_Germinating_Seeds_P Parameter: Tissue Value: Germinating Seeds
  misc_feature: MA Experiment ID: 20001451 Result: Down-regulated in Transcription
  misc_feature: MA Experiment 20001451 PARAMETER Experiment Name: At_Far-red-induction_P Parameter: Age (day) Value: 7
  misc_feature: MA Experiment 20001451 PARAMETER Experiment Name: At_Far-red-induction_P Parameter: Light Value: Far-red vs. White
  misc_feature: MA Experiment 20001451 PARAMETER Experiment Name: At_Far-red-induction_P Parameter: Organism Value: A. thaliana
  misc_feature: MA Experiment 20001451 PARAMETER Experiment Name: At_Far-red-induction_P Parameter: Plant Line Value: Columbia
  misc_feature: MA Experiment 20001451 PARAMETER Experiment Name: At_Far-red-induction_P Parameter: Timepoint (hr) Value: 24
  misc_feature: MA Experiment 20001451 PARAMETER Experiment Name: At_Far-red-induction_P Parameter: Tissue Value: Whole Plant
  misc_feature: MA Experiment ID: 20001557 Result: Up-regulated in Transcription
  misc_feature: MA Experiment 20001557 PARAMETER Experiment Name: At_Drought_Soil_Dry_P Parameter: Age (day) Value: 27
  misc_feature: MA Experiment 20001557 PARAMETER Experiment Name: At_Drought_Soil_Dry_P Parameter: Organism Value: A. thaliana
  misc_feature: MA Experiment 20001557 PARAMETER Experiment Name: At_Drought_Soil_Dry_P Parameter: Plant Line Value: WS
  misc_feature: MA Experiment 20001557 PARAMETER Experiment Name: At_Drought_Soil_Dry_P Parameter: Post Timepoint (hr) Value: 3
  misc_feature: MA Experiment 20001557 PARAMETER Experiment Name: At_Drought_Soil_Dry_P Parameter: Post-Treatment Value: Re-Water vs. No Drought
  misc_feature: MA Experiment 20001557 PARAMETER Experiment Name: At_Drought_Soil_Dry_P Parameter: Timepoint (day) Value: 13
  misc_feature: MA Experiment 20001557 PARAMETER Experiment Name: At_Drought_Soil_Dry_P Parameter: Treatment Value: Drought vs. No Drought
  misc_feature: MA Experiment ID: 20001558 Result: Up-regulated in Transcription
  misc_feature: MA Experiment 20001558 PARAMETER Experiment Name: At_Drought_Soil_Dry_P Parameter: Age (day) Value: 27
  misc_feature: MA Experiment 20001558 PARAMETER Experiment Name: At_Drought_Soil_Dry_P Parameter: Organism Value: A. thaliana
  misc_feature: MA Experiment 20001558 PARAMETER Experiment Name: At_Drought_Soil_Dry_P Parameter: Plant Line Value: WS
  misc_feature: MA Experiment 20001558 PARAMETER Experiment Name: At_Drought_Soil_Dry_P Parameter: Post Timepoint (hr) Value: 6
  misc_feature: MA Experiment 20001558 PARAMETER Experiment Name: At_Drought_Soil_Dry_P Parameter: Post-Treatment Value: Re-Water vs. No Drought
  misc_feature: MA Experiment 20001558 PARAMETER Experiment Name: At_Drought_Soil_Dry_P Parameter: Timepoint (day) Value: 13
  misc_feature: MA Experiment 20001558 PARAMETER Experiment Name: At_Drought_Soil_Dry_P Parameter: Treatment Value: Drought vs. No Drought
  misc_feature: MA Experiment ID: 20001757 Result: Up-regulated in Transcription
  misc_feature: MA Experiment 20001757 PARAMETER Experiment Name: At_50mM_NH4NO3_L-to-H_P Parameter: Timepoint (hr) Value: 6
  misc_feature: MA Experiment 20001757 PARAMETER Experiment Name: At_50mM_NH4NO3_L-to-H_P Parameter: Tissue Value: Leaf
  misc_feature: MA Experiment 20001757 PARAMETER Experiment Name: At_50mM_NH4NO3_L-to-H_P Parameter: Treatment Value: 50mM NH4NO3 vs 100mM Mannitol
atgagcaaggtaggctcgtcgctgtacagtcgcctccatggaatcttcaaagaatcttcaatcgccactgctaagtccgcaaaacccagaagccaaaccaaatccaccaaattccctagtaaattgaaggcatccaccgcctctgtaggagacggaggtcaatcgtcgaatgacgccaaggattctaaaaattcgaaattgacgcagaaagtagagaagttcaagagatcctgcgagtctgagagtttccggcaagtccatggactctacagtgcgtttatccgccgtctcagggaagcaaagaagttctcaacgatcgacgaagttcttcaataccagaagaagttcgatgacataaagtcggaggatttcgttatccgtataatgcttctttatggatactcaggaatggcggaacatgcgcacaaactgttcgatgaaatgcctgagctaaactgtgaaagaactgtgaagtcgttcaatgcgcttctatcggcttatgttaattcaaagaagcttgacgaggctatgaagaccttcaaggagttaccagagaagctaggtattactcctgatttggttacttataataccatgatcaaggcactttgccgtaaaggctctatggatgatatattatctatctttgaggaactggagaagaacgggttcgagcctgacttgatctctttcaacactctgttagaagagttttataggagggagttgtttgttgaaggtgataggatttgggatttgatgaaatccaagaatctttctcctaacattaggagttataactcgagagtgagaggtcttactcggaacaagaagttcactgatgcacttaacttgattgatgttatgaaaactgaagggatttccccagatgttcatacatacaatgctttaatcacggcttaccgtgttgataacaacctcgaggaggttatgaaatgttacaatgagatgaaggagaagggtctgactcctgatacagtgacttactgtatgttaatccctcttctctgcaagaaaggtgatcttgatagagcggttgaggtatccgaagaggccatcaaacacaagctcctgtctcgcccgaacatgtacaaacccgtggttgagcgtttgatgggtgcaggcaagattgatgaagcaacacagctagtgaagaatggcaagctacagagttactttcggtacctgccagacttgtccgctggtaagaaaaagaccacttccagtccagtctcttcaagtgcgaagaccacttccactccggtctcttcaagtccggatacctcttcctttctgctctctttaagtctggcggcggactcttccagctccgactccgactcttcgagtccagactcttccagctccgtctcttcgagtccagactcttccagctccgtctcttcgagtccagactcttacagctcgttctcttcgagtccagactcttccagctctgtctcttcgagtctgttctcttcaagtcgggagaactcttcaagtccggactattccaactcggtctcttcgagtttggactattccggctcggtctcttcgagttcggactattccagctcggtctttccgagtgcgaactcttccagctcttcctctgggttgttggacgattaa

SEQ ID NO: 80758 - protein, 551 aa, Arabidopsis thaliana
  peptide (1)..(551): Ceres Seq. ID no. 12657055
  misc_feature (299)..(333): Pfam Name: PPR repeat Pfam Description: PPR repeat
  misc_feature (1)..(551): Homolog of NCBI NO: 15231160 NR Description: hypothetical protein; protein id: At3g13150.1 thaliana] >gi|10172602|dbj|BAB01406.1| gene_id:MJG19.10~similar
  misc_feature (57)..(401): Homolog of NCBI NO: 18399887 NR Description: Expressed protein; protein id: At3g13160.1, by cDNA: 93242. [Arabidopsis thaliana]
  misc_feature (57)..(401): Homolog of NCBI NO: 21617993 NR Description: unknown [Arabidopsis thaliana]
  misc_feature (40)..(401): Homolog of NCBI NO: 15222796 NR Description: unknown protein; protein id: At1g55890.1, by cDNA: gi_18650653 [Arabidopsis thaliana]
  misc_feature (2)..(419): Homolog of NCBI NO: 34910148 NR Description: B1070A12.17 [Oryza sativa (japonica
  misc_feature (90)..(400): Homolog of NCBI NO: 18407365 NR Description: expressed protein; protein id: At1g61870.1, by cDNA: 16387., supported by cDNA: gi_16226402, supported by
  misc_feature (90)..(400): Homolog of NCBI NO: 21553755 NR Description: putative membrane-associated salt-inducible
  misc_feature (34)..(391): Homolog of NCBI NO: 15221069 NR Description: putative membrane-associated salt-inducible protein id: At1g11630.1, supported by cDNA: 38193., supported by gi_14326575, supported by cDNA: gi_19548050 [Arabidopsis
  misc_feature (94)..(392): Homolog of NCBI NO: 15220068 NR Description: hypothetical protein; protein id: At1g80150.1
  misc_feature (94)..(392): Homolog of NCBI NO: 25406637 NR Description: hypothetical protein F18B13.23 [imported] - thaliana >gi|5902386|gb|AAD55488.1|AC009322_28 Hypothetical
MSKVGSSLYSRLHGIFKESSIATAKSAKPRSQTKSTKFPSKLKASTASVGDGGQSSNDAKDSKNSKLTQKVEKFKRSCESESFRQVHGLYSAFIRRLREAKKFSTIDEVLQYQKKFDDIKSEDFVIRIMLLYGYSGMAEHAHKLFDEMPELNCERTVKSFNALLSAYVNSKKLDEAMKTFKELPEKLGITPDLVTYNTMIKALCRKGSMDDILSIFEELEKNGFEPDLISFNTLLEEFYRRELFVEGDRIWDLMKSKNLSPNIRSYNSRVRGLTRNKKFTDALNLIDVMKTEGISPDVHTYNALITAYRVDNNLEEVMKCYNEMKEKGLTPDTVTYCMLIPLLCKKGDLDRAVEVSEEAIKHKLLSRPNMYKPVVERLMGAGKIDEATQLVKNGKLQSYFRYLPDLSAGKKKTTSSPVSSSAKTTSTPVSSSPDTSSFLLSLSLAADSSSSDSDSSSPDSSSSVSSSPDSSSSVSSSPDSYSSFSSSPDSSSSVSSSLFSSSRENSSSPDYSNSVSSSLDYSGSVSSSSDYSSSVFPSANSSSSSSGLLDD

SEQ ID NO: 80759 - protein, 423 aa, Arabidopsis thaliana
  peptide (1)..(423): Ceres Seq. ID no. 12657056
  misc_feature (171)..(205): Pfam Name: PPR repeat Pfam Description: PPR repeat
  misc_feature (1)..(423): Homolog of NCBI NO: 15231160 NR Description: hypothetical protein; protein id: At3g13150.1 thaliana] >gi|10172602|dbj|BAB01406.1| gene_id:MJG19.10~similar
  misc_feature (1)..(273): Homolog of NCBI NO: 18399887 NR Description: Expressed protein; protein id: At3g13160.1, by cDNA: 93242. [Arabidopsis thaliana]
  misc_feature (1)..(273): Homolog of NCBI NO: 21617993 NR Description: unknown [Arabidopsis thaliana]
  misc_feature (1)..(273): Homolog of NCBI NO: 15222796 NR Description: unknown protein; protein id: At1g55890.1, by cDNA: gi_18650653 [Arabidopsis thaliana]
  misc_feature (1)..(291): Homolog of NCBI NO: 34910148 NR Description: B1070A12.17 [Oryza sativa (japonica
  misc_feature (1)..(272): Homolog of NCBI NO: 18407365 NR Description: expressed protein; protein id: At1g61870.1, by cDNA: 16387., supported by cDNA: gi_16226402, supported by
  misc_feature (1)..(272): Homolog of NCBI NO: 21553755 NR Description: putative membrane-associated salt-inducible
  misc_feature (1)..(263): Homolog of NCBI NO: 15221069 NR Description: putative membrane-associated salt-inducible protein id: At1g11630.1, supported by cDNA: 38193., supported by gi_14326575, supported by cDNA: gi_19548050 [Arabidopsis
  misc_feature (1)..(264): Homolog of NCBI NO: 15220068 NR Description: hypothetical protein; protein id: At1g80150.1
  misc_feature (1)..(264): Homolog of NCBI NO: 25406637 NR Description: hypothetical protein F18B13.23 [imported] - thaliana >gi|5902386|gb|AAD55488.1|AC009322_28 Hypothetical
MLLYGYSGMAEHAHKLFDEMPELNCERTVKSFNALLSAYVNSKKLDEAMKTFKELPEKLGITPDLVTYNTMIKALCRKGSMDDILSIFEELEKNGFEPDLISFNTLLEEFYRRELFVEGDRIWDLMKSKNLSPNIRSYNSRVRGLTRNKKFTDALNLIDVMKTEGISPDVHTYNALITAYRVDNNLEEVMKCYNEMKEKGLTPDTVTYCMLIPLLCKKGDLDRAVEVSEEAIKHKLLSRPNMYKPVVERLMGAGKIDEATQLVKNGKLQSYFRYLPDLSAGKKKTTSSPVSSSAKTTSTPVSSSPDTSSFLLSLSLAADSSSSDSDSSSPDSSSSVSSSPDSSSSVSSSPDSYSSFSSSPDSSSSVSSSLFSSSRENSSSPDYSNSVSSSLDYSGSVSSSSDYSSSVFPSANSSSSSSGLLDD

SEQ ID NO: 80760 - protein, 415 aa, Arabidopsis thaliana
  peptide (1)..(415): Ceres Seq. ID no. 12657057
  misc_feature (163)..(197): Pfam Name: PPR repeat Pfam Description: PPR repeat
  misc_feature (1)..(415): Homolog of NCBI NO: 15231160 NR Description: hypothetical protein; protein id: At3g13150.1 thaliana] >gi|10172602|dbj|BAB01406.1| gene_id:MJG19.10~similar
  misc_feature (1)..(265): Homolog of NCBI NO: 18399887 NR Description: Expressed protein; protein id: At3g13160.1, by cDNA: 93242. [Arabidopsis thaliana]
  misc_feature (1)..(265): Homolog of NCBI NO: 21617993 NR Description: unknown [Arabidopsis thaliana]
  misc_feature (1)..(265): Homolog of NCBI NO: 15222796 NR Description: unknown protein; protein id: At1g55890.1, by cDNA: gi_18650653 [Arabidopsis thaliana]
  misc_feature (1)..(283): Homolog of NCBI NO: 34910148 NR Description: B1070A12.17 [Oryza sativa (japonica
  misc_feature (1)..(264): Homolog of NCBI NO: 18407365 NR Description: expressed protein; protein id: At1g61870.1, by cDNA: 16387., supported by cDNA: gi_16226402, supported by
  misc_feature (1)..(264): Homolog of NCBI NO: 21553755 NR Description: putative membrane-associated salt-inducible
  misc_feature (1)..(255): Homolog of NCBI NO: 15221069 NR Description: putative membrane-associated salt-inducible protein id: At1g11630.1, supported by cDNA: 38193., supported by gi_14326575, supported by cDNA: gi_19548050 [Arabidopsis
  misc_feature (1)..(256): Homolog of NCBI NO: 15220068 NR Description: hypothetical protein; protein id: At1g80150.1
  misc_feature (1)..(256): Homolog of NCBI NO: 25406637 NR Description: hypothetical protein F18B13.23 [imported] - thaliana >gi|5902386|gb|AAD55488.1|AC009322_28 Hypothetical
MAEHAHKLFDEMPELNCERTVKSFNALLSAYVNSKKLDEAMKTFKELPEKLGITPDLVTYNTMIKALCRKGSMDDILSIFEELEKNGFEPDLISFNTLLEEFYRRELFVEGDRIWDLMKSKNLSPNIRSYNSRVRGLTRNKKFTDALNLIDVMKTEGISPDVHTYNALITAYRVDNNLEEVMKCYNEMKEKGLTPDTVTYCMLIPLLCKKGDLDRAVEVSEEAIKHKLLSRPNMYKPVVERLMGAGKIDEATQLVKNGKLQSYFRYLPDLSAGKKKTTSSPVSSSAKTTSTPVSSSPDTSSFLLSLSLAADSSSSDSDSSSPDSSSSVSSSPDSSSSVSSSPDSYSSFSSSPDSSSSVSSSLFSSSRENSSSPDYSNSVSSSLDYSGSVSSSSDYSSSVFPSANSSSSSSGLLDD

SEQ ID NO: 80761 - DNA, 1517 bp, Arabidopsis thaliana
  misc_feature (1)..(1517): Ceres Seq. ID no. 12657062
  misc_feature: MA Experiment ID: 20000184 Result: Up-regulated in Transcription
  misc_feature: MA Experiment 20000184 PARAMETER Experiment Name: At_Shoots__P Parameter: Age (day) Value: 7
  misc_feature: MA Experiment 20000184 PARAMETER Experiment Name: At_Shoots__P Parameter: Tissue Value: Shoots vs. Whole Plant
  misc_feature: MA Experiment ID: 20000185 Result: Up-regulated in Transcription
  misc_feature: MA Experiment 20000185 PARAMETER Experiment Name: At_Roots__P Parameter: Age (day) Value: 7 vs. 21
  misc_feature: MA Experiment 20000185 PARAMETER Experiment Name: At_Roots__P Parameter: Organism Value: A. thaliana
  misc_feature: MA Experiment 20000185 PARAMETER Experiment Name: At_Roots__P Parameter: Tissue Value: Roots vs. Whole Plant
  misc_feature: MA Experiment ID: 20000438 Result: Up-regulated in Transcription
  misc_feature: MA Experiment 20000438 PARAMETER Experiment Name: At_Shoots__P Parameter: Age (day) Value: 14
  misc_feature: MA Experiment 20000438 PARAMETER Experiment Name: At_Shoots__P Parameter: Tissue Value: Shoots vs. Whole Plant
  misc_feature: MA Experiment ID: 20000439 Result: Up-regulated in Transcription
  misc_feature: MA Experiment 20000439 PARAMETER Experiment Name: At_Roots__P Parameter: Age (day) Value: 14 vs. 21
  misc_feature: MA Experiment 20000439 PARAMETER Experiment Name: At_Roots__P Parameter: Organism Value: A. thaliana
  misc_feature: MA Experiment 20000439 PARAMETER Experiment Name: At_Roots__P Parameter: Tissue Value: Roots vs. Whole Plant
gcctcctaaaatcttacaacacaaaaaaaaaaaaaacatttagttaaatccaatgagagactcttcaacaactgcatccaccaaatcctcaccgttatggaaaccctttgcctcaaactgttgttccgttgatgaccaaaccgtctttggcaatctcagccgttgccgaccttcgagatcagaattctccaagaaccatctcggaccacttccttcttttcggcgactctcctttgctgatctaagccgttcttcttcggctaggatcaatgaagatcttgcacagactcttggagccgacttagtggattttcagatgtgtgaactcaagatgatcactcagagtttctccgggaactatcttctcggagaaggtgggttcggtaaagtgtataaaggttatgttgatgattatctccgacaaagtctcaaggctcagcctgttgctgtcaagctattggacattgaggggcttcaaggacatcgtgaatggctttctgaggtcatatttcttggacagctaaaacacccgaatttagtcaaacttattggttactgctgcgaagaagaggaacgagtactcatctacgagtttatgccacgtggtagcctagaaaatcacctcttcagacggatatcactatcgttgccgtgggcgacgcggctgaagatagcggtcgcagctgctaagggtttggcgtttttgcatgatttggagagtccaatcatttaccgtgatttcaaaacttctaatatactacttgattcggattttactgcaaaactctcagattttgggttggcaaaaatgggaccagaaggatccaaatctcatgtcacaactcgagtcatgggcacttatggttatgctgctcctgaatatgtttcaacagggcatttaacaacaaagagtgacgtgtatagttatggcgtcgttttactcgagctcctaacgggaagaagagccacagaaaagtcacggccaaaaaaccagcagaacatcatcgactggtcaaagccttatctaacaagcagccgccgactccgatgtgttatggacccgaggctcgctggacaatactccgtcaaggcggctaaagatacagctcttctagccttacaatgtgtgagcccaaaccctaaagaccggcccaaaatgcttgccgttgtggaagctctagagagtctcatacattataaggacatggcggtttcttctggtcattggccactgtctcctaaatctcagggcgggaaggtttccccgaaggttcgaggggatcatcggagtggtagaaaatcagctccgggttcgttaagatcgtgaacttagggttgaatgaccttataaaaaaagagagaaaataacatgtgtgatgtggtgtgtgtgtatgtgtgtatacggtcatacgtctaagagtgacatagtgagagacatatgactctcactaagaaaaaacaatgatatgaatatataaatattgtagattagggttttcgtataaaatatttaatcc

SEQ ID NO: 80762 - protein, 424 aa, Arabidopsis thaliana
  peptide (1)..(424): Ceres Seq. ID no. 12657063
  misc_feature (1)..(424): Homolog of NCBI NO: 15220535 NR Description: serine/threonine protein kinase, putative; id: At1g61590.1, supported by cDNA: gi_17381260, supported by gi_20453380 [Arabidopsis thaliana] >gi|25287627|pir||C96641
  misc_feature (9)..(408): Homolog of NCBI NO: 15225019 NR Description: putative protein kinase; protein id: At2g05940.1, by cDNA: gi_15810412, supported by cDNA: gi_21280976 [Arabidopsis >gi|25287639|pir||C84473 probable protein kinase putative protein
  misc_feature (55)..(386): Homolog of NCBI NO: 30013675 NR Description: Avr9/Cf-9 rapidly elicited protein 264 [Nicotiana
  misc_feature (139)..(421): Homolog of NCBI NO: 27436752 NR Description: Putative serine/threonine protein kinase [Oryza
  misc_feature (58)..(148): Homolog of NCBI NO: 27436752 NR Description: Putative serine/threonine protein kinase [Oryza
  misc_feature (60)..(422): Homolog of NCBI NO: 30679085 NR Description: protein kinase family [Arabidopsis thaliana]
  misc_feature (55)..(384): Homolog of NCBI NO: 10176804 NR Description: serine/threonine protein kinase-like [Arabidopsis
  misc_feature (55)..(384): Homolog of NCBI NO: 15238553 NR Description: serine/threonine protein kinase-like; protein id:
  misc_feature (60)..(422): Homolog of NCBI NO: 9542860 NR Description: protein kinase-like protein [Arabidopsis thaliana]
  misc_feature (9)..(399): Homolog of NCBI NO: 37534008 NR Description: putative serine/threonine protein kinase [Oryza
MRDSSTTASTKSSPLWKPFASNCCSVDDQTVFGNLSRCRPSRSEFSKNHLGPLPSFRRLSFADLSRSSSARINEDLAQTLGADLVDFQMCELKMITQSFSGNYLLGEGGFGKVYKGYVDDYLRQSLKAQPVAVKLLDIEGLQGHREWLSEVIFLGQLKHPNLVKLIGYCCEEEERVLIYEFMPRGSLENHLFRRISLSLPWATRLKIAVAAAKGLAFLHDLESPIIYRDFKTSNILLDSDFTAKLSDFGLAKMGPEGSKSHVTTRVMGTYGYAAPEYVSTGHLTTKSDVYSYGVVLLELLTGRRATEKSRPKNQQNIIDWSKPYLTSSRRLRCVMDPRLAGQYSVKAAKDTALLALQCVSPNPKDRPKMLAVVEALESLIHYKDMAVSSGHWPLSPKSQGGKVSPKVRGDHRSGRKSAPGSLRS

SEQ ID NO: 80763 - protein, 336 aa, Arabidopsis thaliana
  peptide (1)..(336): Ceres Seq. ID no. 12657064
  misc_feature (1)..(336): Homolog of NCBI NO: 15220535 NR Description: serine/threonine protein kinase, putative; id: At1g61590.1, supported by cDNA: gi_17381260, supported by gi_20453380 [Arabidopsis thaliana] >gi|25287627|pir||C96641
  misc_feature (1)..(320): Homolog of NCBI NO: 15225019 NR Description: putative protein kinase; protein id: At2g05940.1, by cDNA: gi_15810412, supported by cDNA: gi_21280976 [Arabidopsis >gi|25287639|pir||C84473 probable protein kinase putative protein
  misc_feature (1)..(298): Homolog of NCBI NO: 30013675 NR Description: Avr9/Cf-9 rapidly elicited protein 264 [Nicotiana
  misc_feature (51)..(333): Homolog of NCBI NO: 27436752 NR Description: Putative serine/threonine protein kinase [Oryza
  misc_feature (1)..(60): Homolog of NCBI NO: 27436752 NR Description: Putative serine/threonine protein kinase [Oryza
  misc_feature (1)..(334): Homolog of NCBI NO: 30679085 NR Description: protein kinase family [Arabidopsis thaliana]
  misc_feature (1)..(296): Homolog of NCBI NO: 10176804 NR Description: serine/threonine protein kinase-like [Arabidopsis
  misc_feature (1)..(296): Homolog of NCBI NO: 15238553 NR Description: serine/threonine protein kinase-like; protein id:
  misc_feature (1)..(334): Homolog of NCBI NO: 9542860 NR Description: protein kinase-like protein [Arabidopsis thaliana]
  misc_feature (1)..(311): Homolog of NCBI NO: 37534008 NR Description: putative serine/threonine protein kinase [Oryza
MCELKMITQSFSGNYLLGEGGFGKVYKGYVDDYLRQSLKAQPVAVKLLDIEGLQGHREWLSEVIFLGQLKHPNLVKLIGYCCEEEERVLIYEFMPRGSLENHLFRRISLSLPWATRLKIAVAAAKGLAFLHDLESPIIYRDFKTSNILLDSDFTAKLSDFGLAKMGPEGSKSHVTTRVMGTYGYAAPEYVSTGHLTTKSDVYSYGVVLLELLTGRRATEKSRPKNQQNIIDWSKPYLTSSRRLRCVMDPRLAGQYSVKAAKDTALLALQCVSPNPKDRPKMLAVVEALESLIHYKDMAVSSGHWPLSPKSQGGKVSPKVRGDHRSGRKSAPGSLRS

SEQ ID NO: 80764 - protein, 331 aa, Arabidopsis thaliana
  peptide (1)..(331): Ceres Seq. ID no. 12657065
  misc_feature (1)..(331): Homolog of NCBI NO: 15220535 NR Description: serine/threonine protein kinase, putative; id: At1g61590.1, supported by cDNA: gi_17381260, supported by gi_20453380 [Arabidopsis thaliana] >gi|25287627|pir||C96641
  misc_feature (1)..(315): Homolog of NCBI NO: 15225019 NR Description: putative protein kinase; protein id: At2g05940.1, by cDNA: gi_15810412, supported by cDNA: gi_21280976 [Arabidopsis >gi|25287639|pir||C84473 probable protein kinase putative protein
  misc_feature (1)..(293): Homolog of NCBI NO: 30013675 NR Description: Avr9/Cf-9 rapidly elicited protein 264 [Nicotiana
  misc_feature (46)..(328): Homolog of NCBI NO: 27436752 NR Description: Putative serine/threonine protein kinase [Oryza
  misc_feature (1)..(55): Homolog of NCBI NO: 27436752 NR Description: Putative serine/threonine protein kinase [Oryza
  misc_feature (1)..(329): Homolog of NCBI NO: 30679085 NR Description: protein kinase family [Arabidopsis thaliana]
  misc_feature (1)..(291): Homolog of NCBI NO: 10176804 NR Description: serine/threonine protein kinase-like [Arabidopsis
  misc_feature (1)..(291): Homolog of NCBI NO: 15238553 NR Description: serine/threonine protein kinase-like; protein id:
  misc_feature (1)..(329): Homolog of NCBI NO: 9542860 NR Description: protein kinase-like protein [Arabidopsis thaliana]
  misc_feature (1)..(306): Homolog of NCBI NO: 37534008 NR Description: putative serine/threonine protein kinase [Oryza
MITQSFSGNYLLGEGGFGKVYKGYVDDYLRQSLKAQPVAVKLLDIEGLQGHREWLSEVIFLGQLKHPNLVKLIGYCCEEEERVLIYEFMPRGSLENHLFRRISLSLPWATRLKIAVAAAKGLAFLHDLESPIIYRDFKTSNILLDSDFTAKLSDFGLAKMGPEGSKSHVTTRVMGTYGYAAPEYVSTGHLTTKSDVYSYGVVLLELLTGRRATEKSRPKNQQNIIDWSKPYLTSSRRLRCVMDPRLAGQYSVKAAKDTALLALQCVSPNPKDRPKMLAVVEALESLIHYKDMAVSSGHWPLSPKSQGGKVSPKVRGDHRSGRKSAPGSLRS

SEQ ID NO: 80765 - DNA, 1425 bp, Arabidopsis thaliana
  misc_feature (1)..(1425): Ceres Seq. ID no. 12657078
  misc_feature: MA Experiment ID: 20000185 Result: Down-regulated in Transcription
  misc_feature: MA Experiment 20000185 PARAMETER Experiment Name: At_Roots__P Parameter: Age (day) Value: 7 vs. 21
  misc_feature: MA Experiment 20000185 PARAMETER Experiment Name: At_Roots__P Parameter: Organism Value: A. thaliana
  misc_feature: MA Experiment 20000185 PARAMETER Experiment Name: At_Roots__P Parameter: Tissue Value: Roots vs. Whole Plant
  misc_feature: MA Experiment ID: 20000264 Result: Up-regulated in Transcription
  misc_feature: MA Experiment 20000264 PARAMETER Experiment Name: At_Open_Flower_P Parameter: Age (day) Value: 21
  misc_feature: MA Experiment 20000264 PARAMETER Experiment Name: At_Open_Flower_P Parameter: Plant Line Value: WS
  misc_feature: MA Experiment 20000264 PARAMETER Experiment Name: At_Open_Flower_P Parameter: Tissue Value: Open Flower vs. Whole Plant
  misc_feature: MA Experiment ID: 20000265 Result: Up-regulated in Transcription
  misc_feature: MA Experiment 20000265 PARAMETER Experiment Name: At_Open_Flower_P Parameter: Age (day) Value: 21
  misc_feature: MA Experiment 20000265 PARAMETER Experiment Name: At_Open_Flower_P Parameter: Plant Line Value: WS
  misc_feature: MA Experiment 20000265 PARAMETER Experiment Name: At_Open_Flower_P Parameter: Tissue Value: Closed Flower vs. Whole Plant
  misc_feature: MA Experiment ID: 20000438 Result: Down-regulated in Transcription
  misc_feature: MA Experiment 20000438 PARAMETER Experiment Name: At_Shoots__P Parameter: Age (day) Value: 14
  misc_feature: MA Experiment 20000438 PARAMETER Experiment Name: At_Shoots__P Parameter: Tissue Value: Shoots vs. Whole Plant
  misc_feature: MA Experiment ID: 20000439 Result: Down-regulated in Transcription
  misc_feature: MA Experiment 20000439 PARAMETER Experiment Name: At_Roots__P Parameter: Age (day) Value: 14 vs. 21
  misc_feature: MA Experiment 20000439 PARAMETER Experiment Name: At_Roots__P Parameter: Organism Value: A. thaliana
  misc_feature: MA Experiment 20000439 PARAMETER Experiment Name: At_Roots__P Parameter: Tissue Value: Roots vs. Whole Plant
  misc_feature: MA Experiment ID: 20000441 Result: Down-regulated in Transcription
  misc_feature: MA Experiment 20000441 PARAMETER Experiment Name: At_1uM_BR-BRZ__P Parameter: Tissue Value: Shoot Apices
  misc_feature: MA Experiment 20000441 PARAMETER Experiment Name: At_1uM_BR-BRZ__P Parameter: Treatment Value: 1uM BR vs. No Treatment
  misc_feature: MA Experiment ID: 20000443 Result: Down-regulated in Transcription
  misc_feature: MA Experiment 20000443 PARAMETER Experiment Name: At_1uM_BR-BRZ__P Parameter: Tissue Value: Shoot Apices
  misc_feature: MA Experiment 20000443 PARAMETER Experiment Name: At_1uM_BR-BRZ__P Parameter: Treatment Value: 1uM BRZ vs. No Treatment
  misc_feature: MA Experiment ID: 20000794 Result: Up-regulated in Transcription
  misc_feature: MA Experiment 20000794 PARAMETER Experiment Name: At_Petals_P Parameter: Age (day) Value: 23-25 days
  misc_feature: MA Experiment 20000794 PARAMETER Experiment Name: At_Petals_P Parameter: Plant Line Value: WS
  misc_feature: MA Experiment 20000794 PARAMETER Experiment Name: At_Petals_P Parameter: Tissue Value: Petals vs. Whole plant
  misc_feature: MA Experiment ID: 20001451 Result: Up-regulated in Transcription
  misc_feature: MA Experiment 20001451 PARAMETER Experiment Name: At_Far-red-induction_P Parameter: Age (day) Value: 7
  misc_feature: MA Experiment 20001451 PARAMETER Experiment Name: At_Far-red-induction_P Parameter: Light Value: Far-red vs. White
  misc_feature: MA Experiment 20001451 PARAMETER Experiment Name: At_Far-red-induction_P Parameter: Organism Value: A. thaliana
  misc_feature: MA Experiment 20001451 PARAMETER Experiment Name: At_Far-red-induction_P Parameter: Plant Line Value: Columbia
  misc_feature: MA Experiment 20001451 PARAMETER Experiment Name: At_Far-red-induction_P Parameter: Timepoint (hr) Value: 24
  misc_feature: MA Experiment 20001451 PARAMETER Experiment Name: At_Far-red-induction_P Parameter: Tissue Value: Whole Plant
  misc_feature: MA Experiment ID: 20001761 Result: Up-regulated in Transcription
  misc_feature: MA Experiment 20001761 PARAMETER Experiment Name: At_50mM_NH4NO3_L-to-H_P Parameter: Timepoint (hr) Value: 4
  misc_feature: MA Experiment 20001761 PARAMETER Experiment Name: At_50mM_NH4NO3_L-to-H_P Parameter: Tissue Value: Siliques
  misc_feature: MA Experiment 20001761 PARAMETER Experiment Name: At_50mM_NH4NO3_L-to-H_P Parameter: Treatment Value: 50mM NH4NO3 vs 100mM Mannitol
  misc_feature: MA Experiment ID: 20001768 Result: Up-regulated in Transcription
  misc_feature: MA Experiment 20001768 PARAMETER Experiment Name: At_Far-red-enriched-adult_P Parameter: Age (day) Value: 28
  misc_feature: MA Experiment 20001768 PARAMETER Experiment Name: At_Far-red-enriched-adult_P Parameter: Light Value: Far-red enriched vs. White
  misc_feature: MA Experiment 20001768 PARAMETER Experiment Name: At_Far-red-enriched-adult_P Parameter: Organism Value: A. thaliana
  misc_feature: MA Experiment 20001768 PARAMETER Experiment Name: At_Far-red-enriched-adult_P Parameter: Plant Line Value: Columbia
  misc_feature: MA Experiment 20001768 PARAMETER Experiment Name: At_Far-red-enriched-adult_P Parameter: Timepoint (hr) Value: 1
  misc_feature: MA Experiment 20001768 PARAMETER Experiment Name: At_Far-red-enriched-adult_P Parameter: Tissue Value: Aerial
  misc_feature: MA Experiment ID: 20001911 Result: Down-regulated in Transcription
  misc_feature: MA Experiment 20001911 PARAMETER Experiment Name: At_Drought_Reproduction_P Parameter: Age (day) Value: 40
  misc_feature: MA Experiment 20001911 PARAMETER Experiment Name: At_Drought_Reproduction_P Parameter: Organism Value: A. thaliana
  misc_feature: MA Experiment 20001911 PARAMETER Experiment Name: At_Drought_Reproduction_P Parameter: Plant Line Value: WS
  misc_feature: MA Experiment 20001911 PARAMETER Experiment Name: At_Drought_Reproduction_P Parameter: Timepoint (day) Value: 10
  misc_feature: MA Experiment 20001911 PARAMETER Experiment Name: At_Drought_Reproduction_P Parameter: Tissue Value: Flowers
  misc_feature: MA Experiment 20001911 PARAMETER Experiment Name: At_Drought_Reproduction_P Parameter: Treatment Value: Drought vs. No Drought
atgatcgatgtcattcaaagtttaggcattgatctccattttcgacaagagatcgagcaaacccttcacatgatttacaaagaaggcctccaattcaacggtgatctccatgagatagcgcttcgctttcgattgctgagacaagagggtcactatgttcaagaaattattttcaaaaacatcctagacaagaagggtggatttaaagacgtagtaaaaaatgacgtcaagggtctaacagaattgtttgaagcttctgagctccgtgtagaaggtgaagaaacactcgacggtgcgagagaattcacatatagccgccttaatgaactttgctcaggtagagaaagtcatcaaaagcaagagataatgaagtctttggcgcaacctcgccacaaaaccgtaagaggattaacgtccaagaggttcacaagcatgatcaaaatcgcgggtcaagaagatccagaatggttacagtctctattacgagtggcggagatcgattccattaggctaaagtcattgactcaaggagaaatgtctcaaacatttaaatggtggacagaacttggtttagaaaaagatgtggagaaggcaagaagccagccgttaaaatggcatacgtggtccatgaaaattcttcaagatccgaccttaaccgaacaaaggcttgatcttaccaaaccaatatcgcttgtttatgttatagatgacattttcgatgtctatggggagctagaagaactaaccatcttcacacgagttgttgagagatgggatcataaggggcttaagacgctacccaaatacatgagggtttgttttgaagctctagatatgatcacaacggagattagcatgaagatctacaaatcacatggttggaacccgacatacgctcttcgacaatcgtgggcaagtttgtgtaaagcattcttggtagaagcaaagtggtttaattcgggttacttacccaccactgaagagtatatgaagaatggggttgtgagttcaggtgttcatttagtgatgcttcatgcctatatcttgttaggcgaagaactaacaaaagagaaagtcgaactaatagagagtaacccggggattgtatcatctgcagctacaattctcaggctctgggatgatctcggaagtgccaaggatgagaaccaagatggaactgatggatcatatgtagagtgttacctgaacgagtacaagggatcaactgttgatgaagcaagaacacatgttgcccagaagatatctagagcatggaaacgcttgaacagggagtgtctgaatccatgtccattctcaagatcattctcaaaagcttgtctcaacattgcaagaacagttcctttaatgtacagctatgatgatgatcaacgacttcccgacgaatatctcaagtctctaatgtaa

SEQ ID NO: 80766 - protein, 474 aa, Arabidopsis thaliana
  peptide (1)..(474): Ceres Seq. ID no. 12657079
  misc_feature (1)..(153): Pfam Name: Terpene synthase, N-terminal domain Pfam Description: Terpene synthase, N-terminal domain
  misc_feature (1)..(474): Homolog of NCBI NO: 15220567 NR Description: terpene synthase/cyclase family; protein id:
  misc_feature (1)..(474): Homolog of NCBI NO: 29468398 NR Description: linalool synthase [Arabidopsis thaliana]
  misc_feature (1)..(334): Homolog of NCBI NO: 25404336 NR Description: hypothetical protein T13M11.3 [imported] -
  misc_feature (387)..(474): Homolog of NCBI NO: 25404336 NR Description: hypothetical protein T13M11.3 [imported] -
  misc_feature (2)..(474): Homolog of NCBI NO: 30349142 NR Description: myrcene synthase Oc15 [Antirrhinum majus]
  misc_feature (2)..(474): Homolog of NCBI NO: 30349144 NR Description: myrcene synthase 1e20 [Antirrhinum majus]
  misc_feature (2)..(474): Homolog of NCBI NO: 30349140 NR Description: (E)-b-ocimene synthase [Antirrhinum majus]
  misc_feature (2)..(474): Homolog of NCBI NO: 40539112 NR Description: putative terpene synthase [Oryza sativa (japonica
  misc_feature (2)..(474): Homolog of NCBI NO: 37535582 NR Description: putative monoterpene synthase [Oryza sativa
  misc_feature (1)..(471): Homolog of NCBI NO: 14331015 NR Description: putative chloroplast terpene synthase [Quercus
MIDVIQSLGIDLHFRQEIEQTLHMIYKEGLQFNGDLHEIALRFRLLRQEGHYVQEIIFKNILDKKGGFKDVVKNDVKGLTELFEASELRVEGEETLDGAREFTYSRLNELCSGRESHQKQEIMKSLAQPRHKTVRGLTSKRFTSMIKIAGQEDPEWLQSLLRVAEIDSIRLKSLTQGEMSQTFKWWTELGLEKDVEKARSQPLKWHTWSMKILQDPTLTEQRLDLTKPISLVYVIDDIFDVYGELEELTIFTRVVERWDHKGLKTLPKYMRVCFEALDMITTEISMKIYKSHGWNPTYALRQSWASLCKAFLVEAKWFNSGYLPTTEEYMKNGVVSSGVHLVMLHAYILLGEELTKEKVELIESNPGIVSSAATILRLWDDLGSAKDENQDGTDGSYVECYLNEYKGSTVDEARTHVAQKISRAWKRLNRECLNPCPFSRSFSKACLNIARTVPLMYSYDDDQRLPDEYLKSLM

SEQ ID NO: 80767 - protein, 451 aa, Arabidopsis thaliana
  peptide (1)..(451): Ceres Seq. ID no. 12657080
  misc_feature (1)..(130): Pfam Name: Terpene synthase, N-terminal domain Pfam Description: Terpene synthase, N-terminal domain
  misc_feature (1)..(451): Homolog of NCBI NO: 15220567 NR Description: terpene synthase/cyclase family; protein id:
  misc_feature (1)..(451): Homolog of NCBI NO: 29468398 NR Description: linalool synthase [Arabidopsis thaliana]
  misc_feature (1)..(311): Homolog of NCBI NO: 25404336 NR Description: hypothetical protein T13M11.3 [imported] -
  misc_feature (364)..(451): Homolog of NCBI NO: 25404336 NR Description: hypothetical protein T13M11.3 [imported] -
  misc_feature (1)..(451): Homolog of NCBI NO: 30349142 NR Description: myrcene synthase Oc15 [Antirrhinum majus]
  misc_feature (1)..(451): Homolog of NCBI NO: 30349144 NR Description: myrcene synthase 1e20 [Antirrhinum majus]
  misc_feature (1)..(451): Homolog of NCBI NO: 30349140 NR Description: (E)-b-ocimene synthase [Antirrhinum majus]
  misc_feature (1)..(451): Homolog of NCBI NO: 40539112 NR Description: putative terpene synthase [Oryza sativa (japonica
  misc_feature (1)..(451): Homolog of NCBI NO: 37535582 NR Description: putative monoterpene synthase [Oryza sativa
  misc_feature (1)..(448): Homolog of NCBI NO: 14331015 NR Description: putative chloroplast terpene synthase [Quercus
MIYKEGLQFNGDLHEIALRFRLLRQEGHYVQEIIFKNILDKKGGFKDVVKNDVKGLTELFEASELRVEGEETLDGAREFTYSRLNELCSGRESHQKQEIMKSLAQPRHKTVRGLTSKRFTSMIKIAGQEDPEWLQSLLRVAEIDSIRLKSLTQGEMSQTFKWWTELGLEKDVEKARSQPLKWHTWSMKILQDPTLTEQRLDLTKPISLVYVIDDIFDVYGELEELTIFTRVVERWDHKGLKTLPKYMRVCFEALDMITTEISMKIYKSHGWNPTYALRQSWASLCKAFLVEAKWFNSGYLPTTEEYMKNGVVSSGVHLVMLHAYILLGEELTKEKVELIESNPGIVSSAATILRLWDDLGSAKDENQDGTDGSYVECYLNEYKGSTVDEARTHVAQKISRAWKRLNRECLNPCPFSRSFSKACLNIARTVPLMYSYDDDQRLPDEYLKSLM

SEQ ID NO: 80768 - protein, 352 aa, Arabidopsis thaliana
  peptide (1)..(352): Ceres Seq. ID no. 12657081
  misc_feature (1)..(352): Homolog of NCBI NO: 15220567 NR Description: terpene synthase/cyclase family; protein id:
  misc_feature (1)..(352): Homolog of NCBI NO: 29468398 NR Description: linalool synthase [Arabidopsis thaliana]
  misc_feature (1)..(212): Homolog of NCBI NO: 25404336 NR Description: hypothetical protein T13M11.3 [imported] -
  misc_feature (265)..(352): Homolog of NCBI NO: 25404336 NR Description: hypothetical protein T13M11.3 [imported] -
  misc_feature (1)..(352): Homolog of NCBI NO: 30349142 NR Description: myrcene synthase Oc15 [Antirrhinum majus]
  misc_feature (1)..(352): Homolog of NCBI NO: 30349144 NR Description: myrcene synthase 1e20 [Antirrhinum majus]
  misc_feature (1)..(352): Homolog of NCBI NO: 30349140 NR Description: (E)-b-ocimene synthase [Antirrhinum majus]
  misc_feature (1)..(352): Homolog of NCBI NO: 40539112 NR Description: putative terpene synthase [Oryza sativa (japonica
  misc_feature (1)..(352): Homolog of NCBI NO: 37535582 NR Description: putative monoterpene synthase [Oryza sativa
  misc_feature (1)..(349): Homolog of NCBI NO: 14331015 NR Description: putative chloroplast terpene synthase [Quercus
MKSLAQPRHKTVRGLTSKRFTSMIKIAGQEDPEWLQSLLRVAEIDSIRLKSLTQGEMSQTFKWWTELGLEKDVEKARSQPLKWHTWSMKILQDPTLTEQRLDLTKPISLVYVIDDIFDVYGELEELTIFTRVVERWDHKGLKTLPKYMRVCFEALDMITTEISMKIYKSHGWNPTYALRQSWASLCKAFLVEAKWFNSGYLPTTEEYMKNGVVSSGVHLVMLHAYILLGEELTKEKVELIESNPGIVSSAATILRLWDDLGSAKDENQDGTDGSYVECYLNEYKGSTVDEARTHVAQKISRAWKRLNRECLNPCPFSRSFSKACLNIARTVPLMYSYDDDQRLPDEYLKSLM

SEQ ID NO: 80769 - DNA, 1537 bp, Arabidopsis thaliana
  misc_feature (1)..(1537): Ceres Seq. ID no. 12657087
  misc_feature: MA Experiment ID: 20000169 Result: Up-regulated in Transcription
  misc_feature: MA Experiment 20000169 PARAMETER Experiment Name: At_100uM_ABA_P Parameter: Age (day) Value: 14
  misc_feature: MA Experiment 20000169 PARAMETER Experiment Name: At_100uM_ABA_P Parameter: Organism Value: A. thaliana
  misc_feature: MA Experiment 20000169 PARAMETER Experiment Name: At_100uM_ABA_P Parameter: Plant Line Value: WS
  misc_feature: MA Experiment 20000169 PARAMETER Experiment Name: At_100uM_ABA_P Parameter: Timepoint (hr) Value: 6
  misc_feature: MA Experiment 20000169 PARAMETER Experiment Name: At_100uM_ABA_P Parameter: Tissue Value: Aerial
  misc_feature: MA Experiment 20000169 PARAMETER Experiment Name: At_100uM_ABA_P Parameter: Treatment Value: 100uM ABA vs. No Treatment
  misc_feature: MA Experiment ID: 20000173 Result: Up-regulated in Transcription
  misc_feature: MA Experiment 20000173 PARAMETER Experiment Name: At_42deg_Heat_P Parameter: Age (day) Value: 14
  misc_feature: MA Experiment 20000173 PARAMETER Experiment Name: At_42deg_Heat_P Parameter: Organism Value: A. thaliana
  misc_feature: MA Experiment 20000173 PARAMETER Experiment Name: At_42deg_Heat_P Parameter: Plant Line Value: WS
  misc_feature: MA Experiment 20000173 PARAMETER Experiment Name: At_42deg_Heat_P Parameter: Temperature (deg C) Value: 42 vs. 22
  misc_feature: MA Experiment 20000173 PARAMETER Experiment Name: At_42deg_Heat_P Parameter: Timepoint (hr) Value: 6
  misc_feature: MA Experiment 20000173 PARAMETER Experiment Name: At_42deg_Heat_P Parameter: Tissue Value: Aerial
  misc_feature: MA Experiment ID: 20000180 Result: Down-regulated in Transcription
  misc_feature: MA Experiment 20000180 PARAMETER Experiment Name: At_Germinating_Seeds_P Parameter: Age (hr) Value: 24 vs. 0
  misc_feature: MA Experiment 20000180 PARAMETER Experiment Name: At_Germinating_Seeds_P Parameter: Tissue Value: Germinating Seeds
  misc_feature: MA Experiment ID: 20000182 Result: Up-regulated in Transcription
  misc_feature: MA Experiment 20000182 PARAMETER Experiment Name: At_2mM_SA_P Parameter: Age (day) Value: 14
  misc_feature: MA Experiment 20000182 PARAMETER Experiment Name: At_2mM_SA_P Parameter: Organism Value: A. thaliana
  misc_feature: MA Experiment 20000182 PARAMETER Experiment Name: At_2mM_SA_P Parameter: Plant Line Value: WS
  misc_feature: MA Experiment 20000182 PARAMETER Experiment Name: At_2mM_SA_P Parameter: Timepoint (hr) Value: 6
  misc_feature: MA Experiment 20000182 PARAMETER Experiment Name: At_2mM_SA_P Parameter: Tissue Value: Aerial
  misc_feature: MA Experiment 20000182 PARAMETER Experiment Name: At_2mM_SA_P Parameter: Treatment Value: 2mM SA vs. No Treatment
  misc_feature: MA Experiment ID: 20000267 Result: Up-regulated in Transcription
  misc_feature: MA Experiment 20000267 PARAMETER Experiment Name: At_Drought_P Parameter: Age (day) Value: 7
  misc_feature: MA Experiment 20000267 PARAMETER Experiment Name: At_Drought_P Parameter: Organism Value: A. thaliana
  misc_feature: MA Experiment 20000267 PARAMETER Experiment Name: At_Drought_P Parameter: Plant Line Value: WS
  misc_feature: MA Experiment 20000267 PARAMETER Experiment Name: At_Drought_P Parameter: Timepoint (hr) Value: 6
  misc_feature: MA Experiment 20000267 PARAMETER Experiment Name: At_Drought_P Parameter: Tissue Value: Whole Plant
  misc_feature: MA Experiment 20000267 PARAMETER Experiment Name: At_Drought_P Parameter: Treatment Value: Drought vs. No Drought
  misc_feature: MA Experiment ID: 20000268 Result: Up-regulated in Transcription
  misc_feature: MA Experiment 20000268 PARAMETER Experiment Name: At_100mM_NaCl__P Parameter: Age (day) Value: 14
  misc_feature: MA Experiment 20000268 PARAMETER Experiment Name: At_100mM_NaCl__P Parameter: Organism Value: A. thaliana
  misc_feature: MA Experiment 20000268 PARAMETER Experiment Name: At_100mM_NaCl__P Parameter: Plant Line Value: WS
  misc_feature: MA Experiment 20000268 PARAMETER Experiment Name: At_100mM_NaCl__P Parameter: Timepoint (hr) Value: 6
  misc_feature: MA Experiment 20000268 PARAMETER Experiment Name: At_100mM_NaCl__P Parameter: Tissue Value: Whole Plant
  misc_feature: MA Experiment 20000268 PARAMETER Experiment Name: At_100mM_NaCl__P Parameter: Treatment Value: 100mM NaCl vs. No Treatment
  misc_feature: MA Experiment ID: 20000308 Result: Up-regulated in Transcription
  misc_feature: MA Experiment 20000308 PARAMETER Experiment Name: At_100mM_NaCl__P Parameter: Age (day) Value: 17
  misc_feature: MA Experiment 20000308 PARAMETER Experiment Name: At_100mM_NaCl__P Parameter: Organism Value: A. thaliana
  misc_feature: MA Experiment 20000308 PARAMETER Experiment Name: At_100mM_NaCl__P Parameter: Plant Line Value: WS
  misc_feature: MA Experiment 20000308 PARAMETER Experiment Name: At_100mM_NaCl__P Parameter: Timepoint (hr) Value: 72
  misc_feature: MA Experiment 20000308 PARAMETER Experiment Name: At_100mM_NaCl__P Parameter: Tissue Value: Whole Plant
  misc_feature: MA Experiment 20000308 PARAMETER Experiment Name: At_100mM_NaCl__P Parameter: Treatment Value: 100mM NaCl vs. No Treatment
  misc_feature: MA Experiment ID: 20000436 Result: Up-regulated in Transcription
  misc_feature: MA Experiment 20000436 PARAMETER Experiment Name: At_Drought_P Parameter: Age (day) Value: 7
  misc_feature: MA Experiment 20000436 PARAMETER Experiment Name: At_Drought_P Parameter: Organism Value: A. thaliana
  misc_feature: MA Experiment 20000436 PARAMETER Experiment Name: At_Drought_P Parameter: Plant Line Value: WS
  misc_feature: MA Experiment 20000436 PARAMETER Experiment Name: At_Drought_P Parameter: Timepoint (hr) Value: 12
  misc_feature: MA Experiment 20000436 PARAMETER Experiment Name: At_Drought_P Parameter: Tissue Value: Whole Plant
  misc_feature: MA Experiment 20000436 PARAMETER Experiment Name: At_Drought_P Parameter: Treatment Value: Drought vs. No Drought
  misc_feature: MA Experiment ID: 20000437 Result: Up-regulated in Transcription
  misc_feature: MA Experiment 20000437 PARAMETER Experiment Name: At_Drought_P Parameter: Age (day) Value: 8
  misc_feature: MA Experiment 20000437 PARAMETER Experiment Name: At_Drought_P Parameter: Organism Value: A. thaliana
  misc_feature: MA Experiment 20000437 PARAMETER Experiment Name: At_Drought_P Parameter: Plant Line Value: WS
  misc_feature: MA Experiment 20000437 PARAMETER Experiment Name: At_Drought_P Parameter: Timepoint (hr) Value: 24
  misc_feature: MA Experiment 20000437 PARAMETER Experiment Name: At_Drought_P Parameter: Tissue Value: Whole Plant
  misc_feature: MA Experiment 20000437 PARAMETER Experiment Name: At_Drought_P Parameter: Treatment Value: Drought vs. No Drought
  misc_feature: MA Experiment ID: 20000438 Result: Down-regulated in Transcription
  misc_feature: MA Experiment 20000438 PARAMETER Experiment Name: At_Shoots__P Parameter: Age (day) Value: 14
  misc_feature: MA Experiment 20000438 PARAMETER Experiment Name: At_Shoots__P Parameter: Tissue Value: Shoots vs. Whole Plant
  misc_feature: MA Experiment ID: 20000439 Result: Down-regulated in Transcription
  misc_feature: MA Experiment 20000439 PARAMETER Experiment Name: At_Roots__P Parameter: Age (day) Value: 14 vs. 21
  misc_feature: MA Experiment 20000439 PARAMETER Experiment Name: At_Roots__P Parameter: Organism Value: A. thaliana
  misc_feature: MA Experiment 20000439 PARAMETER Experiment Name: At_Roots__P Parameter: Tissue Value: Roots vs. Whole Plant
  misc_feature: MA Experiment ID: 20000445 Result: Up-regulated in Transcription
  misc_feature: MA Experiment 20000445 PARAMETER Experiment Name: At_100uM_NAA__P Parameter: Age (day) Value: 14
  misc_feature: MA Experiment 20000445 PARAMETER Experiment Name: At_100uM_NAA__P Parameter: Organism Value: A. thaliana
  misc_feature: MA Experiment 20000445 PARAMETER Experiment Name: At_100uM_NAA__P Parameter: Plant Line Value: WS
  misc_feature: MA Experiment 20000445 PARAMETER Experiment Name: At_100uM_NAA__P Parameter: Timepoint (hr) Value: 6
  misc_feature: MA Experiment 20000445 PARAMETER Experiment Name: At_100uM_NAA__P Parameter: Tissue Value: Aerial
  misc_feature: MA Experiment 20000445 PARAMETER Experiment Name: At_100uM_NAA__P Parameter: Treatment Value: 100uM NAA vs. No Treatment
  misc_feature: MA Experiment ID: 20000453 Result: Up-regulated in Transcription
  misc_feature: MA Experiment 20000453 PARAMETER Experiment Name: At_100uM_ABA_P Parameter: Age (day) Value: 15
  misc_feature: MA Experiment 20000453 PARAMETER Experiment Name: At_100uM_ABA_P Parameter: Organism Value: A. thaliana
  misc_feature: MA Experiment 20000453 PARAMETER Experiment Name: At_100uM_ABA_P Parameter: Plant Line Value: WS
  misc_feature: MA Experiment 20000453 PARAMETER Experiment Name: At_100uM_ABA_P Parameter: Timepoint (hr) Value: 24
  misc_feature: MA Experiment 20000453 PARAMETER Experiment Name: At_100uM_ABA_P Parameter: Tissue Value: Aerial
  misc_feature: MA Experiment 20000453 PARAMETER Experiment Name: At_100uM_ABA_P Parameter: Treatment Value: 100uM ABA vs. No Treatment
  misc_feature: MA Experiment ID: 20000456 Result: Up-regulated in Transcription
  misc_feature: MA Experiment 20000456 PARAMETER Experiment Name: At_100uM_BA_P Parameter: Age (day) Value: 14
  misc_feature: MA Experiment 20000456 PARAMETER Experiment Name: At_100uM_BA_P Parameter: Organism Value: A. thaliana
  misc_feature: MA Experiment 20000456 PARAMETER Experiment Name: At_100uM_BA_P Parameter: Plant Line Value: WS
  misc_feature: MA Experiment 20000456 PARAMETER Experiment Name: At_100uM_BA_P Parameter: Timepoint (hr) Value: 6
  misc_feature: MA Experiment 20000456 PARAMETER Experiment Name: At_100uM_BA_P Parameter: Tissue Value: Aerial
  misc_feature: MA Experiment 20000456 PARAMETER Experiment Name: At_100uM_BA_P Parameter: Treatment Value: 100uM BA vs. No Treatment
  misc_feature: MA Experiment ID: 20000460 Result: Up-regulated in Transcription
  misc_feature: MA Experiment 20000460 PARAMETER Experiment Name: At_10percent_PEG_P Parameter: Age (day) Value: 12
  misc_feature: MA Experiment 20000460 PARAMETER Experiment Name: At_10percent_PEG_P Parameter: Organism Value: A. thaliana
  misc_feature: MA Experiment 20000460 PARAMETER Experiment Name: At_10percent_PEG_P Parameter: Plant Line Value: WS
  misc_feature: MA Experiment 20000460 PARAMETER Experiment Name: At_10percent_PEG_P Parameter: Timepoint (day) Value: 12
  misc_feature: MA Experiment 20000460 PARAMETER Experiment Name: At_10percent_PEG_P Parameter: Tissue Value: Whole Plant
  misc_feature: MA Experiment 20000460 PARAMETER Experiment Name: At_10percent_PEG_P Parameter: Treatment Value: 10percent PEG vs. No Treatment
  misc_feature: MA Experiment ID: 20000527 Result: Down-regulated in Transcription
  misc_feature: MA Experiment 20000527 PARAMETER Experiment Name: At_10percent_PEG_P Parameter: Age (day) Value: 20
  misc_feature: MA Experiment 20000527 PARAMETER Experiment Name: At_10percent_PEG_P Parameter: Organism Value: A. thaliana
  misc_feature: MA Experiment 20000527 PARAMETER Experiment Name: At_10percent_PEG_P Parameter: Plant Line Value: WS
  misc_feature: MA Experiment 20000527 PARAMETER Experiment Name: At_10percent_PEG_P Parameter: Timepoint (day) Value: 20
  misc_feature: MA Experiment 20000527 PARAMETER Experiment Name: At_10percent_PEG_P Parameter: Tissue Value: Whole Plant
  misc_feature: MA Experiment 20000527 PARAMETER Experiment Name: At_10percent_PEG_P Parameter: Treatment Value: 10percent PEG vs. No Treatment
  misc_feature: MA Experiment ID: 20000574 Result: Up-regulated in Transcription
  misc_feature: MA Experiment 20000574 PARAMETER Experiment Name: At_100uM_ABA_Mutants__P Parameter: Organism Value: A. thaliana
  misc_feature: MA Experiment 20000574 PARAMETER Experiment Name: At_100uM_ABA_Mutants__P Parameter: Plant Line Value: CS23 vs. Ler wt
  misc_feature: MA Experiment 20000574 PARAMETER Experiment Name: At_100uM_ABA_Mutants__P Parameter: Timepoint (hr) Value: N/A
  misc_feature: MA Experiment 20000574 PARAMETER Experiment Name: At_100uM_ABA_Mutants__P Parameter: Tissue Value: Whole Plant
  misc_feature: MA Experiment 20000574 PARAMETER Experiment Name: At_100uM_ABA_Mutants__P Parameter: Treatment Value: None
  misc_feature: MA Experiment ID: 20000794 Result: Down-regulated in Transcription
  misc_feature: MA Experiment 20000794 PARAMETER Experiment Name: At_Petals_P Parameter: Age (day) Value: 23-25 days
  misc_feature: MA Experiment 20000794 PARAMETER Experiment Name: At_Petals_P Parameter: Plant Line Value: WS
  misc_feature: MA Experiment 20000794 PARAMETER Experiment Name: At_Petals_P Parameter: Tissue Value: Petals vs. Whole plant
  misc_feature: MA Experiment ID: 20001450 Result: Down-regulated in Transcription
  misc_feature: MA Experiment 20001450 PARAMETER Experiment Name: At_Far-red-induction_P Parameter: Age (day) Value: 7
  misc_feature: MA Experiment 20001450 PARAMETER Experiment Name: At_Far-red-induction_P Parameter: Light Value: Far-red vs. White
  misc_feature: MA Experiment 20001450 PARAMETER Experiment Name: At_Far-red-induction_P Parameter: Organism Value: A. thaliana
  misc_feature: MA Experiment 20001450 PARAMETER Experiment Name: At_Far-red-induction_P Parameter: Plant Line Value: Columbia
  misc_feature: MA Experiment 20001450 PARAMETER Experiment Name: At_Far-red-induction_P Parameter: Timepoint (hr) Value: 8
  misc_feature: MA Experiment 20001450 PARAMETER Experiment Name: At_Far-red-induction_P Parameter: Tissue Value: Whole Plant
  misc_feature: MA Experiment ID: 20001451 Result: Down-regulated in Transcription
  misc_feature: MA Experiment 20001451 PARAMETER Experiment Name: At_Far-red-induction_P Parameter: Age (day) Value: 7
  misc_feature: MA Experiment 20001451 PARAMETER Experiment Name: At_Far-red-induction_P Parameter: Light Value: Far-red vs. White
  misc_feature: MA Experiment 20001451 PARAMETER Experiment Name: At_Far-red-induction_P Parameter: Organism Value: A. thaliana
  misc_feature: MA Experiment 20001451 PARAMETER Experiment Name: At_Far-red-induction_P Parameter: Plant Line Value: Columbia
  misc_feature: MA Experiment 20001451 PARAMETER Experiment Name: At_Far-red-induction_P Parameter: Timepoint (hr) Value: 24
  misc_feature: MA Experiment 20001451 PARAMETER Experiment Name: At_Far-red-induction_P Parameter: Tissue Value: Whole Plant
  misc_feature: MA Experiment ID: 20001554 Result: Up-regulated in Transcription
  misc_feature: MA Experiment 20001554 PARAMETER Experiment Name: At_Drought_Soil_Dry_P Parameter: Age (day) Value: 21
  misc_feature: MA Experiment 20001554 PARAMETER Experiment Name: At_Drought_Soil_Dry_P Parameter: Organism Value: A. thaliana
  misc_feature: MA Experiment 20001554 PARAMETER Experiment Name: At_Drought_Soil_Dry_P Parameter: Plant Line Value: WS
  misc_feature: MA Experiment 20001554 PARAMETER Experiment Name: At_Drought_Soil_Dry_P Parameter: Post Timepoint (hr) Value: None
  misc_feature: MA Experiment 20001554 PARAMETER Experiment Name: At_Drought_Soil_Dry_P Parameter: Post-Treatment Value: None
  misc_feature: MA Experiment 20001554 PARAMETER Experiment Name: At_Drought_Soil_Dry_P Parameter: Timepoint (day) Value: 7
  misc_feature: MA Experiment 20001554 PARAMETER Experiment Name: At_Drought_Soil_Dry_P Parameter: Treatment Value: Drought vs. No Drought
  misc_feature: MA Experiment ID: 20001555 Result: Up-regulated in Transcription
  misc_feature: MA Experiment 20001555 PARAMETER Experiment Name: At_Drought_Soil_Dry_P Parameter: Age (day) Value: 24
  misc_feature: MA Experiment 20001555 PARAMETER Experiment Name: At_Drought_Soil_Dry_P Parameter: Organism Value: A. thaliana
  misc_feature: MA Experiment 20001555 PARAMETER Experiment Name: At_Drought_Soil_Dry_P Parameter: Plant Line Value: WS
  misc_feature: MA Experiment 20001555 PARAMETER Experiment Name: At_Drought_Soil_Dry_P Parameter: Post Timepoint (hr) Value: None
  misc_feature: MA Experiment 20001555 PARAMETER Experiment Name: At_Drought_Soil_Dry_P Parameter: Post-Treatment Value: None
  misc_feature: MA Experiment 20001555 PARAMETER Experiment Name: At_Drought_Soil_Dry_P Parameter: Timepoint (day) Value: 10
  misc_feature: MA Experiment 20001555 PARAMETER Experiment Name: At_Drought_Soil_Dry_P Parameter: Treatment Value: Drought vs. No Drought
  misc_feature: MA Experiment ID: 20001556 Result: Up-regulated in Transcription
  misc_feature: MA Experiment 20001556 PARAMETER Experiment Name: At_Drought_Soil_Dry_P Parameter: Age (day) Value: 26
  misc_feature: MA Experiment 20001556 PARAMETER Experiment Name: At_Drought_Soil_Dry_P Parameter: Organism Value: A. thaliana
  misc_feature: MA Experiment 20001556 PARAMETER Experiment Name: At_Drought_Soil_Dry_P Parameter: Plant Line Value: WS
  misc_feature: MA Experiment 20001556 PARAMETER Experiment Name: At_Drought_Soil_Dry_P Parameter: Post Timepoint (hr) Value: None
  misc_feature: MA Experiment 20001556 PARAMETER Experiment Name: At_Drought_Soil_Dry_P Parameter: Post-Treatment Value: None
  misc_feature: MA Experiment 20001556 PARAMETER Experiment Name: At_Drought_Soil_Dry_P Parameter: Timepoint (day) Value: 12
  misc_feature: MA Experiment 20001556 PARAMETER Experiment Name: At_Drought_Soil_Dry_P Parameter: Treatment Value: Drought vs. No Drought
  misc_feature: MA Experiment ID: 20001557 Result: Up-regulated in Transcription
  misc_feature: MA Experiment 20001557 PARAMETER Experiment Name: At_Drought_Soil_Dry_P Parameter: Age (day) Value: 27
  misc_feature: MA Experiment 20001557 PARAMETER Experiment Name: At_Drought_Soil_Dry_P Parameter: Organism Value: A. thaliana
  misc_feature: MA Experiment 20001557 PARAMETER Experiment Name: At_Drought_Soil_Dry_P Parameter: Plant Line Value: WS
  misc_feature: MA Experiment 20001557 PARAMETER Experiment Name: At_Drought_Soil_Dry_P Parameter: Post Timepoint (hr) Value: 3
  misc_feature: MA Experiment 20001557 PARAMETER Experiment Name: At_Drought_Soil_Dry_P Parameter: Post-Treatment Value: Re-Water vs. No Drought
  misc_feature: MA Experiment 20001557 PARAMETER Experiment Name: At_Drought_Soil_Dry_P Parameter: Timepoint (day) Value: 13
  misc_feature: MA Experiment 20001557 PARAMETER Experiment Name: At_Drought_Soil_Dry_P Parameter: Treatment Value: Drought vs. No Drought
  misc_feature: MA Experiment ID: 20001558 Result: Up-regulated in Transcription
  misc_feature: MA Experiment 20001558 PARAMETER Experiment Name: At_Drought_Soil_Dry_P Parameter: Age (day) Value: 27
  misc_feature: MA Experiment 20001558 PARAMETER Experiment Name: At_Drought_Soil_Dry_P Parameter: Organism Value: A. thaliana
  misc_feature: MA Experiment 20001558 PARAMETER Experiment Name: At_Drought_Soil_Dry_P Parameter: Plant Line Value: WS
  misc_feature: MA Experiment 20001558 PARAMETER Experiment Name: At_Drought_Soil_Dry_P Parameter: Post Timepoint (hr) Value: 6
  misc_feature: MA Experiment 20001558 PARAMETER Experiment Name: At_Drought_Soil_Dry_P Parameter: Post-Treatment Value: Re-Water vs. No Drought
  misc_feature: MA Experiment 20001558 PARAMETER Experiment Name: At_Drought_Soil_Dry_P Parameter: Timepoint (day) Value: 13
  misc_feature: MA Experiment 20001558 PARAMETER Experiment Name: At_Drought_Soil_Dry_P Parameter: Treatment Value: Drought vs. No Drought
  misc_feature: MA Experiment ID: 20001559 Result: Up-regulated in Transcription
  misc_feature: MA Experiment 20001559 PARAMETER Experiment Name: At_Drought_Soil_Dry_P Parameter: Age (day) Value: 28
  misc_feature: MA Experiment 20001559 PARAMETER Experiment Name: At_Drought_Soil_Dry_P Parameter: Organism Value: A. thaliana
  misc_feature: MA Experiment 20001559 PARAMETER Experiment Name: At_Drought_Soil_Dry_P Parameter: Plant Line Value: WS
  misc_feature: MA Experiment 20001559 PARAMETER Experiment Name: At_Drought_Soil_Dry_P Parameter: Post Timepoint (hr) Value: 29
  misc_feature: MA Experiment 20001559 PARAMETER Experiment Name: At_Drought_Soil_Dry_P Parameter: Post-Treatment Value: Re-Water vs. No Drought
  misc_feature: MA Experiment 20001559 PARAMETER Experiment Name: At_Drought_Soil_Dry_P Parameter: Timepoint (day) Value: 14
  misc_feature: MA Experiment 20001559 PARAMETER Experiment Name: At_Drought_Soil_Dry_P Parameter: Treatment Value: Drought vs. No Drought
  misc_feature: MA Experiment ID: 20001560 Result: Up-regulated in Transcription
  misc_feature: MA Experiment 20001560 PARAMETER Experiment Name: At_Drought_Soil_Dry_P Parameter: Age (day) Value: 28
  misc_feature: MA Experiment 20001560 PARAMETER Experiment Name: At_Drought_Soil_Dry_P Parameter: Organism Value: A. thaliana
  misc_feature: MA Experiment 20001560 PARAMETER Experiment Name: At_Drought_Soil_Dry_P Parameter: Plant Line Value: WS
  misc_feature: MA Experiment 20001560 PARAMETER Experiment Name: At_Drought_Soil_Dry_P Parameter: Post Timepoint (hr) Value: None
  misc_feature: MA Experiment 20001560 PARAMETER Experiment Name: At_Drought_Soil_Dry_P Parameter: Post-Treatment Value: None
  misc_feature: MA Experiment 20001560 PARAMETER Experiment Name: At_Drought_Soil_Dry_P Parameter: Timepoint (day) Value: 14
  misc_feature: MA Experiment 20001560 PARAMETER Experiment Name: At_Drought_Soil_Dry_P Parameter: Treatment Value: Drought vs. No Drought
  misc_feature: MA Experiment ID: 20001904 Result: Up-regulated in Transcription
  misc_feature: MA Experiment 20001904 PARAMETER Experiment Name: At_Drought_Reproduction_P Parameter: Age (day) Value: 37
  misc_feature: MA Experiment 20001904 PARAMETER Experiment Name: At_Drought_Reproduction_P Parameter: Organism Value: A. thaliana
  misc_feature: MA Experiment 20001904 PARAMETER Experiment Name: At_Drought_Reproduction_P Parameter: Plant Line Value: WS
  misc_feature: MA Experiment 20001904 PARAMETER Experiment Name: At_Drought_Reproduction_P Parameter: Timepoint (day) Value: 7
  misc_feature: MA Experiment 20001904 PARAMETER Experiment Name: At_Drought_Reproduction_P Parameter: Tissue Value: Rosettes
  misc_feature: MA Experiment 20001904 PARAMETER Experiment Name: At_Drought_Reproduction_P Parameter: Treatment Value: Drought vs. No Drought
  misc_feature: MA Experiment ID: 20001905 Result: Up-regulated in Transcription
  misc_feature: MA Experiment 20001905 PARAMETER Experiment Name: At_Drought_Reproduction_P Parameter: Age (day) Value: 40
  misc_feature: MA Experiment 20001905 PARAMETER Experiment Name: At_Drought_Reproduction_P Parameter: Organism Value: A. thaliana
  misc_feature: MA Experiment 20001905 PARAMETER Experiment Name: At_Drought_Reproduction_P Parameter: Plant Line Value: WS
  misc_feature: MA Experiment 20001905 PARAMETER Experiment Name: At_Drought_Reproduction_P Parameter: Timepoint (day) Value: 10
  misc_feature: MA Experiment 20001905 PARAMETER Experiment Name: At_Drought_Reproduction_P Parameter: Tissue Value: Rosettes
  misc_feature: MA Experiment 20001905 PARAMETER Experiment Name: At_Drought_Reproduction_P Parameter: Treatment Value: Drought vs. No Drought
  misc_feature: MA Experiment ID: 20001908 Result: Up-regulated in Transcription
  misc_feature: MA Experiment 20001908 PARAMETER Experiment Name: At_Drought_Reproduction_P Parameter: Age (day) Value: 40
  misc_feature: MA Experiment 20001908 PARAMETER Experiment Name: At_Drought_Reproduction_P Parameter: Organism Value: A. thaliana
  misc_feature: MA Experiment 20001908 PARAMETER Experiment Name: At_Drought_Reproduction_P Parameter: Plant Line Value: WS
  misc_feature: MA Experiment 20001908 PARAMETER Experiment Name: At_Drought_Reproduction_P Parameter: Timepoint (day) Value: 10
  misc_feature: MA Experiment 20001908 PARAMETER Experiment Name: At_Drought_Reproduction_P Parameter: Tissue Value: Siliques
  misc_feature: MA Experiment 20001908 PARAMETER Experiment Name: At_Drought_Reproduction_P Parameter: Treatment Value: Drought vs. No Drought
  misc_feature: MA Experiment ID: 20001911 Result: Up-regulated in Transcription
  misc_feature: MA Experiment 20001911 PARAMETER Experiment Name: At_Drought_Reproduction_P Parameter: Age (day) Value: 40
  misc_feature: MA Experiment 20001911 PARAMETER Experiment Name: At_Drought_Reproduction_P Parameter: Organism Value: A. thaliana
  misc_feature: MA Experiment 20001911 PARAMETER Experiment Name: At_Drought_Reproduction_P Parameter: Plant Line Value: WS
  misc_feature: MA Experiment 20001911 PARAMETER Experiment Name: At_Drought_Reproduction_P Parameter: Timepoint (day) Value: 10
  misc_feature: MA Experiment 20001911 PARAMETER Experiment Name: At_Drought_Reproduction_P Parameter: Tissue Value: Flowers
  misc_feature: MA Experiment 20001911 PARAMETER Experiment Name: At_Drought_Reproduction_P Parameter: Treatment Value: Drought vs. No Drought
aacaacacaaagtctctctctctctgataaaatcttaaaacccacctcgagatcatagtcttcatcaattagccataaaaaagcacaatgctttcttcaatcaaaccatcttcgtcttccttctccaccgctatctccggcagcgtaaggcggtcaattcctacaaagctcaagttttctcctttactcatcatcaaaaactgccataaccaaagctttaacgctaatgttgtctcccatcaaaagcctctacacatttcatctgcttcgaatttcaagcgtgaggtcaaagtcgaagcttacgaggccgatcgttcccgtccactggacatcaacatcgagcttcccgatgaacaatccgcgcagaaactgaaaatcggaatctacttcgcaacttggtgggcacttaacgttgtcttcaacatctacaacaagaaagtcctcaatgcttttccttacccgtggcttacttcgacgttgtctctcgcttgtggttctttgatgatgcttgtctcttgggctactagaatcgcagatgctcctaaaactgatctcgagttctggaaaactctgttcccggtcgctgtagcacacacgataggacacgttgcagcaacagtgagtatgtcaaaagtagcagtttccttcacacacatcattaaaagtggtgaaccagctttcagtgtcttagtctcaagattcttcatgggagagactttccctcttcctgtctatctctctctcttaccaatcatcggaggctgcgctctcgcggccatcaccgagcttaacttcaacatcactgggtttatgggggcaatgatatcgaatttggcatttgtgttccggaatatcttttcgaagaaagggatgaaagggaagtcagtgagcggaatgaactactacgcttgcttatcgatgatgtctcttgtgatcctcactccattttctattgccgtggaaggtcctcaaatgtgggctgctggttggcaaaatgcggtttctcaagtcggaccaaactttgtctggtgggtagtggcacaaagtgtgttttaccatttgtacaatcaggtctcatacatgtcattagaccagatttcgccgttaactttcagtatcggtaatacgatgaagcggatttccgttattgttgcatcgatcatcattttccataccccgattcaaccggttaatgccctcggtgctgccattgcgatttttggaactttcctctactcacaggcgaagcagtgaggatggtttaggaggcagttttttgggtttgttttgcaaaagaaaatgaaaactaacaaaagagtagccggggaggagagaacattccggtgagatcaacatcggaaaatgcttttccccggtccatggatatgaagaaactggagcttgaagttgatagagtgtttgcttttactttttttttcattgtctcataatagattctgcacaagacaggctaattctatattatctatgttttatttagatgatcgtaataataaagatatcagtgtcatttctt

SEQ ID NO: 80770 - protein, 388 aa, Arabidopsis thaliana
  peptide (1)..(388): Ceres Seq. ID no. 12657088
  misc_feature (1)..(388): Homolog of NCBI NO: 18407336 NR Description: glucose-6-phosphate/phosphate-translocator putative; protein id: At1g61800.1, supported by cDNA:
  misc_feature (1)..(388): Homolog of NCBI NO: 14596173 NR Description: Similar to
  misc_feature (1)..(388): Homolog of NCBI NO: 7484980 NR Description: glucose-6-phosphate/phosphate translocator
  misc_feature (1)..(388): Homolog of NCBI NO: 7488807 NR Description: glucose-6-phosphate/phosphate-translocator
  misc_feature (4)..(387): Homolog of NCBI NO: 18423670 NR Description: glucose-6-phosphate/phosphate translocator; id: At5g54800.1, supported by cDNA: 26107., supported by cDNA: supported by cDNA: gi_7229674 [Arabidopsis thaliana]
  misc_feature (4)..(387): Homolog of NCBI NO: 21554690 NR Description: glucose-6-phosphate/phosphate translocator
  misc_feature (4)..(385): Homolog of NCBI NO: 9758260 NR Description: glucose-6-phosphate/phosphate translocator
  misc_feature (9)..(388): Homolog of NCBI NO: 27752361 NR Description: glucose-6-phosphate/phosphate translocator 2
  misc_feature (56)..(388): Homolog of NCBI NO: 7489258 NR Description: probable
  misc_feature (1)..(387): Homolog of NCBI NO: 7489744 NR Description: glucose-6-phosphate/phosphate-translocator
MLSSIKPSSSSFSTAISGSVRRSIPTKLKFSPLLIIKNCHNQSFNANVVSHQKPLHISSASNFKREVKVEAYEADRSRPLDINIELPDEQSAQKLKIGIYFATWWALNVVFNIYNKKVLNAFPYPWLTSTLSLACGSLMMLVSWATRIADAPKTDLEFWKTLFPVAVAHTIGHVAATVSMSKVAVSFTHIIKSGEPAFSVLVSRFFMGETFPLPVYLSLLPIIGGCALAAITELNFNITGFMGAMISNLAFVFRNIFSKKGMKGKSVSGMNYYACLSMMSLVILTPFSIAVEGPQMWAAGWQNAVSQVGPNFVWWVVAQSVFYHLYNQVSYMSLDQISPLTFSIGNTMKRISVIVASIIIFHTPIQPVNALGAAIAIFGTFLYSQAKQ

SEQ ID NO: 80771 - protein, 250 aa, Arabidopsis thaliana
  peptide (1)..(250): Ceres Seq. ID no. 12657089
  misc_feature (1)..(250): Homolog of NCBI NO: 18407336 NR Description: glucose-6-phosphate/phosphate-translocator putative; protein id: At1g61800.1, supported by cDNA:
  misc_feature (1)..(250): Homolog of NCBI NO: 14596173 NR Description: Similar to
  misc_feature (1)..(250): Homolog of NCBI NO: 7484980 NR Description: glucose-6-phosphate/phosphate translocator
  misc_feature (1)..(250): Homolog of NCBI NO: 7488807 NR Description: glucose-6-phosphate/phosphate-translocator
  misc_feature (1)..(249): Homolog of NCBI NO: 18423670 NR Description: glucose-6-phosphate/phosphate translocator; id: At5g54800.1, supported by cDNA: 26107., supported by cDNA: supported by cDNA: gi_7229674 [Arabidopsis thaliana]
  misc_feature (1)..(249): Homolog of NCBI NO: 21554690 NR Description: glucose-6-phosphate/phosphate translocator
  misc_feature (1)..(247): Homolog of NCBI NO: 9758260 NR Description: glucose-6-phosphate/phosphate translocator
  misc_feature (1)..(250): Homolog of NCBI NO: 27752361 NR Description: glucose-6-phosphate/phosphate translocator 2
  misc_feature (1)..(250): Homolog of NCBI NO: 7489258 NR Description: probable
  misc_feature (1)..(249): Homolog of NCBI NO: 7489744 NR Description: glucose-6-phosphate/phosphate-translocator
MMLVSWATRIADAPKTDLEFWKTLFPVAVAHTIGHVAATVSMSKVAVSFTHIIKSGEPAFSVLVSRFFMGETFPLPVYLSLLPIIGGCALAAITELNFNITGFMGAMISNLAFVFRNIFSKKGMKGKSVSGMNYYACLSMMSLVILTPFSIAVEGPQMWAAGWQNAVSQVGPNFVWWVVAQSVFYHLYNQVSYMSLDQISPLTFSIGNTMKRISVIVASIIIFHTPIQPVNALGAAIAIFGTFLYSQAKQ

SEQ ID NO: 80772 - protein, 249 aa, Arabidopsis thaliana
  peptide (1)..(249): Ceres Seq. ID no. 12657090
  misc_feature (1)..(249): Homolog of NCBI NO: 18407336 NR Description: glucose-6-phosphate/phosphate-translocator putative; protein id: At1g61800.1, supported by cDNA:
  misc_feature (1)..(249): Homolog of NCBI NO: 14596173 NR Description: Similar to
  misc_feature (1)..(249): Homolog of NCBI NO: 7484980 NR Description: glucose-6-phosphate/phosphate translocator
  misc_feature (1)..(249): Homolog of NCBI NO: 7488807 NR Description: glucose-6-phosphate/phosphate-translocator
  misc_feature (1)..(248): Homolog of NCBI NO: 18423670 NR Description: glucose-6-phosphate/phosphate translocator; id: At5g54800.1, supported by cDNA: 26107., supported by cDNA: supported by cDNA: gi_7229674 [Arabidopsis thaliana]
  misc_feature (1)..(248): Homolog of NCBI NO: 21554690 NR Description: glucose-6-phosphate/phosphate translocator
  misc_feature (1)..(246): Homolog of NCBI NO: 9758260 NR Description: glucose-6-phosphate/phosphate translocator
  misc_feature (1)..(249): Homolog of NCBI NO: 27752361 NR Description: glucose-6-phosphate/phosphate translocator 2
  misc_feature (1)..(249): Homolog of NCBI NO: 7489258 NR Description: probable
  misc_feature (1)..(248): Homolog of NCBI NO: 7489744 NR Description: glucose-6-phosphate/phosphate-translocator
MLVSWATRIADAPKTDLEFWKTLFPVAVAHTIGHVAATVSMSKVAVSFTHIIKSGEPAFSVLVSRFFMGETFPLPVYLSLLPIIGGCALAAITELNFNITGFMGAMISNLAFVFRNIFSKKGMKGKSVSGMNYYACLSMMSLVILTPFSIAVEGPQMWAAGWQNAVSQVGPNFVWWVVAQSVFYHLYNQVSYMSLDQISPLTFSIGNTMKRISVIVASIIIFHTPIQPVNALGAAIAIFGTFLYSQAKQ

SEQ ID NO: 80773 - DNA, 1563 bp, Arabidopsis thaliana
  misc_feature (1)..(1563): Ceres Seq. ID no. 12657091
  misc_feature: MA Experiment ID: 20000182 Result: Up-regulated in Transcription
  misc_feature: MA Experiment 20000182 PARAMETER Experiment Name: At_2mM_SA_P Parameter: Age (day) Value: 14
  misc_feature: MA Experiment 20000182 PARAMETER Experiment Name: At_2mM_SA_P Parameter: Organism Value: A. thaliana
  misc_feature: MA Experiment 20000182 PARAMETER Experiment Name: At_2mM_SA_P Parameter: Plant Line Value: WS
  misc_feature: MA Experiment 20000182 PARAMETER Experiment Name: At_2mM_SA_P Parameter: Timepoint (hr) Value: 6
  misc_feature: MA Experiment 20000182 PARAMETER Experiment Name: At_2mM_SA_P Parameter: Tissue Value: Aerial
  misc_feature: MA Experiment 20000182 PARAMETER Experiment Name: At_2mM_SA_P Parameter: Treatment Value: 2mM SA vs. No Treatment
  misc_feature: MA Experiment ID: 20000184 Result: Down-regulated in Transcription
  misc_feature: MA Experiment 20000184 PARAMETER Experiment Name: At_Shoots__P Parameter: Age (day) Value: 7
  misc_feature: MA Experiment 20000184 PARAMETER Experiment Name: At_Shoots__P Parameter: Tissue Value: Shoots vs. Whole Plant
  misc_feature: MA Experiment ID: 20000185 Result: Down-regulated in Transcription
  misc_feature: MA Experiment 20000185 PARAMETER Experiment Name: At_Roots__P Parameter: Age (day) Value: 7 vs. 21
  misc_feature: MA Experiment 20000185 PARAMETER Experiment Name: At_Roots__P Parameter: Organism Value: A. thaliana
  misc_feature: MA Experiment 20000185 PARAMETER Experiment Name: At_Roots__P Parameter: Tissue Value: Roots vs. Whole Plant
  misc_feature: MA Experiment ID: 20000227 Result: Down-regulated in Transcription
  misc_feature: MA Experiment 20000227 PARAMETER Experiment Name: At_Root-Tips-vs-Tops_P Parameter: Tissue Value: Root Tips vs. Root Tops
  misc_feature: MA Experiment ID: 20000234 Result: Down-regulated in Transcription
  misc_feature: MA Experiment 20000234 PARAMETER Experiment Name: At_Siliques_P Parameter: Age (day) Value: 21
  misc_feature: MA Experiment 20000234 PARAMETER Experiment Name: At_Siliques_P Parameter: Organism Value: A. thaliana
  misc_feature: MA Experiment 20000234 PARAMETER Experiment Name: At_Siliques_P Parameter: Plant Line Value: WS
  misc_feature: MA Experiment 20000234 PARAMETER Experiment Name: At_Siliques_P Parameter: Tissue Value: Less Than 5mm Siliques vs. Whole Plant
  misc_feature: MA Experiment ID: 20000264 Result: Down-regulated in Transcription
  misc_feature: MA Experiment 20000264 PARAMETER Experiment Name: At_Open_Flower_P Parameter: Age (day) Value: 21
  misc_feature: MA Experiment 20000264 PARAMETER Experiment Name: At_Open_Flower_P Parameter: Plant Line Value: WS
  misc_feature: MA Experiment 20000264 PARAMETER Experiment Name: At_Open_Flower_P Parameter: Tissue Value: Open Flower vs. Whole Plant
  misc_feature: MA Experiment ID: 20000265 Result: Down-regulated in Transcription
  misc_feature: MA Experiment 20000265 PARAMETER Experiment Name: At_Open_Flower_P Parameter: Age (day) Value: 21
  misc_feature: MA Experiment 20000265 PARAMETER Experiment Name: At_Open_Flower_P Parameter: Plant Line Value: WS
  misc_feature: MA Experiment 20000265 PARAMETER Experiment Name: At_Open_Flower_P Parameter: Tissue Value: Closed Flower vs. Whole Plant
  misc_feature: MA Experiment ID: 20000286 Result: Down-regulated in Transcription
  misc_feature: MA Experiment 20000286 PARAMETER Experiment Name: At_Open_Flower_P Parameter: Age (day) Value: 21
  misc_feature: MA Experiment 20000286 PARAMETER Experiment Name: At_Open_Flower_P Parameter: Plant Line Value: WS
  misc_feature: MA Experiment 20000286 PARAMETER Experiment Name: At_Open_Flower_P Parameter: Tissue Value: Half Open vs. Whole Plant
  misc_feature: MA Experiment ID: 20000438 Result: Down-regulated in Transcription
  misc_feature: MA Experiment 20000438 PARAMETER Experiment Name: At_Shoots__P Parameter: Age (day) Value: 14
  misc_feature: MA Experiment 20000438 PARAMETER Experiment Name: At_Shoots__P Parameter: Tissue Value: Shoots vs. Whole Plant
  misc_feature: MA Experiment ID: 20000439 Result: Down-regulated in Transcription
  misc_feature: MA Experiment 20000439 PARAMETER Experiment Name: At_Roots__P Parameter: Age (day) Value: 14 vs. 21
  misc_feature: MA Experiment 20000439 PARAMETER Experiment Name: At_Roots__P Parameter: Organism Value: A. thaliana
  misc_feature: MA Experiment 20000439 PARAMETER Experiment Name: At_Roots__P Parameter: Tissue Value: Roots vs. Whole Plant
  misc_feature: MA Experiment ID: 20000527 Result: Up-regulated in Transcription
  misc_feature: MA Experiment 20000527 PARAMETER Experiment Name: At_10percent_PEG_P Parameter: Age (day) Value: 20
  misc_feature: MA Experiment 20000527 PARAMETER Experiment Name: At_10percent_PEG_P Parameter: Organism Value: A. thaliana
  misc_feature: MA Experiment 20000527 PARAMETER Experiment Name: At_10percent_PEG_P Parameter: Plant Line Value: WS
  misc_feature: MA Experiment 20000527 PARAMETER Experiment Name: At_10percent_PEG_P Parameter: Timepoint (day) Value: 20
  misc_feature: MA Experiment 20000527 PARAMETER Experiment Name: At_10percent_PEG_P Parameter: Tissue Value: Whole Plant
  misc_feature: MA Experiment 20000527 PARAMETER Experiment Name: At_10percent_PEG_P Parameter: Treatment Value: 10percent PEG vs. No Treatment
  misc_feature: MA Experiment ID: 20000573 Result: Up-regulated in Transcription
  misc_feature: MA Experiment 20000573 PARAMETER Experiment Name: At_100uM_ABA_Mutants__P Parameter: Organism Value: A. thaliana
  misc_feature: MA Experiment 20000573 PARAMETER Experiment Name: At_100uM_ABA_Mutants__P Parameter: Plant Line Value: CS22 vs. Ler wt
  misc_feature: MA Experiment 20000573 PARAMETER Experiment Name: At_100uM_ABA_Mutants__P Parameter: Timepoint (hr) Value: N/A
  misc_feature: MA Experiment 20000573 PARAMETER Experiment Name: At_100uM_ABA_Mutants__P Parameter: Tissue Value: Whole Plant
  misc_feature: MA Experiment 20000573 PARAMETER Experiment Name: At_100uM_ABA_Mutants__P Parameter: Treatment Value: None
  misc_feature: MA Experiment ID: 20000574 Result: Up-regulated in Transcription
  misc_feature: MA Experiment 20000574 PARAMETER Experiment Name: At_100uM_ABA_Mutants__P Parameter: Organism Value: A. thaliana
  misc_feature: MA Experiment 20000574 PARAMETER Experiment Name: At_100uM_ABA_Mutants__P Parameter: Plant Line Value: CS23 vs. Ler wt
  misc_feature: MA Experiment 20000574 PARAMETER Experiment Name: At_100uM_ABA_Mutants__P Parameter: Timepoint (hr) Value: N/A
  misc_feature: MA Experiment 20000574 PARAMETER Experiment Name: At_100uM_ABA_Mutants__P Parameter: Tissue Value: Whole Plant
  misc_feature: MA Experiment 20000574 PARAMETER Experiment Name: At_100uM_ABA_Mutants__P Parameter: Treatment Value: None
  misc_feature: MA Experiment ID: 20000794 Result: Down-regulated in Transcription
  misc_feature: MA Experiment 20000794 PARAMETER Experiment Name: At_Petals_P Parameter: Age (day) Value: 23-25 days
  misc_feature: MA Experiment 20000794 PARAMETER Experiment Name: At_Petals_P Parameter: Plant Line Value: WS
  misc_feature: MA Experiment 20000794 PARAMETER Experiment Name: At_Petals_P Parameter: Tissue Value: Petals vs. Whole plant
  misc_feature: MA Experiment ID: 20001247 Result: Up-regulated in Transcription
  misc_feature: MA Experiment 20001247 PARAMETER Experiment Name: At_Far-red-induction_P Parameter: Age (day) Value: 7
  misc_feature: MA Experiment 20001247 PARAMETER Experiment Name: At_Far-red-induction_P Parameter: Light Value: Far-red vs. White
  misc_feature: MA Experiment 20001247 PARAMETER Experiment Name: At_Far-red-induction_P Parameter: Organism Value: A. thaliana
  misc_feature: MA Experiment 20001247 PARAMETER Experiment Name: At_Far-red-induction_P Parameter: Plant Line Value: Columbia
  misc_feature: MA Experiment 20001247 PARAMETER Experiment Name: At_Far-red-induction_P Parameter: Timepoint (hr) Value: 1
  misc_feature: MA Experiment 20001247 PARAMETER Experiment Name: At_Far-red-induction_P Parameter: Tissue Value: Whole Plant
  misc_feature: MA Experiment ID: 20001555 Result: Up-regulated in Transcription
  misc_feature: MA Experiment 20001555 PARAMETER Experiment Name: At_Drought_Soil_Dry_P Parameter: Age (day) Value: 24
  misc_feature: MA Experiment 20001555 PARAMETER Experiment Name: At_Drought_Soil_Dry_P Parameter: Organism Value: A. thaliana
  misc_feature: MA Experiment 20001555 PARAMETER Experiment Name: At_Drought_Soil_Dry_P Parameter: Plant Line Value: WS
  misc_feature: MA Experiment 20001555 PARAMETER Experiment Name: At_Drought_Soil_Dry_P Parameter: Post Timepoint (hr) Value: None
  misc_feature: MA Experiment 20001555 PARAMETER Experiment Name: At_Drought_Soil_Dry_P Parameter: Post-Treatment Value: None
  misc_feature: MA Experiment 20001555 PARAMETER Experiment Name: At_Drought_Soil_Dry_P Parameter: Timepoint (day) Value: 10
  misc_feature: MA Experiment 20001555 PARAMETER Experiment Name: At_Drought_Soil_Dry_P Parameter: Treatment Value: Drought vs. No Drought
  misc_feature: MA Experiment ID: 20001556 Result: Up-regulated in Transcription
  misc_feature: MA Experiment 20001556 PARAMETER Experiment Name: At_Drought_Soil_Dry_P Parameter: Age (day) Value: 26
  misc_feature: MA Experiment 20001556 PARAMETER Experiment Name: At_Drought_Soil_Dry_P Parameter: Organism Value: A. thaliana
  misc_feature: MA Experiment 20001556 PARAMETER Experiment Name: At_Drought_Soil_Dry_P Parameter: Plant Line Value: WS
  misc_feature: MA Experiment 20001556 PARAMETER Experiment Name: At_Drought_Soil_Dry_P Parameter: Post Timepoint (hr) Value: None
  misc_feature: MA Experiment 20001556 PARAMETER Experiment Name: At_Drought_Soil_Dry_P Parameter: Post-Treatment Value: None
  misc_feature: MA Experiment 20001556 PARAMETER Experiment Name: At_Drought_Soil_Dry_P Parameter: Timepoint (day) Value: 12
  misc_feature: MA Experiment 20001556 PARAMETER Experiment Name: At_Drought_Soil_Dry_P Parameter: Treatment Value: Drought vs. No Drought
  misc_feature: MA Experiment ID: 20001558 Result: Up-regulated in Transcription
  misc_feature: MA Experiment 20001558 PARAMETER Experiment Name: At_Drought_Soil_Dry_P Parameter: Age (day) Value: 27
  misc_feature: MA Experiment 20001558 PARAMETER Experiment Name: At_Drought_Soil_Dry_P Parameter: Organism Value: A. thaliana
  misc_feature: MA Experiment 20001558 PARAMETER Experiment Name: At_Drought_Soil_Dry_P Parameter: Plant Line Value: WS
  misc_feature: MA Experiment 20001558 PARAMETER Experiment Name: At_Drought_Soil_Dry_P Parameter: Post Timepoint (hr) Value: 6
  misc_feature: MA Experiment 20001558 PARAMETER Experiment Name: At_Drought_Soil_Dry_P Parameter: Post-Treatment Value: Re-Water vs. No Drought
  misc_feature: MA Experiment 20001558 PARAMETER Experiment Name: At_Drought_Soil_Dry_P Parameter: Timepoint (day) Value: 13
  misc_feature: MA Experiment 20001558 PARAMETER Experiment Name: At_Drought_Soil_Dry_P Parameter: Treatment Value: Drought vs. No Drought
  misc_feature: MA Experiment ID: 20001773 Result: Up-regulated in Transcription
  misc_feature: MA Experiment 20001773 PARAMETER Experiment Name: At_Far-red-enriched-adult_P Parameter: Age (day) Value: 30
  misc_feature: MA Experiment 20001773 PARAMETER Experiment Name: At_Far-red-enriched-adult_P Parameter: Light Value: Far-red enriched vs. White
  misc_feature: MA Experiment 20001773 PARAMETER Experiment Name: At_Far-red-enriched-adult_P Parameter: Organism Value: A. thaliana
  misc_feature: MA Experiment 20001773 PARAMETER Experiment Name: At_Far-red-enriched-adult_P Parameter: Plant Line Value: Columbia
  misc_feature: MA Experiment 20001773 PARAMETER Experiment Name: At_Far-red-enriched-adult_P Parameter: Timepoint (hr) Value: 48
  misc_feature: MA Experiment 20001773 PARAMETER Experiment Name: At_Far-red-enriched-adult_P Parameter: Tissue Value: Aerial
  misc_feature: MA Experiment ID: 20001904 Result: Up-regulated in Transcription
  misc_feature: MA Experiment 20001904 PARAMETER Experiment Name: At_Drought_Reproduction_P Parameter: Age (day) Value: 37
  misc_feature: MA Experiment 20001904 PARAMETER Experiment Name: At_Drought_Reproduction_P Parameter: Organism Value: A. thaliana
  misc_feature: MA Experiment 20001904 PARAMETER Experiment Name: At_Drought_Reproduction_P Parameter: Plant Line Value: WS
  misc_feature: MA Experiment 20001904 PARAMETER Experiment Name: At_Drought_Reproduction_P Parameter: Timepoint (day) Value: 7
  misc_feature: MA Experiment 20001904 PARAMETER Experiment Name: At_Drought_Reproduction_P Parameter: Tissue Value: Rosettes
  misc_feature: MA Experiment 20001904 PARAMETER Experiment Name: At_Drought_Reproduction_P Parameter: Treatment Value: Drought vs. No Drought
  misc_feature: MA Experiment ID: 20001905 Result: Up-regulated in Transcription
  misc_feature: MA Experiment 20001905 PARAMETER Experiment Name: At_Drought_Reproduction_P Parameter: Age (day) Value: 40
  misc_feature: MA Experiment 20001905 PARAMETER Experiment Name: At_Drought_Reproduction_P Parameter: Organism Value: A. thaliana
  misc_feature: MA Experiment 20001905 PARAMETER Experiment Name: At_Drought_Reproduction_P Parameter: Plant Line Value: WS
  misc_feature: MA Experiment 20001905 PARAMETER Experiment Name: At_Drought_Reproduction_P Parameter: Timepoint (day) Value: 10
  misc_feature: MA Experiment 20001905 PARAMETER Experiment Name: At_Drought_Reproduction_P Parameter: Tissue Value: Rosettes
  misc_feature: MA Experiment 20001905 PARAMETER Experiment Name: At_Drought_Reproduction_P Parameter: Treatment Value: Drought vs. No Drought
  misc_feature: MA Experiment ID: 20001910 Result: Up-regulated in Transcription
  misc_feature: MA Experiment 20001910 PARAMETER Experiment Name: At_Drought_Reproduction_P Parameter: Age (day) Value: 37
  misc_feature: MA Experiment 20001910 PARAMETER Experiment Name: At_Drought_Reproduction_P Parameter: Organism Value: A. thaliana
  misc_feature: MA Experiment 20001910 PARAMETER Experiment Name: At_Drought_Reproduction_P Parameter: Plant Line Value: WS
  misc_feature: MA Experiment 20001910 PARAMETER Experiment Name: At_Drought_Reproduction_P Parameter: Timepoint (day) Value: 7
  misc_feature: MA Experiment 20001910 PARAMETER Experiment Name: At_Drought_Reproduction_P Parameter: Tissue Value: Flowers
  misc_feature: MA Experiment 20001910 PARAMETER Experiment Name: At_Drought_Reproduction_P Parameter: Treatment Value: Drought vs. No Drought
  misc_feature: MA Experiment ID: 20001911 Result: Up-regulated in Transcription
  misc_feature: MA Experiment 20001911 PARAMETER Experiment Name: At_Drought_Reproduction_P Parameter: Age (day) Value: 40
  misc_feature: MA Experiment 20001911 PARAMETER Experiment Name: At_Drought_Reproduction_P Parameter: Organism Value: A. thaliana
  misc_feature: MA Experiment 20001911 PARAMETER Experiment Name: At_Drought_Reproduction_P Parameter: Plant Line Value: WS
  misc_feature: MA Experiment 20001911 PARAMETER Experiment Name: At_Drought_Reproduction_P Parameter: Timepoint (day) Value: 10
  misc_feature: MA Experiment 20001911 PARAMETER Experiment Name: At_Drought_Reproduction_P Parameter: Tissue Value: Flowers
  misc_feature: MA Experiment 20001911 PARAMETER Experiment Name: At_Drought_Reproduction_P Parameter: Treatment Value: Drought vs. No Drought
atgaaaaatttaaccagtttcgtaattgttatcttactacaaagcttattgtttcatgtatatggtcgtcatcaaagttcttcgaagaacattttagtagattcatctccatttccttctgatttcctctttggtacagcttcttccgcttaccagtatgaaggtgcgttcttgactgatggaaaaagtttgaacaattgggatgtctttacgcataaaaatcctgggaaaatacttgacaagaacaatgcagatagagctgtggaccaatataatcgatttttggaggacatccaattaatgtcttttcttggagtgaacagttataggttttcaatttcttggtgtagaatcttacctagaggaagatttggagagattaattatttggggataaagtattacaacatatttatcgatgctctcattagtagagggattaaaccatttgtgacgttgaaccatgtcgactatcctcaagaactcgaggaccggtttcaaagttggttaaaccccgagatgcagaaggaatttggttatttagccgatatatgtttcaagcattttggaaaccgagttaaatactggaccacgcttaacgaaccaaatcaacaattaatcttaggctatctaacaggtaaatttccaccctctcgttgctcctcgccatacgggaactgtagccaggggaattcagaaaccgaacctttcatagccgcacataacatgatccttgcacacgcaaaagcggttaacatatacaagaccaaatatcagaaagaacaaaagggaagcattggcattgtggtacaaacatcatggtttgaacccattagtgattccaatgcggataaagaagctgctgagagagctcaatcattttactctaattggattctagatcccgttatatatgggaaatatccaaaagaaatggtagatattcttggaccagccttgccacaattttcgagcaatgaagtgaagaacttagagaagtcgagggcagatttcgttggtattaatcactatacaagttacttcattcaagattgtttgacctctgcttgtaatactggacatggagcttttaaggccgaaggatatgctctcaagttagaccggaaaggcaatgttactataggagaacttaccgatgtaaattggcagcatattgatcccacaggattccacaagatgctgaattatttaaaagataggtacccaaacatgccaatgttcataactgaaaacggttttggagacttgcaaaaacctgaaacaacggataaagaacttctaaatgatacaaaaaggatccaatacatgagtggatacttagaagctttacaagcagcaatgagggatggagcaaatgtgaagggttattttgtgtggtcactattagacaattttgagtggttgttcggatacaaggttcggtttggtctattccatgtggatctaacaactcttaaaaggtcaccgaaacaatcagcttcatggtacaaaaattatatcgaagaacacgtgaatcgaagagatatcgtagataattattaa

SEQ ID NO: 80774 - protein, 520 aa, Arabidopsis thaliana
  peptide (1)..(520): Ceres Seq. ID no. 12657092
  misc_feature (1)..(520): Homolog of NCBI NO: 15220627 NR Description: glycosyl hydrolase family 1; protein id:
  misc_feature (1)..(518): Homolog of NCBI NO: 30696622 NR Description: glycosyl hydrolase family 1 [Arabidopsis thaliana]
  misc_feature (24)..(518): Homolog of NCBI NO: 7435450 NR Description: beta-glucosidase homolog F8K4.3 - Arabidopsis
  misc_feature (146)..(518): Homolog of NCBI NO: 30696625 NR Description: glycosyl hydrolase family 1 [Arabidopsis thaliana]
  misc_feature (7)..(510): Homolog of NCBI NO: 22328863 NR Description: glycosyl hydrolase family 1; protein id:
  misc_feature (6)..(518): Homolog of NCBI NO: 38345324 NR Description: OSJNBa0004N05.21 [Oryza sativa (japonica
  misc_feature (33)..(513): Homolog of NCBI NO: 38345329 NR Description: OSJNBa0004N05.26 [Oryza sativa (japonica
  misc_feature (38)..(507): Homolog of NCBI NO: 38345327 NR Description: OSJNBa0004N05.24 [Oryza sativa (japonica
  misc_feature (9)..(508): Homolog of NCBI NO: 3820531 NR Description: beta-glucosidase [Pinus contorta]
  misc_feature (7)..(455): Homolog of NCBI NO: 7435447 NR Description: beta-glucosidase homolog F17L22.220 - Arabidopsis
MKNLTSFVIVILLQSLLFHVYGRHQSSSKNILVDSSPFPSDFLFGTASSAYQYEGAFLTDGKSLNNWDVFTHKNPGKILDKNNADRAVDQYNRFLEDIQLMSFLGVNSYRFSISWCRILPRGRFGEINYLGIKYYNIFIDALISRGIKPFVTLNHVDYPQELEDRFQSWLNPEMQKEFGYLADICFKHFGNRVKYWTTLNEPNQQLILGYLTGKFPPSRCSSPYGNCSQGNSETEPFIAAHNMILAHAKAVNIYKTKYQKEQKGSIGIVVQTSWFEPISDSNADKEAAERAQSFYSNWILDPVIYGKYPKEMVDILGPALPQFSSNEVKNLEKSRADFVGINHYTSYFIQDCLTSACNTGHGAFKAEGYALKLDRKGNVTIGELTDVNWQHIDPTGFHKMLNYLKDRYPNMPMFITENGFGDLQKPETTDKELLNDTKRIQYMSGYLEALQAAMRDGANVKGYFVWSLLDNFEWLFGYKVRFGLFHVDLTTLKRSPKQSASWYKNYIEEHVNRRDIVDNY

SEQ ID NO: 80775 - protein, 420 aa, Arabidopsis thaliana
  peptide (1)..(420): Ceres Seq. ID no. 12657093
  misc_feature (1)..(420): Homolog of NCBI NO: 15220627 NR Description: glycosyl hydrolase family 1; protein id:
  misc_feature (1)..(418): Homolog of NCBI NO: 30696622 NR Description: glycosyl hydrolase family 1 [Arabidopsis thaliana]
  misc_feature (1)..(418): Homolog of NCBI NO: 7435450 NR Description: beta-glucosidase homolog F8K4.3 - Arabidopsis
  misc_feature (46)..(418): Homolog of NCBI NO: 30696625 NR Description: glycosyl hydrolase family 1 [Arabidopsis thaliana]
  misc_feature (1)..(410): Homolog of NCBI NO: 22328863 NR Description: glycosyl hydrolase family 1; protein id:
  misc_feature (1)..(418): Homolog of NCBI NO: 38345324 NR Description: OSJNBa0004N05.21 [Oryza sativa (japonica
  misc_feature (1)..(413): Homolog of NCBI NO: 38345329 NR Description: OSJNBa0004N05.26 [Oryza sativa (japonica
  misc_feature (1)..(407): Homolog of NCBI NO: 38345327 NR Description: OSJNBa0004N05.24 [Oryza sativa (japonica
  misc_feature (1)..(408): Homolog of NCBI NO: 3820531 NR Description: beta-glucosidase [Pinus contorta]
  misc_feature (1)..(355): Homolog of NCBI NO: 7435447 NR Description: beta-glucosidase homolog F17L22.220 - Arabidopsis
MSFLGVNSYRFSISWCRILPRGRFGEINYLGIKYYNIFIDALISRGIKPFVTLNHVDYPQELEDRFQSWLNPEMQKEFGYLADICFKHFGNRVKYWTTLNEPNQQLILGYLTGKFPPSRCSSPYGNCSQGNSETEPFIAAHNMILAHAKAVNIYKTKYQKEQKGSIGIVVQTSWFEPISDSNADKEAAERAQSFYSNWILDPVIYGKYPKEMVDILGPALPQFSSNEVKNLEKSRADFVGINHYTSYFIQDCLTSACNTGHGAFKAEGYALKLDRKGNVTIGELTDVNWQHIDPTGFHKMLNYLKDRYPNMPMFITENGFGDLQKPETTDKELLNDTKRIQYMSGYLEALQAAMRDGANVKGYFVWSLLDNFEWLFGYKVRFGLFHVDLTTLKRSPKQSASWYKNYIEEHVNRRDIVDNY

SEQ ID NO: 80776 - protein, 347 aa, Arabidopsis thaliana
  peptide (1)..(347): Ceres Seq. ID no. 12657094
  misc_feature (1)..(347): Homolog of NCBI NO: 15220627 NR Description: glycosyl hydrolase family 1; protein id:
  misc_feature (1)..(345): Homolog of NCBI NO: 30696622 NR Description: glycosyl hydrolase family 1 [Arabidopsis thaliana]
  misc_feature (1)..(345): Homolog of NCBI NO: 7435450 NR Description: beta-glucosidase homolog F8K4.3 - Arabidopsis
  misc_feature (1)..(345): Homolog of NCBI NO: 30696625 NR Description: glycosyl hydrolase family 1 [Arabidopsis thaliana]
  misc_feature (1)..(337): Homolog of NCBI NO: 22328863 NR Description: glycosyl hydrolase family 1; protein id:
  misc_feature (1)..(345): Homolog of NCBI NO: 38345324 NR Description: OSJNBa0004N05.21 [Oryza sativa (japonica
  misc_feature (1)..(340): Homolog of NCBI NO: 38345329 NR Description: OSJNBa0004N05.26 [Oryza sativa (japonica
  misc_feature (1)..(334): Homolog of NCBI NO: 38345327 NR Description: OSJNBa0004N05.24 [Oryza sativa (japonica
  misc_feature (1)..(335): Homolog of NCBI NO: 3820531 NR Description: beta-glucosidase [Pinus contorta]
  misc_feature (1)..(282): Homolog of NCBI NO: 7435447 NR Description: beta-glucosidase homolog F17L22.220 - Arabidopsis
MQKEFGYLADICFKHFGNRVKYWTTLNEPNQQLILGYLTGKFPPSRCSSPYGNCSQGNSETEPFIAAHNMILAHAKAVNIYKTKYQKEQKGSIGIVVQTSWFEPISDSNADKEAAERAQSFYSNWILDPVIYGKYPKEMVDILGPALPQFSSNEVKNLEKSRADFVGINHYTSYFIQDCLTSACNTGHGAFKAEGYALKLDRKGNVTIGELTDVNWQHIDPTGFHKMLNYLKDRYPNMPMFITENGFGDLQKPETTDKELLNDTKRIQYMSGYLEALQAAMRDGANVKGYFVWSLLDNFEWLFGYKVRFGLFHVDLTTLKRSPKQSASWYKNYIEEHVNRRDIVDNY

SEQ ID NO: 80777 - DNA, 3651 bp, Arabidopsis thaliana
  misc_feature (1)..(3651): Ceres Seq. ID no. 12657104
  misc_feature: MA Experiment ID: 20000173 Result: Down-regulated in Transcription
  misc_feature: MA Experiment 20000173 PARAMETER Experiment Name: At_42deg_Heat_P Parameter: Age (day) Value: 14
  misc_feature: MA Experiment 20000173 PARAMETER Experiment Name: At_42deg_Heat_P Parameter: Organism Value: A. thaliana
  misc_feature: MA Experiment 20000173 PARAMETER Experiment Name: At_42deg_Heat_P Parameter: Plant Line Value: WS
  misc_feature: MA Experiment 20000173 PARAMETER Experiment Name: At_42deg_Heat_P Parameter: Temperature (deg C) Value: 42 vs. 22
  misc_feature: MA Experiment 20000173 PARAMETER Experiment Name: At_42deg_Heat_P Parameter: Timepoint (hr) Value: 6
  misc_feature: MA Experiment 20000173 PARAMETER Experiment Name: At_42deg_Heat_P Parameter: Tissue Value: Aerial
  misc_feature: MA Experiment ID: 20000234 Result: Up-regulated in Transcription
  misc_feature: MA Experiment 20000234 PARAMETER Experiment Name: At_Siliques_P Parameter: Age (day) Value: 21
  misc_feature: MA Experiment 20000234 PARAMETER Experiment Name: At_Siliques_P Parameter: Organism Value: A. thaliana
  misc_feature: MA Experiment 20000234 PARAMETER Experiment Name: At_Siliques_P Parameter: Plant Line Value: WS
  misc_feature: MA Experiment 20000234 PARAMETER Experiment Name: At_Siliques_P Parameter: Tissue Value: Less Than 5mm Siliques vs. Whole Plant
  misc_feature: MA Experiment ID: 20000286 Result: Up-regulated in Transcription
  misc_feature: MA Experiment 20000286 PARAMETER Experiment Name: At_Open_Flower_P Parameter: Age (day) Value: 21
  misc_feature: MA Experiment 20000286 PARAMETER Experiment Name: At_Open_Flower_P Parameter: Plant Line Value: WS
  misc_feature: MA Experiment 20000286 PARAMETER Experiment Name: At_Open_Flower_P Parameter: Tissue Value: Half Open vs. Whole Plant
  misc_feature: MA Experiment ID: 20001451 Result: Down-regulated in Transcription
  misc_feature: MA Experiment 20001451 PARAMETER Experiment Name: At_Far-red-induction_P Parameter: Age (day) Value: 7
  misc_feature: MA Experiment 20001451 PARAMETER Experiment Name: At_Far-red-induction_P Parameter: Light Value: Far-red vs. White
  misc_feature: MA Experiment 20001451 PARAMETER Experiment Name: At_Far-red-induction_P Parameter: Organism Value: A. thaliana
  misc_feature: MA Experiment 20001451 PARAMETER Experiment Name: At_Far-red-induction_P Parameter: Plant Line Value: Columbia
  misc_feature: MA Experiment 20001451 PARAMETER Experiment Name: At_Far-red-induction_P Parameter: Timepoint (hr) Value: 24
  misc_feature: MA Experiment 20001451 PARAMETER Experiment Name: At_Far-red-induction_P Parameter: Tissue Value: Whole Plant
  misc_feature: MA Experiment ID: 20001911 Result: Down-regulated in Transcription
  misc_feature: MA Experiment 20001911 PARAMETER Experiment Name: At_Drought_Reproduction_P Parameter: Age (day) Value: 40
  misc_feature: MA Experiment 20001911 PARAMETER Experiment Name: At_Drought_Reproduction_P Parameter: Organism Value: A. thaliana
  misc_feature: MA Experiment 20001911 PARAMETER Experiment Name: At_Drought_Reproduction_P Parameter: Plant Line Value: WS
  misc_feature: MA Experiment 20001911 PARAMETER Experiment Name: At_Drought_Reproduction_P Parameter: Timepoint (day) Value: 10
  misc_feature: MA Experiment 20001911 PARAMETER Experiment Name: At_Drought_Reproduction_P Parameter: Tissue Value: Flowers
  misc_feature: MA Experiment 20001911 PARAMETER Experiment Name: At_Drought_Reproduction_P Parameter: Treatment Value: Drought vs. No Drought
atgttgacaaagttcgaaaccaaaagtaacagagttaagggactgagttttcaccctaaacgaccatggattctcgcgagtttgcacagtggcgtgatccagctctgggattatcgtatgggtactttgatcgatagattcgacgaacacgaaggacctgttcgtggtgttcatttccacaattctcagcctctcttcgtctccggaggggatgattacaagattaaagtgtggaactacaaaaaccacaggtgccttttcactcttctagggcatcttgattatatccgcacggttcagttccatcatgagtacccatggattgtgagtgcaagtgatgatcaaactatccgtatatggaactggcaatcacggacttgtgtttctgtattgactggtcacaatcattatgttatgtgtgcttctttccatccgaaagaagacctcgtcgtatcagcttcgttagatcagactgttcgtgtttgggatattggtgctcttaggaagaagactgtatctcctgctgatgatatcatgaggttgactcagatgaatagtgatctttttggtggagttgatgccattgtcaagtacgttcttgaaggtcatgatagaggtgtaaactgggctgcttttcatcccaccctgcctcttattgtctcgggtgcagatgaccgccaagtaaagctgtggcgtatgaatgaaactaaagcttgggaggtggatacattgcgaggccatatgaataacgtttcatctgttatgttccatgcaaaacaggacataattgtatcaaactctgaagataagagcatccgtgtctgggatgctaccaagcgaactggacttcagactttccgtcgtgaacatgatagattctggattcttgcagttcaccctgagatgaatctactagcagcaggacatgacagtggcatgattgtgttcaagcttgagagagaacgtcctgcatttgctttgagtggggattctttgttctatgccaaggatagattcttgcggtactatgaatattcaactcaaagggattcccaagttatccctatacggcgtccgggtactccaagcttgaatcaaagtcctaggactctatcatacagtcccactgaaaatgcagttttgatctgctcagatctggatggtggttcgtatgagttgtacatcataccgaaagatagtgttggcaggagtgacgttgtgcaagatgcaaagagagggacaggtggctctgcagtattcattgcccgtaaccgatttgctgttctcgagaaaagcaccagccaagtgctagtcaagaatctaaagaatgaggtggttaaaaagagtcctctgcctattcccacagatgctatcttttatgctgggactgggaatttgctttgtagatctgaggataaagtagttatctttgacctccagcaaaggcttgttcttggtgagcttcagacaccatttgttaggtacgttgtttggtccagtgatatggagagtgttgctttgctcagcaaacatactatcattatcgcgagcaaaaaacttgttctccagtgcacgcttcatgagacgatacgtgtgaaaagtggagcttgggacgataatggtgtcttcatttacacaactttgaatcatatcaagtactgtcttcctaatggagatagtggaatcatccgaaccctggatgtcccaatctatatcaccaaggtgtctggtaatacaatcttttgcttggatcgggatggcaaaaacaaggctatcaccattaatgcaaccgagtacattttcaagctttcactgctgaggaagagatatgatcatgtcatgagcatgataaagaactctcagctatgtggacaggctatgattgcttacctgcagcagaaaggattccctgaagttgccctccattttgttgaagatgagaggatccgattcaatctggctcttgaaagtggcaacatcagtgtggctgttgcatccgctacacagattaacgagaaagaccactggtatagacttggagtggaggctcttcgccaaggtaattctggaattgttgagtttgcataccagcagacaaagaactttgagaggttatcttttctttatctcattactggaaatttggacaagctttcaaagttgatgaagattgcagaagtgaagaacaacgtaatgggacagtttcacaatgctctctacctaggagatgttaaagagcgtgttaagatactggagaatgctggtcatttgcctctagcttatatcacagcttcggttcatggtttaaatgacattgctgagcgactggcaactgagttaggagacaacgtgccctcattgcctgaaggaaaaactccatcgcttctaatgccaccgacacccatcatgtgtggtggtgattggcctcttcttagagtgatgaaaggaatatttgaaggaggacttgagagtgcagacagaggaggtactgttgatgaagaagatgttgaaggggattggggtgaggaacttgacattaatgttgatggaatggagaacagagatattgaagacattttggcggctgcagaagcaggtgaagaagaaaacgatgaggaaggtggatggggacttgaagacttggtgctcccaccagagcttgacactcctaaagcctctgctaatgcacgttcatctgtttttgtgacacctccccaaggtatgcccgtaagtcagagctggagccagaaatcttctcttgctgctgagcaagccgcagcgggaagcttcgacactgcaatgcgtctgctccacagacagcttggtatcaagaactttacacctttgaaatcgatgtttctagatctgttcaatggcagccatagctatctgcgtgctttttcttcatgtcctgtggttccacttgccattgagcgtggatggagcgagtcttccagtcccaacgtccgtagcccaccagctcttgtttatgatttctctcagctagacgagaagctcaaatccggctacaaagctacaacaactgggaaattcactgaggctctccgtctcttcctttctatcctgcacaccatccctctagtggtagtcgagacaagaagagaagtggatgaggtcaaggaattaatcgttatcgttaaagaatatgtccttggtcttcaaatggagctcaagaggagagagatgaaagatgatccggtgaggcagcaagagctcgctgcttacttcactcactgcaacctccaaacacctcacttacggcttgcgctgcttagtgcaatgggtgtctgctacaaggcaaagaacctcgccactgcttctaatttcgccagaagactgttggaaacaagcccagttgatagccaagccaagatggctagacaagttgtgcaagccgctgaacgtaacatgaccgatgaaacaaagcttaactacgacttcaggaacccttttgtggtatgtggttccacatatgtcccgatctacagaggacagaaagacgtctcatgtccttactgcaccgcccggtttgtaccaaaccaggaaggaaacatctgcacggtctgtgatctagcagtgattggcgcagacgcatctggtttgttatgctctccatctcaagtccggtga

SEQ ID NO: 80778 - protein, 1216 aa, Arabidopsis thaliana
  peptide (1)..(1216): Ceres Seq. ID no. 12657105
  misc_feature (337)..(784): Pfam Name: Coatomer WD associated region Pfam Description: Coatomer WD associated region
  misc_feature (1)..(1211): Homolog of NCBI NO: 39595549 NR Description: Hypothetical protein CBG04223 [Caenorhabditis
  misc_feature (1)..(1208): Homolog of NCBI NO: 40744421 NR Description: hypothetical protein AN3026.2 [Aspergillus
  misc_feature (906)..(1118): Homolog of NCBI NO: 23612149 NR Description: coatomer alpha subunit, putative [Plasmodium
  misc_feature (418)..(606): Homolog of NCBI NO: 23612149 NR Description: coatomer alpha subunit, putative [Plasmodium
  misc_feature (1)..(192): Homolog of NCBI NO: 23612149 NR Description: coatomer alpha subunit, putative [Plasmodium
  misc_feature (183)..(365): Homolog of NCBI NO: 23612149 NR Description: coatomer alpha subunit, putative [Plasmodium
  misc_feature (627)..(803): Homolog of NCBI NO: 23612149 NR Description: coatomer alpha subunit, putative [Plasmodium
  misc_feature (48)..(213): Homolog of NCBI NO: 23612149 NR Description: coatomer alpha subunit, putative [Plasmodium
  misc_feature (201)..(332): Homolog of NCBI NO: 23612149 NR Description: coatomer alpha subunit, putative [Plasmodium
  misc_feature (198)..(798): Homolog of NCBI NO: 12324597 NR Description: putative coatomer protein complex, subunit beta 2
MLTKFETKSNRVKGLSFHPKRPWILASLHSGVIQLWDYRMGTLIDRFDEHEGPVRGVHFHNSQPLFVSGGDDYKIKVWNYKNHRCLFTLLGHLDYIRTVQFHHEYPWIVSASDDQTIRIWNWQSRTCVSVLTGHNHYVMCASFHPKEDLVVSASLDQTVRVWDIGALRKKTVSPADDIMRLTQMNSDLFGGVDAIVKYVLEGHDRGVNWAAFHPTLPLIVSGADDRQVKLWRMNETKAWEVDTLRGHMNNVSSVMFHAKQDIIVSNSEDKSIRVWDATKRTGLQTFRREHDRFWILAVHPEMNLLAAGHDSGMIVFKLERERPAFALSGDSLFYAKDRFLRYYEYSTQRDSQVIPIRRPGTPSLNQSPRTLSYSPTENAVLICSDLDGGSYELYIIPKDSVGRSDVVQDAKRGTGGSAVFIARNRFAVLEKSTSQVLVKNLKNEVVKKSPLPIPTDAIFYAGTGNLLCRSEDKVVIFDLQQRLVLGELQTPFVRYVVWSSDMESVALLSKHTIIIASKKLVLQCTLHETIRVKSGAWDDNGVFIYTTLNHIKYCLPNGDSGIIRTLDVPIYITKVSGNTIFCLDRDGKNKAITINATEYIFKLSLLRKRYDHVMSMIKNSQLCGQAMIAYLQQKGFPEVALHFVEDERIRFNLALESGNISVAVASATQINEKDHWYRLGVEALRQGNSGIVEFAYQQTKNFERLSFLYLITGNLDKLSKLMKIAEVKNNVMGQFHNALYLGDVKERVKILENAGHLPLAYITASVHGLNDIAERLATELGDNVPSLPEGKTPSLLMPPTPIMCGGDWPLLRVMKGIFEGGLESADRGGTVDEEDVEGDWGEELDINVDGMENRDIEDILAAAEAGEEENDEEGGWGLEDLVLPPELDTPKASANARSSVFVTPPQGMPVSQSWSQKSSLAAEQAAAGSFDTAMRLLHRQLGIKNFTPLKSMFLDLFNGSHSYLRAFSSCPVVPLAIERGWSESSSPNVRSPPALVYDFSQLDEKLKSGYKATTTGKFTEALRLFLSILHTIPLVVVETRREVDEVKELIVIVKEYVLGLQMELKRREMKDDPVRQQELAAYFTHCNLQTPHLRLALLSAMGVCYKAKNLATASNFARRLLETSPVDSQAKMARQVVQAAERNMTDETKLNYDFRNPFVVCGSTYVPIYRGQKDVSCPYCTARFVPNQEGNICTVCDLAVIGADASGLLCSPSQVR

SEQ ID NO: 80779 - protein, 1177 aa, Arabidopsis thaliana
  peptide (1)..(1177): Ceres Seq. ID no. 12657106
  misc_feature (298)..(745): Pfam Name: Coatomer WD associated region Pfam Description: Coatomer WD associated region
  misc_feature (1)..(1172): Homolog of NCBI NO: 39595549 NR Description: Hypothetical protein CBG04223 [Caenorhabditis
  misc_feature (1)..(1169): Homolog of NCBI NO: 40744421 NR Description: hypothetical protein AN3026.2 [Aspergillus
  misc_feature (867)..(1079): Homolog of NCBI NO: 23612149 NR Description: coatomer alpha subunit, putative [Plasmodium
  misc_feature (379)..(567): Homolog of NCBI NO: 23612149 NR Description: coatomer alpha subunit, putative [Plasmodium
  misc_feature (1)..(153): Homolog of NCBI NO: 23612149 NR Description: coatomer alpha subunit, putative [Plasmodium
  misc_feature (144)..(326): Homolog of NCBI NO: 23612149 NR Description: coatomer alpha subunit, putative [Plasmodium
  misc_feature (588)..(764): Homolog of NCBI NO: 23612149 NR Description: coatomer alpha subunit, putative [Plasmodium
  misc_feature (9)..(174): Homolog of NCBI NO: 23612149 NR Description: coatomer alpha subunit, putative [Plasmodium
  misc_feature (162)..(293): Homolog of NCBI NO: 23612149 NR Description: coatomer alpha subunit, putative [Plasmodium
  misc_feature (159)..(759): Homolog of NCBI NO: 12324597 NR Description: putative coatomer protein complex, subunit beta 2
MGTLIDRFDEHEGPVRGVHFHNSQPLFVSGGDDYKIKVWNYKNHRCLFTLLGHLDYIRTVQFHHEYPWIVSASDDQTIRIWNWQSRTCVSVLTGHNHYVMCASFHPKEDLVVSASLDQTVRVWDIGALRKKTVSPADDIMRLTQMNSDLFGGVDAIVKYVLEGHDRGVNWAAFHPTLPLIVSGADDRQVKLWRMNETKAWEVDTLRGHMNNVSSVMFHAKQDIIVSNSEDKSIRVWDATKRTGLQTFRREHDRFWILAVHPEMNLLAAGHDSGMIVFKLERERPAFALSGDSLFYAKDRFLRYYEYSTQRDSQVIPIRRPGTPSLNQSPRTLSYSPTENAVLICSDLDGGSYELYIIPKDSVGRSDVVQDAKRGTGGSAVFIARNRFAVLEKSTSQVLVKNLKNEVVKKSPLPIPTDAIFYAGTGNLLCRSEDKVVIFDLQQRLVLGELQTPFVRYVVWSSDMESVALLSKHTIIIASKKLVLQCTLHETIRVKSGAWDDNGVFIYTTLNHIKYCLPNGDSGIIRTLDVPIYITKVSGNTIFCLDRDGKNKAITINATEYIFKLSLLRKRYDHVMSMIKNSQLCGQAMIAYLQQKGFPEVALHFVEDERIRFNLALESGNISVAVASATQINEKDHWYRLGVEALRQGNSGIVEFAYQQTKNFERLSFLYLITGNLDKLSKLMKIAEVKNNVMGQFHNALYLGDVKERVKILENAGHLPLAYITASVHGLNDIAERLATELGDNVPSLPEGKTPSLLMPPTPIMCGGDWPLLRVMKGIFEGGLESADRGGTVDEEDVEGDWGEELDINVDGMENRDIEDILAAAEAGEEENDEEGGWGLEDLVLPPELDTPKASANARSSVFVTPPQGMPVSQSWSQKSSLAAEQAAAGSFDTAMRLLHRQLGIKNFTPLKSMFLDLFNGSHSYLRAFSSCPVVPLAIERGWSESSSPNVRSPPALVYDFSQLDEKLKSGYKATTTGKFTEALRLFLSILHTIPLVVVETRREVDEVKELIVIVKEYVLGLQMELKRREMKDDPVRQQELAAYFTHCNLQTPHLRLALLSAMGVCYKAKNLATASNFARRLLETSPVDSQAKMARQVVQAAERNMTDETKLNYDFRNPFVVCGSTYVPIYRGQKDVSCPYCTARFVPNQEGNICTVCDLAVIGADASGLLCSPSQVR

SEQ ID NO: 80780 - protein, 1078 aa, Arabidopsis thaliana
  peptide (1)..(1078): Ceres Seq. ID no. 12657107
  misc_feature (199)..(646): Pfam Name: Coatomer WD associated region Pfam Description: Coatomer WD associated region
  misc_feature (1)..(1073): Homolog of NCBI NO: 39595549 NR Description: Hypothetical protein CBG04223 [Caenorhabditis
  misc_feature (1)..(1070): Homolog of NCBI NO: 40744421 NR Description: hypothetical protein AN3026.2 [Aspergillus
  misc_feature (768)..(980): Homolog of NCBI NO: 23612149 NR Description: coatomer alpha subunit, putative [Plasmodium
  misc_feature (280)..(468): Homolog of NCBI NO: 23612149 NR Description: coatomer alpha subunit, putative [Plasmodium
  misc_feature (1)..(54): Homolog of NCBI NO: 23612149 NR Description: coatomer alpha subunit, putative [Plasmodium
  misc_feature (45)..(227): Homolog of NCBI NO: 23612149 NR Description: coatomer alpha subunit, putative [Plasmodium
  misc_feature (489)..(665): Homolog of NCBI NO: 23612149 NR Description: coatomer alpha subunit, putative [Plasmodium
  misc_feature (1)..(75): Homolog of NCBI NO: 23612149 NR Description: coatomer alpha subunit, putative [Plasmodium
  misc_feature (63)..(194): Homolog of NCBI NO: 23612149 NR Description: coatomer alpha subunit, putative [Plasmodium
  misc_feature (60)..(660): Homolog of NCBI NO: 12324597 NR Description: putative coatomer protein complex, subunit beta 2
MCASFHPKEDLVVSASLDQTVRVWDIGALRKKTVSPADDIMRLTQMNSDLFGGVDAIVKYVLEGHDRGVNWAAFHPTLPLIVSGADDRQVKLWRMNETKAWEVDTLRGHMNNVSSVMFHAKQDIIVSNSEDKSIRVWDATKRTGLQTFRREHDRFWILAVHPEMNLLAAGHDSGMIVFKLERERPAFALSGDSLFYAKDRFLRYYEYSTQRDSQVIPIRRPGTPSLNQSPRTLSYSPTENAVLICSDLDGGSYELYIIPKDSVGRSDVVQDAKRGTGGSAVFIARNRFAVLEKSTSQVLVKNLKNEVVKKSPLPIPTDAIFYAGTGNLLCRSEDKVVIFDLQQRLVLGELQTPFVRYVVWSSDMESVALLSKHTIIIASKKLVLQCTLHETIRVKSGAWDDNGVFIYTTLNHIKYCLPNGDSGIIRTLDVPIYITKVSGNTIFCLDRDGKNKAITINATEYIFKLSLLRKRYDHVMSMIKNSQLCGQAMIAYLQQKGFPEVALHFVEDERIRFNLALESGNISVAVASATQINEKDHWYRLGVEALRQGNSGIVEFAYQQTKNFERLSFLYLITGNLDKLSKLMKIAEVKNNVMGQFHNALYLGDVKERVKILENAGHLPLAYITASVHGLNDIAERLATELGDNVPSLPEGKTPSLLMPPTPIMCGGDWPLLRVMKGIFEGGLESADRGGTVDEEDVEGDWGEELDINVDGMENRDIEDILAAAEAGEEENDEEGGWGLEDLVLPPELDTPKASANARSSVFVTPPQGMPVSQSWSQKSSLAAEQAAAGSFDTAMRLLHRQLGIKNFTPLKSMFLDLFNGSHSYLRAFSSCPVVPLAIERGWSESSSPNVRSPPALVYDFSQLDEKLKSGYKATTTGKFTEALRLFLSILHTIPLVVVETRREVDEVKELIVIVKEYVLGLQMELKRREMKDDPVRQQELAAYFTHCNLQTPHLRLALLSAMGVCYKAKNLATASNFARRLLETSPVDSQAKMARQVVQAAERNMTDETKLNYDFRNPFVVCGSTYVPIYRGQKDVSCPYCTARFVPNQEGNICTVCDLAVIGADASGLLCSPSQVR

SEQ ID NO: 80781 - DNA, 1314 bp, Arabidopsis thaliana
  misc_feature (1)..(1314): Ceres Seq. ID no. 12657123
  misc_feature: MA Experiment ID: 20000328 Result: Down-regulated in Transcription
  misc_feature: MA Experiment 20000328 PARAMETER Experiment Name: At_42deg_Heat_Sub_P Parameter: Age (day) Value: 14
  misc_feature: MA Experiment 20000328 PARAMETER Experiment Name: At_42deg_Heat_Sub_P Parameter: Organism Value: A. thaliana
  misc_feature: MA Experiment 20000328 PARAMETER Experiment Name: At_42deg_Heat_Sub_P Parameter: Plant Line Value: WS
  misc_feature: MA Experiment 20000328 PARAMETER Experiment Name: At_42deg_Heat_Sub_P Parameter: Temperature (deg C) Value: 42 vs. 22
  misc_feature: MA Experiment 20000328 PARAMETER Experiment Name: At_42deg_Heat_Sub_P Parameter: Timepoint (hr) Value: 6
  misc_feature: MA Experiment 20000328 PARAMETER Experiment Name: At_42deg_Heat_Sub_P Parameter: Tissue Value: Aerial
atgtattctctgattctccatggaagaaagttggtccagttgcagaaatggcgccatttgagggtttcagtgaatctttttcaaaatggatcagctttttccaataccttctcctcctctgctattgctgctgatgtgagctcaagagatggtcgaaaaggtcacaactttacagtttcttacctcgttgattcattaggtttagctacaaaagtcgctgaatcgatctccatgaaagtcagtttcgataacaagggcaaccctgattctgttctgagtcttttgagaagtcatgggttcactgattctcagatctccaacatcattaggactttcccaagattgcttatcctagatgctgagaaatcccttgctcccaagcttcagtttctgcagtccataggtgcttcaagctctgagctcaccgagactgtttctgcagttccgaaaatattggggaagagaaagggcaaatctctcagcagatactatgatttcgtcaaagtcattatagaagcggataagagttccaagttagaaaagttatgtcattctttgccagagggtagtaagcaggagaacaaaatcagaaatttattggtgttgagagaaatgggtgtgcctcagaggttgttattctcattgcttatatccgatgccggagatgtttgtggtaaagaaaaatttaaagaatcactcaagaaggctgttgagattggttttgatccaaccaccgcaacttttgtcaaagctcttaacgttctttacggattaagcgacaaaggaattgaaaataaattcaatgcctgtaaaaggttaggcttggctgtggacgatgtatgggcaatgttcaagaagtggccaaacattctgacaaagtctgagaagaagatagagaactccgttgaaacatttctaggcctaggattcagcagagatgagtttttgatgatggtcaagcgattccctcagtgcattggatattctacagagttgatgaagacgaagactgagtttctggtgacggagatgaattggccactaaaggctgtggcttcaatccctcaggtactcggatacagcctagagaagaggactgtcccaaggtgtaatgttatcaaagttctcatctcaaaaggattgctcgaaagtgaactccctccaatatcctctgttttgacaagtaccagtgaggtgtttttatatatgtatgttaggaaacatgatgacaagcagcttgtggctgagttgatggctatcttcaccggagatcgtgtttcactcaccgatcagaagacacgcctagaacaatga

SEQ ID NO: 80782 - protein, 437 aa, Arabidopsis thaliana
  peptide (1)..(437): Ceres Seq. ID no. 12657124
  misc_feature (92)..(398): Pfam Name: mTERF Pfam Description: mTERF
  misc_feature (1)..(437): Homolog of NCBI NO: 15220713 NR Description: hypothetical protein; protein id: At1g62120.1
  misc_feature (1)..(403): Homolog of NCBI NO: 25404361 NR Description: hypothetical protein F19K23.6 [imported] - thaliana >gi|2160138|gb|AAB60760.1| F19K23.6 gene product
  misc_feature (1)..(421): Homolog of NCBI NO: 15220664 NR Description: hypothetical protein; protein id: At1g61980.1
  misc_feature (1)..(421): Homolog of NCBI NO: 15220662 NR Description: hypothetical protein; protein id: At1g61970.1
  misc_feature (34)..(437): Homolog of NCBI NO: 15220672 NR Description: hypothetical protein; protein id: At1g62010.1
  misc_feature (1)..(427): Homolog of NCBI NO: 15220666 NR Description: hypothetical protein; protein id: At1g61990.1, by cDNA: gi_18087609 [Arabidopsis thaliana]
  misc_feature (1)..(340): Homolog of NCBI NO: 25345734 NR Description: hypothetical protein F19K23.4 [imported] - thaliana >gi|2160136|gb|AAB60758.1| F19K23.4 gene product
  misc_feature (1)..(340): Homolog of NCBI NO: 30696656 NR Description: expressed protein [Arabidopsis thaliana] unknown protein [Arabidopsis thaliana]
  misc_feature (3)..(363): Homolog of NCBI NO: 15220717 NR Description: hypothetical protein; protein id: At1g62150.1 thaliana] >gi|26452931|dbj|BAC43542.1| unknown protein thaliana] >gi|28973555|gb|AAO64102.1| unknown protein
  misc_feature (15)..(340): Homolog of NCBI NO: 25404361 NR Description: hypothetical protein F19K23.6 [imported] - thaliana >gi|2160138|gb|AAB60760.1| F19K23.6 gene product
MYSLILHGRKLVQLQKWRHLRVSVNLFQNGSAFSNTFSSSAIAADVSSRDGRKGHNFTVSYLVDSLGLATKVAESISMKVSFDNKGNPDSVLSLLRSHGFTDSQISNIIRTFPRLLILDAEKSLAPKLQFLQSIGASSSELTETVSAVPKILGKRKGKSLSRYYDFVKVIIEADKSSKLEKLCHSLPEGSKQENKIRNLLVLREMGVPQRLLFSLLISDAGDVCGKEKFKESLKKAVEIGFDPTTATFVKALNVLYGLSDKGIENKFNACKRLGLAVDDVWAMFKKWPNILTKSEKKIENSVETFLGLGFSRDEFLMMVKRFPQCIGYSTELMKTKTEFLVTEMNWPLKAVASIPQVLGYSLEKRTVPRCNVIKVLISKGLLESELPPISSVLTSTSEVFLYMYVRKHDDKQLVAELMAIFTGDRVSLTDQKTRLEQ

SEQ ID NO: 80783 - protein, 360 aa, Arabidopsis thaliana
  peptide (1)..(360): Ceres Seq. ID no. 12657125
  misc_feature (15)..(321): Pfam Name: mTERF Pfam Description: mTERF
  misc_feature (1)..(360): Homolog of NCBI NO: 15220713 NR Description: hypothetical protein; protein id: At1g62120.1
  misc_feature (1)..(326): Homolog of NCBI NO: 25404361 NR Description: hypothetical protein F19K23.6 [imported] - thaliana >gi|2160138|gb|AAB60760.1| F19K23.6 gene product
  misc_feature (1)..(344): Homolog of NCBI NO: 15220664 NR Description: hypothetical protein; protein id: At1g61980.1
  misc_feature (1)..(344): Homolog of NCBI NO: 15220662 NR Description: hypothetical protein; protein id: At1g61970.1
  misc_feature (1)..(360): Homolog of NCBI NO: 15220672 NR Description: hypothetical protein; protein id: At1g62010.1
  misc_feature (1)..(350): Homolog of NCBI NO: 15220666 NR Description: hypothetical protein; protein id: At1g61990.1, by cDNA: gi_18087609 [Arabidopsis thaliana]
  misc_feature (1)..(263): Homolog of NCBI NO: 25345734 NR Description: hypothetical protein F19K23.4 [imported] - thaliana >gi|2160136|gb|AAB60758.1| F19K23.4 gene product
  misc_feature (1)..(263): Homolog of NCBI NO: 30696656 NR Description: expressed protein [Arabidopsis thaliana] unknown protein [Arabidopsis thaliana]
  misc_feature (1)..(286): Homolog of NCBI NO: 15220717 NR Description: hypothetical protein; protein id: At1g62150.1 thaliana] >gi|26452931|dbj|BAC43542.1| unknown protein thaliana] >gi|28973555|gb|AAO64102.1| unknown protein
  misc_feature (1)..(263): Homolog of NCBI NO: 25404361 NR Description: hypothetical protein F19K23.6 [imported] - thaliana >gi|2160138|gb|AAB60760.1| F19K23.6 gene product
MKVSFDNKGNPDSVLSLLRSHGFTDSQISNIIRTFPRLLILDAEKSLAPKLQFLQSIGASSSELTETVSAVPKILGKRKGKSLSRYYDFVKVIIEADKSSKLEKLCHSLPEGSKQENKIRNLLVLREMGVPQRLLFSLLISDAGDVCGKEKFKESLKKAVEIGFDPTTATFVKALNVLYGLSDKGIENKFNACKRLGLAVDDVWAMFKKWPNILTKSEKKIENSVETFLGLGFSRDEFLMMVKRFPQCIGYSTELMKTKTEFLVTEMNWPLKAVASIPQVLGYSLEKRTVPRCNVIKVLISKGLLESELPPISSVLTSTSEVFLYMYVRKHDDKQLVAELMAIFTGDRVSLTDQKTRLEQ

SEQ ID NO: 80784 - protein, 233 aa, Arabidopsis thaliana
  peptide (1)..(233): Ceres Seq. ID no. 12657126
  misc_feature (1)..(194): Pfam Name: mTERF Pfam Description: mTERF
  misc_feature (1)..(233): Homolog of NCBI NO: 15220713 NR Description: hypothetical protein; protein id: At1g62120.1
  misc_feature (1)..(199): Homolog of NCBI NO: 25404361 NR Description: hypothetical protein F19K23.6 [imported] - thaliana >gi|2160138|gb|AAB60760.1| F19K23.6 gene product
  misc_feature (1)..(217): Homolog of NCBI NO: 15220664 NR Description: hypothetical protein; protein id: At1g61980.1
  misc_feature (1)..(217): Homolog of NCBI NO: 15220662 NR Description: hypothetical protein; protein id: At1g61970.1
  misc_feature (1)..(233): Homolog of NCBI NO: 15220672 NR Description: hypothetical protein; protein id: At1g62010.1
  misc_feature (1)..(223): Homolog of NCBI NO: 15220666 NR Description: hypothetical protein; protein id: At1g61990.1, by cDNA: gi_18087609 [Arabidopsis thaliana]
  misc_feature (1)..(136): Homolog of NCBI NO: 25345734 NR Description: hypothetical protein F19K23.4 [imported] - thaliana >gi|2160136|gb|AAB60758.1| F19K23.4 gene product
  misc_feature (1)..(136): Homolog of NCBI NO: 30696656 NR Description: expressed protein [Arabidopsis thaliana] unknown protein [Arabidopsis thaliana]
  misc_feature (1)..(159): Homolog of NCBI NO: 15220717 NR Description: hypothetical protein; protein id: At1g62150.1 thaliana] >gi|26452931|dbj|BAC43542.1| unknown protein thaliana] >gi|28973555|gb|AAO64102.1| unknown protein
  misc_feature (1)..(136): Homolog of NCBI NO: 25404361 NR Description: hypothetical protein F19K23.6 [imported] - thaliana >gi|2160138|gb|AAB60760.1| F19K23.6 gene product
MGVPQRLLFSLLISDAGDVCGKEKFKESLKKAVEIGFDPTTATFVKALNVLYGLSDKGIENKFNACKRLGLAVDDVWAMFKKWPNILTKSEKKIENSVETFLGLGFSRDEFLMMVKRFPQCIGYSTELMKTKTEFLVTEMNWPLKAVASIPQVLGYSLEKRTVPRCNVIKVLISKGLLESELPPISSVLTSTSEVFLYMYVRKHDDKQLVAELMAIFTGDRVSLTDQKTRLEQ

SEQ ID NO: 80785 - DNA, 888 bp, Arabidopsis thaliana
  misc_feature (1)..(888): Ceres Seq. ID no. 12657135
  misc_feature: MA Experiment ID: 20000307 Result: Up-regulated in Transcription
  misc_feature: MA Experiment 20000307 PARAMETER Experiment Name: At_Germinating_Seeds_Sub_P Parameter: Age (hr) Value: 24 vs. 0
  misc_feature: MA Experiment 20000307 PARAMETER Experiment Name: At_Germinating_Seeds_Sub_P Parameter: Organism Value: A. thaliana
  misc_feature: MA Experiment 20000307 PARAMETER Experiment Name: At_Germinating_Seeds_Sub_P Parameter: Plant Line Value: WS
  misc_feature: MA Experiment 20000307 PARAMETER Experiment Name: At_Germinating_Seeds_Sub_P Parameter: Tissue Value: Germinating Seeds
  misc_feature: MA Experiment ID: 20000314 Result: Up-regulated in Transcription
  misc_feature: MA Experiment 20000314 PARAMETER Experiment Name: At_14day_Shoots-Roots_Sub_P Parameter: Age (day) Value: 14
  misc_feature: MA Experiment 20000314 PARAMETER Experiment Name: At_14day_Shoots-Roots_Sub_P Parameter: Organism Value: A. thaliana
  misc_feature: MA Experiment 20000314 PARAMETER Experiment Name: At_14day_Shoots-Roots_Sub_P Parameter: Plant Line Value: WS
  misc_feature: MA Experiment 20000314 PARAMETER Experiment Name: At_14day_Shoots-Roots_Sub_P Parameter: Tissue Value: Roots vs. Whole Plant
  misc_feature: MA Experiment ID: 20000328 Result: Up-regulated in Transcription
  misc_feature: MA Experiment 20000328 PARAMETER Experiment Name: At_42deg_Heat_Sub_P Parameter: Age (day) Value: 14
  misc_feature: MA Experiment 20000328 PARAMETER Experiment Name: At_42deg_Heat_Sub_P Parameter: Organism Value: A. thaliana
  misc_feature: MA Experiment 20000328 PARAMETER Experiment Name: At_42deg_Heat_Sub_P Parameter: Plant Line Value: WS
  misc_feature: MA Experiment 20000328 PARAMETER Experiment Name: At_42deg_Heat_Sub_P Parameter: Temperature (deg C) Value: 42 vs. 22
  misc_feature: MA Experiment 20000328 PARAMETER Experiment Name: At_42deg_Heat_Sub_P Parameter: Timepoint (hr) Value: 6
  misc_feature: MA Experiment 20000328 PARAMETER Experiment Name: At_42deg_Heat_Sub_P Parameter: Tissue Value: Aerial
  misc_feature: MA Experiment ID: 20000348 Result: Down-regulated in Transcription
  misc_feature: MA Experiment 20000348 PARAMETER Experiment Name: At_100uM_ABA_Sub_P Parameter: Age (day) Value: 14
  misc_feature: MA Experiment 20000348 PARAMETER Experiment Name: At_100uM_ABA_Sub_P Parameter: Organism Value: A. thaliana
  misc_feature: MA Experiment 20000348 PARAMETER Experiment Name: At_100uM_ABA_Sub_P Parameter: Plant Line Value: WS
  misc_feature: MA Experiment 20000348 PARAMETER Experiment Name: At_100uM_ABA_Sub_P Parameter: Timepoint (hr) Value: 1
  misc_feature: MA Experiment 20000348 PARAMETER Experiment Name: At_100uM_ABA_Sub_P Parameter: Tissue Value: Aerial
  misc_feature: MA Experiment 20000348 PARAMETER Experiment Name: At_100uM_ABA_Sub_P Parameter: Treatment Value: 100uM ABA vs. No Treatment
atggctgtatcatttcaaaccaagaaccctctaagacccatcaccaacatcccaagaagctatggtccaacgcgtgtacgtgtcacatgctctgttactaccaccaatcctcagcttaatcatgagaaccttgtagttgagaaacgccttgtgaatcctcctctttccaagaacaacgacccgactctgcaatcgacatggactcatcggttatgggttgcagcgggaagtacaaccatatttgcctctttcgctaaatctatcattggagggtttggttctcatctttggctccaaccagctttagcgtgttatgcagggtacgtgtttgctgatctaggctccggtgtttaccactgggccattgataactatggtggtgcatcaacacctatagttggagcccaacttgaagcgtctcagggtcatcacaagtatccctggacaatcacaaaacgtcaattcgccaacaattcatacactatcgctcgagccataacttttatagttctaccactaaaccttgcaattaacaatcctctgtttcatagctttgtgagcacatttgcattttgcattttgttaagccaacaattccatgcttgggctcatggaaccaagagcaagcttccacctctcgtgatggcgttgcaggacatgggactgcttgtctcacggaaagatcacccgggacatcaccaagcaccgtataacagcaactactgtgtagtgagtggggcatggaacaaagttttggacgaaagtaacttatttaaggcattggagatggcgttgtttttccagttcggtgtgagaccaaactcgtggaacgagccaaactctgactggacagaagaaaccgagactaatttctttacaaagatttaa

SEQ ID NO: 80786 - protein, 295 aa, Arabidopsis thaliana
  peptide (1)..(295): Ceres Seq. ID no. 12657136
  misc_feature (1)..(295): Homolog of NCBI NO: 15220724 NR Description: hypothetical protein; protein id: At1g62190.1
  misc_feature (31)..(288): Homolog of NCBI NO: 15236949 NR Description: putative protein; protein id: At4g27030.1
  misc_feature (1)..(280): Homolog of NCBI NO: 15227763 NR Description: unknown protein; protein id: At2g22890.1
  misc_feature (50)..(286): Homolog of NCBI NO: 38637069 NR Description: hypothetical protein [Oryza sativa (japonica
  misc_feature (220)..(288): Homolog of NCBI NO: 14488086 NR Description: AT4g27030/F10M23_370 [Arabidopsis thaliana]
  misc_feature (97)..(273): Homolog of NCBI NO: 13397952 NR Description: hypothetical protein [Myxococcus xanthus]
  misc_feature (67)..(262): Homolog of NCBI NO: 11061657 NR Description: probable ubiquitin-conjugating enzyme variant
  misc_feature (102)..(275): Homolog of NCBI NO: 7208823 NR Description: dJ1185N5.1.1 (ubiquitin-conjugating enzyme E2
  misc_feature (102)..(275): Homolog of NCBI NO: 34860742 NR Description: similar to CG10723-PA [Rattus norvegicus]
  misc_feature (102)..(275): Homolog of NCBI NO: 40806193 NR Description: ubiquitin-conjugating enzyme variant Kua [Homo >gi|10434753|dbj|BAB14364.1| unnamed protein product [Homo
MAVSFQTKNPLRPITNIPRSYGPTRVRVTCSVTTTNPQLNHENLVVEKRLVNPPLSKNNDPTLQSTWTHRLWVAAGSTTIFASFAKSIIGGFGSHLWLQPALACYAGYVFADLGSGVYHWAIDNYGGASTPIVGAQLEASQGHHKYPWTITKRQFANNSYTIARAITFIVLPLNLAINNPLFHSFVSTFAFCILLSQQFHAWAHGTKSKLPPLVMALQDMGLLVSRKDHPGHHQAPYNSNYCVVSGAWNKVLDESNLFKALEMALFFQFGVRPNSWNEPNSDWTEETETNFFTKI

SEQ ID NO: 80787 - DNA, 1038 bp, Arabidopsis thaliana
  misc_feature (1)..(1038): Ceres Seq. ID no. 12657177
  misc_feature: MA Experiment ID: 20000453 Result: Down-regulated in Transcription
  misc_feature: MA Experiment 20000453 PARAMETER Experiment Name: At_100uM_ABA_P Parameter: Age (day) Value: 15
  misc_feature: MA Experiment 20000453 PARAMETER Experiment Name: At_100uM_ABA_P Parameter: Organism Value: A. thaliana
  misc_feature: MA Experiment 20000453 PARAMETER Experiment Name: At_100uM_ABA_P Parameter: Plant Line Value: WS
  misc_feature: MA Experiment 20000453 PARAMETER Experiment Name: At_100uM_ABA_P Parameter: Timepoint (hr) Value: 24
  misc_feature: MA Experiment 20000453 PARAMETER Experiment Name: At_100uM_ABA_P Parameter: Tissue Value: Aerial
  misc_feature: MA Experiment 20000453 PARAMETER Experiment Name: At_100uM_ABA_P Parameter: Treatment Value: 100uM ABA vs. No Treatment
atggagaagaagagatttgacagtatggaatcttggtcgatgatcctcgagtccgagaacgtggagacatgggaagcttctaaaggcgaaagagaggaatggaccgcagatctttcgcagctatttatcggaaacaaatttgcttccggagcacactctagaatatacagagggatctacaaacaaagagccgttgccgtgaagatggtgaggatcccaacacacaaggaagagacaagggctaagcttgaacaacagtttaagtccgaggttgctctgctttctcgtctctttcaccctaacatcgttcagttcattgcggcgtgcaagaaaccgccggtgtactgcattataacagagtacatgtcacaaggaaacctccgaatgtacctaaacaagaaagagccttactcgctttcgatcgagaccgtactaaggctggctctagacatctcaagaggaatggagtatcttcactcgcaaggtgttatccacagagacctaaagtccaacaatttgcttttgaacgacgagatgagagttaaagttgcagactttgggacatcttgtcttgagacgcaatgcagagaggccaagggtaacatgggaacttatagatggatggctccagagatgatcaaggagaagccttataccagaaaagtcgatgtttatagctttggcatcgttctatgggaactcaccaccgcgttgcttccgttccaaggcatgactcctgtgcaagccgcattcgcagtcgctgaaaagaacgaaagaccaccattgccggcgagctgtcaaccagcgctagctcatctaatcaagaggtgttggtcagagaatccgtcgaagcggccagacttctcaaacatagtggcggtgctagagaagtacgacgagtgtgtcaaagaaggactgcctttgacgtcacacgcaagcctaacgaagacaaagaaagctattcttgatcaccttaaaggctgtgtcacatccattagctcaccattttcttcctcctctgttcctgtaaatgcctag

SEQ ID NO: 80788 - protein, 345 aa, Arabidopsis thaliana
  peptide (1)..(345): Ceres Seq. ID no. 12657178
  misc_feature (1)..(345): Homolog of NCBI NO: 7488256 NR Description: protein kinase homolog F24O1.13 - Arabidopsis
  misc_feature (1)..(345): Homolog of NCBI NO: 15220773 NR Description: protein kinase, putative; protein id: At1g62400.1
  misc_feature (115)..(345): Homolog of NCBI NO: 7940280 NR Description: F24O1.13 [Arabidopsis thaliana]
  misc_feature (1)..(104): Homolog of NCBI NO: 7940280 NR Description: F24O1.13 [Arabidopsis thaliana]
  misc_feature (3)..(343): Homolog of NCBI NO: 478809 NR Description: protein kinase 6 (EC 2.7.1.-) - soybean
  misc_feature (2)..(322): Homolog of NCBI NO: 10241603 NR Description: protein kinase (PK) [Fagus sylvatica]
  misc_feature (32)..(305): Homolog of NCBI NO: 34909474 NR Description: putative protein kinase [Oryza sativa (japonica group)] >gi|14209526|dbj|BAB56022.1| putative protein kinase
  misc_feature (12)..(324): Homolog of NCBI NO: 18424175 NR Description: protein kinase 6 - like; protein id: At5g58950.1, by cDNA: gi_18087632, supported by cDNA: gi_20260119 [Arabidopsis
  misc_feature (12)..(324): Homolog of NCBI NO: 18087633 NR Description: AT5g58950/k19m22_150 [Arabidopsis thaliana]
  misc_feature (29)..(258): Homolog of NCBI NO: 34894114 NR Description: putative protein kinase [Oryza sativa (japonica group)] >gi|10945257|dbj|BAB16918.1| putative protein kinase
MEKKRFDSMESWSMILESENVETWEASKGEREEWTADLSQLFIGNKFASGAHSRIYRGIYKQRAVAVKMVRIPTHKEETRAKLEQQFKSEVALLSRLFHPNIVQFIAACKKPPVYCIITEYMSQGNLRMYLNKKEPYSLSIETVLRLALDISRGMEYLHSQGVIHRDLKSNNLLLNDEMRVKVADFGTSCLETQCREAKGNMGTYRWMAPEMIKEKPYTRKVDVYSFGIVLWELTTALLPFQGMTPVQAAFAVAEKNERPPLPASCQPALAHLIKRCWSENPSKRPDFSNIVAVLEKYDECVKEGLPLTSHASLTKTKKAILDHLKGCVTSISSPFSSSSVPVNA

SEQ ID NO: 80789 - protein, 337 aa, Arabidopsis thaliana
  peptide (1)..(337): Ceres Seq. ID no. 12657179
  misc_feature (1)..(337): Homolog of NCBI NO: 7488256 NR Description: protein kinase homolog F24O1.13 - Arabidopsis
  misc_feature (1)..(337): Homolog of NCBI NO: 15220773 NR Description: protein kinase, putative; protein id: At1g62400.1
  misc_feature (107)..(337): Homolog of NCBI NO: 7940280 NR Description: F24O1.13 [Arabidopsis thaliana]
  misc_feature (1)..(96): Homolog of NCBI NO: 7940280 NR Description: F24O1.13 [Arabidopsis thaliana]
  misc_feature (1)..(335): Homolog of NCBI NO: 478809 NR Description: protein kinase 6 (EC 2.7.1.-) - soybean
  misc_feature (1)..(314): Homolog of NCBI NO: 10241603 NR Description: protein kinase (PK) [Fagus sylvatica]
  misc_feature (24)..(297): Homolog of NCBI NO: 34909474 NR Description: putative protein kinase [Oryza sativa (japonica group)] >gi|14209526|dbj|BAB56022.1| putative protein kinase
  misc_feature (4)..(316): Homolog of NCBI NO: 18424175 NR Description: protein kinase 6 - like; protein id: At5g58950.1, by cDNA: gi_18087632, supported by cDNA: gi_20260119 [Arabidopsis
  misc_feature (4)..(316): Homolog of NCBI NO: 18087633 NR Description: AT5g58950/k19m22_150 [Arabidopsis thaliana]
  misc_feature (21)..(250): Homolog of NCBI NO: 34894114 NR Description: putative protein kinase [Oryza sativa (japonica group)] >gi|10945257|dbj|BAB16918.1| putative protein kinase
MESWSMILESENVETWEASKGEREEWTADLSQLFIGNKFASGAHSRIYRGIYKQRAVAVKMVRIPTHKEETRAKLEQQFKSEVALLSRLFHPNIVQFIAACKKPPVYCIITEYMSQGNLRMYLNKKEPYSLSIETVLRLALDISRGMEYLHSQGVIHRDLKSNNLLLNDEMRVKVADFGTSCLETQCREAKGNMGTYRWMAPEMIKEKPYTRKVDVYSFGIVLWELTTALLPFQGMTPVQAAFAVAEKNERPPLPASCQPALAHLIKRCWSENPSKRPDFSNIVAVLEKYDECVKEGLPLTSHASLTKTKKAILDHLKGCVTSISSPFSSSSVPVNA

SEQ ID NO: 80790 - protein, 332 aa, Arabidopsis thaliana
  peptide (1)..(332): Ceres Seq. ID no. 12657180
  misc_feature (1)..(332): Homolog of NCBI NO: 7488256 NR Description: protein kinase homolog F24O1.13 - Arabidopsis
  misc_feature (1)..(332): Homolog of NCBI NO: 15220773 NR Description: protein kinase, putative; protein id: At1g62400.1
  misc_feature (102)..(332): Homolog of NCBI NO: 7940280 NR Description: F24O1.13 [Arabidopsis thaliana]
  misc_feature (1)..(91): Homolog of NCBI NO: 7940280 NR Description: F24O1.13 [Arabidopsis thaliana]
  misc_feature (1)..(330): Homolog of NCBI NO: 478809 NR Description: protein kinase 6 (EC 2.7.1.-) - soybean
  misc_feature (1)..(309): Homolog of NCBI NO: 10241603 NR Description: protein kinase (PK) [Fagus sylvatica]
  misc_feature (19)..(292): Homolog of NCBI NO: 34909474 NR Description: putative protein kinase [Oryza sativa (japonica group)] >gi|14209526|dbj|BAB56022.1| putative protein kinase
  misc_feature (1)..(311): Homolog of NCBI NO: 18424175 NR Description: protein kinase 6 - like; protein id: At5g58950.1, by cDNA: gi_18087632, supported by cDNA: gi_20260119 [Arabidopsis
  misc_feature (1)..(311): Homolog of NCBI NO: 18087633 NR Description: AT5g58950/k19m22_150 [Arabidopsis thaliana]
  misc_feature (16)..(245): Homolog of NCBI NO: 34894114 NR Description: putative protein kinase [Oryza sativa (japonica group)] >gi|10945257|dbj|BAB16918.1| putative protein kinase
MILESENVETWEASKGEREEWTADLSQLFIGNKFASGAHSRIYRGIYKQRAVAVKMVRIPTHKEETRAKLEQQFKSEVALLSRLFHPNIVQFIAACKKPPVYCIITEYMSQGNLRMYLNKKEPYSLSIETVLRLALDISRGMEYLHSQGVIHRDLKSNNLLLNDEMRVKVADFGTSCLETQCREAKGNMGTYRWMAPEMIKEKPYTRKVDVYSFGIVLWELTTALLPFQGMTPVQAAFAVAEKNERPPLPASCQPALAHLIKRCWSENPSKRPDFSNIVAVLEKYDECVKEGLPLTSHASLTKTKKAILDHLKGCVTSISSPFSSSSVPVNA

SEQ ID NO: 80791 - DNA, 450 bp, Arabidopsis thaliana
  misc_feature (1)..(450): Ceres Seq. ID no. 12657189
  misc_feature: MA Experiment ID: 20000314 Result: Up-regulated in Transcription
  misc_feature: MA Experiment 20000314 PARAMETER Experiment Name: At_14day_Shoots-Roots_Sub_P Parameter: Age (day) Value: 14
  misc_feature: MA Experiment 20000314 PARAMETER Experiment Name: At_14day_Shoots-Roots_Sub_P Parameter: Organism Value: A. thaliana
  misc_feature: MA Experiment 20000314 PARAMETER Experiment Name: At_14day_Shoots-Roots_Sub_P Parameter: Plant Line Value: WS
  misc_feature: MA Experiment 20000314 PARAMETER Experiment Name: At_14day_Shoots-Roots_Sub_P Parameter: Tissue Value: Roots vs. Whole Plant
  misc_feature: MA Experiment ID: 20000315 Result: Up-regulated in Transcription
  misc_feature: MA Experiment 20000315 PARAMETER Experiment Name: At_14day_Shoots-Roots_Sub_P Parameter: Age (day) Value: 14
  misc_feature: MA Experiment 20000315 PARAMETER Experiment Name: At_14day_Shoots-Roots_Sub_P Parameter: Organism Value: A. thaliana
  misc_feature: MA Experiment 20000315 PARAMETER Experiment Name: At_14day_Shoots-Roots_Sub_P Parameter: Plant Line Value: WS
  misc_feature: MA Experiment 20000315 PARAMETER Experiment Name: At_14day_Shoots-Roots_Sub_P Parameter: Tissue Value: Shoots vs. Whole Plant
  misc_feature: MA Experiment ID: 20000349 Result: Up-regulated in Transcription
  misc_feature: MA Experiment 20000349 PARAMETER Experiment Name: At_100uM_ABA_Sub_P Parameter: Age (day) Value: 14
  misc_feature: MA Experiment 20000349 PARAMETER Experiment Name: At_100uM_ABA_Sub_P Parameter: Organism Value: A. thaliana
  misc_feature: MA Experiment 20000349 PARAMETER Experiment Name: At_100uM_ABA_Sub_P Parameter: Plant Line Value: WS
  misc_feature: MA Experiment 20000349 PARAMETER Experiment Name: At_100uM_ABA_Sub_P Parameter: Timepoint (hr) Value: 6
  misc_feature: MA Experiment 20000349 PARAMETER Experiment Name: At_100uM_ABA_Sub_P Parameter: Tissue Value: Aerial
  misc_feature: MA Experiment 20000349 PARAMETER Experiment Name: At_100uM_ABA_Sub_P Parameter: Treatment Value: 100uM ABA vs. No Treatment
atggcttcaagaaccacaaaatctttagctcttttcttgatcctcaacttccttttcttcacaacaatatccgcctgcggtaactgcggttgcccttctcccaagccaaaacataaacctagcccctctcccaagccaaaacctaaccctaaacccaagccaacaccacaccctagtcctagcccggcaatagccaaatgccctagagacgcccttaagctaggagtttgcgccaacgtactcaacggcctactaaacgtaacccttggcaagccaccggtcgagccatgttgcaccctcatccaaggactcgctgatcttgaggctgcagcttgtctttgcactgcgctcaaggctaacatcctcggtatcaacctgaatatcccactctctctcagtcttcttctcaatgtttgcagcaaaaaagttcctcgtggcttccaatgctaa

SEQ ID NO: 80792 - protein, 149 aa, Arabidopsis thaliana
  peptide (1)..(149): Ceres Seq. ID no. 12657190
  misc_feature (67)..(149): Pfam Name: Protease inhibitor/seed storage/LTP family Pfam Description: Protease inhibitor/seed storage/LTP family
  misc_feature (1)..(149): Homolog of NCBI NO: 15221484 NR Description: similar to 14KD proline-rich protein DC2.15 (sp|P14009); similar to ESTs emb|Z17709 and emb|Z47685; protein
  misc_feature (1)..(149): Homolog of NCBI NO: 629597 NR Description: proline-rich protein - rape
  misc_feature (1)..(149): Homolog of NCBI NO: 7484770 NR Description: extensin like protein - black poplar extensin like protein [Populus nigra] >gi|1199774|dbj|BAA11855.1|
  misc_feature (50)..(149): Homolog of NCBI NO: 10798758 NR Description: P-rich protein Nt-SubC29 [Nicotiana tabacum]
  misc_feature (1)..(44): Homolog of NCBI NO: 10798758 NR Description: P-rich protein Nt-SubC29 [Nicotiana tabacum]
  misc_feature (6)..(149): Homolog of NCBI NO: 15221201 NR Description: pEARLI 1-like protein; protein id: At1g12090.1, by cDNA: 5712., supported by cDNA: gi_16648817, supported by
  misc_feature (1)..(149): Homolog of NCBI NO: 4103618 NR Description: HyPRP [Fragaria x ananassa]
  misc_feature (6)..(148): Homolog of NCBI NO: 13561927 NR Description: extensin-like protein [Brassica napus]
  misc_feature (1)..(144): Homolog of NCBI NO: 21360370 NR Description: extensin-like protein [Citrus junos]
  misc_feature (1)..(149): Homolog of NCBI NO: 4454097 NR Description: hybrid proline-rich protein [Catharanthus roseus]
MASRTTKSLALFLILNFLFFTTISACGNCGCPSPKPKHKPSPSPKPKPNPKPKPTPHPSPSPAIAKCPRDALKLGVCANVLNGLLNVTLGKPPVEPCCTLIQGLADLEAAACLCTALKANILGINLNIPLSLSLLLNVCSKKVPRGFQC

SEQ ID NO: 80793 - DNA, 1643 bp, Arabidopsis thaliana
  misc_feature (1)..(1643): Ceres Seq. ID no. 12657219
  misc_feature: MA Experiment ID: 20000180 Result: Down-regulated in Transcription
  misc_feature: MA Experiment 20000180 PARAMETER Experiment Name: At_Germinating_Seeds_P Parameter: Age (hr) Value: 24 vs. 0
  misc_feature: MA Experiment 20000180 PARAMETER Experiment Name: At_Germinating_Seeds_P Parameter: Tissue Value: Germinating Seeds
  misc_feature: MA Experiment ID: 20000184 Result: Up-regulated in Transcription
  misc_feature: MA Experiment 20000184 PARAMETER Experiment Name: At_Shoots__P Parameter: Age (day) Value: 7
  misc_feature: MA Experiment 20000184 PARAMETER Experiment Name: At_Shoots__P Parameter: Tissue Value: Shoots vs. Whole Plant
  misc_feature: MA Experiment ID: 20000185 Result: Up-regulated in Transcription
  misc_feature: MA Experiment 20000185 PARAMETER Experiment Name: At_Roots__P Parameter: Age (day) Value: 7 vs. 21
  misc_feature: MA Experiment 20000185 PARAMETER Experiment Name: At_Roots__P Parameter: Organism Value: A. thaliana
  misc_feature: MA Experiment 20000185 PARAMETER Experiment Name: At_Roots__P Parameter: Tissue Value: Roots vs. Whole Plant
  misc_feature: MA Experiment ID: 20000264 Result: Up-regulated in Transcription
  misc_feature: MA Experiment 20000264 PARAMETER Experiment Name: At_Open_Flower_P Parameter: Age (day) Value: 21
  misc_feature: MA Experiment 20000264 PARAMETER Experiment Name: At_Open_Flower_P Parameter: Plant Line Value: WS
  misc_feature: MA Experiment 20000264 PARAMETER Experiment Name: At_Open_Flower_P Parameter: Tissue Value: Open Flower vs. Whole Plant
  misc_feature: MA Experiment ID: 20000286 Result: Up-regulated in Transcription
  misc_feature: MA Experiment 20000286 PARAMETER Experiment Name: At_Open_Flower_P Parameter: Age (day) Value: 21
  misc_feature: MA Experiment 20000286 PARAMETER Experiment Name: At_Open_Flower_P Parameter: Plant Line Value: WS
  misc_feature: MA Experiment 20000286 PARAMETER Experiment Name: At_Open_Flower_P Parameter: Tissue Value: Half Open vs. Whole Plant
  misc_feature: MA Experiment ID: 20000308 Result: Up-regulated in Transcription
  misc_feature: MA Experiment 20000308 PARAMETER Experiment Name: At_100mM_NaCl__P Parameter: Age (day) Value: 17
  misc_feature: MA Experiment 20000308 PARAMETER Experiment Name: At_100mM_NaCl__P Parameter: Organism Value: A. thaliana
  misc_feature: MA Experiment 20000308 PARAMETER Experiment Name: At_100mM_NaCl__P Parameter: Plant Line Value: WS
  misc_feature: MA Experiment 20000308 PARAMETER Experiment Name: At_100mM_NaCl__P Parameter: Timepoint (hr) Value: 72
  misc_feature: MA Experiment 20000308 PARAMETER Experiment Name: At_100mM_NaCl__P Parameter: Tissue Value: Whole Plant
  misc_feature: MA Experiment 20000308 PARAMETER Experiment Name: At_100mM_NaCl__P Parameter: Treatment Value: 100mM NaCl vs. No Treatment
  misc_feature: MA Experiment ID: 20000436 Result: Up-regulated in Transcription
  misc_feature: MA Experiment 20000436 PARAMETER Experiment Name: At_Drought_P Parameter: Age (day) Value: 7
  misc_feature: MA Experiment 20000436 PARAMETER Experiment Name: At_Drought_P Parameter: Organism Value: A. thaliana
  misc_feature: MA Experiment 20000436 PARAMETER Experiment Name: At_Drought_P Parameter: Plant Line Value: WS
  misc_feature: MA Experiment 20000436 PARAMETER Experiment Name: At_Drought_P Parameter: Timepoint (hr) Value: 12
  misc_feature: MA Experiment 20000436 PARAMETER Experiment Name: At_Drought_P Parameter: Tissue Value: Whole Plant
  misc_feature: MA Experiment 20000436 PARAMETER Experiment Name: At_Drought_P Parameter: Treatment Value: Drought vs. No Drought
  misc_feature: MA Experiment ID: 20000437 Result: Up-regulated in Transcription
  misc_feature: MA Experiment 20000437 PARAMETER Experiment Name: At_Drought_P Parameter: Age (day) Value: 8
  misc_feature: MA Experiment 20000437 PARAMETER Experiment Name: At_Drought_P Parameter: Organism Value: A. thaliana
  misc_feature: MA Experiment 20000437 PARAMETER Experiment Name: At_Drought_P Parameter: Plant Line Value: WS
  misc_feature: MA Experiment 20000437 PARAMETER Experiment Name: At_Drought_P Parameter: Timepoint (hr) Value: 24
  misc_feature: MA Experiment 20000437 PARAMETER Experiment Name: At_Drought_P Parameter: Tissue Value: Whole Plant
  misc_feature: MA Experiment 20000437 PARAMETER Experiment Name: At_Drought_P Parameter: Treatment Value: Drought vs. No Drought
  misc_feature: MA Experiment ID: 20000438 Result: Up-regulated in Transcription
  misc_feature: MA Experiment 20000438 PARAMETER Experiment Name: At_Shoots__P Parameter: Age (day) Value: 14
  misc_feature: MA Experiment 20000438 PARAMETER Experiment Name: At_Shoots__P Parameter: Tissue Value: Shoots vs. Whole Plant
  misc_feature: MA Experiment ID: 20000439 Result: Up-regulated in Transcription
  misc_feature: MA Experiment 20000439 PARAMETER Experiment Name: At_Roots__P Parameter: Age (day) Value: 14 vs. 21
  misc_feature: MA Experiment 20000439 PARAMETER Experiment Name: At_Roots__P Parameter: Organism Value: A. thaliana
  misc_feature: MA Experiment 20000439 PARAMETER Experiment Name: At_Roots__P Parameter: Tissue Value: Roots vs. Whole Plant
  misc_feature: MA Experiment ID: 20000451 Result: Up-regulated in Transcription
  misc_feature: MA Experiment 20000451 PARAMETER Experiment Name: At_CS6879_Shoots-Roots_P Parameter: Age (day) Value: 14
  misc_feature: MA Experiment 20000451 PARAMETER Experiment Name: At_CS6879_Shoots-Roots_P Parameter: Organism Value: A. thaliana
  misc_feature: MA Experiment 20000451 PARAMETER Experiment Name: At_CS6879_Shoots-Roots_P Parameter: Plant Line Value: CS6879 vs. WS
  misc_feature: MA Experiment 20000451 PARAMETER Experiment Name: At_CS6879_Shoots-Roots_P Parameter: Tissue Value: Roots
  misc_feature: MA Experiment ID: 20000456 Result: Up-regulated in Transcription
  misc_feature: MA Experiment 20000456 PARAMETER Experiment Name: At_100uM_BA_P Parameter: Age (day) Value: 14
  misc_feature: MA Experiment 20000456 PARAMETER Experiment Name: At_100uM_BA_P Parameter: Organism Value: A. thaliana
  misc_feature: MA Experiment 20000456 PARAMETER Experiment Name: At_100uM_BA_P Parameter: Plant Line Value: WS
  misc_feature: MA Experiment 20000456 PARAMETER Experiment Name: At_100uM_BA_P Parameter: Timepoint (hr) Value: 6
  misc_feature: MA Experiment 20000456 PARAMETER Experiment Name: At_100uM_BA_P Parameter: Tissue Value: Aerial
  misc_feature: MA Experiment 20000456 PARAMETER Experiment Name: At_100uM_BA_P Parameter: Treatment Value: 100uM BA vs. No Treatment
  misc_feature: MA Experiment ID: 20000794 Result: Up-regulated in Transcription
  misc_feature: MA Experiment 20000794 PARAMETER Experiment Name: At_Petals_P Parameter: Age (day) Value: 23-25 days
  misc_feature: MA Experiment 20000794 PARAMETER Experiment Name: At_Petals_P Parameter: Plant Line Value: WS
  misc_feature: MA Experiment 20000794 PARAMETER Experiment Name: At_Petals_P Parameter: Tissue Value: Petals vs. Whole plant
  misc_feature: MA Experiment ID: 20001248 Result: Down-regulated in Transcription
  misc_feature: MA Experiment 20001248 PARAMETER Experiment Name: At_Far-red-induction_P Parameter: Age (day) Value: 7
  misc_feature: MA Experiment 20001248 PARAMETER Experiment Name: At_Far-red-induction_P Parameter: Light Value: Far-red vs. White
  misc_feature: MA Experiment 20001248 PARAMETER Experiment Name: At_Far-red-induction_P Parameter: Organism Value: A. thaliana
  misc_feature: MA Experiment 20001248 PARAMETER Experiment Name: At_Far-red-induction_P Parameter: Plant Line Value: Columbia
  misc_feature: MA Experiment 20001248 PARAMETER Experiment Name: At_Far-red-induction_P Parameter: Timepoint (hr) Value: 4
  misc_feature: MA Experiment 20001248 PARAMETER Experiment Name: At_Far-red-induction_P Parameter: Tissue Value: Whole Plant
  misc_feature: MA Experiment ID: 20001554 Result: Up-regulated in Transcription
  misc_feature: MA Experiment 20001554 PARAMETER Experiment Name: At_Drought_Soil_Dry_P Parameter: Age (day) Value: 21
  misc_feature: MA Experiment 20001554 PARAMETER Experiment Name: At_Drought_Soil_Dry_P Parameter: Organism Value: A. thaliana
  misc_feature: MA Experiment 20001554 PARAMETER Experiment Name: At_Drought_Soil_Dry_P Parameter: Plant Line Value: WS
  misc_feature: MA Experiment 20001554 PARAMETER Experiment Name: At_Drought_Soil_Dry_P Parameter: Post Timepoint (hr) Value: None
  misc_feature: MA Experiment 20001554 PARAMETER Experiment Name: At_Drought_Soil_Dry_P Parameter: Post-Treatment Value: None
  misc_feature: MA Experiment 20001554 PARAMETER Experiment Name: At_Drought_Soil_Dry_P Parameter: Timepoint (day) Value: 7
  misc_feature: MA Experiment 20001554 PARAMETER Experiment Name: At_Drought_Soil_Dry_P Parameter: Treatment Value: Drought vs. No Drought
  misc_feature: MA Experiment ID: 20001555 Result: Up-regulated in Transcription
  misc_feature: MA Experiment 20001555 PARAMETER Experiment Name: At_Drought_Soil_Dry_P Parameter: Age (day) Value: 24
  misc_feature: MA Experiment 20001555 PARAMETER Experiment Name: At_Drought_Soil_Dry_P Parameter: Organism Value: A. thaliana
  misc_feature: MA Experiment 20001555 PARAMETER Experiment Name: At_Drought_Soil_Dry_P Parameter: Plant Line Value: WS
  misc_feature: MA Experiment 20001555 PARAMETER Experiment Name: At_Drought_Soil_Dry_P Parameter: Post Timepoint (hr) Value: None
  misc_feature: MA Experiment 20001555 PARAMETER Experiment Name: At_Drought_Soil_Dry_P Parameter: Post-Treatment Value: None
  misc_feature: MA Experiment 20001555 PARAMETER Experiment Name: At_Drought_Soil_Dry_P Parameter: Timepoint (day) Value: 10
  misc_feature: MA Experiment 20001555 PARAMETER Experiment Name: At_Drought_Soil_Dry_P Parameter: Treatment Value: Drought vs. No Drought
  misc_feature: MA Experiment ID: 20001556 Result: Up-regulated in Transcription
  misc_feature: MA Experiment 20001556 PARAMETER Experiment Name: At_Drought_Soil_Dry_P Parameter: Age (day) Value: 26
  misc_feature: MA Experiment 20001556 PARAMETER Experiment Name: At_Drought_Soil_Dry_P Parameter: Organism Value: A. thaliana
  misc_feature: MA Experiment 20001556 PARAMETER Experiment Name: At_Drought_Soil_Dry_P Parameter: Plant Line Value: WS
  misc_feature: MA Experiment 20001556 PARAMETER Experiment Name: At_Drought_Soil_Dry_P Parameter: Post Timepoint (hr) Value: None
  misc_feature: MA Experiment 20001556 PARAMETER Experiment Name: At_Drought_Soil_Dry_P Parameter: Post-Treatment Value: None
  misc_feature: MA Experiment 20001556 PARAMETER Experiment Name: At_Drought_Soil_Dry_P Parameter: Timepoint (day) Value: 12
  misc_feature: MA Experiment 20001556 PARAMETER Experiment Name: At_Drought_Soil_Dry_P Parameter: Treatment Value: Drought vs. No Drought
  misc_feature: MA Experiment ID: 20001557 Result: Up-regulated in Transcription
  misc_feature: MA Experiment 20001557 PARAMETER Experiment Name: At_Drought_Soil_Dry_P Parameter: Age (day) Value: 27
  misc_feature: MA Experiment 20001557 PARAMETER Experiment Name: At_Drought_Soil_Dry_P Parameter: Organism Value: A. thaliana
  misc_feature: MA Experiment 20001557 PARAMETER Experiment Name: At_Drought_Soil_Dry_P Parameter: Plant Line Value: WS
  misc_feature: MA Experiment 20001557 PARAMETER Experiment Name: At_Drought_Soil_Dry_P Parameter: Post Timepoint (hr) Value: 3
  misc_feature: MA Experiment 20001557 PARAMETER Experiment Name: At_Drought_Soil_Dry_P Parameter: Post-Treatment Value: Re-Water vs. No Drought
  misc_feature: MA Experiment 20001557 PARAMETER Experiment Name: At_Drought_Soil_Dry_P Parameter: Timepoint (day) Value: 13
  misc_feature: MA Experiment 20001557 PARAMETER Experiment Name: At_Drought_Soil_Dry_P Parameter: Treatment Value: Drought vs. No Drought
  misc_feature: MA Experiment ID: 20001771 Result: Up-regulated in Transcription
  misc_feature: MA Experiment 20001771 PARAMETER Experiment Name: At_Far-red-enriched-adult_P Parameter: Age (day) Value: 28
  misc_feature: MA Experiment 20001771 PARAMETER Experiment Name: At_Far-red-enriched-adult_P Parameter: Light Value: Far-red enriched vs. White
  misc_feature: MA Experiment 20001771 PARAMETER Experiment Name: At_Far-red-enriched-adult_P Parameter: Organism Value: A. thaliana
  misc_feature: MA Experiment 20001771 PARAMETER Experiment Name: At_Far-red-enriched-adult_P Parameter: Plant Line Value: Columbia
  misc_feature: MA Experiment 20001771 PARAMETER Experiment Name: At_Far-red-enriched-adult_P Parameter: Timepoint (hr) Value: 16
  misc_feature: MA Experiment 20001771 PARAMETER Experiment Name: At_Far-red-enriched-adult_P Parameter: Tissue Value: Aerial
  misc_feature: MA Experiment ID: 20001904 Result: Up-regulated in Transcription
  misc_feature: MA Experiment 20001904 PARAMETER Experiment Name: At_Drought_Reproduction_P Parameter: Age (day) Value: 37
  misc_feature: MA Experiment 20001904 PARAMETER Experiment Name: At_Drought_Reproduction_P Parameter: Organism Value: A. thaliana
  misc_feature: MA Experiment 20001904 PARAMETER Experiment Name: At_Drought_Reproduction_P Parameter: Plant Line Value: WS
  misc_feature: MA Experiment 20001904 PARAMETER Experiment Name: At_Drought_Reproduction_P Parameter: Timepoint (day) Value: 7
  misc_feature: MA Experiment 20001904 PARAMETER Experiment Name: At_Drought_Reproduction_P Parameter: Tissue Value: Rosettes
  misc_feature: MA Experiment 20001904 PARAMETER Experiment Name: At_Drought_Reproduction_P Parameter: Treatment Value: Drought vs. No Drought
  misc_feature: MA Experiment ID: 20001905 Result: Up-regulated in Transcription
  misc_feature: MA Experiment 20001905 PARAMETER Experiment Name: At_Drought_Reproduction_P Parameter: Age (day) Value: 40
  misc_feature: MA Experiment 20001905 PARAMETER Experiment Name: At_Drought_Reproduction_P Parameter: Organism Value: A. thaliana
  misc_feature: MA Experiment 20001905 PARAMETER Experiment Name: At_Drought_Reproduction_P Parameter: Plant Line Value: WS
  misc_feature: MA Experiment 20001905 PARAMETER Experiment Name: At_Drought_Reproduction_P Parameter: Timepoint (day) Value: 10
  misc_feature: MA Experiment 20001905 PARAMETER Experiment Name: At_Drought_Reproduction_P Parameter: Tissue Value: Rosettes
  misc_feature: MA Experiment 20001905 PARAMETER Experiment Name: At_Drought_Reproduction_P Parameter: Treatment Value: Drought vs. No Drought
  misc_feature: MA Experiment ID: 20001906 Result: Up-regulated in Transcription
  misc_feature: MA Experiment 20001906 PARAMETER Experiment Name: At_Drought_Reproduction_P Parameter: Age (day) Value: 35
  misc_feature: MA Experiment 20001906 PARAMETER Experiment Name: At_Drought_Reproduction_P Parameter: Organism Value: A. thaliana
  misc_feature: MA Experiment 20001906 PARAMETER Experiment Name: At_Drought_Reproduction_P Parameter: Plant Line Value: WS
  misc_feature: MA Experiment 20001906 PARAMETER Experiment Name: At_Drought_Reproduction_P Parameter: Timepoint (day) Value: 5
  misc_feature: MA Experiment 20001906 PARAMETER Experiment Name: At_Drought_Reproduction_P Parameter: Tissue Value: Siliques
  misc_feature: MA Experiment 20001906 PARAMETER Experiment Name: At_Drought_Reproduction_P Parameter: Treatment Value: Drought vs. No Drought
  misc_feature: MA Experiment ID: 20001907 Result: Up-regulated in Transcription
  misc_feature: MA Experiment 20001907 PARAMETER Experiment Name: At_Drought_Reproduction_P Parameter: Age (day) Value: 37
  misc_feature: MA Experiment 20001907 PARAMETER Experiment Name: At_Drought_Reproduction_P Parameter: Organism Value: A. thaliana
  misc_feature: MA Experiment 20001907 PARAMETER Experiment Name: At_Drought_Reproduction_P Parameter: Plant Line Value: WS
  misc_feature: MA Experiment 20001907 PARAMETER Experiment Name: At_Drought_Reproduction_P Parameter: Timepoint (day) Value: 7
  misc_feature: MA Experiment 20001907 PARAMETER Experiment Name: At_Drought_Reproduction_P Parameter: Tissue Value: Siliques
  misc_feature: MA Experiment 20001907 PARAMETER Experiment Name: At_Drought_Reproduction_P Parameter: Treatment Value: Drought vs. No Drought
  misc_feature: MA Experiment ID: 20001908 Result: Up-regulated in Transcription
  misc_feature: MA Experiment 20001908 PARAMETER Experiment Name: At_Drought_Reproduction_P Parameter: Age (day) Value: 40
  misc_feature: MA Experiment 20001908 PARAMETER Experiment Name: At_Drought_Reproduction_P Parameter: Organism Value: A. thaliana
  misc_feature: MA Experiment 20001908 PARAMETER Experiment Name: At_Drought_Reproduction_P Parameter: Plant Line Value: WS
  misc_feature: MA Experiment 20001908 PARAMETER Experiment Name: At_Drought_Reproduction_P Parameter: Timepoint (day) Value: 10
  misc_feature: MA Experiment 20001908 PARAMETER Experiment Name: At_Drought_Reproduction_P Parameter: Tissue Value: Siliques
  misc_feature: MA Experiment 20001908 PARAMETER Experiment Name: At_Drought_Reproduction_P Parameter: Treatment Value: Drought vs. No Drought
  misc_feature: MA Experiment ID: 20001910 Result: Up-regulated in Transcription
  misc_feature: MA Experiment 20001910 PARAMETER Experiment Name: At_Drought_Reproduction_P Parameter: Age (day) Value: 37
  misc_feature: MA Experiment 20001910 PARAMETER Experiment Name: At_Drought_Reproduction_P Parameter: Organism Value: A. thaliana
  misc_feature: MA Experiment 20001910 PARAMETER Experiment Name: At_Drought_Reproduction_P Parameter: Plant Line Value: WS
  misc_feature: MA Experiment 20001910 PARAMETER Experiment Name: At_Drought_Reproduction_P Parameter: Timepoint (day) Value: 7
  misc_feature: MA Experiment 20001910 PARAMETER Experiment Name: At_Drought_Reproduction_P Parameter: Tissue Value: Flowers
  misc_feature: MA Experiment 20001910 PARAMETER Experiment Name: At_Drought_Reproduction_P Parameter: Treatment Value: Drought vs. No Drought
  misc_feature: MA Experiment ID: 20001911 Result: Up-regulated in Transcription
  misc_feature: MA Experiment 20001911 PARAMETER Experiment Name: At_Drought_Reproduction_P Parameter: Age (day) Value: 40
  misc_feature: MA Experiment 20001911 PARAMETER Experiment Name: At_Drought_Reproduction_P Parameter: Organism Value: A. thaliana
  misc_feature: MA Experiment 20001911 PARAMETER Experiment Name: At_Drought_Reproduction_P Parameter: Plant Line Value: WS
  misc_feature: MA Experiment 20001911 PARAMETER Experiment Name: At_Drought_Reproduction_P Parameter: Timepoint (day) Value: 10
  misc_feature: MA Experiment 20001911 PARAMETER Experiment Name: At_Drought_Reproduction_P Parameter: Tissue Value: Flowers
  misc_feature: MA Experiment 20001911 PARAMETER Experiment Name: At_Drought_Reproduction_P Parameter: Treatment Value: Drought vs. No Drought
ctctttctctctcttttgtttctcgctgccatggctaagtcttgctatttcagaccagctcttcttcttctgttagttcttttggttcatgccgagtcacgcggtcggttcgagccaaagattcttatgccgacagaggaagctaacccggctgaccaagacgaagatggtgtcggtacaagatgggcggttctcgtcgctggttcttctggatatggaaactacagacaccaggctgacgtgtgtcacgcatatcaaatactaagaaaaggaggtttaaaggaagaaaacatagtcgttttgatgtatgatgatatcgcaaaccacccacttaatcctcgtccgggtactctcatcaaccatcctgacggtgacgatgtttacgccggagtccctaaggactatactggtagtagcgttacggctgcaaacttctacgctgtactcctaggcgaccagaaggctgttaaaggtggaagcggtaaggtcatcgctagcaagcccaacgatcacattttcgtatattatgcggatcatggtggtcccggagttcttgggatgccaaatacgcctcacatatatgcagctgattttattgaaacgcttaagaagaagcatgcttccggaacatacaaagagatggttatatacgtagaagcgtgtgaaagtgggagtattttcgaagggataatgccaaaggacttgaacatttacgtaacaacggcttcaaatgcacaagagagtagttatggaacatattgtcctggcatgaatccgtcacccccatctgaatatatcacttgcttaggggatttatatagtgttgcttggatggaagatagtgagactcacaatttaaagaaagagaccataaagcaacaataccacacggtgaagatgaggacatcaaactacaatacctactcaggtggctctcatgtgatggaatacggtaacaatagtattaagtcggagaagctttatctttaccaagggtttgatccagccaccgttaatctcccactaaacgaattaccggtcaagtcaaaaataggagtcgttaaccaacgcgacgcggaccttctcttcctttggcatatgtatcggacatcggaagatgggtcaaggaagaaggatgacacattgaaggaattaactgagacaacaaggcataggaaacatttagatgcaagcgtcgaattgatagccacaattttgtttggtccgacgatgaatgttcttaacttggttagagaacccggtttgcctttggttgacgattgggaatgtcttaaatcgatggtacgtgtatttgaagagcattgtggatcactaacgcaatatgggatgaaacatatgcgagcgtttgcaaacgtttgtaacaacggtgtgtccaaagagctgatggaggaagcttctactgcggcatgcggtggttatagtgaggctcgctacacggtgcatccatcaatcttaggctatagcgcctgagagattttgaggcttttctgattttcaagtgtttcgaattataacgttaaagatgtcaaaataaaagaaatgtttagtatgtaaatacgtacgtagcaataaggtcgtctaacttttttttatcgattgttatctttttaataaaactttgc

SEQ ID NO: 80794 - protein, 496 aa, Arabidopsis thaliana
  peptide (1)..(496): Ceres Seq. ID no. 12657220
  misc_feature (20)..(377): Pfam Name: Peptidase C13 family Pfam Description: Peptidase C13 family
  misc_feature (11)..(496): Homolog of NCBI NO: 15221556 NR Description: beta-VPE; protein id: At1g62710.1, supported by gi_14194096, supported by cDNA: gi_16323335 [Arabidopsis
  misc_feature (133)..(496): Homolog of NCBI NO: 25344843 NR Description: protein F23N19.7 [imported] - Arabidopsis >gi|6630462|gb|AAF19550.1|AC007190_18 F23N19.7 [Arabidopsis
  misc_feature (11)..(133): Homolog of NCBI NO: 25344843 NR Description: protein F23N19.7 [imported] - Arabidopsis >gi|6630462|gb|AAF19550.1|AC007190_18 F23N19.7 [Arabidopsis
  misc_feature (11)..(496): Homolog of NCBI NO: 2129767 NR Description: vacuolar processing enzyme (EC 3.4.22.-) isozyme
  misc_feature (4)..(496): Homolog of NCBI NO: 1351409 NR Description: Vacuolar processing enzyme precursor (VPE)
LFLSLLFLAAMAKSCYFRPALLLLLVLLVHAESRGRFEPKILMPTEEANPADQDEDGVGTRWAVLVAGSSGYGNYRHQADVCHAYQILRKGGLKEENIVVLMYDDIANHPLNPRPGTLINHPDGDDVYAGVPKDYTGSSVTAANFYAVLLGDQKAVKGGSGKVIASKPNDHIFVYYADHGGPGVLGMPNTPHIYAADFIETLKKKHASGTYKEMVIYVEACESGSIFEGIMPKDLNIYVTTASNAQESSYGTYCPGMNPSPPSEYITCLGDLYSVAWMEDSETHNLKKETIKQQYHTVKMRTSNYNTYSGGSHVMEYGNNSIKSEKLYLYQGFDPATVNLPLNELPVKSKIGVVNQRDADLLFLWHMYRTSEDGSRKKDDTLKELTETTRHRKHLDASVELIATILFGPTMNVLNLVREPGLPLVDDWECLKSMVRVFEEHCGSLTQYGMKHMRAFANVCNNGVSKELMEEASTAACGGYSEARYTVHPSILGYSA

SEQ ID NO: 80795 - protein, 486 aa, Arabidopsis thaliana
  peptide (1)..(486): Ceres Seq. ID no. 12657221
  misc_feature (10)..(367): Pfam Name: Peptidase C13 family Pfam Description: Peptidase C13 family
  misc_feature (1)..(486): Homolog of NCBI NO: 15221556 NR Description: beta-VPE; protein id: At1g62710.1, supported by gi_14194096, supported by cDNA: gi_16323335 [Arabidopsis
  misc_feature (123)..(486): Homolog of NCBI NO: 25344843 NR Description: protein F23N19.7 [imported] - Arabidopsis >gi|6630462|gb|AAF19550.1|AC007190_18 F23N19.7 [Arabidopsis
  misc_feature (1)..(123): Homolog of NCBI NO: 25344843 NR Description: protein F23N19.7 [imported] - Arabidopsis >gi|6630462|gb|AAF19550.1|AC007190_18 F23N19.7 [Arabidopsis
  misc_feature (1)..(486): Homolog of NCBI NO: 2129767 NR Description: vacuolar processing enzyme (EC 3.4.22.-) isozyme
  misc_feature (1)..(486): Homolog of NCBI NO: 1351409 NR Description: Vacuolar processing enzyme precursor (VPE)
MAKSCYFRPALLLLLVLLVHAESRGRFEPKILMPTEEANPADQDEDGVGTRWAVLVAGSSGYGNYRHQADVCHAYQILRKGGLKEENIVVLMYDDIANHPLNPRPGTLINHPDGDDVYAGVPKDYTGSSVTAANFYAVLLGDQKAVKGGSGKVIASKPNDHIFVYYADHGGPGVLGMPNTPHIYAADFIETLKKKHASGTYKEMVIYVEACESGSIFEGIMPKDLNIYVTTASNAQESSYGTYCPGMNPSPPSEYITCLGDLYSVAWMEDSETHNLKKETIKQQYHTVKMRTSNYNTYSGGSHVMEYGNNSIKSEKLYLYQGFDPATVNLPLNELPVKSKIGVVNQRDADLLFLWHMYRTSEDGSRKKDDTLKELTETTRHRKHLDASVELIATILFGPTMNVLNLVREPGLPLVDDWECLKSMVRVFEEHCGSLTQYGMKHMRAFANVCNNGVSKELMEEASTAACGGYSEARYTVHPSILGYSA

SEQ ID NO: 80796 - protein, 454 aa, Arabidopsis thaliana
  peptide (1)..(454): Ceres Seq. ID no. 12657222
  misc_feature (1)..(335): Pfam Name: Peptidase C13 family Pfam Description: Peptidase C13 family
  misc_feature (1)..(454): Homolog of NCBI NO: 15221556 NR Description: beta-VPE; protein id: At1g62710.1, supported by gi_14194096, supported by cDNA: gi_16323335 [Arabidopsis
  misc_feature (91)..(454): Homolog of NCBI NO: 25344843 NR Description: protein F23N19.7 [imported] - Arabidopsis >gi|6630462|gb|AAF19550.1|AC007190_18 F23N19.7 [Arabidopsis
  misc_feature (1)..(91): Homolog of NCBI NO: 25344843 NR Description: protein F23N19.7 [imported] - Arabidopsis >gi|6630462|gb|AAF19550.1|AC007190_18 F23N19.7 [Arabidopsis
  misc_feature (1)..(454): Homolog of NCBI NO: 2129767 NR Description: vacuolar processing enzyme (EC 3.4.22.-) isozyme
  misc_feature (1)..(454): Homolog of NCBI NO: 1351409 NR Description: Vacuolar processing enzyme precursor (VPE)
MPTEEANPADQDEDGVGTRWAVLVAGSSGYGNYRHQADVCHAYQILRKGGLKEENIVVLMYDDIANHPLNPRPGTLINHPDGDDVYAGVPKDYTGSSVTAANFYAVLLGDQKAVKGGSGKVIASKPNDHIFVYYADHGGPGVLGMPNTPHIYAADFIETLKKKHASGTYKEMVIYVEACESGSIFEGIMPKDLNIYVTTASNAQESSYGTYCPGMNPSPPSEYITCLGDLYSVAWMEDSETHNLKKETIKQQYHTVKMRTSNYNTYSGGSHVMEYGNNSIKSEKLYLYQGFDPATVNLPLNELPVKSKIGVVNQRDADLLFLWHMYRTSEDGSRKKDDTLKELTETTRHRKHLDASVELIATILFGPTMNVLNLVREPGLPLVDDWECLKSMVRVFEEHCGSLTQYGMKHMRAFANVCNNGVSKELMEEASTAACGGYSEARYTVHPSILGYSA

SEQ ID NO: 80797 - DNA, 1281 bp, Arabidopsis thaliana
  misc_feature (1)..(1281): Ceres Seq. ID no. 12657223
  misc_feature: MA Experiment ID: 20001558 Result: Up-regulated in Transcription
  misc_feature: MA Experiment 20001558 PARAMETER Experiment Name: At_Drought_Soil_Dry_P Parameter: Age (day) Value: 27
  misc_feature: MA Experiment 20001558 PARAMETER Experiment Name: At_Drought_Soil_Dry_P Parameter: Organism Value: A. thaliana
  misc_feature: MA Experiment 20001558 PARAMETER Experiment Name: At_Drought_Soil_Dry_P Parameter: Plant Line Value: WS
  misc_feature: MA Experiment 20001558 PARAMETER Experiment Name: At_Drought_Soil_Dry_P Parameter: Post Timepoint (hr) Value: 6
  misc_feature: MA Experiment 20001558 PARAMETER Experiment Name: At_Drought_Soil_Dry_P Parameter: Post-Treatment Value: Re-Water vs. No Drought
  misc_feature: MA Experiment 20001558 PARAMETER Experiment Name: At_Drought_Soil_Dry_P Parameter: Timepoint (day) Value: 13
  misc_feature: MA Experiment 20001558 PARAMETER Experiment Name: At_Drought_Soil_Dry_P Parameter: Treatment Value: Drought vs. No Drought
  misc_feature: MA Experiment ID: 20001757 Result: Up-regulated in Transcription
  misc_feature: MA Experiment 20001757 PARAMETER Experiment Name: At_50mM_NH4NO3_L-to-H_P Parameter: Timepoint (hr) Value: 6
  misc_feature: MA Experiment 20001757 PARAMETER Experiment Name: At_50mM_NH4NO3_L-to-H_P Parameter: Tissue Value: Leaf
  misc_feature: MA Experiment 20001757 PARAMETER Experiment Name: At_50mM_NH4NO3_L-to-H_P Parameter: Treatment Value: 50mM NH4NO3 vs 100mM Mannitol
atgattcaatctcgtcctcttccttcaatagttgatttcagtaaagtattgagtaaaatcgccaaatcgaagaattacgatcttgtgatctctctgtttcaccatatggaagtttgtggaattggtcatgatctttatagttacaacattgtgattaattgtttatgtcgatgctctcgatttgttattgctttatctgttgttgggaagatgatgaagtttggttacgagcctgatgttgtcacggttagttctttgattaatggattttgtcaagggaatagagtttttgatgctatagatttggttagtaaaatggaggaaatgggatttagaccagatgttgttatctacaacacgatcatcgacggttcttgtaagatcgggttggtgaatgacgcggtggagctgtttgatcggatggaaagagatggggttagagctgatgctgttacttataactctcttgtggccggtctttgttgttctggtagatggagtgatgcagctcggctaatgagagatatggtaatgagggatattgttcctaatgtcattactttcactgcggtgatcgatgtgtttgtgaaagaagggaagttttcggaggcgatgaagttgtacgaggagatgacacgaaggtgtgtagatccggatgttttcacttacaattcgttgatcaacggtctttgtatgcacggtcgggtagatgaggccaaacaaatgcttgatttgatggtaactaagggttgtctccccgatgtagtgacttataatactctcattaacgggttttgcaagtctaagagggttgatgaaggaacgaaactcttccgcgagatggctcaaagaggattagttggtgacactatcacatacaacactataatccagggctattttcaagcgggtagaccagatgcggcgcaagaaattttcagtcggatggattctcgtcccaatattaggacgtacagcattttgttgtatgggctttgtatgaactggagggtagagaaagcattggtgttattcgagaatatgcaaaagagtgaaatagaacttgatattactacttataatatcgtcattcacgggatgtgcaagattggtaatgttgaagatgcgtgggacttgtttcgtagcctttcttgcaaaggacttaagcctgatgttgtgtcctacactacgatgatctcaggcttttgtaggaaacgccaatgggataaatcagatttgttgtacagaaaaatgcaagaagatgggcttcttccattataa

SEQ ID NO: 80798 - protein, 426 aa, Arabidopsis thaliana
  peptide (1)..(426): Ceres Seq. ID no. 12657224
  misc_feature (358)..(392): Pfam Name: PPR repeat Pfam Description: PPR repeat
  misc_feature (1)..(426): Homolog of NCBI NO: 6630449 NR Description: F23N19.8 [Arabidopsis thaliana]
  misc_feature (1)..(426): Homolog of NCBI NO: 15221558 NR Description: PPR-repeat protein; protein id: At1g62720.1
  misc_feature (1)..(424): Homolog of NCBI NO: 6630464 NR Description: F23N19.4 [Arabidopsis thaliana]
  misc_feature (1)..(424): Homolog of NCBI NO: 15221550 NR Description: PPR-repeat protein; protein id: At1g62680.1
  misc_feature (1)..(425): Homolog of NCBI NO: 15217683 NR Description: hypothetical protein; protein id: At1g64580.1
  misc_feature (1)..(425): Homolog of NCBI NO: 25404938 NR Description: protein F1N19.15 [imported] - Arabidopsis >gi|6633829|gb|AAF19688.1|AC009519_22 F1N19.15 [Arabidopsis
  misc_feature (1)..(425): Homolog of NCBI NO: 15237384 NR Description: putative protein; protein id: At5g16640.1 thaliana] >gi|10176973|dbj|BAB10191.1|
  misc_feature (1)..(425): Homolog of NCBI NO: 11994626 NR Description: contains similarity to salt-inducible
  misc_feature (1)..(425): Homolog of NCBI NO: 15228287 NR Description: hypothetical protein; protein id: At3g16710.1
  misc_feature (1)..(424): Homolog of NCBI NO: 15217683 NR Description: hypothetical protein; protein id: At1g64580.1
MIQSRPLPSIVDFSKVLSKIAKSKNYDLVISLFHHMEVCGIGHDLYSYNIVINCLCRCSRFVIALSVVGKMMKFGYEPDVVTVSSLINGFCQGNRVFDAIDLVSKMEEMGFRPDVVIYNTIIDGSCKIGLVNDAVELFDRMERDGVRADAVTYNSLVAGLCCSGRWSDAARLMRDMVMRDIVPNVITFTAVIDVFVKEGKFSEAMKLYEEMTRRCVDPDVFTYNSLINGLCMHGRVDEAKQMLDLMVTKGCLPDVVTYNTLINGFCKSKRVDEGTKLFREMAQRGLVGDTITYNTIIQGYFQAGRPDAAQEIFSRMDSRPNIRTYSILLYGLCMNWRVEKALVLFENMQKSEIELDITTYNIVIHGMCKIGNVEDAWDLFRSLSCKGLKPDVVSYTTMISGFCRKRQWDKSDLLYRKMQEDGLLPL

SEQ ID NO: 80799 - protein, 391 aa, Arabidopsis thaliana
  peptide (1)..(391): Ceres Seq. ID no. 12657225
  misc_feature (323)..(357): Pfam Name: PPR repeat Pfam Description: PPR repeat
  misc_feature (1)..(391): Homolog of NCBI NO: 6630449 NR Description: F23N19.8 [Arabidopsis thaliana]
  misc_feature (1)..(391): Homolog of NCBI NO: 15221558 NR Description: PPR-repeat protein; protein id: At1g62720.1
  misc_feature (1)..(389): Homolog of NCBI NO: 6630464 NR Description: F23N19.4 [Arabidopsis thaliana]
  misc_feature (1)..(389): Homolog of NCBI NO: 15221550 NR Description: PPR-repeat protein; protein id: At1g62680.1
  misc_feature (1)..(390): Homolog of NCBI NO: 15217683 NR Description: hypothetical protein; protein id: At1g64580.1
  misc_feature (1)..(390): Homolog of NCBI NO: 25404938 NR Description: protein F1N19.15 [imported] - Arabidopsis >gi|6633829|gb|AAF19688.1|AC009519_22 F1N19.15 [Arabidopsis
  misc_feature (1)..(390): Homolog of NCBI NO: 15237384 NR Description: putative protein; protein id: At5g16640.1 thaliana] >gi|10176973|dbj|BAB10191.1|
  misc_feature (1)..(390): Homolog of NCBI NO: 11994626 NR Description: contains similarity to salt-inducible
  misc_feature (1)..(390): Homolog of NCBI NO: 15228287 NR Description: hypothetical protein; protein id: At3g16710.1
  misc_feature (1)..(389): Homolog of NCBI NO: 15217683 NR Description: hypothetical protein; protein id: At1g64580.1
MEVCGIGHDLYSYNIVINCLCRCSRFVIALSVVGKMMKFGYEPDVVTVSSLINGFCQGNRVFDAIDLVSKMEEMGFRPDVVIYNTIIDGSCKIGLVNDAVELFDRMERDGVRADAVTYNSLVAGLCCSGRWSDAARLMRDMVMRDIVPNVITFTAVIDVFVKEGKFSEAMKLYEEMTRRCVDPDVFTYNSLINGLCMHGRVDEAKQMLDLMVTKGCLPDVVTYNTLINGFCKSKRVDEGTKLFREMAQRGLVGDTITYNTIIQGYFQAGRPDAAQEIFSRMDSRPNIRTYSILLYGLCMNWRVEKALVLFENMQKSEIELDITTYNIVIHGMCKIGNVEDAWDLFRSLSCKGLKPDVVSYTTMISGFCRKRQWDKSDLLYRKMQEDGLLPL

SEQ ID NO: 80800 - protein, 356 aa, Arabidopsis thaliana
  peptide (1)..(356): Ceres Seq. ID no. 12657226
  misc_feature (288)..(322): Pfam Name: PPR repeat Pfam Description: PPR repeat
  misc_feature (1)..(356): Homolog of NCBI NO: 6630449 NR Description: F23N19.8 [Arabidopsis thaliana]
  misc_feature (1)..(356): Homolog of NCBI NO: 15221558 NR Description: PPR-repeat protein; protein id: At1g62720.1
  misc_feature (1)..(354): Homolog of NCBI NO: 6630464 NR Description: F23N19.4 [Arabidopsis thaliana]
  misc_feature (1)..(354): Homolog of NCBI NO: 15221550 NR Description: PPR-repeat protein; protein id: At1g62680.1
  misc_feature (1)..(355): Homolog of NCBI NO: 15217683 NR Description: hypothetical protein; protein id: At1g64580.1
  misc_feature (1)..(355): Homolog of NCBI NO: 25404938 NR Description: protein F1N19.15 [imported] - Arabidopsis >gi|6633829|gb|AAF19688.1|AC009519_22 F1N19.15 [Arabidopsis
  misc_feature (1)..(355): Homolog of NCBI NO: 15237384 NR Description: putative protein; protein id: At5g16640.1 thaliana] >gi|10176973|dbj|BAB10191.1|
  misc_feature (1)..(355): Homolog of NCBI NO: 11994626 NR Description: contains similarity to salt-inducible
  misc_feature (1)..(355): Homolog of NCBI NO: 15228287 NR Description: hypothetical protein; protein id: At3g16710.1
  misc_feature (1)..(354): Homolog of NCBI NO: 15217683 NR Description: hypothetical protein; protein id: At1g64580.1
MMKFGYEPDVVTVSSLINGFCQGNRVFDAIDLVSKMEEMGFRPDVVIYNTIIDGSCKIGLVNDAVELFDRMERDGVRADAVTYNSLVAGLCCSGRWSDAARLMRDMVMRDIVPNVITFTAVIDVFVKEGKFSEAMKLYEEMTRRCVDPDVFTYNSLINGLCMHGRVDEAKQMLDLMVTKGCLPDVVTYNTLINGFCKSKRVDEGTKLFREMAQRGLVGDTITYNTIIQGYFQAGRPDAAQEIFSRMDSRPNIRTYSILLYGLCMNWRVEKALVLFENMQKSEIELDITTYNIVIHGMCKIGNVEDAWDLFRSLSCKGLKPDVVSYTTMISGFCRKRQWDKSDLLYRKMQEDGLLPL

SEQ ID NO: 80801 - DNA, 939 bp, Arabidopsis thaliana
  misc_feature (1)..(939): Ceres Seq. ID no. 12657231
  misc_feature: MA Experiment ID: 20000184 Result: Down-regulated in Transcription
  misc_feature: MA Experiment 20000184 PARAMETER Experiment Name: At_Shoots__P Parameter: Age (day) Value: 7
  misc_feature: MA Experiment 20000184 PARAMETER Experiment Name: At_Shoots__P Parameter: Tissue Value: Shoots vs. Whole Plant
  misc_feature: MA Experiment ID: 20000496 Result: Down-regulated in Transcription
  misc_feature: MA Experiment 20000496 PARAMETER Experiment Name: At_Guard_Cells_P Parameter: Harvest Date Value: 7/19/2002
  misc_feature: MA Experiment 20000496 PARAMETER Experiment Name: At_Guard_Cells_P Parameter: Organism Value: Canola
  misc_feature: MA Experiment 20000496 PARAMETER Experiment Name: At_Guard_Cells_P Parameter: Tissue Value: Guard Cells vs. Leaves
  misc_feature: MA Experiment ID: 20000794 Result: Down-regulated in Transcription
  misc_feature: MA Experiment 20000794 PARAMETER Experiment Name: At_Petals_P Parameter: Age (day) Value: 23-25 days
  misc_feature: MA Experiment 20000794 PARAMETER Experiment Name: At_Petals_P Parameter: Plant Line Value: WS
  misc_feature: MA Experiment 20000794 PARAMETER Experiment Name: At_Petals_P Parameter: Tissue Value: Petals vs. Whole plant
atgaacatcttatctcaaacccaaatccttcatctctctatagctattcttctcttcatcacaacatcatcatcatcattatcaccatcatcatcatcaccatcattatcaccatcaccaccatcatcatcaccatcatcggcaccaccatcatcattatcaccatcatcaccaccaccactatcattatcaccatcatcaccaccaccaccgccaccatcatcatcacctctatcatcattatcaccatcattatcaccatcaccaccatcatcatcaccatcatcggcaccaccatcatcattatcaccatcatcaccaccaccactatcattatcaccatcatcaccaccaccaccgccaccatcatcatcacctctatcatcattatcaccatcatcatcttcatcaacatactcaaatcaaaccaacttagattacatcaaaacatcatgtaacattacactctacaaaaccatttgctacaactctctatctccttacgcctcaacaatccgttccaaccctcaaaaactcgctgtcatcgccctcaatctcaccctctcatccgccaaatctgcctccaaattcgtcaaaaacatatctcacggaggtggtctaacacgtttggaagtagttgcggttgctgattgcgttgaagagattggagactcggtgacttcgcttcaagattcgataagggaattggattctatcaactataaagatagtgcaaagtttgagatggttatgtcggatgttgaaacatgggttagtgctgctctcacgaatgatgacacatgtatggatggtttcagtctagttaaaacggccgtgaaagatttggttcgacgacatgttgttgaggtagctcggcttactagcaacgcgcttgctctcattaatatgtacgcctctacgcaagaaaacttttcttaa

SEQ ID NO: 80802 - protein, 312 aa, Arabidopsis thaliana
  peptide (1)..(312): Ceres Seq. ID no. 12657232
  misc_feature (19)..(132): Pfam Name: Extensin-like region Pfam Description: Extensin-like region
  misc_feature (1)..(312): Homolog of NCBI NO: 30696750 NR Description: hypothetical protein [Arabidopsis thaliana]
  misc_feature (133)..(306): Homolog of NCBI NO: 30697666 NR Description: pectinesterase family [Arabidopsis thaliana]
  misc_feature (31)..(144): Homolog of NCBI NO: 28829783 NR Description: similar to Leishmania major. Ppg3 [Dictyostelium
  misc_feature (28)..(137): Homolog of NCBI NO: 14253159 NR Description: VMP3 protein [Volvox carteri f. nagariensis]
  misc_feature (28)..(137): Homolog of NCBI NO: 20138131 NR Description: Vegetative cell wall protein gp1 precursor rich glycoprotein 1) >gi|12018147|gb|AAG45420.1|AF309494_1
  misc_feature (20)..(126): Homolog of NCBI NO: 81286 NR Description: extensin - Volvox carteri (fragment)
  misc_feature (21)..(137): Homolog of NCBI NO: 1076211 NR Description: hypothetical protein VSP-3 - Chlamydomonas >gi|530876|gb|AAB53953.1| amino acid feature: Rod protein domain,
  misc_feature (24)..(137): Homolog of NCBI NO: 1076211 NR Description: hypothetical protein VSP-3 - Chlamydomonas >gi|530876|gb|AAB53953.1| amino acid feature: Rod protein domain,
  misc_feature (10)..(136): Homolog of NCBI NO: 20138131 NR Description: Vegetative cell wall protein gp1 precursor rich glycoprotein 1) >gi|12018147|gb|AAG45420.1|AF309494_1
  misc_feature (22)..(153): Homolog of NCBI NO: 9630030 NR Description: unknown [Orgyia pseudotsugata multicapsid
MNILSQTQILHLSIAILLFITTSSSSLSPSSSSPSLSPSPPSSSPSSAPPSSLSPSSPPPLSLSPSSPPPPPPSSSPLSSLSPSLSPSPPSSSPSSAPPSSLSPSSPPPLSLSPSSPPPPPPSSSPLSSLSPSSSSSTYSNQTNLDYIKTSCNITLYKTICYNSLSPYASTIRSNPQKLAVIALNLTLSSAKSASKFVKNISHGGGLTRLEVVAVADCVEEIGDSVTSLQDSIRELDSINYKDSAKFEMVMSDVETWVSAALTNDDTCMDGFSLVKTAVKDLVRRHVVEVARLTSNALALINMYASTQENFS

SEQ ID NO: 80803 - DNA, 922 bp, Arabidopsis thaliana
  misc_feature (1)..(922): Ceres Seq. ID no. 12657233
  misc_feature: MA Experiment ID: 20000180 Result: Up-regulated in Transcription
  misc_feature: MA Experiment 20000180 PARAMETER Experiment Name: At_Germinating_Seeds_P Parameter: Age (hr) Value: 24 vs. 0
  misc_feature: MA Experiment 20000180 PARAMETER Experiment Name: At_Germinating_Seeds_P Parameter: Tissue Value: Germinating Seeds
  misc_feature: MA Experiment ID: 20000185 Result: Down-regulated in Transcription
  misc_feature: MA Experiment 20000185 PARAMETER Experiment Name: At_Roots__P Parameter: Age (day) Value: 7 vs. 21
  misc_feature: MA Experiment 20000185 PARAMETER Experiment Name: At_Roots__P Parameter: Organism Value: A. thaliana
  misc_feature: MA Experiment 20000185 PARAMETER Experiment Name: At_Roots__P Parameter: Tissue Value: Roots vs. Whole Plant
  misc_feature: MA Experiment ID: 20000213 Result: Up-regulated in Transcription
  misc_feature: MA Experiment 20000213 PARAMETER Experiment Name: At_4deg_Cold_P Parameter: Timepoint (hr) Value: 2
  misc_feature: MA Experiment ID: 20000234 Result: Up-regulated in Transcription
  misc_feature: MA Experiment 20000234 PARAMETER Experiment Name: At_Siliques_P Parameter: Age (day) Value: 21
  misc_feature: MA Experiment 20000234 PARAMETER Experiment Name: At_Siliques_P Parameter: Organism Value: A. thaliana
  misc_feature: MA Experiment 20000234 PARAMETER Experiment Name: At_Siliques_P Parameter: Plant Line Value: WS
  misc_feature: MA Experiment 20000234 PARAMETER Experiment Name: At_Siliques_P Parameter: Tissue Value: Less Than 5mm Siliques vs. Whole Plant
  misc_feature: MA Experiment ID: 20000235 Result: Up-regulated in Transcription
  misc_feature: MA Experiment 20000235 PARAMETER Experiment Name: At_Siliques_P Parameter: Age (day) Value: 21
  misc_feature: MA Experiment 20000235 PARAMETER Experiment Name: At_Siliques_P Parameter: Organism Value: A. thaliana
  misc_feature: MA Experiment 20000235 PARAMETER Experiment Name: At_Siliques_P Parameter: Plant Line Value: WS
  misc_feature: MA Experiment 20000235 PARAMETER Experiment Name: At_Siliques_P Parameter: Tissue Value: 5-10mm Siliques vs. Whole Plant
  misc_feature: MA Experiment ID: 20000436 Result: Down-regulated in Transcription
  misc_feature: MA Experiment 20000436 PARAMETER Experiment Name: At_Drought_P Parameter: Age (day) Value: 7
  misc_feature: MA Experiment 20000436 PARAMETER Experiment Name: At_Drought_P Parameter: Organism Value: A. thaliana
  misc_feature: MA Experiment 20000436 PARAMETER Experiment Name: At_Drought_P Parameter: Plant Line Value: WS
  misc_feature: MA Experiment 20000436 PARAMETER Experiment Name: At_Drought_P Parameter: Timepoint (hr) Value: 12
  misc_feature: MA Experiment 20000436 PARAMETER Experiment Name: At_Drought_P Parameter: Tissue Value: Whole Plant
  misc_feature: MA Experiment 20000436 PARAMETER Experiment Name: At_Drought_P Parameter: Treatment Value: Drought vs. No Drought
  misc_feature: MA Experiment ID: 20000437 Result: Down-regulated in Transcription
  misc_feature: MA Experiment 20000437 PARAMETER Experiment Name: At_Drought_P Parameter: Age (day) Value: 8
  misc_feature: MA Experiment 20000437 PARAMETER Experiment Name: At_Drought_P Parameter: Organism Value: A. thaliana
  misc_feature: MA Experiment 20000437 PARAMETER Experiment Name: At_Drought_P Parameter: Plant Line Value: WS
  misc_feature: MA Experiment 20000437 PARAMETER Experiment Name: At_Drought_P Parameter: Timepoint (hr) Value: 24
  misc_feature: MA Experiment 20000437 PARAMETER Experiment Name: At_Drought_P Parameter: Tissue Value: Whole Plant
  misc_feature: MA Experiment 20000437 PARAMETER Experiment Name: At_Drought_P Parameter: Treatment Value: Drought vs. No Drought
  misc_feature: MA Experiment ID: 20001247 Result: Down-regulated in Transcription
  misc_feature: MA Experiment 20001247 PARAMETER Experiment Name: At_Far-red-induction_P Parameter: Age (day) Value: 7
  misc_feature: MA Experiment 20001247 PARAMETER Experiment Name: At_Far-red-induction_P Parameter: Light Value: Far-red vs. White
  misc_feature: MA Experiment 20001247 PARAMETER Experiment Name: At_Far-red-induction_P Parameter: Organism Value: A. thaliana
  misc_feature: MA Experiment 20001247 PARAMETER Experiment Name: At_Far-red-induction_P Parameter: Plant Line Value: Columbia
  misc_feature: MA Experiment 20001247 PARAMETER Experiment Name: At_Far-red-induction_P Parameter: Timepoint (hr) Value: 1
  misc_feature: MA Experiment 20001247 PARAMETER Experiment Name: At_Far-red-induction_P Parameter: Tissue Value: Whole Plant
  misc_feature: MA Experiment ID: 20001450 Result: Down-regulated in Transcription
  misc_feature: MA Experiment 20001450 PARAMETER Experiment Name: At_Far-red-induction_P Parameter: Age (day) Value: 7
  misc_feature: MA Experiment 20001450 PARAMETER Experiment Name: At_Far-red-induction_P Parameter: Light Value: Far-red vs. White
  misc_feature: MA Experiment 20001450 PARAMETER Experiment Name: At_Far-red-induction_P Parameter: Organism Value: A. thaliana
  misc_feature: MA Experiment 20001450 PARAMETER Experiment Name: At_Far-red-induction_P Parameter: Plant Line Value: Columbia
  misc_feature: MA Experiment 20001450 PARAMETER Experiment Name: At_Far-red-induction_P Parameter: Timepoint (hr) Value: 8
  misc_feature: MA Experiment 20001450 PARAMETER Experiment Name: At_Far-red-induction_P Parameter: Tissue Value: Whole Plant
  misc_feature: MA Experiment ID: 20001451 Result: Down-regulated in Transcription
  misc_feature: MA Experiment 20001451 PARAMETER Experiment Name: At_Far-red-induction_P Parameter: Age (day) Value: 7
  misc_feature: MA Experiment 20001451 PARAMETER Experiment Name: At_Far-red-induction_P Parameter: Light Value: Far-red vs. White
  misc_feature: MA Experiment 20001451 PARAMETER Experiment Name: At_Far-red-induction_P Parameter: Organism Value: A. thaliana
  misc_feature: MA Experiment 20001451 PARAMETER Experiment Name: At_Far-red-induction_P Parameter: Plant Line Value: Columbia
  misc_feature: MA Experiment 20001451 PARAMETER Experiment Name: At_Far-red-induction_P Parameter: Timepoint (hr) Value: 24
  misc_feature: MA Experiment 20001451 PARAMETER Experiment Name: At_Far-red-induction_P Parameter: Tissue Value: Whole Plant
aaaaaagcagagctcacacttagaaaacaaaaaacaaaaatggctacgctttcgtttggaatcgccgccgctgcaaccaccgtccgtacgattccgagatttaattcacggaggagcaaaatcacatgcgaatgggatccgaaaggtgtgttgggtccggctcaaactggtcatatagctcggcttgagtttaagcgtcggctagagagagattcagaggcaagagaagcttttcagaaacaacttcgtgaagagaaagagcgtcgtcaagctcttagacaatctagagttgtaccggatactgctgcggagctgattgagtactttcttgatactgaagctcaggagattgagtatgagatcgctaggcttagaggaaggttaaacgacgaattctttgcgcagatacgacttgaaatcggacagattcgatttgctgttactaagactgcggatattgaagatagattgattgagcttgaaacacttcaaaaagctttagaagaaggaatagaggcttatgacaaaatgcaaaatgagcttatgacggctacaaatagcttaaccaaactcttaacctcaaccgatataaaaaccacattgttggatatggtggagaaaaaccaaatcaacagatctttgttggcacttctcgacgaaaacatagccaatgcatacaaaggaaaccagaaagaagcaggagattacatggagaagatacgctcttcagttcttaagtatttgacagtgtaggatcatatgagtcttcgaaagatttctcaagcttttgaatgttttctattatcggggaaaattgtatttatatttttgtttgttgagtaaaatgtattttctttttttccgaacgatgtttatatttttagggtcatttcagatcttcaagtaataaaaagaatttaat

SEQ ID NO: 80804 - protein, 250 aa, Arabidopsis thaliana
  peptide (1)..(250): Ceres Seq. ID no. 12657234
  misc_feature (14)..(250): Homolog of NCBI NO: 15221583 NR Description: unknown protein; protein id: At1g62780.1, by cDNA: gi_18252920 [Arabidopsis thaliana] unknown protein [Arabidopsis thaliana]
  misc_feature (95)..(250): Homolog of NCBI NO: 25373192 NR Description: protein F23N19.15 [imported] - Arabidopsis >gi|6630456|gb|AAF19544.1|AC007190_12 F23N19.15 [Arabidopsis
  misc_feature (14)..(45): Homolog of NCBI NO: 25373192 NR Description: protein F23N19.15 [imported] - Arabidopsis >gi|6630456|gb|AAF19544.1|AC007190_12 F23N19.15 [Arabidopsis
  misc_feature (28)..(250): Homolog of NCBI NO: 29368099 NR Description: unknown [Oryza sativa (japonica cultivar-group)]
KKAELTLRKQKTKMATLSFGIAAAATTVRTIPRFNSRRSKITCEWDPKGVLGPAQTGHIARLEFKRRLERDSEAREAFQKQLREEKERRQALRQSRVVPDTAAELIEYFLDTEAQEIEYEIARLRGRLNDEFFAQIRLEIGQIRFAVTKTADIEDRLIELETLQKALEEGIEAYDKMQNELMTATNSLTKLLTSTDIKTTLLDMVEKNQINRSLLALLDENIANAYKGNQKEAGDYMEKIRSSVLKYLTV

SEQ ID NO: 80805 - protein, 237 aa, Arabidopsis thaliana
  peptide (1)..(237): Ceres Seq. ID no. 12657235
  misc_feature (1)..(237): Homolog of NCBI NO: 15221583 NR Description: unknown protein; protein id: At1g62780.1, by cDNA: gi_18252920 [Arabidopsis thaliana] unknown protein [Arabidopsis thaliana]
  misc_feature (82)..(237): Homolog of NCBI NO: 25373192 NR Description: protein F23N19.15 [imported] - Arabidopsis >gi|6630456|gb|AAF19544.1|AC007190_12 F23N19.15 [Arabidopsis
  misc_feature (1)..(32): Homolog of NCBI NO: 25373192 NR Description: protein F23N19.15 [imported] - Arabidopsis >gi|6630456|gb|AAF19544.1|AC007190_12 F23N19.15 [Arabidopsis
  misc_feature (15)..(237): Homolog of NCBI NO: 29368099 NR Description: unknown [Oryza sativa (japonica cultivar-group)]
MATLSFGIAAAATTVRTIPRFNSRRSKITCEWDPKGVLGPAQTGHIARLEFKRRLERDSEAREAFQKQLREEKERRQALRQSRVVPDTAAELIEYFLDTEAQEIEYEIARLRGRLNDEFFAQIRLEIGQIRFAVTKTADIEDRLIELETLQKALEEGIEAYDKMQNELMTATNSLTKLLTSTDIKTTLLDMVEKNQINRSLLALLDENIANAYKGNQKEAGDYMEKIRSSVLKYLTV

SEQ ID NO: 80806 - DNA, 774 bp, Arabidopsis thaliana
  misc_feature (1)..(774): Ceres Seq. ID no. 12657267
  misc_feature: MA Experiment ID: 20000180 Result: Up-regulated in Transcription
  misc_feature: MA Experiment 20000180 PARAMETER Experiment Name: At_Germinating_Seeds_P Parameter: Age (hr) Value: 24 vs. 0
  misc_feature: MA Experiment 20000180 PARAMETER Experiment Name: At_Germinating_Seeds_P Parameter: Tissue Value: Germinating Seeds
  misc_feature: MA Experiment ID: 20000184 Result: Up-regulated in Transcription
  misc_feature: MA Experiment 20000184 PARAMETER Experiment Name: At_Shoots__P Parameter: Age (day) Value: 7
  misc_feature: MA Experiment 20000184 PARAMETER Experiment Name: At_Shoots__P Parameter: Tissue Value: Shoots vs. Whole Plant
  misc_feature: MA Experiment ID: 20000185 Result: Up-regulated in Transcription
  misc_feature: MA Experiment 20000185 PARAMETER Experiment Name: At_Roots__P Parameter: Age (day) Value: 7 vs. 21
  misc_feature: MA Experiment 20000185 PARAMETER Experiment Name: At_Roots__P Parameter: Organism Value: A. thaliana
  misc_feature: MA Experiment 20000185 PARAMETER Experiment Name: At_Roots__P Parameter: Tissue Value: Roots vs. Whole Plant
  misc_feature: MA Experiment ID: 20000439 Result: Up-regulated in Transcription
  misc_feature: MA Experiment 20000439 PARAMETER Experiment Name: At_Roots__P Parameter: Age (day) Value: 14 vs. 21
  misc_feature: MA Experiment 20000439 PARAMETER Experiment Name: At_Roots__P Parameter: Organism Value: A. thaliana
  misc_feature: MA Experiment 20000439 PARAMETER Experiment Name: At_Roots__P Parameter: Tissue Value: Roots vs. Whole Plant
  misc_feature: MA Experiment ID: 20000527 Result: Down-regulated in Transcription
  misc_feature: MA Experiment 20000527 PARAMETER Experiment Name: At_10percent_PEG_P Parameter: Age (day) Value: 20
  misc_feature: MA Experiment 20000527 PARAMETER Experiment Name: At_10percent_PEG_P Parameter: Organism Value: A. thaliana
  misc_feature: MA Experiment 20000527 PARAMETER Experiment Name: At_10percent_PEG_P Parameter: Plant Line Value: WS
  misc_feature: MA Experiment 20000527 PARAMETER Experiment Name: At_10percent_PEG_P Parameter: Timepoint (day) Value: 20
  misc_feature: MA Experiment 20000527 PARAMETER Experiment Name: At_10percent_PEG_P Parameter: Tissue Value: Whole Plant
  misc_feature: MA Experiment 20000527 PARAMETER Experiment Name: At_10percent_PEG_P Parameter: Treatment Value: 10percent PEG vs. No Treatment
atggatcaaaatttgtatcgcaagtgcctggttattttatcgatgatggcaatgatcggcacatcaatggctacatatgccgggaccccatggcgtacagcctcagccactttttacggtgacgacaccggcagcgcaactatgggtggggcttgtggctatggtaacatgtatgacagcggctacggggtagccacgactgcgctgagcacagccctgttcaacgagggttatgcatgcggtcaatgtttccagttaaagtgtgtgtcgtcgcctaactgctactacgggtcaccagccaccgtggtaactgcaaccaacatatgtccaccaaattatggccaagcatccaacaatggtggatggtgtaatccgccacgagtccattttgatttgactaaaccagcttttatgaagatcgctaactggaaggctggtatcatccccgtctcatatcgcagagtggcatgtaagaagatcggaggaataaggttcaaatttgaaggaaatggatattggctacttgtgtacgtgatgaacgtaggtggtccaggtgacatcaagaccatggccgttaaaggtagccgcacagggtggatcaacatgagccataactggggagcttcgtaccaagccttttcttctctctacggtcagtctctctcgttccggctcacctcttacaccactcgtcagaccatttacgcttataatgctgctccggcaagctggagcgcgggcaagacctaccagagcaaggctaattttaactaa

SEQ ID NO: 80807 - protein, 257 aa, Arabidopsis thaliana
  peptide (1)..(257): Ceres Seq. ID no. 12657268
  misc_feature (163)..(241): Pfam Name: Pollen allergen Pfam Description: Pollen allergen
  misc_feature (1)..(257): Homolog of NCBI NO: 15221643 NR Description: expansin, putative; protein id: At1g62980.1, by cDNA: gi_12083295 [Arabidopsis thaliana]
  misc_feature (11)..(256): Homolog of NCBI NO: 15222017 NR Description: expansin, putative; protein id: At1g12560.1
  misc_feature (11)..(256): Homolog of NCBI NO: 25344424 NR Description: protein T12C24.10 [imported] - Arabidopsis >gi|9502371|gb|AAF88078.1|AC025417_6 T12C24.10 [Arabidopsis
  misc_feature (11)..(257): Homolog of NCBI NO: 37536438 NR Description: putative alpha-expansin protein [Oryza sativa
  misc_feature (11)..(256): Homolog of NCBI NO: 31506015 NR Description: expansin [Sambucus nigra]
  misc_feature (9)..(256): Homolog of NCBI NO: 13898655 NR Description: expansin [Prunus cerasus]
  misc_feature (9)..(256): Homolog of NCBI NO: 29466643 NR Description: expansin [Prunus persica]
  misc_feature (26)..(256): Homolog of NCBI NO: 15224330 NR Description: expansin, putative; protein id: At2g37640.1, by cDNA: gi_19699321 [Arabidopsis thaliana]
  misc_feature (26)..(256): Homolog of NCBI NO: 16923359 NR Description: alpha-expansin 6 precursor [Cucumis sativus]
  misc_feature (26)..(256): Homolog of NCBI NO: 15233283 NR Description: expansin, putative; protein id: At3g55500.1
MDQNLYRKCLVILSMMAMIGTSMATYAGTPWRTASATFYGDDTGSATMGGACGYGNMYDSGYGVATTALSTALFNEGYACGQCFQLKCVSSPNCYYGSPATVVTATNICPPNYGQASNNGGWCNPPRVHFDLTKPAFMKIANWKAGIIPVSYRRVACKKIGGIRFKFEGNGYWLLVYVMNVGGPGDIKTMAVKGSRTGWINMSHNWGASYQAFSSLYGQSLSFRLTSYTTRQTIYAYNAAPASWSAGKTYQSKANFN

SEQ ID NO: 80808 - protein, 243 aa, Arabidopsis thaliana
  peptide (1)..(243): Ceres Seq. ID no. 12657269
  misc_feature (149)..(227): Pfam Name: Pollen allergen Pfam Description: Pollen allergen
  misc_feature (1)..(243): Homolog of NCBI NO: 15221643 NR Description: expansin, putative; protein id: At1g62980.1, by cDNA: gi_12083295 [Arabidopsis thaliana]
  misc_feature (1)..(242): Homolog of NCBI NO: 15222017 NR Description: expansin, putative; protein id: At1g12560.1
  misc_feature (1)..(242): Homolog of NCBI NO: 25344424 NR Description: protein T12C24.10 [imported] - Arabidopsis >gi|9502371|gb|AAF88078.1|AC025417_6 T12C24.10 [Arabidopsis
  misc_feature (1)..(243): Homolog of NCBI NO: 37536438 NR Description: putative alpha-expansin protein [Oryza sativa
  misc_feature (1)..(242): Homolog of NCBI NO: 31506015 NR Description: expansin [Sambucus nigra]
  misc_feature (1)..(242): Homolog of NCBI NO: 13898655 NR Description: expansin [Prunus cerasus]
  misc_feature (1)..(242): Homolog of NCBI NO: 29466643 NR Description: expansin [Prunus persica]
  misc_feature (12)..(242): Homolog of NCBI NO: 15224330 NR Description: expansin, putative; protein id: At2g37640.1, by cDNA: gi_19699321 [Arabidopsis thaliana]
  misc_feature (12)..(242): Homolog of NCBI NO: 15233283 NR Description: expansin, putative; protein id: At3g55500.1
  misc_feature (12)..(242): Homolog of NCBI NO: 16923359 NR Description: alpha-expansin 6 precursor [Cucumis sativus]
MMAMIGTSMATYAGTPWRTASATFYGDDTGSATMGGACGYGNMYDSGYGVATTALSTALFNEGYACGQCFQLKCVSSPNCYYGSPATVVTATNICPPNYGQASNNGGWCNPPRVHFDLTKPAFMKIANWKAGIIPVSYRRVACKKIGGIRFKFEGNGYWLLVYVMNVGGPGDIKTMAVKGSRTGWINMSHNWGASYQAFSSLYGQSLSFRLTSYTTRQTIYAYNAAPASWSAGKTYQSKANFN

SEQ ID NO: 80809 - protein, 242 aa, Arabidopsis thaliana
  peptide (1)..(242): Ceres Seq. ID no. 12657270
  misc_feature (148)..(226): Pfam Name: Pollen allergen Pfam Description: Pollen allergen
  misc_feature (1)..(242): Homolog of NCBI NO: 15221643 NR Description: expansin, putative; protein id: At1g62980.1, by cDNA: gi_12083295 [Arabidopsis thaliana]
  misc_feature (1)..(241): Homolog of NCBI NO: 15222017 NR Description: expansin, putative; protein id: At1g12560.1
  misc_feature (1)..(241): Homolog of NCBI NO: 25344424 NR Description: protein T12C24.10 [imported] - Arabidopsis >gi|9502371|gb|AAF88078.1|AC025417_6 T12C24.10 [Arabidopsis
  misc_feature (1)..(242): Homolog of NCBI NO: 37536438 NR Description: putative alpha-expansin protein [Oryza sativa
  misc_feature (1)..(241): Homolog of NCBI NO: 31506015 NR Description: expansin [Sambucus nigra]
  misc_feature (1)..(241): Homolog of NCBI NO: 13898655 NR Description: expansin [Prunus cerasus]
  misc_feature (1)..(241): Homolog of NCBI NO: 29466643 NR Description: expansin [Prunus persica]
  misc_feature (11)..(241): Homolog of NCBI NO: 15224330 NR Description: expansin, putative; protein id: At2g37640.1, by cDNA: gi_19699321 [Arabidopsis thaliana]
  misc_feature (11)..(241): Homolog of NCBI NO: 16923359 NR Description: alpha-expansin 6 precursor [Cucumis sativus]
  misc_feature (11)..(241): Homolog of NCBI NO: 15233283 NR Description: expansin, putative; protein id: At3g55500.1
MAMIGTSMATYAGTPWRTASATFYGDDTGSATMGGACGYGNMYDSGYGVATTALSTALFNEGYACGQCFQLKCVSSPNCYYGSPATVVTATNICPPNYGQASNNGGWCNPPRVHFDLTKPAFMKIANWKAGIIPVSYRRVACKKIGGIRFKFEGNGYWLLVYVMNVGGPGDIKTMAVKGSRTGWINMSHNWGASYQAFSSLYGQSLSFRLTSYTTRQTIYAYNAAPASWSAGKTYQSKANFN

SEQ ID NO: 80810 - DNA, 546 bp, Arabidopsis thaliana
  misc_feature (1)..(546): Ceres Seq. ID no. 12657275
  misc_feature: MA Experiment ID: 20000234 Result: Down-regulated in Transcription
  misc_feature: MA Experiment 20000234 PARAMETER Experiment Name: At_Siliques_P Parameter: Age (day) Value: 21
  misc_feature: MA Experiment 20000234 PARAMETER Experiment Name: At_Siliques_P Parameter: Organism Value: A. thaliana
  misc_feature: MA Experiment 20000234 PARAMETER Experiment Name: At_Siliques_P Parameter: Plant Line Value: WS
  misc_feature: MA Experiment 20000234 PARAMETER Experiment Name: At_Siliques_P Parameter: Tissue Value: Less Than 5mm Siliques vs. Whole Plant
  misc_feature: MA Experiment ID: 20000235 Result: Down-regulated in Transcription
  misc_feature: MA Experiment 20000235 PARAMETER Experiment Name: At_Siliques_P Parameter: Age (day) Value: 21
  misc_feature: MA Experiment 20000235 PARAMETER Experiment Name: At_Siliques_P Parameter: Organism Value: A. thaliana
  misc_feature: MA Experiment 20000235 PARAMETER Experiment Name: At_Siliques_P Parameter: Plant Line Value: WS
  misc_feature: MA Experiment 20000235 PARAMETER Experiment Name: At_Siliques_P Parameter: Tissue Value: 5-10mm Siliques vs. Whole Plant
  misc_feature: MA Experiment ID: 20000264 Result: Down-regulated in Transcription
  misc_feature: MA Experiment 20000264 PARAMETER Experiment Name: At_Open_Flower_P Parameter: Age (day) Value: 21
  misc_feature: MA Experiment 20000264 PARAMETER Experiment Name: At_Open_Flower_P Parameter: Plant Line Value: WS
  misc_feature: MA Experiment 20000264 PARAMETER Experiment Name: At_Open_Flower_P Parameter: Tissue Value: Open Flower vs. Whole Plant
  misc_feature: MA Experiment ID: 20000265 Result: Down-regulated in Transcription
  misc_feature: MA Experiment 20000265 PARAMETER Experiment Name: At_Open_Flower_P Parameter: Age (day) Value: 21
  misc_feature: MA Experiment 20000265 PARAMETER Experiment Name: At_Open_Flower_P Parameter: Plant Line Value: WS
  misc_feature: MA Experiment 20000265 PARAMETER Experiment Name: At_Open_Flower_P Parameter: Tissue Value: Closed Flower vs. Whole Plant
  misc_feature: MA Experiment ID: 20000286 Result: Down-regulated in Transcription
  misc_feature: MA Experiment 20000286 PARAMETER Experiment Name: At_Open_Flower_P Parameter: Age (day) Value: 21
  misc_feature: MA Experiment 20000286 PARAMETER Experiment Name: At_Open_Flower_P Parameter: Plant Line Value: WS
  misc_feature: MA Experiment 20000286 PARAMETER Experiment Name: At_Open_Flower_P Parameter: Tissue Value: Half Open vs. Whole Plant
  misc_feature: MA Experiment ID: 20000453 Result: Up-regulated in Transcription
  misc_feature: MA Experiment 20000453 PARAMETER Experiment Name: At_100uM_ABA_P Parameter: Age (day) Value: 15
  misc_feature: MA Experiment 20000453 PARAMETER Experiment Name: At_100uM_ABA_P Parameter: Organism Value: A. thaliana
  misc_feature: MA Experiment 20000453 PARAMETER Experiment Name: At_100uM_ABA_P Parameter: Plant Line Value: WS
  misc_feature: MA Experiment 20000453 PARAMETER Experiment Name: At_100uM_ABA_P Parameter: Timepoint (hr) Value: 24
  misc_feature: MA Experiment 20000453 PARAMETER Experiment Name: At_100uM_ABA_P Parameter: Tissue Value: Aerial
  misc_feature: MA Experiment 20000453 PARAMETER Experiment Name: At_100uM_ABA_P Parameter: Treatment Value: 100uM ABA vs. No Treatment
  misc_feature: MA Experiment ID: 20000495 Result: Down-regulated in Transcription
  misc_feature: MA Experiment 20000495 PARAMETER Experiment Name: At_Guard_Cells_P Parameter: Harvest Date Value: 8/2/2002
  misc_feature: MA Experiment 20000495 PARAMETER Experiment Name: At_Guard_Cells_P Parameter: Organism Value: A. thaliana
  misc_feature: MA Experiment 20000495 PARAMETER Experiment Name: At_Guard_Cells_P Parameter: Tissue Value: Guard Cells vs. Leaves
  misc_feature: MA Experiment ID: 20000794 Result: Down-regulated in Transcription
  misc_feature: MA Experiment 20000794 PARAMETER Experiment Name: At_Petals_P Parameter: Age (day) Value: 23-25 days
  misc_feature: MA Experiment 20000794 PARAMETER Experiment Name: At_Petals_P Parameter: Plant Line Value: WS
  misc_feature: MA Experiment 20000794 PARAMETER Experiment Name: At_Petals_P Parameter: Tissue Value: Petals vs. Whole plant
  misc_feature: MA Experiment ID: 20001904 Result: Down-regulated in Transcription
  misc_feature: MA Experiment 20001904 PARAMETER Experiment Name: At_Drought_Reproduction_P Parameter: Age (day) Value: 37
  misc_feature: MA Experiment 20001904 PARAMETER Experiment Name: At_Drought_Reproduction_P Parameter: Organism Value: A. thaliana
  misc_feature: MA Experiment 20001904 PARAMETER Experiment Name: At_Drought_Reproduction_P Parameter: Plant Line Value: WS
  misc_feature: MA Experiment 20001904 PARAMETER Experiment Name: At_Drought_Reproduction_P Parameter: Timepoint (day) Value: 7
  misc_feature: MA Experiment 20001904 PARAMETER Experiment Name: At_Drought_Reproduction_P Parameter: Tissue Value: Rosettes
  misc_feature: MA Experiment 20001904 PARAMETER Experiment Name: At_Drought_Reproduction_P Parameter: Treatment Value: Drought vs. No Drought
atggaaaacgacgatatcaccgtggcggagatgaagccaaagaagcgtgctggacggaggattttcaaggagacacgtcacccaatctacagaggcgtgcggcgtagggacggcgacaaatgggtatgcgaagtccgtgaaccgattcatcagcgtcgagtctggctcggaacttatccgacggcagatatggccgcacgtgctcacgacgtggcggttcttgctctgcgcgggagatccgcgtgtttgaatttctccgattctgcttggaggttgccggtgccggcatccactgatccggacacgatcaggcgcacggcggccgaagcagcggagatgttcaggccgccggagtttagtacaggaattacggttttaccctcagccagtgagtttgacacgtcggatgaaggagtcgctggaatgatgatgaggctcgcggaggagccgttgatgtcgccgccaagatcgtacattgatatgaatacgagtgtgtacgtggacgaagaaatgtgttacgaagatttgtcactttggagttactaa

SEQ ID NO: 80811 - protein, 181 aa, Arabidopsis thaliana
  peptide (1)..(181): Ceres Seq. ID no. 12657276
  misc_feature (27)..(91): Pfam Name: AP2 domain Pfam Description: AP2 domain
  misc_feature (1)..(181): Homolog of NCBI NO: 15221664 NR Description: transcription factor DREB1A, putative; protein At1g63030.1 [Arabidopsis thaliana] >gi|25404392|pir||E96655
  misc_feature (1)..(131): Homolog of NCBI NO: 15222028 NR Description: transcriptional activator CBF1, putative; protein At1g12610.1 [Arabidopsis thaliana] >gi|25350646|pir||H86259
  misc_feature (128)..(181): Homolog of NCBI NO: 15222028 NR Description: transcriptional activator CBF1, putative; protein At1g12610.1 [Arabidopsis thaliana] >gi|25350646|pir||H86259
  misc_feature (1)..(180): Homolog of NCBI NO: 23495458 NR Description: dehydratiion responsive element binding protein 1
  misc_feature (3)..(181): Homolog of NCBI NO: 37147896 NR Description: CaCBF1B [Capsicum annuum]
  misc_feature (3)..(181): Homolog of NCBI NO: 12003384 NR Description: Avr9/Cf-9 rapidly elicited protein 111B
  misc_feature (5)..(119): Homolog of NCBI NO: 23495460 NR Description: dehydration responsive element binding protein 1
  misc_feature (3)..(181): Homolog of NCBI NO: 40647095 NR Description: DREB-like protein 1 [Capsicum annuum]
  misc_feature (4)..(181): Homolog of NCBI NO: 18535580 NR Description: putative transcriptional activator CBF1
  misc_feature (8)..(181): Homolog of NCBI NO: 12003382 NR Description: Avr9/Cf-9 rapidly elicited protein 111A
MENDDITVAEMKPKKRAGRRIFKETRHPIYRGVRRRDGDKWVCEVREPIHQRRVWLGTYPTADMAARAHDVAVLALRGRSACLNFSDSAWRLPVPASTDPDTIRRTAAEAAEMFRPPEFSTGITVLPSASEFDTSDEGVAGMMMRLAEEPLMSPPRSYIDMNTSVYVDEEMCYEDLSLWSY

SEQ ID NO: 80812 - protein, 171 aa, Arabidopsis thaliana
  peptide (1)..(171): Ceres Seq. ID no. 12657277
  misc_feature (17)..(81): Pfam Name: AP2 domain Pfam Description: AP2 domain
  misc_feature (1)..(171): Homolog of NCBI NO: 15221664 NR Description: transcription factor DREB1A, putative; protein At1g63030.1 [Arabidopsis thaliana] >gi|25404392|pir||E96655
  misc_feature (1)..(121): Homolog of NCBI NO: 15222028 NR Description: transcriptional activator CBF1, putative; protein At1g12610.1 [Arabidopsis thaliana] >gi|25350646|pir||H86259
  misc_feature (118)..(171): Homolog of NCBI NO: 15222028 NR Description: transcriptional activator CBF1, putative; protein At1g12610.1 [Arabidopsis thaliana] >gi|25350646|pir||H86259
  misc_feature (1)..(170): Homolog of NCBI NO: 23495458 NR Description: dehydratiion responsive element binding protein 1
  misc_feature (1)..(171): Homolog of NCBI NO: 37147896 NR Description: CaCBF1B [Capsicum annuum]
  misc_feature (1)..(171): Homolog of NCBI NO: 12003384 NR Description: Avr9/Cf-9 rapidly elicited protein 111B
  misc_feature (1)..(109): Homolog of NCBI NO: 23495460 NR Description: dehydration responsive element binding protein 1
  misc_feature (1)..(171): Homolog of NCBI NO: 40647095 NR Description: DREB-like protein 1 [Capsicum annuum]
  misc_feature (1)..(171): Homolog of NCBI NO: 18535580 NR Description: putative transcriptional activator CBF1
  misc_feature (1)..(171): Homolog of NCBI NO: 12003382 NR Description: Avr9/Cf-9 rapidly elicited protein 111A
MKPKKRAGRRIFKETRHPIYRGVRRRDGDKWVCEVREPIHQRRVWLGTYPTADMAARAHDVAVLALRGRSACLNFSDSAWRLPVPASTDPDTIRRTAAEAAEMFRPPEFSTGITVLPSASEFDTSDEGVAGMMMRLAEEPLMSPPRSYIDMNTSVYVDEEMCYEDLSLWSY

SEQ ID NO: 80813 - protein, 118 aa, Arabidopsis thaliana
  peptide (1)..(118): Ceres Seq. ID no. 12657278
  misc_feature (1)..(118): Homolog of NCBI NO: 15221664 NR Description: transcription factor DREB1A, putative; protein At1g63030.1 [Arabidopsis thaliana] >gi|25404392|pir||E96655
  misc_feature (1)..(68): Homolog of NCBI NO: 15222028 NR Description: transcriptional activator CBF1, putative; protein At1g12610.1 [Arabidopsis thaliana] >gi|25350646|pir||H86259
  misc_feature (65)..(118): Homolog of NCBI NO: 15222028 NR Description: transcriptional activator CBF1, putative; protein At1g12610.1 [Arabidopsis thaliana] >gi|25350646|pir||H86259
  misc_feature (1)..(117): Homolog of NCBI NO: 23495458 NR Description: dehydratiion responsive element binding protein 1
  misc_feature (1)..(118): Homolog of NCBI NO: 37147896 NR Description: CaCBF1B [Capsicum annuum]
  misc_feature (1)..(118): Homolog of NCBI NO: 12003384 NR Description: Avr9/Cf-9 rapidly elicited protein 111B
  misc_feature (1)..(56): Homolog of NCBI NO: 23495460 NR Description: dehydration responsive element binding protein 1
  misc_feature (1)..(118): Homolog of NCBI NO: 40647095 NR Description: DREB-like protein 1 [Capsicum annuum]
  misc_feature (1)..(118): Homolog of NCBI NO: 18535580 NR Description: putative transcriptional activator CBF1
  misc_feature (1)..(118): Homolog of NCBI NO: 12003382 NR Description: Avr9/Cf-9 rapidly elicited protein 111A
MAARAHDVAVLALRGRSACLNFSDSAWRLPVPASTDPDTIRRTAAEAAEMFRPPEFSTGITVLPSASEFDTSDEGVAGMMMRLAEEPLMSPPRSYIDMNTSVYVDEEMCYEDLSLWSY

SEQ ID NO: 80814 - DNA, 2419 bp, Arabidopsis thaliana
  misc_feature (1)..(2419): Ceres Seq. ID no. 12657295
  misc_feature: MA Experiment ID: 20000328 Result: Down-regulated in Transcription
  misc_feature: MA Experiment 20000328 PARAMETER Experiment Name: At_42deg_Heat_Sub_P Parameter: Age (day) Value: 14
  misc_feature: MA Experiment 20000328 PARAMETER Experiment Name: At_42deg_Heat_Sub_P Parameter: Organism Value: A. thaliana
  misc_feature: MA Experiment 20000328 PARAMETER Experiment Name: At_42deg_Heat_Sub_P Parameter: Plant Line Value: WS
  misc_feature: MA Experiment 20000328 PARAMETER Experiment Name: At_42deg_Heat_Sub_P Parameter: Temperature (deg C) Value: 42 vs. 22
  misc_feature: MA Experiment 20000328 PARAMETER Experiment Name: At_42deg_Heat_Sub_P Parameter: Timepoint (hr) Value: 6
  misc_feature: MA Experiment 20000328 PARAMETER Experiment Name: At_42deg_Heat_Sub_P Parameter: Tissue Value: Aerial
accaaaagttcaaacctttactctctctgtctgcaaaaggttcatcatttagggtttatacaagtttacagagagtttacgattctgaatcagtgattttggaagaaaccccaatcagctgaagatgaggagattgtttgcgatttcatcgacgggaaacagatttgttcatcggagtcttctcggaaaaggtaaatgtggaactgctcctccttcctttagccattgcagtttctgggtacgagatttctctggtgttagatatgattacagaaaaatatcgataaataggctaaatgatttgaagctagatgatgcggttaatctgttcggtgacatggtcaagtctcgtcctttcccttcgattgttgagttcagtaaactgttgagtgccattgctaagatgaacaagttcgatcttgtcatctctctcggcgagcagatgcaaaatttgggaatttcacataatctttacacatacagtattctcatcaactgtttctgccgacgctctcagctctctcttgctttagctgttcttgccaagatgatgaaactcggctatgagcccgatattgtcacgcttaactctctgctcaatggtttctgtcacgggaataggatttcagatgccgtatctcttgttggtcagatggtggaaatgggatatcagcccgattcattcacattcaacactctaattcatggactttttcgccacaacagagcttcagaagcagtggctttagttgaccggatggttgtgaaaggttgtcaaccagatctggttacttatggtattgtagtaaatggattatgtaagagaggtgatattgatttggctttgagtttgttaaagaagatggaacaagggaaaatagagcctggtgttgtgatctacaacactatcattgatgctctttgcaactacaaaaacgtgaatgatgcactcaatctgttcactgaaatggataacaaaggaattagaccaaatgttgttacctacaactccctcataagatgcctttgtaattacggaagatggagtgatgcttctcgactactcagtgatatgattgagaggaaaatcaatccaaatgtagtcactttcagcgcattgattgatgcatttgtgaaggaggggaagcttgtagaggctgagaaattgtacgacgagatgatcaaaaggtctatagatcctgatattttcacttatagttcactgatcaatgggttttgtatgcacgatcgtttagacgaggccaagcacatgtttgagttgatgattagcaaggactgtttcccaaacgtagtgacttacaatactcttataaagggattttgtaaggctaagagagtagacgaaggtatggaactcttccgcgagatgtctcaaagaggattggttggcaacacagtcacttacaccactcttatccatggattttttcaagctagagagtgtgataatgcccaaatagttttcaaacagatggtttctgatggtgtgcttcccgatattatgacatacagcattttattagatgggctttgtaataatgggaaggtagagacagcattggtggtgtttgagtatctgcaaaggagtaaaatggaacctgatatttacacatataatattatgattgaagggatgtgcaaggcagggaaggtggaagatgggtgggatctattttgtagcctcagccttaaaggagtgaagcctaatgttgtaacctacacaacaatgatgtcaggattttgtaggaaaggtttaaaggaagaagcagatgccttgtttagagaaatgaaagaagaagggcctcttccagatagtggtacatataatacgcttatcagggcacatctgagagatggtgacaaagcagcatcagctgaactcatcagagaaatgaggagttgcaggtttgttggagatgcttcaaccattggcttggtcactaatatgttgcatgatgggagattggacaaaagctttctcaagatgctttcttaaaacagtttatcctcgagagaagaggatcgtgaggtgaatcaagtctttatgttgccttactctgtttacttctcaagctacatgtgtgtatttggttgctgtcgtgtgtgtaagcttcatgaagatgactgatactttgctttgtgtaattcattgttaggttaacacacacgagatcaatttgtgagcatcagaacaagatctcagacgtgtcattattatggttttactgtagtagatttggtttttaaccaaacgtattttataattcttgttttgaatgattgctagcagtttctagttccttttggttcaaaaaaataacttgatttggattcttattcccagtgacatttgtaacgtggattttattttggtggtaatattttaaaccggtttgac

SEQ ID NO: 80815 - protein, 630 aa, Arabidopsis thaliana
  peptide (1)..(630): Ceres Seq. ID no. 12657296
  misc_feature (362)..(396): Pfam Name: PPR repeat Pfam Description: PPR repeat
  misc_feature (6)..(630): Homolog of NCBI NO: 25404377 NR Description: hypothetical protein F16P17.5 [imported] - thaliana >gi|8493578|gb|AAF75801.1|AC011000_4 Contains a RepB protein domain and multiple PPR PF|01535 repeats. [Arabidopsis
  misc_feature (42)..(630): Homolog of NCBI NO: 25404380 NR Description: hypothetical protein F16P17.7 [imported] - thaliana >gi|8493580|gb|AAF75803.1|AC011000_6 Contains weak to leaf protein from Ipomea nil gb|D85101 and contains a RepB
  misc_feature (1)..(630): Homolog of NCBI NO: 15221549 NR Description: PPR-repeat protein; protein id: At1g62670.1
  misc_feature (6)..(611): Homolog of NCBI NO: 15221621 NR Description: unknown protein; protein id: At1g62910.1
  misc_feature (42)..(623): Homolog of NCBI NO: 15221635 NR Description: unknown protein; protein id: At1g62930.1
  misc_feature (9)..(630): Homolog of NCBI NO: 15221674 NR Description: unknown protein; protein id: At1g63080.1
  misc_feature (18)..(630): Homolog of NCBI NO: 6630464 NR Description: F23N19.4 [Arabidopsis thaliana]
  misc_feature (7)..(630): Homolog of NCBI NO: 15221515 NR Description: putative membrane-associated salt-inducible (AL021637); similar to EST gb|AA728420; protein id: At1g62590.1
  misc_feature (37)..(630): Homolog of NCBI NO: 22531122 NR Description: putative membrane-associated salt-inducible
  misc_feature (44)..(530): Homolog of NCBI NO: 15221621 NR Description: unknown protein; protein id: At1g62910.1
MRRLFAISSTGNRFVHRSLLGKGKCGTAPPSFSHCSFWVRDFSGVRYDYRKISINRLNDLKLDDAVNLFGDMVKSRPFPSIVEFSKLLSAIAKMNKFDLVISLGEQMQNLGISHNLYTYSILINCFCRRSQLSLALAVLAKMMKLGYEPDIVTLNSLLNGFCHGNRISDAVSLVGQMVEMGYQPDSFTFNTLIHGLFRHNRASEAVALVDRMVVKGCQPDLVTYGIVVNGLCKRGDIDLALSLLKKMEQGKIEPGVVIYNTIIDALCNYKNVNDALNLFTEMDNKGIRPNVVTYNSLIRCLCNYGRWSDASRLLSDMIERKINPNVVTFSALIDAFVKEGKLVEAEKLYDEMIKRSIDPDIFTYSSLINGFCMHDRLDEAKHMFELMISKDCFPNVVTYNTLIKGFCKAKRVDEGMELFREMSQRGLVGNTVTYTTLIHGFFQARECDNAQIVFKQMVSDGVLPDIMTYSILLDGLCNNGKVETALVVFEYLQRSKMEPDIYTYNIMIEGMCKAGKVEDGWDLFCSLSLKGVKPNVVTYTTMMSGFCRKGLKEEADALFREMKEEGPLPDSGTYNTLIRAHLRDGDKAASAELIREMRSCRFVGDASTIGLVTNMLHDGRLDKSFLKMLS

SEQ ID NO: 80816 - protein, 559 aa, Arabidopsis thaliana
  peptide (1)..(559): Ceres Seq. ID no. 12657297
  misc_feature (291)..(325): Pfam Name: PPR repeat Pfam Description: PPR repeat
  misc_feature (1)..(559): Homolog of NCBI NO: 25404377 NR Description: hypothetical protein F16P17.5 [imported] - thaliana >gi|8493578|gb|AAF75801.1|AC011000_4 Contains a RepB protein domain and multiple PPR PF|01535 repeats. [Arabidopsis
  misc_feature (1)..(559): Homolog of NCBI NO: 25404380 NR Description: hypothetical protein F16P17.7 [imported] - thaliana >gi|8493580|gb|AAF75803.1|AC011000_6 Contains weak to leaf protein from Ipomea nil gb|D85101 and contains a RepB
  misc_feature (1)..(559): Homolog of NCBI NO: 15221549 NR Description: PPR-repeat protein; protein id: At1g62670.1
  misc_feature (1)..(540): Homolog of NCBI NO: 15221621 NR Description: unknown protein; protein id: At1g62910.1
  misc_feature (1)..(552): Homolog of NCBI NO: 15221635 NR Description: unknown protein; protein id: At1g62930.1
  misc_feature (1)..(559): Homolog of NCBI NO: 15221674 NR Description: unknown protein; protein id: At1g63080.1
  misc_feature (1)..(559): Homolog of NCBI NO: 6630464 NR Description: F23N19.4 [Arabidopsis thaliana]
  misc_feature (1)..(559): Homolog of NCBI NO: 15221515 NR Description: putative membrane-associated salt-inducible (AL021637); similar to EST gb|AA728420; protein id: At1g62590.1
  misc_feature (1)..(559): Homolog of NCBI NO: 22531122 NR Description: putative membrane-associated salt-inducible
  misc_feature (1)..(459): Homolog of NCBI NO: 15221621 NR Description: unknown protein; protein id: At1g62910.1
MVKSRPFPSIVEFSKLLSAIAKMNKFDLVISLGEQMQNLGISHNLYTYSILINCFCRRSQLSLALAVLAKMMKLGYEPDIVTLNSLLNGFCHGNRISDAVSLVGQMVEMGYQPDSFTFNTLIHGLFRHNRASEAVALVDRMVVKGCQPDLVTYGIVVNGLCKRGDIDLALSLLKKMEQGKIEPGVVIYNTIIDALCNYKNVNDALNLFTEMDNKGIRPNVVTYNSLIRCLCNYGRWSDASRLLSDMIERKINPNVVTFSALIDAFVKEGKLVEAEKLYDEMIKRSIDPDIFTYSSLINGFCMHDRLDEAKHMFELMISKDCFPNVVTYNTLIKGFCKAKRVDEGMELFREMSQRGLVGNTVTYTTLIHGFFQARECDNAQIVFKQMVSDGVLPDIMTYSILLDGLCNNGKVETALVVFEYLQRSKMEPDIYTYNIMIEGMCKAGKVEDGWDLFCSLSLKGVKPNVVTYTTMMSGFCRKGLKEEADALFREMKEEGPLPDSGTYNTLIRAHLRDGDKAASAELIREMRSCRFVGDASTIGLVTNMLHDGRLDKSFLKMLS

SEQ ID NO: 80817 - protein, 537 aa, Arabidopsis thaliana
  peptide (1)..(537): Ceres Seq. ID no. 12657298
  misc_feature (269)..(303): Pfam Name: PPR repeat Pfam Description: PPR repeat
  misc_feature (1)..(537): Homolog of NCBI NO: 25404377 NR Description: hypothetical protein F16P17.5 [imported] - thaliana >gi|8493578|gb|AAF75801.1|AC011000_4 Contains a RepB protein domain and multiple PPR PF|01535 repeats. [Arabidopsis
  misc_feature (1)..(537): Homolog of NCBI NO: 25404380 NR Description: hypothetical protein F16P17.7 [imported] - thaliana >gi|8493580|gb|AAF75803.1|AC011000_6 Contains weak to leaf protein from Ipomea nil gb|D85101 and contains a RepB
  misc_feature (1)..(537): Homolog of NCBI NO: 15221549 NR Description: PPR-repeat protein; protein id: At1g62670.1
  misc_feature (1)..(518): Homolog of NCBI NO: 15221621 NR Description: unknown protein; protein id: At1g62910.1
  misc_feature (1)..(530): Homolog of NCBI NO: 15221635 NR Description: unknown protein; protein id: At1g62930.1
  misc_feature (1)..(537): Homolog of NCBI NO: 15221674 NR Description: unknown protein; protein id: At1g63080.1
  misc_feature (1)..(537): Homolog of NCBI NO: 6630464 NR Description: F23N19.4 [Arabidopsis thaliana]
  misc_feature (1)..(537): Homolog of NCBI NO: 15221515 NR Description: putative membrane-associated salt-inducible (AL021637); similar to EST gb|AA728420; protein id: At1g62590.1
  misc_feature (1)..(537): Homolog of NCBI NO: 22531122 NR Description: putative membrane-associated salt-inducible
  misc_feature (1)..(437): Homolog of NCBI NO: 15221621 NR Description: unknown protein; protein id: At1g62910.1
MNKFDLVISLGEQMQNLGISHNLYTYSILINCFCRRSQLSLALAVLAKMMKLGYEPDIVTLNSLLNGFCHGNRISDAVSLVGQMVEMGYQPDSFTFNTLIHGLFRHNRASEAVALVDRMVVKGCQPDLVTYGIVVNGLCKRGDIDLALSLLKKMEQGKIEPGVVIYNTIIDALCNYKNVNDALNLFTEMDNKGIRPNVVTYNSLIRCLCNYGRWSDASRLLSDMIERKINPNVVTFSALIDAFVKEGKLVEAEKLYDEMIKRSIDPDIFTYSSLINGFCMHDRLDEAKHMFELMISKDCFPNVVTYNTLIKGFCKAKRVDEGMELFREMSQRGLVGNTVTYTTLIHGFFQARECDNAQIVFKQMVSDGVLPDIMTYSILLDGLCNNGKVETALVVFEYLQRSKMEPDIYTYNIMIEGMCKAGKVEDGWDLFCSLSLKGVKPNVVTYTTMMSGFCRKGLKEEADALFREMKEEGPLPDSGTYNTLIRAHLRDGDKAASAELIREMRSCRFVGDASTIGLVTNMLHDGRLDKSFLKMLS

SEQ ID NO: 80818 - DNA, 2049 bp, Arabidopsis thaliana
  misc_feature (1)..(2049): Ceres Seq. ID no. 12657299
  misc_feature: MA Experiment ID: 20000184 Result: Down-regulated in Transcription
  misc_feature: MA Experiment 20000184 PARAMETER Experiment Name: At_Shoots__P Parameter: Age (day) Value: 7
  misc_feature: MA Experiment 20000184 PARAMETER Experiment Name: At_Shoots__P Parameter: Tissue Value: Shoots vs. Whole Plant
aagatgcagagatcgatttcattgacggccaaaagattgtttgttcattggaatctccaggggataggtaatcctccaactgttccttctttcttcaatctttgcggttccggttgctgggaacgatcttttgctagtgctagtggtgattacagagagatattgagaaataggctaagtgatattattaaggtagatgatgcggttgatctgttcggtgacatggtcaagtctcgtccatttccttccattgttgaattcaataaactgttgagtgccgttgctaagatgaacaagtttgaacttgtcatctctctcggcgagcagatgcaaactttgggaatttcacatgatctttacacatacagtattttcatcaactgcttttgccgacgctctcagctctctcttgctttagctgttcttgccaagatgatgaaactcggctatgagcccgatattgtcacgctttcttcgctgctcaatggctactgtcacagtaagaggatttctgatgccgtagctttggttgatcaaatggtcgaaatgggatataaacctgatacctttacattcacaactctaattcatggactttttcttcacaacaaagcttcagaagcagtggctttagttgatcaaatggttcaaagaggatgtcaaccagatctggttacttatggtaccgtagtaaacggattatgtaagagaggtgatattgatttggctttaaatctgctcaacaagatggaagctgcgagaataaaggctaatgttgtgatcttcaacacaatcatcgatagtctctgcaaatatagacatgtggaagttgctgttgacttattcactgaaatggaaaccaaaggaattagacctaatgttgtcacctacaattccctcattaattgcctttgtaattacggaagatggagtgatgcctctcgactactgagtaatatgcttgagaagaaaatcaaccccaatgttgttactttcaatgcattgatcgatgcgttttttaaagaggggaagcttgtagaggctgaaaaattgcacgaggagatgatccaaaggtctatagatccagatactatcacttacaatttattgatcaatgggttttgcatgcacaatcgcctagacgaggccaagcagatgtttaagttcatggttagcaaggactgtcttccaaatatacagacttataatacgcttataaatggattttgtaagtgtaaaagggttgaggatggtgtggaactcttccgcgagatgtctcaaaggggattagttggcaacacagtcacttacaccactattatccaagggttttttcaagctggcgactgtgattctgcccaaatggtattcaaacagatggtttctaatcgtgtgcctacagatattatgacatacagcattttgttgcatggactttgtagttatgggaagctagatacagcattggtcatattcaagtatctgcaaaagagtgaaatggaacttaatatttttatatataatactatgattgaagggatgtgcaaggctggcaaggtgggagaagcgtgggatttattttgtagcctcagcattaagcctgatgttgtaacatacaatacaatgatctcaggattgtgtagtaaacgcctactacaggaagcagatgacctgttcagaaaaatgaaagaagatggtactcttccaaatagtggtacatataatacgcttatcagagcaaaccttagagattgtgacagagccgcatcagcagaactcatcaaagaaatgaggagttctgggtttgttggagatgcttcaaccattagcttggtgacaaatatgttgcatgatgggagattggacaaaagctttctcaatatgctttcttaaaacagtttgtcctcgaggtaggaggagtctgaggttaacacacacgagctacagaagaagatttcagacgtgtcatcattatggttactgtagtagatttggtttttaaccaaacgtattttatagttttggttcaataaatataactttatttcg

SEQ ID NO: 80819 - protein, 630 aa, Arabidopsis thaliana
  peptide (1)..(630): Ceres Seq. ID no. 12657300
  misc_feature (365)..(399): Pfam Name: PPR repeat Pfam Description: PPR repeat
  misc_feature (2)..(630): Homolog of NCBI NO: 25404377 NR Description: hypothetical protein F16P17.5 [imported] - thaliana >gi|8493578|gb|AAF75801.1|AC011000_4 Contains a RepB protein domain and multiple PPR PF|01535 repeats. [Arabidopsis
  misc_feature (2)..(611): Homolog of NCBI NO: 15221621 NR Description: unknown protein; protein id: At1g62910.1
  misc_feature (6)..(630): Homolog of NCBI NO: 15221515 NR Description: putative membrane-associated salt-inducible (AL021637); similar to EST gb|AA728420; protein id: At1g62590.1
  misc_feature (40)..(630): Homolog of NCBI NO: 22531122 NR Description: putative membrane-associated salt-inducible
  misc_feature (5)..(630): Homolog of NCBI NO: 15221691 NR Description: unknown protein; protein id: At1g63130.1
  misc_feature (44)..(630): Homolog of NCBI NO: 25404380 NR Description: hypothetical protein F16P17.7 [imported] - thaliana >gi|8493580|gb|AAF75803.1|AC011000_6 Contains weak to leaf protein from Ipomea nil gb|D85101 and contains a RepB
  misc_feature (5)..(630): Homolog of NCBI NO: 15221549 NR Description: PPR-repeat protein; protein id: At1g62670.1
  misc_feature (42)..(630): Homolog of NCBI NO: 6630464 NR Description: F23N19.4 [Arabidopsis thaliana]
  misc_feature (44)..(623): Homolog of NCBI NO: 15221635 NR Description: unknown protein; protein id: At1g62930.1
  misc_feature (48)..(519): Homolog of NCBI NO: 15221621 NR Description: unknown protein; protein id: At1g62910.1
KMQRSISLTAKRLFVHWNLQGIGNPPTVPSFFNLCGSGCWERSFASASGDYREILRNRLSDIIKVDDAVDLFGDMVKSRPFPSIVEFNKLLSAVAKMNKFELVISLGEQMQTLGISHDLYTYSIFINCFCRRSQLSLALAVLAKMMKLGYEPDIVTLSSLLNGYCHSKRISDAVALVDQMVEMGYKPDTFTFTTLIHGLFLHNKASEAVALVDQMVQRGCQPDLVTYGTVVNGLCKRGDIDLALNLLNKMEAARIKANVVIFNTIIDSLCKYRHVEVAVDLFTEMETKGIRPNVVTYNSLINCLCNYGRWSDASRLLSNMLEKKINPNVVTFNALIDAFFKEGKLVEAEKLHEEMIQRSIDPDTITYNLLINGFCMHNRLDEAKQMFKFMVSKDCLPNIQTYNTLINGFCKCKRVEDGVELFREMSQRGLVGNTVTYTTIIQGFFQAGDCDSAQMVFKQMVSNRVPTDIMTYSILLHGLCSYGKLDTALVIFKYLQKSEMELNIFIYNTMIEGMCKAGKVGEAWDLFCSLSIKPDVVTYNTMISGLCSKRLLQEADDLFRKMKEDGTLPNSGTYNTLIRANLRDCDRAASAELIKEMRSSGFVGDASTISLVTNMLHDGRLDKSFLNMLS

SEQ ID NO: 80820 - protein, 629 aa, Arabidopsis thaliana
  peptide (1)..(629): Ceres Seq. ID no. 12657301
  misc_feature (364)..(398): Pfam Name: PPR repeat Pfam Description: PPR repeat
  misc_feature (1)..(629): Homolog of NCBI NO: 25404377 NR Description: hypothetical protein F16P17.5 [imported] - thaliana >gi|8493578|gb|AAF75801.1|AC011000_4 Contains a RepB protein domain and multiple PPR PF|01535 repeats. [Arabidopsis
  misc_feature (1)..(610): Homolog of NCBI NO: 15221621 NR Description: unknown protein; protein id: At1g62910.1
  misc_feature (5)..(629): Homolog of NCBI NO: 15221515 NR Description: putative membrane-associated salt-inducible (AL021637); similar to EST gb|AA728420; protein id: At1g62590.1
  misc_feature (39)..(629): Homolog of NCBI NO: 22531122 NR Description: putative membrane-associated salt-inducible
  misc_feature (4)..(629): Homolog of NCBI NO: 15221691 NR Description: unknown protein; protein id: At1g63130.1
  misc_feature (43)..(629): Homolog of NCBI NO: 25404380 NR Description: hypothetical protein F16P17.7 [imported] - thaliana >gi|8493580|gb|AAF75803.1|AC011000_6 Contains weak to leaf protein from Ipomea nil gb|D85101 and contains a RepB
  misc_feature (4)..(629): Homolog of NCBI NO: 15221549 NR Description: PPR-repeat protein; protein id: At1g62670.1
  misc_feature (41)..(629): Homolog of NCBI NO: 6630464 NR Description: F23N19.4 [Arabidopsis thaliana]
  misc_feature (43)..(622): Homolog of NCBI NO: 15221635 NR Description: unknown protein; protein id: At1g62930.1
  misc_feature (47)..(518): Homolog of NCBI NO: 15221621 NR Description: unknown protein; protein id: At1g62910.1
MQRSISLTAKRLFVHWNLQGIGNPPTVPSFFNLCGSGCWERSFASASGDYREILRNRLSDIIKVDDAVDLFGDMVKSRPFPSIVEFNKLLSAVAKMNKFELVISLGEQMQTLGISHDLYTYSIFINCFCRRSQLSLALAVLAKMMKLGYEPDIVTLSSLLNGYCHSKRISDAVALVDQMVEMGYKPDTFTFTTLIHGLFLHNKASEAVALVDQMVQRGCQPDLVTYGTVVNGLCKRGDIDLALNLLNKMEAARIKANVVIFNTIIDSLCKYRHVEVAVDLFTEMETKGIRPNVVTYNSLINCLCNYGRWSDASRLLSNMLEKKINPNVVTFNALIDAFFKEGKLVEAEKLHEEMIQRSIDPDTITYNLLINGFCMHNRLDEAKQMFKFMVSKDCLPNIQTYNTLINGFCKCKRVEDGVELFREMSQRGLVGNTVTYTTIIQGFFQAGDCDSAQMVFKQMVSNRVPTDIMTYSILLHGLCSYGKLDTALVIFKYLQKSEMELNIFIYNTMIEGMCKAGKVGEAWDLFCSLSIKPDVVTYNTMISGLCSKRLLQEADDLFRKMKEDGTLPNSGTYNTLIRANLRDCDRAASAELIKEMRSSGFVGDASTISLVTNMLHDGRLDKSFLNMLS

SEQ ID NO: 80821 - protein, 556 aa, Arabidopsis thaliana
  peptide (1)..(556): Ceres Seq. ID no. 12657302
  misc_feature (291)..(325): Pfam Name: PPR repeat Pfam Description: PPR repeat
  misc_feature (1)..(556): Homolog of NCBI NO: 25404377 NR Description: hypothetical protein F16P17.5 [imported] - thaliana >gi|8493578|gb|AAF75801.1|AC011000_4 Contains a RepB protein domain and multiple PPR PF|01535 repeats. [Arabidopsis
  misc_feature (1)..(537): Homolog of NCBI NO: 15221621 NR Description: unknown protein; protein id: At1g62910.1
  misc_feature (1)..(556): Homolog of NCBI NO: 15221515 NR Description: putative membrane-associated salt-inducible (AL021637); similar to EST gb|AA728420; protein id: At1g62590.1
  misc_feature (1)..(556): Homolog of NCBI NO: 22531122 NR Description: putative membrane-associated salt-inducible
  misc_feature (1)..(556): Homolog of NCBI NO: 15221691 NR Description: unknown protein; protein id: At1g63130.1
  misc_feature (1)..(556): Homolog of NCBI NO: 25404380 NR Description: hypothetical protein F16P17.7 [imported] - thaliana >gi|8493580|gb|AAF75803.1|AC011000_6 Contains weak to leaf protein from Ipomea nil gb|D85101 and contains a RepB
  misc_feature (1)..(556): Homolog of NCBI NO: 15221549 NR Description: PPR-repeat protein; protein id: At1g62670.1
  misc_feature (1)..(556): Homolog of NCBI NO: 6630464 NR Description: F23N19.4 [Arabidopsis thaliana]
  misc_feature (1)..(549): Homolog of NCBI NO: 15221635 NR Description: unknown protein; protein id: At1g62930.1
  misc_feature (1)..(445): Homolog of NCBI NO: 15221621 NR Description: unknown protein; protein id: At1g62910.1
MVKSRPFPSIVEFNKLLSAVAKMNKFELVISLGEQMQTLGISHDLYTYSIFINCFCRRSQLSLALAVLAKMMKLGYEPDIVTLSSLLNGYCHSKRISDAVALVDQMVEMGYKPDTFTFTTLIHGLFLHNKASEAVALVDQMVQRGCQPDLVTYGTVVNGLCKRGDIDLALNLLNKMEAARIKANVVIFNTIIDSLCKYRHVEVAVDLFTEMETKGIRPNVVTYNSLINCLCNYGRWSDASRLLSNMLEKKINPNVVTFNALIDAFFKEGKLVEAEKLHEEMIQRSIDPDTITYNLLINGFCMHNRLDEAKQMFKFMVSKDCLPNIQTYNTLINGFCKCKRVEDGVELFREMSQRGLVGNTVTYTTIIQGFFQAGDCDSAQMVFKQMVSNRVPTDIMTYSILLHGLCSYGKLDTALVIFKYLQKSEMELNIFIYNTMIEGMCKAGKVGEAWDLFCSLSIKPDVVTYNTMISGLCSKRLLQEADDLFRKMKEDGTLPNSGTYNTLIRANLRDCDRAASAELIKEMRSSGFVGDASTISLVTNMLHDGRLDKSFLNMLS

SEQ ID NO: 80822 - DNA, 1926 bp, Arabidopsis thaliana
  misc_feature (1)..(1926): Ceres Seq. ID no. 12657339
  misc_feature: MA Experiment ID: 20000314 Result: Up-regulated in Transcription
  misc_feature: MA Experiment 20000314 PARAMETER Experiment Name: At_14day_Shoots-Roots_Sub_P Parameter: Age (day) Value: 14
  misc_feature: MA Experiment 20000314 PARAMETER Experiment Name: At_14day_Shoots-Roots_Sub_P Parameter: Organism Value: A. thaliana
  misc_feature: MA Experiment 20000314 PARAMETER Experiment Name: At_14day_Shoots-Roots_Sub_P Parameter: Plant Line Value: WS
  misc_feature: MA Experiment 20000314 PARAMETER Experiment Name: At_14day_Shoots-Roots_Sub_P Parameter: Tissue Value: Roots vs. Whole Plant
atgcctgtctccgtctcaaagttgagacgaccaagaacgtccaaaaagaccgaaaccggaaatcccgaaaaaacacttaaagatcctcgtacttgctgtaataaccttttttcgatcttttccgccagatcatttctttatcgtgtacctctcacgattctctttcttttcttgatttatctttggtccacttccacgaccgttatctctggtaacgtcgttcatatatgcatctcttcgcggaagctcactgacctttattgcctcactgccggttctcagcccgctttacgtgcaccagtcaacaatttcactgcgccggctagtgaagatgtggtaacaagtaaagaagagaagaatgtttttgttcttggtaaagacggagacaagggtttcgcagaaaatgaaaccttcgagggaggaaaagattcagacaaatctacggtcggagaaaacctcaccatcaataagaacgaaactttcacaggagaaacctccggagaaagagtttccattcttaatcaagatgctaaacccatccatgaaaagaatcttgattccgttcttgatcaagattctttacccaaaaacgagattgatcaagatttcatcattgattgggatccagaaactggcgaagaacgataccgatatttcaaagcgaagaccgaagacgaggagaccggtctaaaatctacggaagagtatattcaaatacagagaacttggttatcgatgggaaacaaccgcaaaaagccgggatcttgcgaaggaaaaggtgtatacgtttacgatttaccatctaaattcaacaaagatttgttgagggaatgctccgatatggttccatgggctgatttttgcaactacttcaagaacgatgcgtttggtgaactgatggagagtatgggtaaaggctggttcagaacgcatcagtattcacttgagccgatatttcactctagaattttgaagcatccatgtagggttcataacgagactcaagcgaagctcttctatgtgcctttctatggcggtatggatgttttgagatggcatttcaagaacgtttcaagcgatgtgaaagatgttttgccgattgagattgttaaatggctcggatcgaagaaatcatggaggaaaaactccggaaaagatcatgtttttgttctcggaaagatctcttgggattttaggagggttgataagtattcttggggctcaagcttacttgagatgcaagaaatgaaaaaccctacaaagcttctcatcgaacgtaatccatgggaagtcaacgacatcgcgatacctcatcccacatacttccacccgaaaactgacaccgatatcgccatatggcaaaacaaaatacttgggaaacctcgtcggagcctaattagcttcgctggtgcagcaagacccggtaaccctgagagcatccggtcaatattgattgaccaatgcagatcgtctccaaaccaatgccggtttttgaattgtaccgatggaggctgcgataaatcggaatcggttatcgagcttttccgagattcggagttctgccttcaaccgcctggagacagtccaacaaggaaatcgattttcgattccctcatattaggttgtattccggtgatatttgatccgtacagcgcgtattaccagtacacgtggcatttaccggaggatcaccggagatattcggtgtatataaacaaagaagatgtgaagttgaagagagtgaatgtgattgagaagttaatgtcaaagactctaagggaaagagaggacatgaggagttacattgttcatgagcttttgcctggtttggtctatggagattctaatgctaagtttgagagatttcgagatgctttcgatattactatggatagtttattcaagaagattgcaaaaactgtataa

SEQ ID NO: 80823 - protein, 641 aa, Arabidopsis thaliana
  peptide (1)..(641): Ceres Seq. ID no. 12657340
  misc_feature (261)..(602): Pfam Name: Exostosin family Pfam Description: Exostosin family
  misc_feature (147)..(641): Homolog of NCBI NO: 15237602 NR Description: putative protein; protein id: At5g41250.1 thaliana] >gi|10177769|dbj|BAB11101.1|
  misc_feature (13)..(98): Homolog of NCBI NO: 15237602 NR Description: putative protein; protein id: At5g41250.1 thaliana] >gi|10177769|dbj|BAB11101.1|
  misc_feature (227)..(639): Homolog of NCBI NO: 25411977 NR Description: hypothetical protein At2g20370 [imported] - thaliana >gi|4512698|gb|AAD21751.1| unknown protein [Arabidopsis
  misc_feature (227)..(639): Homolog of NCBI NO: 30680972 NR Description: expressed protein [Arabidopsis thaliana]
  misc_feature (221)..(639): Homolog of NCBI NO: 27497206 NR Description: Unknown protein [Oryza sativa (japonica
  misc_feature (252)..(639): Homolog of NCBI NO: 37535066 NR Description: hypothetical protein [Oryza sativa (japonica group)] >gi|22165082|gb|AAM93699.1| hypothetical protein [Oryza
  misc_feature (252)..(639): Homolog of NCBI NO: 37535064 NR Description: putative exostosin family protein [Oryza sativa
  misc_feature (255)..(639): Homolog of NCBI NO: 27497204 NR Description: Hypothetical protein [Oryza sativa (japonica
  misc_feature (134)..(637): Homolog of NCBI NO: 15227020 NR Description: hypothetical protein; protein id: At2g29040.1
  misc_feature (244)..(640): Homolog of NCBI NO: 27497203 NR Description: Hypothetical protein [Oryza sativa (japonica
MPVSVSKLRRPRTSKKTETGNPEKTLKDPRTCCNNLFSIFSARSFLYRVPLTILFLFLIYLWSTSTTVISGNVVHICISSRKLTDLYCLTAGSQPALRAPVNNFTAPASEDVVTSKEEKNVFVLGKDGDKGFAENETFEGGKDSDKSTVGENLTINKNETFTGETSGERVSILNQDAKPIHEKNLDSVLDQDSLPKNEIDQDFIIDWDPETGEERYRYFKAKTEDEETGLKSTEEYIQIQRTWLSMGNNRKKPGSCEGKGVYVYDLPSKFNKDLLRECSDMVPWADFCNYFKNDAFGELMESMGKGWFRTHQYSLEPIFHSRILKHPCRVHNETQAKLFYVPFYGGMDVLRWHFKNVSSDVKDVLPIEIVKWLGSKKSWRKNSGKDHVFVLGKISWDFRRVDKYSWGSSLLEMQEMKNPTKLLIERNPWEVNDIAIPHPTYFHPKTDTDIAIWQNKILGKPRRSLISFAGAARPGNPESIRSILIDQCRSSPNQCRFLNCTDGGCDKSESVIELFRDSEFCLQPPGDSPTRKSIFDSLILGCIPVIFDPYSAYYQYTWHLPEDHRRYSVYINKEDVKLKRVNVIEKLMSKTLREREDMRSYIVHELLPGLVYGDSNAKFERFRDAFDITMDSLFKKIAKTV

SEQ ID NO: 80824 - protein, 396 aa, Arabidopsis thaliana
  peptide (1)..(396): Ceres Seq. ID no. 12657341
  misc_feature (16)..(357): Pfam Name: Exostosin family Pfam Description: Exostosin family
  misc_feature (1)..(396): Homolog of NCBI NO: 15237602 NR Description: putative protein; protein id: At5g41250.1 thaliana] >gi|10177769|dbj|BAB11101.1|
  misc_feature (1)..(394): Homolog of NCBI NO: 25411977 NR Description: hypothetical protein At2g20370 [imported] - thaliana >gi|4512698|gb|AAD21751.1| unknown protein [Arabidopsis
  misc_feature (1)..(394): Homolog of NCBI NO: 30680972 NR Description: expressed protein [Arabidopsis thaliana]
  misc_feature (1)..(394): Homolog of NCBI NO: 27497206 NR Description: Unknown protein [Oryza sativa (japonica
  misc_feature (7)..(394): Homolog of NCBI NO: 37535066 NR Description: hypothetical protein [Oryza sativa (japonica group)] >gi|22165082|gb|AAM93699.1| hypothetical protein [Oryza
  misc_feature (7)..(394): Homolog of NCBI NO: 37535064 NR Description: putative exostosin family protein [Oryza sativa
  misc_feature (10)..(394): Homolog of NCBI NO: 27497204 NR Description: Hypothetical protein [Oryza sativa (japonica
  misc_feature (1)..(392): Homolog of NCBI NO: 15227020 NR Description: hypothetical protein; protein id: At2g29040.1
  misc_feature (1)..(395): Homolog of NCBI NO: 27497203 NR Description: Hypothetical protein [Oryza sativa (japonica
  misc_feature (11)..(394): Homolog of NCBI NO: 37535054 NR Description: hypothetical protein [Oryza sativa (japonica group)] >gi|14140279|gb|AAK54285.1| hypothetical protein [Oryza
MGNNRKKPGSCEGKGVYVYDLPSKFNKDLLRECSDMVPWADFCNYFKNDAFGELMESMGKGWFRTHQYSLEPIFHSRILKHPCRVHNETQAKLFYVPFYGGMDVLRWHFKNVSSDVKDVLPIEIVKWLGSKKSWRKNSGKDHVFVLGKISWDFRRVDKYSWGSSLLEMQEMKNPTKLLIERNPWEVNDIAIPHPTYFHPKTDTDIAIWQNKILGKPRRSLISFAGAARPGNPESIRSILIDQCRSSPNQCRFLNCTDGGCDKSESVIELFRDSEFCLQPPGDSPTRKSIFDSLILGCIPVIFDPYSAYYQYTWHLPEDHRRYSVYINKEDVKLKRVNVIEKLMSKTLREREDMRSYIVHELLPGLVYGDSNAKFERFRDAFDITMDSLFKKIAKTV

SEQ ID NO: 80825 - protein, 361 aa, Arabidopsis thaliana
  peptide (1)..(361): Ceres Seq. ID no. 12657342
  misc_feature (1)..(322): Pfam Name: Exostosin family Pfam Description: Exostosin family
  misc_feature (1)..(361): Homolog of NCBI NO: 15237602 NR Description: putative protein; protein id: At5g41250.1 thaliana] >gi|10177769|dbj|BAB11101.1|
  misc_feature (1)..(359): Homolog of NCBI NO: 25411977 NR Description: hypothetical protein At2g20370 [imported] - thaliana >gi|4512698|gb|AAD21751.1| unknown protein [Arabidopsis
  misc_feature (1)..(359): Homolog of NCBI NO: 30680972 NR Description: expressed protein [Arabidopsis thaliana]
  misc_feature (1)..(359): Homolog of NCBI NO: 27497206 NR Description: Unknown protein [Oryza sativa (japonica
  misc_feature (1)..(359): Homolog of NCBI NO: 37535066 NR Description: hypothetical protein [Oryza sativa (japonica group)] >gi|22165082|gb|AAM93699.1| hypothetical protein [Oryza
  misc_feature (1)..(359): Homolog of NCBI NO: 37535064 NR Description: putative exostosin family protein [Oryza sativa
  misc_feature (1)..(359): Homolog of NCBI NO: 27497204 NR Description: Hypothetical protein [Oryza sativa (japonica
  misc_feature (1)..(357): Homolog of NCBI NO: 15227020 NR Description: hypothetical protein; protein id: At2g29040.1
  misc_feature (1)..(360): Homolog of NCBI NO: 27497203 NR Description: Hypothetical protein [Oryza sativa (japonica
  misc_feature (1)..(359): Homolog of NCBI NO: 37535054 NR Description: hypothetical protein [Oryza sativa (japonica group)] >gi|14140279|gb|AAK54285.1| hypothetical protein [Oryza
MVPWADFCNYFKNDAFGELMESMGKGWFRTHQYSLEPIFHSRILKHPCRVHNETQAKLFYVPFYGGMDVLRWHFKNVSSDVKDVLPIEIVKWLGSKKSWRKNSGKDHVFVLGKISWDFRRVDKYSWGSSLLEMQEMKNPTKLLIERNPWEVNDIAIPHPTYFHPKTDTDIAIWQNKILGKPRRSLISFAGAARPGNPESIRSILIDQCRSSPNQCRFLNCTDGGCDKSESVIELFRDSEFCLQPPGDSPTRKSIFDSLILGCIPVIFDPYSAYYQYTWHLPEDHRRYSVYINKEDVKLKRVNVIEKLMSKTLREREDMRSYIVHELLPGLVYGDSNAKFERFRDAFDITMDSLFKKIAKTV

SEQ ID NO: 80826 - DNA, 3171 bp, Arabidopsis thaliana
  misc_feature (1)..(3171): Ceres Seq. ID no. 12657351
  misc_feature: MA Experiment ID: 20000234 Result: Up-regulated in Transcription
  misc_feature: MA Experiment 20000234 PARAMETER Experiment Name: At_Siliques_P Parameter: Age (day) Value: 21
  misc_feature: MA Experiment 20000234 PARAMETER Experiment Name: At_Siliques_P Parameter: Organism Value: A. thaliana
  misc_feature: MA Experiment 20000234 PARAMETER Experiment Name: At_Siliques_P Parameter: Plant Line Value: WS
  misc_feature: MA Experiment 20000234 PARAMETER Experiment Name: At_Siliques_P Parameter: Tissue Value: Less Than 5mm Siliques vs. Whole Plant
  misc_feature: MA Experiment ID: 20000264 Result: Up-regulated in Transcription
  misc_feature: MA Experiment 20000264 PARAMETER Experiment Name: At_Open_Flower_P Parameter: Age (day) Value: 21
  misc_feature: MA Experiment 20000264 PARAMETER Experiment Name: At_Open_Flower_P Parameter: Plant Line Value: WS
  misc_feature: MA Experiment 20000264 PARAMETER Experiment Name: At_Open_Flower_P Parameter: Tissue Value: Open Flower vs. Whole Plant
  misc_feature: MA Experiment ID: 20000265 Result: Up-regulated in Transcription
  misc_feature: MA Experiment 20000265 PARAMETER Experiment Name: At_Open_Flower_P Parameter: Age (day) Value: 21
  misc_feature: MA Experiment 20000265 PARAMETER Experiment Name: At_Open_Flower_P Parameter: Plant Line Value: WS
  misc_feature: MA Experiment 20000265 PARAMETER Experiment Name: At_Open_Flower_P Parameter: Tissue Value: Closed Flower vs. Whole Plant
  misc_feature: MA Experiment ID: 20000286 Result: Up-regulated in Transcription
  misc_feature: MA Experiment 20000286 PARAMETER Experiment Name: At_Open_Flower_P Parameter: Age (day) Value: 21
  misc_feature: MA Experiment 20000286 PARAMETER Experiment Name: At_Open_Flower_P Parameter: Plant Line Value: WS
  misc_feature: MA Experiment 20000286 PARAMETER Experiment Name: At_Open_Flower_P Parameter: Tissue Value: Half Open vs. Whole Plant
  misc_feature: MA Experiment ID: 20000794 Result: Up-regulated in Transcription
  misc_feature: MA Experiment 20000794 PARAMETER Experiment Name: At_Petals_P Parameter: Age (day) Value: 23-25 days
  misc_feature: MA Experiment 20000794 PARAMETER Experiment Name: At_Petals_P Parameter: Plant Line Value: WS
  misc_feature: MA Experiment 20000794 PARAMETER Experiment Name: At_Petals_P Parameter: Tissue Value: Petals vs. Whole plant
atgagcagtcatctgtcacaggacgccaatatgaatggtgtctatgttcgatcagatgtgtctagcatgctgagttttgacggatcagaaagtcgcgaaagtatggatgacagtaagaaaggtcatcagagtttggttgagtggttaaatgagacacttccttatctgaagttaccatgggaagcttcagaggacgaactgagagcatgcttgagggatggaactgtcttgtgtagccttttaaatcagcttagtcctgggtcaatgagaatgggaggcagctttgagcctgccagtgtaaaaattgagcggtttctgactgctatggatgaaatggccctgcctaggttcgaagtttcagatatagaacagtccctgaaggcgcttaaagccagtttttccgatggtagttatgataagaactcactagctgcgaggaggagatggagcttgccagaggaccactcagattcaagaggagatgaccgcaactttactgatggattccagtcgaaggaaggatctgagattgatatgtctgatgctaaaatttcggatttacttaaatccaacagtttacgaaatgctcctactaggtcactgtttgacatgctggataagcttctagatgagagcatgacgaagatgaatggacatgtgtctcatgctatggcatctctcttgagcgcacttgtgcaagtgattgaacaaagaatctcaaatcaagctgataacctaaagaatcaaaatatactctttagggtacgtgaagaaaaatacaggtcaagaataaaggtcttagaatccttggcagctgggacaacaaaggaaaacgagatcgttacgaactgtatggagcatataaagcttgagaaaaccagaatagaagagaaagaacgatcagaagaaaaagatgttgtgagactgagaaaggaaaaagagcgcagtgatgctgagattcgccagctgaagcaggaactcaaattggtgaaagagacacatgaaaaccaatgcttggaattagaagcaaaagcacaaaaaactagagatgagttggagaagaagttaaaagatgcggagttacatgttgtagattcaagtaggaaggtgaaagaacttgagaagttgtgccaatctaaatctcaaagatgggagaaaaaagagtgcatctaccagaacttcatagacaaccattctggagccttgcaggagttgagtgctacttcgttgtctataaaacatgaagtcgtaaggacacagaggaaatactttgaggatttaaattactacggtttgaagctcaaaggagtggctgatgcagcaaaaaattaccatgttgtccttgaagaaaatcgaagactgtacaatgaagtgcaagaattgaaaggaaatatcagagtctattgccggattagaccatttcttccagggcaaaacagtagacaaacaactatagaatacattggtgagactggtgaattggtggttgcgaatccctttaagcaagggaaagatacgcatcggttatttaagttcaacaaagttttcgatcaagcagcaacacaagaggaggttttcttagatactcgaccattaattcgatccattcttgatggctataatgtttgtatatttgcctatggtcagactggttctggaaaaacttatacaatgagtgggccaagcatcacttcaaaagaagactggggtgtcaattatagagctttgaatgacttgtttctcttaactcagagtagacaaaacactgtcatgtatgaagttggtgttcaaatggtggagatatataatgagcaagttcgtgatatactttctgatgggatttggaacaccgccttaccaaatgggctagcagtccctgatgcaagcatgcattgtgtgagatcaacagaagatgttcttgaactgatgaatattggactaatgaacagaaccgtgggtgctacagctctcaatgaaaggagcagtagatcacactgtgttctttctgtccatgtacgaggtgtcgacgtggaaaccgattcaattttgcggggcagtttgcatttagttgaccttgctggaagtgagagggttgatcgctctgaggcaaccggagagaggctcaaggaagctcagcatatcaacaaatcattgtcagcacttggggatgtcatatttgctttagcgcacaagaaccctcatgttccttacagaaacagcaaattgactcaagtccttcaaagttctttgggtggacaggctaaaactcttatgtttgtccaagtcaatcctgatggcgattcttatgctgagacagtaagcactttgaaattcgccgaaagggtttctggtgtggagttaggtgctgccaaaagtagtaaagagggtcgagatgtaagacaactcatggaacaggtatcgaacttgaaggatgtaattgctaagaaagatgaagagctacaaaattttcagaaggtaaaaggtaataatgcaacatccctgaaacgtggattaagcaatttaaggttggtggggcctacatcacctagaagacattctattggagcgtcaccaaacgctcgacgaggaaaggcctctggtttatttggaagaggaacctcagatgttgacaactgctctgaatatagcagcaagcattcggattctggttcacaacaatcatcagacgaacgtaaacatcaaaaagattatcaccaaccatctaaatttgctggtgcggcgaaaggaatcgattttgatgatgaagatgttgaactcgtaggtcttgcagatgcagattctgaggacagattgagtgatatctctgatagttgtctttcaatgggaacagaaactgatggatccataagcagtgcagtagagttgactctattccctgaaactgctaagcctcttgaactaatagaacgacctgaagcacgcatgacttctgagaaactcgagaaatcagtgaaaatggggaaaaccgagccaaaagacagaactaatattccatcgaagattccaaagcagaccttgaaaccaccaggccaaaccagaccgtctcgtctgtcaattgccactagctcctcctctaaggctttaacaggtgctaaaaggccaacaattagcacttcatcttcagcgaaaccactcaatagaaggcggtga

SEQ ID NO: 80827 - protein, 1056 aa, Arabidopsis thaliana
  peptide (1)..(1056): Ceres Seq. ID no. 12657352
  misc_feature (113)..(498): Pfam Name: Myosin tail Pfam Description: Myosin tail
  misc_feature (244)..(917): Homolog of NCBI NO: 12324217 NR Description: kinesin-related protein; 103921-99132
  misc_feature (244)..(917): Homolog of NCBI NO: 22330608 NR Description: kinesin-related protein; protein id: At1g73860.1
  misc_feature (244)..(899): Homolog of NCBI NO: 25406299 NR Description: protein kinesin F2P9.27 [imported] - Arabidopsis
  misc_feature (235)..(830): Homolog of NCBI NO: 22329655 NR Description: kinesin-related protein; protein id: At1g18410.1
  misc_feature (188)..(611): Homolog of NCBI NO: 6714287 NR Description: F15H18.10 [Arabidopsis thaliana]
  misc_feature (613)..(830): Homolog of NCBI NO: 6714287 NR Description: F15H18.10 [Arabidopsis thaliana]
  misc_feature (402)..(890): Homolog of NCBI NO: 30692267 NR Description: kinesin-related protein [Arabidopsis thaliana]
  misc_feature (58)..(124): Homolog of NCBI NO: 30692267 NR Description: kinesin-related protein [Arabidopsis thaliana]
  misc_feature (402)..(890): Homolog of NCBI NO: 18201934 NR Description: kinesin-like protein heavy chain [Arabidopsis
  misc_feature (58)..(124): Homolog of NCBI NO: 18201934 NR Description: kinesin-like protein heavy chain [Arabidopsis
MSSHLSQDANMNGVYVRSDVSSMLSFDGSESRESMDDSKKGHQSLVEWLNETLPYLKLPWEASEDELRACLRDGTVLCSLLNQLSPGSMRMGGSFEPASVKIERFLTAMDEMALPRFEVSDIEQSLKALKASFSDGSYDKNSLAARRRWSLPEDHSDSRGDDRNFTDGFQSKEGSEIDMSDAKISDLLKSNSLRNAPTRSLFDMLDKLLDESMTKMNGHVSHAMASLLSALVQVIEQRISNQADNLKNQNILFRVREEKYRSRIKVLESLAAGTTKENEIVTNCMEHIKLEKTRIEEKERSEEKDVVRLRKEKERSDAEIRQLKQELKLVKETHENQCLELEAKAQKTRDELEKKLKDAELHVVDSSRKVKELEKLCQSKSQRWEKKECIYQNFIDNHSGALQELSATSLSIKHEVVRTQRKYFEDLNYYGLKLKGVADAAKNYHVVLEENRRLYNEVQELKGNIRVYCRIRPFLPGQNSRQTTIEYIGETGELVVANPFKQGKDTHRLFKFNKVFDQAATQEEVFLDTRPLIRSILDGYNVCIFAYGQTGSGKTYTMSGPSITSKEDWGVNYRALNDLFLLTQSRQNTVMYEVGVQMVEIYNEQVRDILSDGIWNTALPNGLAVPDASMHCVRSTEDVLELMNIGLMNRTVGATALNERSSRSHCVLSVHVRGVDVETDSILRGSLHLVDLAGSERVDRSEATGERLKEAQHINKSLSALGDVIFALAHKNPHVPYRNSKLTQVLQSSLGGQAKTLMFVQVNPDGDSYAETVSTLKFAERVSGVELGAAKSSKEGRDVRQLMEQVSNLKDVIAKKDEELQNFQKVKGNNATSLKRGLSNLRLVGPTSPRRHSIGASPNARRGKASGLFGRGTSDVDNCSEYSSKHSDSGSQQSSDERKHQKDYHQPSKFAGAAKGIDFDDEDVELVGLADADSEDRLSDISDSCLSMGTETDGSISSAVELTLFPETAKPLELIERPEARMTSEKLEKSVKMGKTEPKDRTNIPSKIPKQTLKPPGQTRPSRLSIATSSSSKALTGAKRPTISTSSSAKPLNRRR

SEQ ID NO: 80828 - protein, 1046 aa, Arabidopsis thaliana
  peptide (1)..(1046): Ceres Seq. ID no. 12657353
  misc_feature (103)..(488): Pfam Name: Myosin tail Pfam Description: Myosin tail
  misc_feature (234)..(907): Homolog of NCBI NO: 12324217 NR Description: kinesin-related protein; 103921-99132
  misc_feature (234)..(907): Homolog of NCBI NO: 22330608 NR Description: kinesin-related protein; protein id: At1g73860.1
  misc_feature (234)..(889): Homolog of NCBI NO: 25406299 NR Description: protein kinesin F2P9.27 [imported] - Arabidopsis
  misc_feature (225)..(820): Homolog of NCBI NO: 22329655 NR Description: kinesin-related protein; protein id: At1g18410.1
  misc_feature (178)..(601): Homolog of NCBI NO: 6714287 NR Description: F15H18.10 [Arabidopsis thaliana]
  misc_feature (603)..(820): Homolog of NCBI NO: 6714287 NR Description: F15H18.10 [Arabidopsis thaliana]
  misc_feature (392)..(880): Homolog of NCBI NO: 30692267 NR Description: kinesin-related protein [Arabidopsis thaliana]
  misc_feature (48)..(114): Homolog of NCBI NO: 30692267 NR Description: kinesin-related protein [Arabidopsis thaliana]
  misc_feature (392)..(880): Homolog of NCBI NO: 18201934 NR Description: kinesin-like protein heavy chain [Arabidopsis
  misc_feature (48)..(114): Homolog of NCBI NO: 18201934 NR Description: kinesin-like protein heavy chain [Arabidopsis
MNGVYVRSDVSSMLSFDGSESRESMDDSKKGHQSLVEWLNETLPYLKLPWEASEDELRACLRDGTVLCSLLNQLSPGSMRMGGSFEPASVKIERFLTAMDEMALPRFEVSDIEQSLKALKASFSDGSYDKNSLAARRRWSLPEDHSDSRGDDRNFTDGFQSKEGSEIDMSDAKISDLLKSNSLRNAPTRSLFDMLDKLLDESMTKMNGHVSHAMASLLSALVQVIEQRISNQADNLKNQNILFRVREEKYRSRIKVLESLAAGTTKENEIVTNCMEHIKLEKTRIEEKERSEEKDVVRLRKEKERSDAEIRQLKQELKLVKETHENQCLELEAKAQKTRDELEKKLKDAELHVVDSSRKVKELEKLCQSKSQRWEKKECIYQNFIDNHSGALQELSATSLSIKHEVVRTQRKYFEDLNYYGLKLKGVADAAKNYHVVLEENRRLYNEVQELKGNIRVYCRIRPFLPGQNSRQTTIEYIGETGELVVANPFKQGKDTHRLFKFNKVFDQAATQEEVFLDTRPLIRSILDGYNVCIFAYGQTGSGKTYTMSGPSITSKEDWGVNYRALNDLFLLTQSRQNTVMYEVGVQMVEIYNEQVRDILSDGIWNTALPNGLAVPDASMHCVRSTEDVLELMNIGLMNRTVGATALNERSSRSHCVLSVHVRGVDVETDSILRGSLHLVDLAGSERVDRSEATGERLKEAQHINKSLSALGDVIFALAHKNPHVPYRNSKLTQVLQSSLGGQAKTLMFVQVNPDGDSYAETVSTLKFAERVSGVELGAAKSSKEGRDVRQLMEQVSNLKDVIAKKDEELQNFQKVKGNNATSLKRGLSNLRLVGPTSPRRHSIGASPNARRGKASGLFGRGTSDVDNCSEYSSKHSDSGSQQSSDERKHQKDYHQPSKFAGAAKGIDFDDEDVELVGLADADSEDRLSDISDSCLSMGTETDGSISSAVELTLFPETAKPLELIERPEARMTSEKLEKSVKMGKTEPKDRTNIPSKIPKQTLKPPGQTRPSRLSIATSSSSKALTGAKRPTISTSSSAKPLNRRR

SEQ ID NO: 80829 - protein, 1034 aa, Arabidopsis thaliana
  peptide (1)..(1034): Ceres Seq. ID no. 12657354
  misc_feature (91)..(476): Pfam Name: Myosin tail Pfam Description: Myosin tail
  misc_feature (222)..(895): Homolog of NCBI NO: 12324217 NR Description: kinesin-related protein; 103921-99132
  misc_feature (222)..(895): Homolog of NCBI NO: 22330608 NR Description: kinesin-related protein; protein id: At1g73860.1
  misc_feature (222)..(877): Homolog of NCBI NO: 25406299 NR Description: protein kinesin F2P9.27 [imported] - Arabidopsis
  misc_feature (213)..(808): Homolog of NCBI NO: 22329655 NR Description: kinesin-related protein; protein id: At1g18410.1
  misc_feature (166)..(589): Homolog of NCBI NO: 6714287 NR Description: F15H18.10 [Arabidopsis thaliana]
  misc_feature (591)..(808): Homolog of NCBI NO: 6714287 NR Description: F15H18.10 [Arabidopsis thaliana]
  misc_feature (380)..(868): Homolog of NCBI NO: 30692267 NR Description: kinesin-related protein [Arabidopsis thaliana]
  misc_feature (36)..(102): Homolog of NCBI NO: 30692267 NR Description: kinesin-related protein [Arabidopsis thaliana]
  misc_feature (380)..(868): Homolog of NCBI NO: 18201934 NR Description: kinesin-like protein heavy chain [Arabidopsis
  misc_feature (36)..(102): Homolog of NCBI NO: 18201934 NR Description: kinesin-like protein heavy chain [Arabidopsis
MLSFDGSESRESMDDSKKGHQSLVEWLNETLPYLKLPWEASEDELRACLRDGTVLCSLLNQLSPGSMRMGGSFEPASVKIERFLTAMDEMALPRFEVSDIEQSLKALKASFSDGSYDKNSLAARRRWSLPEDHSDSRGDDRNFTDGFQSKEGSEIDMSDAKISDLLKSNSLRNAPTRSLFDMLDKLLDESMTKMNGHVSHAMASLLSALVQVIEQRISNQADNLKNQNILFRVREEKYRSRIKVLESLAAGTTKENEIVTNCMEHIKLEKTRIEEKERSEEKDVVRLRKEKERSDAEIRQLKQELKLVKETHENQCLELEAKAQKTRDELEKKLKDAELHVVDSSRKVKELEKLCQSKSQRWEKKECIYQNFIDNHSGALQELSATSLSIKHEVVRTQRKYFEDLNYYGLKLKGVADAAKNYHVVLEENRRLYNEVQELKGNIRVYCRIRPFLPGQNSRQTTIEYIGETGELVVANPFKQGKDTHRLFKFNKVFDQAATQEEVFLDTRPLIRSILDGYNVCIFAYGQTGSGKTYTMSGPSITSKEDWGVNYRALNDLFLLTQSRQNTVMYEVGVQMVEIYNEQVRDILSDGIWNTALPNGLAVPDASMHCVRSTEDVLELMNIGLMNRTVGATALNERSSRSHCVLSVHVRGVDVETDSILRGSLHLVDLAGSERVDRSEATGERLKEAQHINKSLSALGDVIFALAHKNPHVPYRNSKLTQVLQSSLGGQAKTLMFVQVNPDGDSYAETVSTLKFAERVSGVELGAAKSSKEGRDVRQLMEQVSNLKDVIAKKDEELQNFQKVKGNNATSLKRGLSNLRLVGPTSPRRHSIGASPNARRGKASGLFGRGTSDVDNCSEYSSKHSDSGSQQSSDERKHQKDYHQPSKFAGAAKGIDFDDEDVELVGLADADSEDRLSDISDSCLSMGTETDGSISSAVELTLFPETAKPLELIERPEARMTSEKLEKSVKMGKTEPKDRTNIPSKIPKQTLKPPGQTRPSRLSIATSSSSKALTGAKRPTISTSSSAKPLNRRR

SEQ ID NO: 80830 - DNA, 1647 bp, Arabidopsis thaliana
  misc_feature (1)..(1647): Ceres Seq. ID no. 12657363
  misc_feature: MA Experiment ID: 20000184 Result: Up-regulated in Transcription
  misc_feature: MA Experiment 20000184 PARAMETER Experiment Name: At_Shoots__P Parameter: Age (day) Value: 7
  misc_feature: MA Experiment 20000184 PARAMETER Experiment Name: At_Shoots__P Parameter: Tissue Value: Shoots vs. Whole Plant
  misc_feature: MA Experiment ID: 20000437 Result: Down-regulated in Transcription
  misc_feature: MA Experiment 20000437 PARAMETER Experiment Name: At_Drought_P Parameter: Age (day) Value: 8
  misc_feature: MA Experiment 20000437 PARAMETER Experiment Name: At_Drought_P Parameter: Organism Value: A. thaliana
  misc_feature: MA Experiment 20000437 PARAMETER Experiment Name: At_Drought_P Parameter: Plant Line Value: WS
  misc_feature: MA Experiment 20000437 PARAMETER Experiment Name: At_Drought_P Parameter: Timepoint (hr) Value: 24
  misc_feature: MA Experiment 20000437 PARAMETER Experiment Name: At_Drought_P Parameter: Tissue Value: Whole Plant
  misc_feature: MA Experiment 20000437 PARAMETER Experiment Name: At_Drought_P Parameter: Treatment Value: Drought vs. No Drought
  misc_feature: MA Experiment ID: 20000438 Result: Up-regulated in Transcription
  misc_feature: MA Experiment 20000438 PARAMETER Experiment Name: At_Shoots__P Parameter: Age (day) Value: 14
  misc_feature: MA Experiment 20000438 PARAMETER Experiment Name: At_Shoots__P Parameter: Tissue Value: Shoots vs. Whole Plant
atggattactctacggctacgacgacggcggggaacggttacagttcgccgcgtgactcttctttcccttcgagcttcactaagttcaactccgctttaacggcaggtcttctaaatccaatgtctcctcctccgcctccggcgatgcacgacaagacacgatcaagtccgacgctgttcgaaatgatggctagtgaagctgataccatagggaaagttccagttcagatccataacggtgtgcttccatctccgtcgtcgtcttcatcgtcttcttctgcggcggctacggctgcgaggacgacgaatgtgaatcatcttgttatttcagctcaggataagcaagcgcttgcgatgcaacggatttcggatcttctggtgattcggagccccgggaatcagttcaatgacccgaattcgagtgatgtgaagctgactctgagctctaaagatgggattagtatcaccatgtgtgttcataggcagattcttgtagctcacagtaggtttttcgctatgaaattgtcggatcgatggtctaaacagcagctgccgccgtcgtcttctccgtacattgttgagatctcagattgtgatgacgttgaggtgtatattgagacgttgatgctgatgtactgcagagatctaaggaagaagatgatgagacatgatgtttctagggttcttggtattttgaaggtttcagcagcaattgggtttgatgctggagtgctttcatgtctggagtacttggaagcagcaccatggtcagaggatgaagaatacaggattgcttctttgttgtctgagctacaccttgaaaacgttggggcaactgaagttttgagaagagtttctgtagaagctagcaatgggaataacgggagtaacggtgggagcaatgacgaggtgcttttgaatcttttgcatattgttcttgagggaaaagatgagaaagcaaggcgtgatatgaaaacacttgtttccaaaatgcttagagagaactcgtctggaaatgatcttaggaaagagtcgttgtacttggcttgtgatgggtgtttgcataagcttaagcggcagtttctacaagcagcagagtcggatttggagaatgttgaccagatagcaagacaagcggataatctgcattggattttggatattttgatagatagacaaatcgcagaggattttattgtgatgtgggcttctctttctgagctatccgaggtacattctaaggtccctgttgttcacaggtttgagattagcagagtaacagcgaggatctttgttggaattggaaagggacaaattctgacaccgaaagaagtgaggtgtttgctgctgaggaattggttgacacctttctatgatgattttgggtggatgaggagagcttcgaaagggcttgatcggtatttaatcgaggatggtttaagcaataccattctgactcttcctcttgcttggcaacaagagtttttcctagcttggtttgatcggttcttgaactctaatgaagactgtcctaatatccagagagggttcgaagtttggtggagacgggcgttttggagacggaaagaacagagtcaagagcctgctcggctaagagtcaccgcttcagccactgaaaactcctaa

SEQ ID NO: 80831 - protein, 548 aa, Arabidopsis thaliana
  peptide (1)..(548): Ceres Seq. ID no. 12657364
  misc_feature (1)..(548): Homolog of NCBI NO: 15222554 NR Description: hypothetical protein; protein id: At1g63850.1
  misc_feature (1)..(548): Homolog of NCBI NO: 38230508 NR Description: predicted protein [Populus alba x Populus tremula]
  misc_feature (267)..(548): Homolog of NCBI NO: 32488518 NR Description: OSJNBa0011J08.25 [Oryza sativa (japonica
  misc_feature (20)..(100): Homolog of NCBI NO: 32488518 NR Description: OSJNBa0011J08.25 [Oryza sativa (japonica
  misc_feature (142)..(541): Homolog of NCBI NO: 15238599 NR Description: putative protein; protein id: At5g60050.1 thaliana] >gi|8777344|dbj|BAA96934.1| to unknown protein [Arabidopsis thaliana]
  misc_feature (19)..(66): Homolog of NCBI NO: 15238599 NR Description: putative protein; protein id: At5g60050.1 thaliana] >gi|8777344|dbj|BAA96934.1| to unknown protein [Arabidopsis thaliana]
  misc_feature (111)..(337): Homolog of NCBI NO: 32488518 NR Description: OSJNBa0011J08.25 [Oryza sativa (japonica
  misc_feature (85)..(546): Homolog of NCBI NO: 15230303 NR Description: putative protein; protein id: At3g50780.1
  misc_feature (135)..(527): Homolog of NCBI NO: 34394507 NR Description: PRLI-interacting factor G-like protein [Oryza
  misc_feature (135)..(537): Homolog of NCBI NO: 40539077 NR Description: expressed protein [Oryza sativa (japonica
MDYSTATTTAGNGYSSPRDSSFPSSFTKFNSALTAGLLNPMSPPPPPAMHDKTRSSPTLFEMMASEADTIGKVPVQIHNGVLPSPSSSSSSSSAAATAARTTNVNHLVISAQDKQALAMQRISDLLVIRSPGNQFNDPNSSDVKLTLSSKDGISITMCVHRQILVAHSRFFAMKLSDRWSKQQLPPSSSPYIVEISDCDDVEVYIETLMLMYCRDLRKKMMRHDVSRVLGILKVSAAIGFDAGVLSCLEYLEAAPWSEDEEYRIASLLSELHLENVGATEVLRRVSVEASNGNNGSNGGSNDEVLLNLLHIVLEGKDEKARRDMKTLVSKMLRENSSGNDLRKESLYLACDGCLHKLKRQFLQAAESDLENVDQIARQADNLHWILDILIDRQIAEDFIVMWASLSELSEVHSKVPVVHRFEISRVTARIFVGIGKGQILTPKEVRCLLLRNWLTPFYDDFGWMRRASKGLDRYLIEDGLSNTILTLPLAWQQEFFLAWFDRFLNSNEDCPNIQRGFEVWWRRAFWRRKEQSQEPARLRVTASATENS

SEQ ID NO: 80832 - protein, 508 aa, Arabidopsis thaliana
  peptide (1)..(508): Ceres Seq. ID no. 12657365
  misc_feature (1)..(508): Homolog of NCBI NO: 15222554 NR Description: hypothetical protein; protein id: At1g63850.1
  misc_feature (1)..(508): Homolog of NCBI NO: 38230508 NR Description: predicted protein [Populus alba x Populus tremula]
  misc_feature (227)..(508): Homolog of NCBI NO: 32488518 NR Description: OSJNBa0011J08.25 [Oryza sativa (japonica
  misc_feature (1)..(60): Homolog of NCBI NO: 32488518 NR Description: OSJNBa0011J08.25 [Oryza sativa (japonica
  misc_feature (102)..(501): Homolog of NCBI NO: 15238599 NR Description: putative protein; protein id: At5g60050.1 thaliana] >gi|8777344|dbj|BAA96934.1| to unknown protein [Arabidopsis thaliana]
  misc_feature (1)..(26): Homolog of NCBI NO: 15238599 NR Description: putative protein; protein id: At5g60050.1 thaliana] >gi|8777344|dbj|BAA96934.1| to unknown protein [Arabidopsis thaliana]
  misc_feature (71)..(297): Homolog of NCBI NO: 32488518 NR Description: OSJNBa0011J08.25 [Oryza sativa (japonica
  misc_feature (45)..(506): Homolog of NCBI NO: 15230303 NR Description: putative protein; protein id: At3g50780.1
  misc_feature (95)..(487): Homolog of NCBI NO: 34394507 NR Description: PRLI-interacting factor G-like protein [Oryza
  misc_feature (95)..(497): Homolog of NCBI NO: 40539077 NR Description: expressed protein [Oryza sativa (japonica
MSPPPPPAMHDKTRSSPTLFEMMASEADTIGKVPVQIHNGVLPSPSSSSSSSSAAATAARTTNVNHLVISAQDKQALAMQRISDLLVIRSPGNQFNDPNSSDVKLTLSSKDGISITMCVHRQILVAHSRFFAMKLSDRWSKQQLPPSSSPYIVEISDCDDVEVYIETLMLMYCRDLRKKMMRHDVSRVLGILKVSAAIGFDAGVLSCLEYLEAAPWSEDEEYRIASLLSELHLENVGATEVLRRVSVEASNGNNGSNGGSNDEVLLNLLHIVLEGKDEKARRDMKTLVSKMLRENSSGNDLRKESLYLACDGCLHKLKRQFLQAAESDLENVDQIARQADNLHWILDILIDRQIAEDFIVMWASLSELSEVHSKVPVVHRFEISRVTARIFVGIGKGQILTPKEVRCLLLRNWLTPFYDDFGWMRRASKGLDRYLIEDGLSNTILTLPLAWQQEFFLAWFDRFLNSNEDCPNIQRGFEVWWRRAFWRRKEQSQEPARLRVTASATENS

SEQ ID NO: 80833 - protein, 500 aa, Arabidopsis thaliana
  peptide (1)..(500): Ceres Seq. ID no. 12657366
  misc_feature (1)..(500): Homolog of NCBI NO: 15222554 NR Description: hypothetical protein; protein id: At1g63850.1
  misc_feature (1)..(500): Homolog of NCBI NO: 38230508 NR Description: predicted protein [Populus alba x Populus tremula]
  misc_feature (219)..(500): Homolog of NCBI NO: 32488518 NR Description: OSJNBa0011J08.25 [Oryza sativa (japonica
  misc_feature (1)..(52): Homolog of NCBI NO: 32488518 NR Description: OSJNBa0011J08.25 [Oryza sativa (japonica
  misc_feature (94)..(493): Homolog of NCBI NO: 15238599 NR Description: putative protein; protein id: At5g60050.1 thaliana] >gi|8777344|dbj|BAA96934.1| to unknown protein [Arabidopsis thaliana]
  misc_feature (1)..(18): Homolog of NCBI NO: 15238599 NR Description: putative protein; protein id: At5g60050.1 thaliana] >gi|8777344|dbj|BAA96934.1| to unknown protein [Arabidopsis thaliana]
  misc_feature (63)..(289): Homolog of NCBI NO: 32488518 NR Description: OSJNBa0011J08.25 [Oryza sativa (japonica
  misc_feature (37)..(498): Homolog of NCBI NO: 15230303 NR Description: putative protein; protein id: At3g50780.1
  misc_feature (87)..(479): Homolog of NCBI NO: 34394507 NR Description: PRLI-interacting factor G-like protein [Oryza
  misc_feature (87)..(489): Homolog of NCBI NO: 40539077 NR Description: expressed protein [Oryza sativa (japonica
MHDKTRSSPTLFEMMASEADTIGKVPVQIHNGVLPSPSSSSSSSSAAATAARTTNVNHLVISAQDKQALAMQRISDLLVIRSPGNQFNDPNSSDVKLTLSSKDGISITMCVHRQILVAHSRFFAMKLSDRWSKQQLPPSSSPYIVEISDCDDVEVYIETLMLMYCRDLRKKMMRHDVSRVLGILKVSAAIGFDAGVLSCLEYLEAAPWSEDEEYRIASLLSELHLENVGATEVLRRVSVEASNGNNGSNGGSNDEVLLNLLHIVLEGKDEKARRDMKTLVSKMLRENSSGNDLRKESLYLACDGCLHKLKRQFLQAAESDLENVDQIARQADNLHWILDILIDRQIAEDFIVMWASLSELSEVHSKVPVVHRFEISRVTARIFVGIGKGQILTPKEVRCLLLRNWLTPFYDDFGWMRRASKGLDRYLIEDGLSNTILTLPLAWQQEFFLAWFDRFLNSNEDCPNIQRGFEVWWRRAFWRRKEQSQEPARLRVTASATENS

SEQ ID NO: 80834 - DNA, 1248 bp, Arabidopsis thaliana
  misc_feature (1)..(1248): Ceres Seq. ID no. 12657373
  misc_feature: MA Experiment ID: 20000307 Result: Up-regulated in Transcription
  misc_feature: MA Experiment 20000307 PARAMETER Experiment Name: At_Germinating_Seeds_Sub_P Parameter: Age (hr) Value: 24 vs. 0
  misc_feature: MA Experiment 20000307 PARAMETER Experiment Name: At_Germinating_Seeds_Sub_P Parameter: Organism Value: A. thaliana
  misc_feature: MA Experiment 20000307 PARAMETER Experiment Name: At_Germinating_Seeds_Sub_P Parameter: Plant Line Value: WS
  misc_feature: MA Experiment 20000307 PARAMETER Experiment Name: At_Germinating_Seeds_Sub_P Parameter: Tissue Value: Germinating Seeds
atgagacctgcgcaagataatcaaggctcgttccttggccggattagtatccgtcgcaaccaattcgtcgacgtcaacaacgaacaagaacaagaagatctcgagcttttccaaaaacacatcgccgatcgtttcaccgagcttctttctcctcctcaaccaccaccgtcagatgaaattaacacggtagcttccgtagccgcgacggagcagattatgtccgtgacttggcttcgtaagctgatggatgttttcctctgttgcgaagctgaattcaaagcgattttgttaatgggtcgtgacccgacccagatttctaagccgccttttgaccggttagttcctgaaatgttagaccggtcgattaaagcgcttgacatttgtaccgccgttgttaacggtatcgattccgttagacattaccagcgtttagctgagattgctgtgacggctttggagcaacgtccgttaggtgacggtaacgtgaggagagctaaacgcgcgttggcgaatctcgtcgtcgcgttgagtctcgaggataaagagaatgttagcggcggaggtggtggcggcggcggagggaataagacgacggagagatcgtggtcgtttggtcgtcgaagcggtggatcatcggcggcgagtaaaggaggagcaacgattggtcagctcaaatcgtcgtcgtgggcggttgggagaaattggtcggcggcgaagcagatccacgcaatgacagcgaatcttacgccgccacgtggtaacgaagcggcgggattgcctcaaccaatgtttataatgagtacggtgatggttttcgtaatgtgggtgctaacggcggcggttccgtgtcaggagagatcaggattagcgaatcatttaccagtgccgccgaaacatttgaattgggctcagagtttgatcggaatccatgagaaaatcggagatgagtggaagaagaaagagaagaaaggatctgctggattgatggaggagatgacgaggatggagaagctaggtcactcgttgatggaattcgcagatggatttcattatccggcggagaaagatgctgctgaatctgcggcggtgcaagtggcggagatggcggagatatgcaggagaatggaggaggagcttgtgccgttacagcaacagatcagagaagtttttcataggatcgtgaggagtcgtgcggagattctcgaggtgttggagcaagccgggaaagtttcggcgccagttgtgtaa

SEQ ID NO: 80835 - protein, 415 aa, Arabidopsis thaliana
  peptide (1)..(415): Ceres Seq. ID no. 12657374
  misc_feature (2)..(404): Pfam Name: Protein of unknown function (DUF793) Pfam Description: Protein of unknown function (DUF793)
  misc_feature (1)..(415): Homolog of NCBI NO: 15222577 NR Description: hypothetical protein; protein id: At1g63930.1
  misc_feature (1)..(407): Homolog of NCBI NO: 15236522 NR Description: putative protein; protein id: At4g23530.1, by cDNA: gi_17380709 [Arabidopsis thaliana]
  misc_feature (1)..(296): Homolog of NCBI NO: 15237130 NR Description: putative protein; protein id: At4g11300.1, by cDNA: 17771. [Arabidopsis thaliana] >gi|7486699|pir||T13021
  misc_feature (1)..(296): Homolog of NCBI NO: 21553882 NR Description: unknown [Arabidopsis thaliana]
  misc_feature (67)..(404): Homolog of NCBI NO: 18394649 NR Description: expressed protein; protein id: At1g18740.1, by cDNA: 40753., supported by cDNA: gi_14517471 [Arabidopsis
  misc_feature (67)..(404): Homolog of NCBI NO: 21593634 NR Description: unknown [Arabidopsis thaliana]
  misc_feature (33)..(406): Homolog of NCBI NO: 5777630 NR Description: CAA303718.1 protein [Oryza sativa]
  misc_feature (3)..(404): Homolog of NCBI NO: 18410617 NR Description: expressed protein; protein id: At1g74450.1, by cDNA: 108193., supported by cDNA: gi_16226873, supported by gi_18176415 [Arabidopsis thaliana] >gi|25354336|pir||D96773
  misc_feature (3)..(404): Homolog of NCBI NO: 21536674 NR Description: unknown [Arabidopsis thaliana]
  misc_feature (58)..(406): Homolog of NCBI NO: 38345505 NR Description: OSJNBa0039K24.3 [Oryza sativa (japonica
MRPAQDNQGSFLGRISIRRNQFVDVNNEQEQEDLELFQKHIADRFTELLSPPQPPPSDEINTVASVAATEQIMSVTWLRKLMDVFLCCEAEFKAILLMGRDPTQISKPPFDRLVPEMLDRSIKALDICTAVVNGIDSVRHYQRLAEIAVTALEQRPLGDGNVRRAKRALANLVVALSLEDKENVSGGGGGGGGGNKTTERSWSFGRRSGGSSAASKGGATIGQLKSSSWAVGRNWSAAKQIHAMTANLTPPRGNEAAGLPQPMFIMSTVMVFVMWVLTAAVPCQERSGLANHLPVPPKHLNWAQSLIGIHEKIGDEWKKKEKKGSAGLMEEMTRMEKLGHSLMEFADGFHYPAEKDAAESAAVQVAEMAEICRRMEEELVPLQQQIREVFHRIVRSRAEILEVLEQAGKVSAPVV

SEQ ID NO: 80836 - protein, 343 aa, Arabidopsis thaliana
  peptide (1)..(343): Ceres Seq. ID no. 12657375
  misc_feature (1)..(332): Pfam Name: Protein of unknown function (DUF793) Pfam Description: Protein of unknown function (DUF793)
  misc_feature (1)..(343): Homolog of NCBI NO: 15222577 NR Description: hypothetical protein; protein id: At1g63930.1
  misc_feature (1)..(335): Homolog of NCBI NO: 15236522 NR Description: putative protein; protein id: At4g23530.1, by cDNA: gi_17380709 [Arabidopsis thaliana]
  misc_feature (1)..(224): Homolog of NCBI NO: 15237130 NR Description: putative protein; protein id: At4g11300.1, by cDNA: 17771. [Arabidopsis thaliana] >gi|7486699|pir||T13021
  misc_feature (1)..(224): Homolog of NCBI NO: 21553882 NR Description: unknown [Arabidopsis thaliana]
  misc_feature (1)..(332): Homolog of NCBI NO: 18394649 NR Description: expressed protein; protein id: At1g18740.1, by cDNA: 40753., supported by cDNA: gi_14517471 [Arabidopsis
  misc_feature (1)..(332): Homolog of NCBI NO: 21593634 NR Description: unknown [Arabidopsis thaliana]
  misc_feature (1)..(334): Homolog of NCBI NO: 5777630 NR Description: CAA303718.1 protein [Oryza sativa]
  misc_feature (1)..(332): Homolog of NCBI NO: 18410617 NR Description: expressed protein; protein id: At1g74450.1, by cDNA: 108193., supported by cDNA: gi_16226873, supported by gi_18176415 [Arabidopsis thaliana] >gi|25354336|pir||D96773
  misc_feature (1)..(332): Homolog of NCBI NO: 21536674 NR Description: unknown [Arabidopsis thaliana]
  misc_feature (1)..(334): Homolog of NCBI NO: 38345505 NR Description: OSJNBa0039K24.3 [Oryza sativa (japonica
MSVTWLRKLMDVFLCCEAEFKAILLMGRDPTQISKPPFDRLVPEMLDRSIKALDICTAVVNGIDSVRHYQRLAEIAVTALEQRPLGDGNVRRAKRALANLVVALSLEDKENVSGGGGGGGGGNKTTERSWSFGRRSGGSSAASKGGATIGQLKSSSWAVGRNWSAAKQIHAMTANLTPPRGNEAAGLPQPMFIMSTVMVFVMWVLTAAVPCQERSGLANHLPVPPKHLNWAQSLIGIHEKIGDEWKKKEKKGSAGLMEEMTRMEKLGHSLMEFADGFHYPAEKDAAESAAVQVAEMAEICRRMEEELVPLQQQIREVFHRIVRSRAEILEVLEQAGKVSAPVV

SEQ ID NO: 80837 - protein, 334 aa, Arabidopsis thaliana
  peptide (1)..(334): Ceres Seq. ID no. 12657376
  misc_feature (1)..(323): Pfam Name: Protein of unknown function (DUF793) Pfam Description: Protein of unknown function (DUF793)
  misc_feature (1)..(334): Homolog of NCBI NO: 15222577 NR Description: hypothetical protein; protein id: At1g63930.1
  misc_feature (1)..(326): Homolog of NCBI NO: 15236522 NR Description: putative protein; protein id: At4g23530.1, by cDNA: gi_17380709 [Arabidopsis thaliana]
  misc_feature (1)..(215): Homolog of NCBI NO: 15237130 NR Description: putative protein; protein id: At4g11300.1, by cDNA: 17771. [Arabidopsis thaliana] >gi|7486699|pir||T13021
  misc_feature (1)..(215): Homolog of NCBI NO: 21553882 NR Description: unknown [Arabidopsis thaliana]
  misc_feature (1)..(323): Homolog of NCBI NO: 18394649 NR Description: expressed protein; protein id: At1g18740.1, by cDNA: 40753., supported by cDNA: gi_14517471 [Arabidopsis
  misc_feature (1)..(323): Homolog of NCBI NO: 21593634 NR Description: unknown [Arabidopsis thaliana]
  misc_feature (1)..(325): Homolog of NCBI NO: 5777630 NR Description: CAA303718.1 protein [Oryza sativa]
  misc_feature (1)..(323): Homolog of NCBI NO: 18410617 NR Description: expressed protein; protein id: At1g74450.1, by cDNA: 108193., supported by cDNA: gi_16226873, supported by gi_18176415 [Arabidopsis thaliana] >gi|25354336|pir||D96773
  misc_feature (1)..(323): Homolog of NCBI NO: 21536674 NR Description: unknown [Arabidopsis thaliana]
  misc_feature (1)..(325): Homolog of NCBI NO: 38345505 NR Description: OSJNBa0039K24.3 [Oryza sativa (japonica
MDVFLCCEAEFKAILLMGRDPTQISKPPFDRLVPEMLDRSIKALDICTAVVNGIDSVRHYQRLAEIAVTALEQRPLGDGNVRRAKRALANLVVALSLEDKENVSGGGGGGGGGNKTTERSWSFGRRSGGSSAASKGGATIGQLKSSSWAVGRNWSAAKQIHAMTANLTPPRGNEAAGLPQPMFIMSTVMVFVMWVLTAAVPCQERSGLANHLPVPPKHLNWAQSLIGIHEKIGDEWKKKEKKGSAGLMEEMTRMEKLGHSLMEFADGFHYPAEKDAAESAAVQVAEMAEICRRMEEELVPLQQQIREVFHRIVRSRAEILEVLEQAGKVSAPVV

SEQ ID NO: 80838 - DNA, 2828 bp, Arabidopsis thaliana
  misc_feature (1)..(2828): Ceres Seq. ID no. 12657397
  misc_feature: MA Experiment ID: 20000169 Result: Up-regulated in Transcription
  misc_feature: MA Experiment 20000169 PARAMETER Experiment Name: At_100uM_ABA_P Parameter: Age (day) Value: 14
  misc_feature: MA Experiment 20000169 PARAMETER Experiment Name: At_100uM_ABA_P Parameter: Organism Value: A. thaliana
  misc_feature: MA Experiment 20000169 PARAMETER Experiment Name: At_100uM_ABA_P Parameter: Plant Line Value: WS
  misc_feature: MA Experiment 20000169 PARAMETER Experiment Name: At_100uM_ABA_P Parameter: Timepoint (hr) Value: 6
  misc_feature: MA Experiment 20000169 PARAMETER Experiment Name: At_100uM_ABA_P Parameter: Tissue Value: Aerial
  misc_feature: MA Experiment 20000169 PARAMETER Experiment Name: At_100uM_ABA_P Parameter: Treatment Value: 100uM ABA vs. No Treatment
  misc_feature: MA Experiment ID: 20000185 Result: Up-regulated in Transcription
  misc_feature: MA Experiment 20000185 PARAMETER Experiment Name: At_Roots__P Parameter: Age (day) Value: 7 vs. 21
  misc_feature: MA Experiment 20000185 PARAMETER Experiment Name: At_Roots__P Parameter: Organism Value: A. thaliana
  misc_feature: MA Experiment 20000185 PARAMETER Experiment Name: At_Roots__P Parameter: Tissue Value: Roots vs. Whole Plant
  misc_feature: MA Experiment ID: 20000234 Result: Down-regulated in Transcription
  misc_feature: MA Experiment 20000234 PARAMETER Experiment Name: At_Siliques_P Parameter: Age (day) Value: 21
  misc_feature: MA Experiment 20000234 PARAMETER Experiment Name: At_Siliques_P Parameter: Organism Value: A. thaliana
  misc_feature: MA Experiment 20000234 PARAMETER Experiment Name: At_Siliques_P Parameter: Plant Line Value: WS
  misc_feature: MA Experiment 20000234 PARAMETER Experiment Name: At_Siliques_P Parameter: Tissue Value: Less Than 5mm Siliques vs. Whole Plant
  misc_feature: MA Experiment ID: 20000235 Result: Down-regulated in Transcription
  misc_feature: MA Experiment 20000235 PARAMETER Experiment Name: At_Siliques_P Parameter: Age (day) Value: 21
  misc_feature: MA Experiment 20000235 PARAMETER Experiment Name: At_Siliques_P Parameter: Organism Value: A. thaliana
  misc_feature: MA Experiment 20000235 PARAMETER Experiment Name: At_Siliques_P Parameter: Plant Line Value: WS
  misc_feature: MA Experiment 20000235 PARAMETER Experiment Name: At_Siliques_P Parameter: Tissue Value: 5-10mm Siliques vs. Whole Plant
  misc_feature: MA Experiment ID: 20000267 Result: Up-regulated in Transcription
  misc_feature: MA Experiment 20000267 PARAMETER Experiment Name: At_Drought_P Parameter: Age (day) Value: 7
  misc_feature: MA Experiment 20000267 PARAMETER Experiment Name: At_Drought_P Parameter: Organism Value: A. thaliana
  misc_feature: MA Experiment 20000267 PARAMETER Experiment Name: At_Drought_P Parameter: Plant Line Value: WS
  misc_feature: MA Experiment 20000267 PARAMETER Experiment Name: At_Drought_P Parameter: Timepoint (hr) Value: 6
  misc_feature: MA Experiment 20000267 PARAMETER Experiment Name: At_Drought_P Parameter: Tissue Value: Whole Plant
  misc_feature: MA Experiment 20000267 PARAMETER Experiment Name: At_Drought_P Parameter: Treatment Value: Drought vs. No Drought
  misc_feature: MA Experiment ID: 20000268 Result: Up-regulated in Transcription
  misc_feature: MA Experiment 20000268 PARAMETER Experiment Name: At_100mM_NaCl__P Parameter: Age (day) Value: 14
  misc_feature: MA Experiment 20000268 PARAMETER Experiment Name: At_100mM_NaCl__P Parameter: Organism Value: A. thaliana
  misc_feature: MA Experiment 20000268 PARAMETER Experiment Name: At_100mM_NaCl__P Parameter: Plant Line Value: WS
  misc_feature: MA Experiment 20000268 PARAMETER Experiment Name: At_100mM_NaCl__P Parameter: Timepoint (hr) Value: 6
  misc_feature: MA Experiment 20000268 PARAMETER Experiment Name: At_100mM_NaCl__P Parameter: Tissue Value: Whole Plant
  misc_feature: MA Experiment 20000268 PARAMETER Experiment Name: At_100mM_NaCl__P Parameter: Treatment Value: 100mM NaCl vs. No Treatment
  misc_feature: MA Experiment ID: 20000308 Result: Up-regulated in Transcription
  misc_feature: MA Experiment 20000308 PARAMETER Experiment Name: At_100mM_NaCl__P Parameter: Age (day) Value: 17
  misc_feature: MA Experiment 20000308 PARAMETER Experiment Name: At_100mM_NaCl__P Parameter: Organism Value: A. thaliana
  misc_feature: MA Experiment 20000308 PARAMETER Experiment Name: At_100mM_NaCl__P Parameter: Plant Line Value: WS
  misc_feature: MA Experiment 20000308 PARAMETER Experiment Name: At_100mM_NaCl__P Parameter: Timepoint (hr) Value: 72
  misc_feature: MA Experiment 20000308 PARAMETER Experiment Name: At_100mM_NaCl__P Parameter: Tissue Value: Whole Plant
  misc_feature: MA Experiment 20000308 PARAMETER Experiment Name: At_100mM_NaCl__P Parameter: Treatment Value: 100mM NaCl vs. No Treatment
  misc_feature: MA Experiment ID: 20000436 Result: Up-regulated in Transcription
  misc_feature: MA Experiment 20000436 PARAMETER Experiment Name: At_Drought_P Parameter: Age (day) Value: 7
  misc_feature: MA Experiment 20000436 PARAMETER Experiment Name: At_Drought_P Parameter: Organism Value: A. thaliana
  misc_feature: MA Experiment 20000436 PARAMETER Experiment Name: At_Drought_P Parameter: Plant Line Value: WS
  misc_feature: MA Experiment 20000436 PARAMETER Experiment Name: At_Drought_P Parameter: Timepoint (hr) Value: 12
  misc_feature: MA Experiment 20000436 PARAMETER Experiment Name: At_Drought_P Parameter: Tissue Value: Whole Plant
  misc_feature: MA Experiment 20000436 PARAMETER Experiment Name: At_Drought_P Parameter: Treatment Value: Drought vs. No Drought
  misc_feature: MA Experiment ID: 20000437 Result: Up-regulated in Transcription
  misc_feature: MA Experiment 20000437 PARAMETER Experiment Name: At_Drought_P Parameter: Age (day) Value: 8
  misc_feature: MA Experiment 20000437 PARAMETER Experiment Name: At_Drought_P Parameter: Organism Value: A. thaliana
  misc_feature: MA Experiment 20000437 PARAMETER Experiment Name: At_Drought_P Parameter: Plant Line Value: WS
  misc_feature: MA Experiment 20000437 PARAMETER Experiment Name: At_Drought_P Parameter: Timepoint (hr) Value: 24
  misc_feature: MA Experiment 20000437 PARAMETER Experiment Name: At_Drought_P Parameter: Tissue Value: Whole Plant
  misc_feature: MA Experiment 20000437 PARAMETER Experiment Name: At_Drought_P Parameter: Treatment Value: Drought vs. No Drought
  misc_feature: MA Experiment ID: 20000439 Result: Up-regulated in Transcription
  misc_feature: MA Experiment 20000439 PARAMETER Experiment Name: At_Roots__P Parameter: Age (day) Value: 14 vs. 21
  misc_feature: MA Experiment 20000439 PARAMETER Experiment Name: At_Roots__P Parameter: Organism Value: A. thaliana
  misc_feature: MA Experiment 20000439 PARAMETER Experiment Name: At_Roots__P Parameter: Tissue Value: Roots vs. Whole Plant
  misc_feature: MA Experiment ID: 20000460 Result: Up-regulated in Transcription
  misc_feature: MA Experiment 20000460 PARAMETER Experiment Name: At_10percent_PEG_P Parameter: Age (day) Value: 12
  misc_feature: MA Experiment 20000460 PARAMETER Experiment Name: At_10percent_PEG_P Parameter: Organism Value: A. thaliana
  misc_feature: MA Experiment 20000460 PARAMETER Experiment Name: At_10percent_PEG_P Parameter: Plant Line Value: WS
  misc_feature: MA Experiment 20000460 PARAMETER Experiment Name: At_10percent_PEG_P Parameter: Timepoint (day) Value: 12
  misc_feature: MA Experiment 20000460 PARAMETER Experiment Name: At_10percent_PEG_P Parameter: Tissue Value: Whole Plant
  misc_feature: MA Experiment 20000460 PARAMETER Experiment Name: At_10percent_PEG_P Parameter: Treatment Value: 10percent PEG vs. No Treatment
  misc_feature: MA Experiment ID: 20000527 Result: Up-regulated in Transcription
  misc_feature: MA Experiment 20000527 PARAMETER Experiment Name: At_10percent_PEG_P Parameter: Age (day) Value: 20
  misc_feature: MA Experiment 20000527 PARAMETER Experiment Name: At_10percent_PEG_P Parameter: Organism Value: A. thaliana
  misc_feature: MA Experiment 20000527 PARAMETER Experiment Name: At_10percent_PEG_P Parameter: Plant Line Value: WS
  misc_feature: MA Experiment 20000527 PARAMETER Experiment Name: At_10percent_PEG_P Parameter: Timepoint (day) Value: 20
  misc_feature: MA Experiment 20000527 PARAMETER Experiment Name: At_10percent_PEG_P Parameter: Tissue Value: Whole Plant
  misc_feature: MA Experiment 20000527 PARAMETER Experiment Name: At_10percent_PEG_P Parameter: Treatment Value: 10percent PEG vs. No Treatment
  misc_feature: MA Experiment ID: 20001451 Result: Up-regulated in Transcription
  misc_feature: MA Experiment 20001451 PARAMETER Experiment Name: At_Far-red-induction_P Parameter: Age (day) Value: 7
  misc_feature: MA Experiment 20001451 PARAMETER Experiment Name: At_Far-red-induction_P Parameter: Light Value: Far-red vs. White
  misc_feature: MA Experiment 20001451 PARAMETER Experiment Name: At_Far-red-induction_P Parameter: Organism Value: A. thaliana
  misc_feature: MA Experiment 20001451 PARAMETER Experiment Name: At_Far-red-induction_P Parameter: Plant Line Value: Columbia
  misc_feature: MA Experiment 20001451 PARAMETER Experiment Name: At_Far-red-induction_P Parameter: Timepoint (hr) Value: 24
  misc_feature: MA Experiment 20001451 PARAMETER Experiment Name: At_Far-red-induction_P Parameter: Tissue Value: Whole Plant
  misc_feature: MA Experiment ID: 20001504 Result: Up-regulated in Transcription
  misc_feature: MA Experiment 20001504 PARAMETER Experiment Name: At_Far-red-enriched_P Parameter: Age (day) Value: 10
  misc_feature: MA Experiment 20001504 PARAMETER Experiment Name: At_Far-red-enriched_P Parameter: Light Value: Far-red enriched vs. White
  misc_feature: MA Experiment 20001504 PARAMETER Experiment Name: At_Far-red-enriched_P Parameter: Organism Value: A. thaliana
  misc_feature: MA Experiment 20001504 PARAMETER Experiment Name: At_Far-red-enriched_P Parameter: Plant Line Value: Columbia
  misc_feature: MA Experiment 20001504 PARAMETER Experiment Name: At_Far-red-enriched_P Parameter: Timepoint (day) Value: 6
  misc_feature: MA Experiment 20001504 PARAMETER Experiment Name: At_Far-red-enriched_P Parameter: Tissue Value: Whole Plant
  misc_feature: MA Experiment ID: 20001554 Result: Up-regulated in Transcription
  misc_feature: MA Experiment 20001554 PARAMETER Experiment Name: At_Drought_Soil_Dry_P Parameter: Age (day) Value: 21
  misc_feature: MA Experiment 20001554 PARAMETER Experiment Name: At_Drought_Soil_Dry_P Parameter: Organism Value: A. thaliana
  misc_feature: MA Experiment 20001554 PARAMETER Experiment Name: At_Drought_Soil_Dry_P Parameter: Plant Line Value: WS
  misc_feature: MA Experiment 20001554 PARAMETER Experiment Name: At_Drought_Soil_Dry_P Parameter: Post Timepoint (hr) Value: None
  misc_feature: MA Experiment 20001554 PARAMETER Experiment Name: At_Drought_Soil_Dry_P Parameter: Post-Treatment Value: None
  misc_feature: MA Experiment 20001554 PARAMETER Experiment Name: At_Drought_Soil_Dry_P Parameter: Timepoint (day) Value: 7
  misc_feature: MA Experiment 20001554 PARAMETER Experiment Name: At_Drought_Soil_Dry_P Parameter: Treatment Value: Drought vs. No Drought
  misc_feature: MA Experiment ID: 20001555 Result: Up-regulated in Transcription
  misc_feature: MA Experiment 20001555 PARAMETER Experiment Name: At_Drought_Soil_Dry_P Parameter: Age (day) Value: 24
  misc_feature: MA Experiment 20001555 PARAMETER Experiment Name: At_Drought_Soil_Dry_P Parameter: Organism Value: A. thaliana
  misc_feature: MA Experiment 20001555 PARAMETER Experiment Name: At_Drought_Soil_Dry_P Parameter: Plant Line Value: WS
  misc_feature: MA Experiment 20001555 PARAMETER Experiment Name: At_Drought_Soil_Dry_P Parameter: Post Timepoint (hr) Value: None
  misc_feature: MA Experiment 20001555 PARAMETER Experiment Name: At_Drought_Soil_Dry_P Parameter: Post-Treatment Value: None
  misc_feature: MA Experiment 20001555 PARAMETER Experiment Name: At_Drought_Soil_Dry_P Parameter: Timepoint (day) Value: 10
  misc_feature: MA Experiment 20001555 PARAMETER Experiment Name: At_Drought_Soil_Dry_P Parameter: Treatment Value: Drought vs. No Drought
  misc_feature: MA Experiment ID: 20001556 Result: Up-regulated in Transcription
  misc_feature: MA Experiment 20001556 PARAMETER Experiment Name: At_Drought_Soil_Dry_P Parameter: Age (day) Value: 26
  misc_feature: MA Experiment 20001556 PARAMETER Experiment Name: At_Drought_Soil_Dry_P Parameter: Organism Value: A. thaliana
  misc_feature: MA Experiment 20001556 PARAMETER Experiment Name: At_Drought_Soil_Dry_P Parameter: Plant Line Value: WS
  misc_feature: MA Experiment 20001556 PARAMETER Experiment Name: At_Drought_Soil_Dry_P Parameter: Post Timepoint (hr) Value: None
  misc_feature: MA Experiment 20001556 PARAMETER Experiment Name: At_Drought_Soil_Dry_P Parameter: Post-Treatment Value: None
  misc_feature: MA Experiment 20001556 PARAMETER Experiment Name: At_Drought_Soil_Dry_P Parameter: Timepoint (day) Value: 12
  misc_feature: MA Experiment 20001556 PARAMETER Experiment Name: At_Drought_Soil_Dry_P Parameter: Treatment Value: Drought vs. No Drought
  misc_feature: MA Experiment ID: 20001557 Result: Up-regulated in Transcription
  misc_feature: MA Experiment 20001557 PARAMETER Experiment Name: At_Drought_Soil_Dry_P Parameter: Age (day) Value: 27
  misc_feature: MA Experiment 20001557 PARAMETER Experiment Name: At_Drought_Soil_Dry_P Parameter: Organism Value: A. thaliana
  misc_feature: MA Experiment 20001557 PARAMETER Experiment Name: At_Drought_Soil_Dry_P Parameter: Plant Line Value: WS
  misc_feature: MA Experiment 20001557 PARAMETER Experiment Name: At_Drought_Soil_Dry_P Parameter: Post Timepoint (hr) Value: 3
  misc_feature: MA Experiment 20001557 PARAMETER Experiment Name: At_Drought_Soil_Dry_P Parameter: Post-Treatment Value: Re-Water vs. No Drought
  misc_feature: MA Experiment 20001557 PARAMETER Experiment Name: At_Drought_Soil_Dry_P Parameter: Timepoint (day) Value: 13
  misc_feature: MA Experiment 20001557 PARAMETER Experiment Name: At_Drought_Soil_Dry_P Parameter: Treatment Value: Drought vs. No Drought
  misc_feature: MA Experiment ID: 20001559 Result: Up-regulated in Transcription
  misc_feature: MA Experiment 20001559 PARAMETER Experiment Name: At_Drought_Soil_Dry_P Parameter: Age (day) Value: 28
  misc_feature: MA Experiment 20001559 PARAMETER Experiment Name: At_Drought_Soil_Dry_P Parameter: Organism Value: A. thaliana
  misc_feature: MA Experiment 20001559 PARAMETER Experiment Name: At_Drought_Soil_Dry_P Parameter: Plant Line Value: WS
  misc_feature: MA Experiment 20001559 PARAMETER Experiment Name: At_Drought_Soil_Dry_P Parameter: Post Timepoint (hr) Value: 29
  misc_feature: MA Experiment 20001559 PARAMETER Experiment Name: At_Drought_Soil_Dry_P Parameter: Post-Treatment Value: Re-Water vs. No Drought
  misc_feature: MA Experiment 20001559 PARAMETER Experiment Name: At_Drought_Soil_Dry_P Parameter: Timepoint (day) Value: 14
  misc_feature: MA Experiment 20001559 PARAMETER Experiment Name: At_Drought_Soil_Dry_P Parameter: Treatment Value: Drought vs. No Drought
  misc_feature: MA Experiment ID: 20001560 Result: Up-regulated in Transcription
  misc_feature: MA Experiment 20001560 PARAMETER Experiment Name: At_Drought_Soil_Dry_P Parameter: Age (day) Value: 28
  misc_feature: MA Experiment 20001560 PARAMETER Experiment Name: At_Drought_Soil_Dry_P Parameter: Organism Value: A. thaliana
  misc_feature: MA Experiment 20001560 PARAMETER Experiment Name: At_Drought_Soil_Dry_P Parameter: Plant Line Value: WS
  misc_feature: MA Experiment 20001560 PARAMETER Experiment Name: At_Drought_Soil_Dry_P Parameter: Post Timepoint (hr) Value: None
  misc_feature: MA Experiment 20001560 PARAMETER Experiment Name: At_Drought_Soil_Dry_P Parameter: Post-Treatment Value: None
  misc_feature: MA Experiment 20001560 PARAMETER Experiment Name: At_Drought_Soil_Dry_P Parameter: Timepoint (day) Value: 14
  misc_feature: MA Experiment 20001560 PARAMETER Experiment Name: At_Drought_Soil_Dry_P Parameter: Treatment Value: Drought vs. No Drought
  misc_feature: MA Experiment ID: 20001904 Result: Up-regulated in Transcription
  misc_feature: MA Experiment 20001904 PARAMETER Experiment Name: At_Drought_Reproduction_P Parameter: Age (day) Value: 37
  misc_feature: MA Experiment 20001904 PARAMETER Experiment Name: At_Drought_Reproduction_P Parameter: Organism Value: A. thaliana
  misc_feature: MA Experiment 20001904 PARAMETER Experiment Name: At_Drought_Reproduction_P Parameter: Plant Line Value: WS
  misc_feature: MA Experiment 20001904 PARAMETER Experiment Name: At_Drought_Reproduction_P Parameter: Timepoint (day) Value: 7
  misc_feature: MA Experiment 20001904 PARAMETER Experiment Name: At_Drought_Reproduction_P Parameter: Tissue Value: Rosettes
  misc_feature: MA Experiment 20001904 PARAMETER Experiment Name: At_Drought_Reproduction_P Parameter: Treatment Value: Drought vs. No Drought
  misc_feature: MA Experiment ID: 20001906 Result: Up-regulated in Transcription
  misc_feature: MA Experiment 20001906 PARAMETER Experiment Name: At_Drought_Reproduction_P Parameter: Age (day) Value: 35
  misc_feature: MA Experiment 20001906 PARAMETER Experiment Name: At_Drought_Reproduction_P Parameter: Organism Value: A. thaliana
  misc_feature: MA Experiment 20001906 PARAMETER Experiment Name: At_Drought_Reproduction_P Parameter: Plant Line Value: WS
  misc_feature: MA Experiment 20001906 PARAMETER Experiment Name: At_Drought_Reproduction_P Parameter: Timepoint (day) Value: 5
  misc_feature: MA Experiment 20001906 PARAMETER Experiment Name: At_Drought_Reproduction_P Parameter: Tissue Value: Siliques
  misc_feature: MA Experiment 20001906 PARAMETER Experiment Name: At_Drought_Reproduction_P Parameter: Treatment Value: Drought vs. No Drought
  misc_feature: MA Experiment ID: 20001909 Result: Up-regulated in Transcription
  misc_feature: MA Experiment 20001909 PARAMETER Experiment Name: At_Drought_Reproduction_P Parameter: Age (day) Value: 35
  misc_feature: MA Experiment 20001909 PARAMETER Experiment Name: At_Drought_Reproduction_P Parameter: Organism Value: A. thaliana
  misc_feature: MA Experiment 20001909 PARAMETER Experiment Name: At_Drought_Reproduction_P Parameter: Plant Line Value: WS
  misc_feature: MA Experiment 20001909 PARAMETER Experiment Name: At_Drought_Reproduction_P Parameter: Timepoint (day) Value: 5
  misc_feature: MA Experiment 20001909 PARAMETER Experiment Name: At_Drought_Reproduction_P Parameter: Tissue Value: Flowers
  misc_feature: MA Experiment 20001909 PARAMETER Experiment Name: At_Drought_Reproduction_P Parameter: Treatment Value: Drought vs. No Drought
agcgatcaaaaaaatcttcattaaaagaaccctaaatctctcatatccgccgccgtctttgcctcattttcaacaccggtgatgacgtgtaaatagatctggttttcacggttctcactactctctgtgatttttcagactattgaatcgttaggaccaaaacaagtacaaagaaactgcagaagaaaagatttgagagagatatcttacgaaacaagcaaacagatgttgttgtcggcgcttggcgtcggagttggagtaggtgtgggtttaggcttggcttctggtcaagccgtcggaaaatgggccggcgggaactcgtcgtcaaataacgccgtcacggcggataagatggagaaggagatactccgtcaagttgttgacggcagagagagtaaaattactttcgatgagtttccttattatctcagtgaacaaacacgagtgcttctaacaagtgcagcttatgtccatttgaagcacttcgatgcttcaaaatatacgagaaacttgtctccagctagccgagccattctcttgtccggccctgccgagctttaccaacaaatgctagccaaagccctagctcatttcttcgatgccaagttacttcttctagacgtcaacgattttgcactcaagatacagagcaaatacggcagtggaaatacagaatcatcgtcattcaagagatctccctcagaatctgctttagagcaactatcaggactgtttagttccttctccatccttcctcagagagaagagtcaaaagctggtggtaccttgaggaggcaaagcagtggtgtggatatcaaatcaagctcaatggaaggctctagtaatcctccaaagcttcgtcgaaactcttcagcagcagctaatattagcaaccttgcatcttcctcaaatcaagtttcagcgcctttgaaacgaagtagcagttggtcattcgatgaaaagcttctcgtccaatctttatataaggtcttggcctatgtctccaaggcgaatccgattgtgttatatcttcgagacgtcgagaactttctgttccgctcacagagaacttacaacttgttccagaagcttctccagaaactcagtggaccggtcctcattctcggttcaagaattgtggacttgtcaagcgaagacgctcaagaaattgatgagaagctctctgctgttttcccttataatatcgacataagacctcctgaggatgagactcatctagtgagctggaaatcgcagcttgaacgcgacatgaacatgatccaaactcaggacaataggaaccatatcatggaagttttgtcggagaatgatcttatatgcgatgaccttgaatccatctcttttgaggacacgaaggttttaagcaattacattgaagagatcgttgtctctgctctttcctatcatctgatgaacaacaaagatcctgagtacagaaacggaaaactggtgatatcttctataagtttgtcgcatggattcagtctcttcagagaaggcaaagctggcggtcgtgagaagctgaagcaaaaaactaaggaggaatcatccaaggaagtaaaagctgaatcaatcaagccggagacaaaaacagagagtgtcaccaccgtaagcagcaaggaagaaccagagaaagaagctaaagctgagaaagttaccccaaaagctccggaagttgcaccggataacgagtttgagaaacggataagaccggaagtaatcccagcagaagaaattaacgtcacattcaaagacattggtgcacttgacgagataaaagagtcactacaagaacttgtaatgcttcctctccgtaggccagacctcttcacaggaggtctcttgaagccctgcagaggaatcttactcttcggtccaccgggtacaggtaaaacaatgctagctaaagccattgccaaagaggcaggagcgagtttcataaacgtttcgatgtcaacaataacttcgaaatggtttggagaagacgagaagaatgttagggctttgtttactctagcttcgaaggtgtcaccaaccataatatttgtggatgaagttgatagtatgttgggacagagaacaagagttggagaacatgaagctatgagaaagatcaagaatgagtttatgagtcattgggatgggttaatgactaaacctggtgaacgtatcttagtccttgctgctactaatcggcctttcgatcttgatgaagccattatcagacgattcgaacgaaggatcatggtgggactaccggctgtagagaacagagaaaagattctaagaacattgttggcgaaggagaaagtagatgaaaacttggattacaaggaactagcaatgatgacagaaggatacacaggaagtgatcttaagaatctgtgcacaaccgctgcgtataggccggtgagagaacttatacagcaagagaggatcaaagacacagagaagaagaagcagagagagcctacaaaagcaggtgaagaagatgaaggaaaagaagagagagttataacacttcgtccgttgaacagacaagactttaaagaagccaagaatcaggtggcggcgagttttgcggctgagggagcgggaatgggagagttgaagcagtggaatgaattgtatggagaaggaggatcgaggaagaaagaacaactcacttacttcttgtaatgatgatgatgaatcatgatgctggtaatggattatgaaatttggtaatgtaatagtatggtgaatttttgtttccatggttaataagagaataagaatatgatgatattgctaaaagtttgacccgt

SEQ ID NO: 80839 - protein, 824 aa, Arabidopsis thaliana
  peptide (1)..(824): Ceres Seq. ID no. 12657398
  misc_feature (552)..(737): Pfam Name: ATPase family associated with various cellular Pfam Description: ATPase family associated with various cellular
  misc_feature (3)..(824): Homolog of NCBI NO: 34904204 NR Description: P0492F05.26 [Oryza sativa (japonica
  misc_feature (490)..(824): Homolog of NCBI NO: 15234347 NR Description: putative protein; protein id: At4g28000.1
  misc_feature (157)..(460): Homolog of NCBI NO: 15234347 NR Description: putative protein; protein id: At4g28000.1
  misc_feature (1)..(113): Homolog of NCBI NO: 15234347 NR Description: putative protein; protein id: At4g28000.1
  misc_feature (1)..(447): Homolog of NCBI NO: 34912822 NR Description: P0501G01.20 [Oryza sativa (japonica
  misc_feature (491)..(790): Homolog of NCBI NO: 34912822 NR Description: P0501G01.20 [Oryza sativa (japonica
  misc_feature (490)..(799): Homolog of NCBI NO: 28188591 NR Description: unknown protein [Arabidopsis lyrata]
  misc_feature (490)..(799): Homolog of NCBI NO: 28188573 NR Description: unknown protein [Arabidopsis thaliana] unknown protein [Arabidopsis thaliana] unknown protein [Arabidopsis thaliana]
  misc_feature (490)..(799): Homolog of NCBI NO: 28188571 NR Description: unknown protein [Arabidopsis thaliana]
  misc_feature (232)..(824): Homolog of NCBI NO: 20259341 NR Description: unknown protein [Arabidopsis thaliana]
MLLSALGVGVGVGVGLGLASGQAVGKWAGGNSSSNNAVTADKMEKEILRQVVDGRESKITFDEFPYYLSEQTRVLLTSAAYVHLKHFDASKYTRNLSPASRAILLSGPAELYQQMLAKALAHFFDAKLLLLDVNDFALKIQSKYGSGNTESSSFKRSPSESALEQLSGLFSSFSILPQREESKAGGTLRRQSSGVDIKSSSMEGSSNPPKLRRNSSAAANISNLASSSNQVSAPLKRSSSWSFDEKLLVQSLYKVLAYVSKANPIVLYLRDVENFLFRSQRTYNLFQKLLQKLSGPVLILGSRIVDLSSEDAQEIDEKLSAVFPYNIDIRPPEDETHLVSWKSQLERDMNMIQTQDNRNHIMEVLSENDLICDDLESISFEDTKVLSNYIEEIVVSALSYHLMNNKDPEYRNGKLVISSISLSHGFSLFREGKAGGREKLKQKTKEESSKEVKAESIKPETKTESVTTVSSKEEPEKEAKAEKVTPKAPEVAPDNEFEKRIRPEVIPAEEINVTFKDIGALDEIKESLQELVMLPLRRPDLFTGGLLKPCRGILLFGPPGTGKTMLAKAIAKEAGASFINVSMSTITSKWFGEDEKNVRALFTLASKVSPTIIFVDEVDSMLGQRTRVGEHEAMRKIKNEFMSHWDGLMTKPGERILVLAATNRPFDLDEAIIRRFERRIMVGLPAVENREKILRTLLAKEKVDENLDYKELAMMTEGYTGSDLKNLCTTAAYRPVRELIQQERIKDTEKKKQREPTKAGEEDEGKEERVITLRPLNRQDFKEAKNQVAASFAAEGAGMGELKQWNELYGEGGSRKKEQLTYFL

SEQ ID NO: 80840 - protein, 782 aa, Arabidopsis thaliana
  peptide (1)..(782): Ceres Seq. ID no. 12657399
  misc_feature (510)..(695): Pfam Name: ATPase family associated with various cellular Pfam Description: ATPase family associated with various cellular
  misc_feature (1)..(782): Homolog of NCBI NO: 34904204 NR Description: P0492F05.26 [Oryza sativa (japonica
  misc_feature (448)..(782): Homolog of NCBI NO: 15234347 NR Description: putative protein; protein id: At4g28000.1
  misc_feature (115)..(418): Homolog of NCBI NO: 15234347 NR Description: putative protein; protein id: At4g28000.1
  misc_feature (1)..(71): Homolog of NCBI NO: 15234347 NR Description: putative protein; protein id: At4g28000.1
  misc_feature (1)..(405): Homolog of NCBI NO: 34912822 NR Description: P0501G01.20 [Oryza sativa (japonica
  misc_feature (449)..(748): Homolog of NCBI NO: 34912822 NR Description: P0501G01.20 [Oryza sativa (japonica
  misc_feature (448)..(757): Homolog of NCBI NO: 28188591 NR Description: unknown protein [Arabidopsis lyrata]
  misc_feature (448)..(757): Homolog of NCBI NO: 28188573 NR Description: unknown protein [Arabidopsis thaliana] unknown protein [Arabidopsis thaliana] unknown protein [Arabidopsis thaliana]
  misc_feature (448)..(757): Homolog of NCBI NO: 28188571 NR Description: unknown protein [Arabidopsis thaliana]
  misc_feature (190)..(782): Homolog of NCBI NO: 20259341 NR Description: unknown protein [Arabidopsis thaliana]
MEKEILRQVVDGRESKITFDEFPYYLSEQTRVLLTSAAYVHLKHFDASKYTRNLSPASRAILLSGPAELYQQMLAKALAHFFDAKLLLLDVNDFALKIQSKYGSGNTESSSFKRSPSESALEQLSGLFSSFSILPQREESKAGGTLRRQSSGVDIKSSSMEGSSNPPKLRRNSSAAANISNLASSSNQVSAPLKRSSSWSFDEKLLVQSLYKVLAYVSKANPIVLYLRDVENFLFRSQRTYNLFQKLLQKLSGPVLILGSRIVDLSSEDAQEIDEKLSAVFPYNIDIRPPEDETHLVSWKSQLERDMNMIQTQDNRNHIMEVLSENDLICDDLESISFEDTKVLSNYIEEIVVSALSYHLMNNKDPEYRNGKLVISSISLSHGFSLFREGKAGGREKLKQKTKEESSKEVKAESIKPETKTESVTTVSSKEEPEKEAKAEKVTPKAPEVAPDNEFEKRIRPEVIPAEEINVTFKDIGALDEIKESLQELVMLPLRRPDLFTGGLLKPCRGILLFGPPGTGKTMLAKAIAKEAGASFINVSMSTITSKWFGEDEKNVRALFTLASKVSPTIIFVDEVDSMLGQRTRVGEHEAMRKIKNEFMSHWDGLMTKPGERILVLAATNRPFDLDEAIIRRFERRIMVGLPAVENREKILRTLLAKEKVDENLDYKELAMMTEGYTGSDLKNLCTTAAYRPVRELIQQERIKDTEKKKQREPTKAGEEDEGKEERVITLRPLNRQDFKEAKNQVAASFAAEGAGMGELKQWNELYGEGGSRKKEQLTYFL

SEQ ID NO: 80841 - protein, 710 aa, Arabidopsis thaliana
  peptide (1)..(710): Ceres Seq. ID no. 12657400
  misc_feature (438)..(623): Pfam Name: ATPase family associated with various cellular Pfam Description: ATPase family associated with various cellular
  misc_feature (1)..(710): Homolog of NCBI NO: 34904204 NR Description: P0492F05.26 [Oryza sativa (japonica
  misc_feature (376)..(710): Homolog of NCBI NO: 15234347 NR Description: putative protein; protein id: At4g28000.1
  misc_feature (43)..(346): Homolog of NCBI NO: 15234347 NR Description: putative protein; protein id: At4g28000.1
  misc_feature (1)..(333): Homolog of NCBI NO: 34912822 NR Description: P0501G01.20 [Oryza sativa (japonica
  misc_feature (377)..(676): Homolog of NCBI NO: 34912822 NR Description: P0501G01.20 [Oryza sativa (japonica
  misc_feature (376)..(685): Homolog of NCBI NO: 28188591 NR Description: unknown protein [Arabidopsis lyrata]
  misc_feature (376)..(685): Homolog of NCBI NO: 28188573 NR Description: unknown protein [Arabidopsis thaliana] unknown protein [Arabidopsis thaliana] unknown protein [Arabidopsis thaliana]
  misc_feature (376)..(685): Homolog of NCBI NO: 28188571 NR Description: unknown protein [Arabidopsis thaliana]
  misc_feature (118)..(710): Homolog of NCBI NO: 20259341 NR Description: unknown protein [Arabidopsis thaliana]
  misc_feature (1)..(53): Homolog of NCBI NO: 20259341 NR Description: unknown protein [Arabidopsis thaliana]
MLAKALAHFFDAKLLLLDVNDFALKIQSKYGSGNTESSSFKRSPSESALEQLSGLFSSFSILPQREESKAGGTLRRQSSGVDIKSSSMEGSSNPPKLRRNSSAAANISNLASSSNQVSAPLKRSSSWSFDEKLLVQSLYKVLAYVSKANPIVLYLRDVENFLFRSQRTYNLFQKLLQKLSGPVLILGSRIVDLSSEDAQEIDEKLSAVFPYNIDIRPPEDETHLVSWKSQLERDMNMIQTQDNRNHIMEVLSENDLICDDLESISFEDTKVLSNYIEEIVVSALSYHLMNNKDPEYRNGKLVISSISLSHGFSLFREGKAGGREKLKQKTKEESSKEVKAESIKPETKTESVTTVSSKEEPEKEAKAEKVTPKAPEVAPDNEFEKRIRPEVIPAEEINVTFKDIGALDEIKESLQELVMLPLRRPDLFTGGLLKPCRGILLFGPPGTGKTMLAKAIAKEAGASFINVSMSTITSKWFGEDEKNVRALFTLASKVSPTIIFVDEVDSMLGQRTRVGEHEAMRKIKNEFMSHWDGLMTKPGERILVLAATNRPFDLDEAIIRRFERRIMVGLPAVENREKILRTLLAKEKVDENLDYKELAMMTEGYTGSDLKNLCTTAAYRPVRELIQQERIKDTEKKKQREPTKAGEEDEGKEERVITLRPLNRQDFKEAKNQVAASFAAEGAGMGELKQWNELYGEGGSRKKEQLTYFL

SEQ ID NO: 80842 - DNA, 852 bp, Arabidopsis thaliana
  misc_feature (1)..(852): Ceres Seq. ID no. 12657435
  misc_feature: MA Experiment ID: 20000440 Result: Up-regulated in Transcription
  misc_feature: MA Experiment 20000440 PARAMETER Experiment Name: At_Closed-Flower__Sub_P Parameter: Tissue Value: Closed Flower vs. Whole Plant
atgtcttcgcatagtgatgaaatcgaagaagaacaaatatcaagaattgagaaaggcaaaggcaaagattgccaaggaggaatcgagacggttatatgtacttctcccagcattgtctgccttacccaaaagttgatagcagagatgattgggacctattttatagtattctctggatgtggagtggtggtagtgaatgtcttgtacggaggaacaataacatttccagggatctgtgttacttggggtctcattgttatggtcatgatttactctactggtcacatttccggtgcacattttaaccctgccgttaccgttactttcgccattttccgacggtttccttggcatcaggtaccattgtatataggtgcacaatttgcgggatcgttactagcgagtttgacattgagactaatgtttaaagtgacacccgaagctttctttggaacgactccagctgattcgccagcacgagcgctcgtcgcagaaatcattatctcattcctcctcatgttcgttatctctggagttgccaccgataatcgtgcggttggagaattagctggaattgcggtggggatgactataatggtaaacgtctttgtggccggaccaatttcgggagcatcaatgaatccagcaagaagtctaggaccagcattagtgatgggagtatataaacacatatgggtttacattgttggtcccgtcctaggagttatatccggaggttttgtttacaaccttatcagatttacggataagccactccgagaactcactaagagcgcttcttttctccgtgccgtttctccaagccacaagggttctagttctaagacttaa

SEQ ID NO: 80843 - protein, 283 aa, Arabidopsis thaliana
  peptide (1)..(283): Ceres Seq. ID no. 12657436
  misc_feature (35)..(249): Pfam Name: Major intrinsic protein Pfam Description: Major intrinsic protein
  misc_feature (1)..(283): Homolog of NCBI NO: 15240347 NR Description: Membrane integral protein (MIP) -like; protein id:
  misc_feature (1)..(281): Homolog of NCBI NO: 15240348 NR Description: Membrane integral protein (MIP) -like; protein id:
  misc_feature (6)..(271): Homolog of NCBI NO: 1346736 NR Description: POLLEN-SPECIFIC MEMBRANE INTEGRAL PROTEIN
  misc_feature (2)..(273): Homolog of NCBI NO: 1076748 NR Description: major intrinsic protein - rice
  misc_feature (16)..(281): Homolog of NCBI NO: 13447785 NR Description: NOD26-like membrane integral protein ZmNIP1-1
  misc_feature (34)..(274): Homolog of NCBI NO: 5139541 NR Description: nodulin26-like major intrinsic protein [Pisum
  misc_feature (39)..(273): Homolog of NCBI NO: 34903716 NR Description: putative major intrinsic protein [Oryza sativa
  misc_feature (29)..(275): Homolog of NCBI NO: 81800 NR Description: nodulin-26 precursor - soybean
  misc_feature (43)..(275): Homolog of NCBI NO: 541944 NR Description: nodulin-26 - soybean
MSSHSDEIEEEQISRIEKGKGKDCQGGIETVICTSPSIVCLTQKLIAEMIGTYFIVFSGCGVVVVNVLYGGTITFPGICVTWGLIVMVMIYSTGHISGAHFNPAVTVTFAIFRRFPWHQVPLYIGAQFAGSLLASLTLRLMFKVTPEAFFGTTPADSPARALVAEIIISFLLMFVISGVATDNRAVGELAGIAVGMTIMVNVFVAGPISGASMNPARSLGPALVMGVYKHIWVYIVGPVLGVISGGFVYNLIRFTDKPLRELTKSASFLRAVSPSHKGSSSKT

SEQ ID NO: 80844 - protein, 235 aa, Arabidopsis thaliana
  peptide (1)..(235): Ceres Seq. ID no. 12657437
  misc_feature (1)..(201): Pfam Name: Major intrinsic protein Pfam Description: Major intrinsic protein
  misc_feature (1)..(235): Homolog of NCBI NO: 15240347 NR Description: Membrane integral protein (MIP) -like; protein id:
  misc_feature (1)..(233): Homolog of NCBI NO: 15240348 NR Description: Membrane integral protein (MIP) -like; protein id:
  misc_feature (1)..(223): Homolog of NCBI NO: 1346736 NR Description: POLLEN-SPECIFIC MEMBRANE INTEGRAL PROTEIN
  misc_feature (1)..(225): Homolog of NCBI NO: 1076748 NR Description: major intrinsic protein - rice
  misc_feature (1)..(233): Homolog of NCBI NO: 13447785 NR Description: NOD26-like membrane integral protein ZmNIP1-1
  misc_feature (1)..(226): Homolog of NCBI NO: 5139541 NR Description: nodulin26-like major intrinsic protein [Pisum
  misc_feature (1)..(225): Homolog of NCBI NO: 34903716 NR Description: putative major intrinsic protein [Oryza sativa
  misc_feature (1)..(227): Homolog of NCBI NO: 81800 NR Description: nodulin-26 precursor - soybean
  misc_feature (1)..(227): Homolog of NCBI NO: 541944 NR Description: nodulin-26 - soybean
MIGTYFIVFSGCGVVVVNVLYGGTITFPGICVTWGLIVMVMIYSTGHISGAHFNPAVTVTFAIFRRFPWHQVPLYIGAQFAGSLLASLTLRLMFKVTPEAFFGTTPADSPARALVAEIIISFLLMFVISGVATDNRAVGELAGIAVGMTIMVNVFVAGPISGASMNPARSLGPALVMGVYKHIWVYIVGPVLGVISGGFVYNLIRFTDKPLRELTKSASFLRAVSPSHKGSSSKT

SEQ ID NO: 80845 - protein, 197 aa, Arabidopsis thaliana
  peptide (1)..(197): Ceres Seq. ID no. 12657438
  misc_feature (1)..(163): Pfam Name: Major intrinsic protein Pfam Description: Major intrinsic protein
  misc_feature (1)..(197): Homolog of NCBI NO: 15240347 NR Description: Membrane integral protein (MIP) -like; protein id:
  misc_feature (1)..(195): Homolog of NCBI NO: 15240348 NR Description: Membrane integral protein (MIP) -like; protein id:
  misc_feature (1)..(185): Homolog of NCBI NO: 1346736 NR Description: POLLEN-SPECIFIC MEMBRANE INTEGRAL PROTEIN
  misc_feature (1)..(187): Homolog of NCBI NO: 1076748 NR Description: major intrinsic protein - rice
  misc_feature (1)..(195): Homolog of NCBI NO: 13447785 NR Description: NOD26-like membrane integral protein ZmNIP1-1
  misc_feature (1)..(188): Homolog of NCBI NO: 5139541 NR Description: nodulin26-like major intrinsic protein [Pisum
  misc_feature (1)..(187): Homolog of NCBI NO: 34903716 NR Description: putative major intrinsic protein [Oryza sativa
  misc_feature (1)..(189): Homolog of NCBI NO: 81800 NR Description: nodulin-26 precursor - soybean
  misc_feature (1)..(189): Homolog of NCBI NO: 541944 NR Description: nodulin-26 - soybean
MVMIYSTGHISGAHFNPAVTVTFAIFRRFPWHQVPLYIGAQFAGSLLASLTLRLMFKVTPEAFFGTTPADSPARALVAEIIISFLLMFVISGVATDNRAVGELAGIAVGMTIMVNVFVAGPISGASMNPARSLGPALVMGVYKHIWVYIVGPVLGVISGGFVYNLIRFTDKPLRELTKSASFLRAVSPSHKGSSSKT

SEQ ID NO: 80846 - DNA, 852 bp, Arabidopsis thaliana
  misc_feature (1)..(852): Ceres Seq. ID no. 12657439
  misc_feature: MA Experiment ID: 20001450 Result: Up-regulated in Transcription
  misc_feature: MA Experiment 20001450 PARAMETER Experiment Name: At_Far-red-induction_P Parameter: Age (day) Value: 7
  misc_feature: MA Experiment 20001450 PARAMETER Experiment Name: At_Far-red-induction_P Parameter: Light Value: Far-red vs. White
  misc_feature: MA Experiment 20001450 PARAMETER Experiment Name: At_Far-red-induction_P Parameter: Organism Value: A. thaliana
  misc_feature: MA Experiment 20001450 PARAMETER Experiment Name: At_Far-red-induction_P Parameter: Plant Line Value: Columbia
  misc_feature: MA Experiment 20001450 PARAMETER Experiment Name: At_Far-red-induction_P Parameter: Timepoint (hr) Value: 8
  misc_feature: MA Experiment 20001450 PARAMETER Experiment Name: At_Far-red-induction_P Parameter: Tissue Value: Whole Plant
atgacttctcatggtgaagagatcgaagacgaacaaatatcaagaattgagaaaggcaattgcaaagatagccaaggaggaatggagacggccatatgtagttctcctagcattgtttgccttacacaaaagttgatagcagagatgattggaacctatttcataatattctctggatgtggagtagtggtagtgaatgtcttgtacggaggaacaataacatttccagggatctgtgtgacttggggtctcattgttatggtcatgatttactctactggtcacatttccggtgcacattttaaccctgccgtcactgtcacgttcgctgttttccggcggtttccttggtatcaggtaccattgtatataggtgcacaacttacgggatcattactagcgagtttaacattgagactaatgttcaatgtgacacccaaagctttctttggaacaactccaactgattcatcaggacaagcactagtagcagagatcattatctcattcctcctcatgttcgttatctccggcgttgccactgatagtcgtgcgactggagaattagctggaatcgcggtggggatgactataatattgaacgtctttgtagccggacctatttcgggagcatcaatgaatccagcgagaagtcttggaccagcaatagtgatgggaagatataaaggaatttgggtttacattgttggtccctttgtcggaatttttgccggaggttttgtttacaacttcatgagatttacggataagccactacgagaactcacaaaaagtgcttctttcctccgtagtgttgcccaaaaagacaatgcttctaaatcagatggctaa

SEQ ID NO: 80847 - protein, 283 aa, Arabidopsis thaliana
  peptide (1)..(283): Ceres Seq. ID no. 12657440
  misc_feature (1)..(283): Homolog of NCBI NO: 15240348 NR Description: Membrane integral protein (MIP) -like; protein id:
  misc_feature (1)..(281): Homolog of NCBI NO: 15240347 NR Description: Membrane integral protein (MIP) -like; protein id:
  misc_feature (9)..(271): Homolog of NCBI NO: 1346736 NR Description: POLLEN-SPECIFIC MEMBRANE INTEGRAL PROTEIN
  misc_feature (100)..(261): Homolog of NCBI NO: 18072853 NR Description: putative aquaglyceroporin [Arabidopsis thaliana]
  misc_feature (16)..(281): Homolog of NCBI NO: 13447785 NR Description: NOD26-like membrane integral protein ZmNIP1-1
  misc_feature (16)..(279): Homolog of NCBI NO: 1076748 NR Description: major intrinsic protein - rice
  misc_feature (22)..(273): Homolog of NCBI NO: 541944 NR Description: nodulin-26 - soybean
  misc_feature (29)..(273): Homolog of NCBI NO: 81800 NR Description: nodulin-26 precursor - soybean
  misc_feature (39)..(275): Homolog of NCBI NO: 34903716 NR Description: putative major intrinsic protein [Oryza sativa
MTSHGEEIEDEQISRIEKGNCKDSQGGMETAICSSPSIVCLTQKLIAEMIGTYFIIFSGCGVVVVNVLYGGTITFPGICVTWGLIVMVMIYSTGHISGAHFNPAVTVTFAVFRRFPWYQVPLYIGAQLTGSLLASLTLRLMFNVTPKAFFGTTPTDSSGQALVAEIIISFLLMFVISGVATDSRATGELAGIAVGMTIILNVFVAGPISGASMNPARSLGPAIVMGRYKGIWVYIVGPFVGIFAGGFVYNFMRFTDKPLRELTKSASFLRSVAQKDNASKSDG

SEQ ID NO: 80848 - protein, 256 aa, Arabidopsis thaliana
  peptide (1)..(256): Ceres Seq. ID no. 12657441
  misc_feature (1)..(256): Homolog of NCBI NO: 15240348 NR Description: Membrane integral protein (MIP) -like; protein id:
  misc_feature (1)..(254): Homolog of NCBI NO: 15240347 NR Description: Membrane integral protein (MIP) -like; protein id:
  misc_feature (1)..(244): Homolog of NCBI NO: 1346736 NR Description: POLLEN-SPECIFIC MEMBRANE INTEGRAL PROTEIN
  misc_feature (73)..(234): Homolog of NCBI NO: 18072853 NR Description: putative aquaglyceroporin [Arabidopsis thaliana]
  misc_feature (1)..(254): Homolog of NCBI NO: 13447785 NR Description: NOD26-like membrane integral protein ZmNIP1-1
  misc_feature (1)..(252): Homolog of NCBI NO: 1076748 NR Description: major intrinsic protein - rice
  misc_feature (1)..(246): Homolog of NCBI NO: 541944 NR Description: nodulin-26 - soybean
  misc_feature (2)..(246): Homolog of NCBI NO: 81800 NR Description: nodulin-26 precursor - soybean
  misc_feature (12)..(248): Homolog of NCBI NO: 34903716 NR Description: putative major intrinsic protein [Oryza sativa
METAICSSPSIVCLTQKLIAEMIGTYFIIFSGCGVVVVNVLYGGTITFPGICVTWGLIVMVMIYSTGHISGAHFNPAVTVTFAVFRRFPWYQVPLYIGAQLTGSLLASLTLRLMFNVTPKAFFGTTPTDSSGQALVAEIIISFLLMFVISGVATDSRATGELAGIAVGMTIILNVFVAGPISGASMNPARSLGPAIVMGRYKGIWVYIVGPFVGIFAGGFVYNFMRFTDKPLRELTKSASFLRSVAQKDNASKSDG

SEQ ID NO: 80849 - protein, 235 aa, Arabidopsis thaliana
  peptide (1)..(235): Ceres Seq. ID no. 12657442
  misc_feature (1)..(235): Homolog of NCBI NO: 15240348 NR Description: Membrane integral protein (MIP) -like; protein id:
  misc_feature (1)..(233): Homolog of NCBI NO: 15240347 NR Description: Membrane integral protein (MIP) -like; protein id:
  misc_feature (1)..(223): Homolog of NCBI NO: 1346736 NR Description: POLLEN-SPECIFIC MEMBRANE INTEGRAL PROTEIN
  misc_feature (52)..(213): Homolog of NCBI NO: 18072853 NR Description: putative aquaglyceroporin [Arabidopsis thaliana]
  misc_feature (1)..(233): Homolog of NCBI NO: 13447785 NR Description: NOD26-like membrane integral protein ZmNIP1-1
  misc_feature (1)..(231): Homolog of NCBI NO: 1076748 NR Description: major intrinsic protein - rice
  misc_feature (1)..(225): Homolog of NCBI NO: 541944 NR Description: nodulin-26 - soybean
  misc_feature (1)..(225): Homolog of NCBI NO: 81800 NR Description: nodulin-26 precursor - soybean
  misc_feature (1)..(227): Homolog of NCBI NO: 34903716 NR Description: putative major intrinsic protein [Oryza sativa
MIGTYFIIFSGCGVVVVNVLYGGTITFPGICVTWGLIVMVMIYSTGHISGAHFNPAVTVTFAVFRRFPWYQVPLYIGAQLTGSLLASLTLRLMFNVTPKAFFGTTPTDSSGQALVAEIIISFLLMFVISGVATDSRATGELAGIAVGMTIILNVFVAGPISGASMNPARSLGPAIVMGRYKGIWVYIVGPFVGIFAGGFVYNFMRFTDKPLRELTKSASFLRSVAQKDNASKSDG

SEQ ID NO: 80850 - DNA, 1223 bp, Arabidopsis thaliana
  misc_feature (1)..(1223): Ceres Seq. ID no. 12657462
  misc_feature: MA Experiment ID: 108433 Result: Up-regulated in Transcription
  misc_feature: MA Experiment 108433 PARAMETER Experiment Name: At_rhl_Mutant2_cDNA_P Parameter: Age (day) Value: 7
  misc_feature: MA Experiment 108433 PARAMETER Experiment Name: At_rhl_Mutant2_cDNA_P Parameter: Organism Value: A. thaliana
  misc_feature: MA Experiment 108433 PARAMETER Experiment Name: At_rhl_Mutant2_cDNA_P Parameter: Plant Line Value: rhl Mutant vs. wt landsburg
  misc_feature: MA Experiment 108433 PARAMETER Experiment Name: At_rhl_Mutant2_cDNA_P Parameter: Tissue Value: Roots
  misc_feature: MA Experiment ID: 108434 Result: Down-regulated in Transcription
  misc_feature: MA Experiment 108434 PARAMETER Experiment Name: At_Root_Tips_cDNA_P Parameter: Tissue Value: Root Tips
  misc_feature: MA Experiment ID: 108462 Result: Up-regulated in Transcription
  misc_feature: MA Experiment 108462 PARAMETER Experiment Name: At_Germinating_Seeds_cDNA_P Parameter: Age (day) Value: 2 vs. 0
  misc_feature: MA Experiment 108462 PARAMETER Experiment Name: At_Germinating_Seeds_cDNA_P Parameter: Tissue Value: Germinating Seeds
  misc_feature: MA Experiment ID: 108463 Result: Up-regulated in Transcription
  misc_feature: MA Experiment 108463 PARAMETER Experiment Name: At_Germinating_Seeds_cDNA_P Parameter: Age (day) Value: 3 vs. 0
  misc_feature: MA Experiment 108463 PARAMETER Experiment Name: At_Germinating_Seeds_cDNA_P Parameter: Tissue Value: Germinating Seeds
  misc_feature: MA Experiment ID: 108464 Result: Up-regulated in Transcription
  misc_feature: MA Experiment 108464 PARAMETER Experiment Name: At_Germinating_Seeds_cDNA_P Parameter: Age (day) Value: 4 vs. 0
  misc_feature: MA Experiment 108464 PARAMETER Experiment Name: At_Germinating_Seeds_cDNA_P Parameter: Tissue Value: Germinating Seeds
  misc_feature: MA Experiment ID: 108594 Result: Down-regulated in Transcription
  misc_feature: MA Experiment 108594 PARAMETER Experiment Name: At_Ler-rhl_Root_cDNA_P Parameter: Plant Line Value: null
  misc_feature: MA Experiment ID: 20000113 Result: Down-regulated in Transcription
  misc_feature: MA Experiment 20000113 PARAMETER Experiment Name: At_42deg_Heat_cDNA_P Parameter: Temperature (deg C) Value: 42 vs. 22
  misc_feature: MA Experiment 20000113 PARAMETER Experiment Name: At_42deg_Heat_cDNA_P Parameter: Timepoint (hr) Value: 8
  misc_feature: MA Experiment 20000113 PARAMETER Experiment Name: At_42deg_Heat_cDNA_P Parameter: Tissue Value: Aerial
  misc_feature: MA Experiment ID: 20000306 Result: Down-regulated in Transcription
  misc_feature: MA Experiment 20000306 PARAMETER Experiment Name: At_Germinating_Seeds_Sub_P Parameter: Age (hr) Value: 6 vs. 0
  misc_feature: MA Experiment 20000306 PARAMETER Experiment Name: At_Germinating_Seeds_Sub_P Parameter: Organism Value: A. thaliana
  misc_feature: MA Experiment 20000306 PARAMETER Experiment Name: At_Germinating_Seeds_Sub_P Parameter: Plant Line Value: WS
  misc_feature: MA Experiment 20000306 PARAMETER Experiment Name: At_Germinating_Seeds_Sub_P Parameter: Tissue Value: Germinating Seeds
  misc_feature: MA Experiment ID: 20000307 Result: Down-regulated in Transcription
  misc_feature: MA Experiment 20000307 PARAMETER Experiment Name: At_Germinating_Seeds_Sub_P Parameter: Age (hr) Value: 24 vs. 0
  misc_feature: MA Experiment 20000307 PARAMETER Experiment Name: At_Germinating_Seeds_Sub_P Parameter: Organism Value: A. thaliana
  misc_feature: MA Experiment 20000307 PARAMETER Experiment Name: At_Germinating_Seeds_Sub_P Parameter: Plant Line Value: WS
  misc_feature: MA Experiment 20000307 PARAMETER Experiment Name: At_Germinating_Seeds_Sub_P Parameter: Tissue Value: Germinating Seeds
  misc_feature: MA Experiment ID: 20000314 Result: Down-regulated in Transcription
  misc_feature: MA Experiment 20000314 PARAMETER Experiment Name: At_14day_Shoots-Roots_Sub_P Parameter: Age (day) Value: 14
  misc_feature: MA Experiment 20000314 PARAMETER Experiment Name: At_14day_Shoots-Roots_Sub_P Parameter: Organism Value: A. thaliana
  misc_feature: MA Experiment 20000314 PARAMETER Experiment Name: At_14day_Shoots-Roots_Sub_P Parameter: Plant Line Value: WS
  misc_feature: MA Experiment 20000314 PARAMETER Experiment Name: At_14day_Shoots-Roots_Sub_P Parameter: Tissue Value: Roots vs. Whole Plant
  misc_feature: MA Experiment ID: 20000315 Result: Down-regulated in Transcription
  misc_feature: MA Experiment 20000315 PARAMETER Experiment Name: At_14day_Shoots-Roots_Sub_P Parameter: Age (day) Value: 14
  misc_feature: MA Experiment 20000315 PARAMETER Experiment Name: At_14day_Shoots-Roots_Sub_P Parameter: Organism Value: A. thaliana
  misc_feature: MA Experiment 20000315 PARAMETER Experiment Name: At_14day_Shoots-Roots_Sub_P Parameter: Plant Line Value: WS
  misc_feature: MA Experiment 20000315 PARAMETER Experiment Name: At_14day_Shoots-Roots_Sub_P Parameter: Tissue Value: Shoots vs. Whole Plant
  misc_feature: MA Experiment ID: 20000346 Result: Up-regulated in Transcription
  misc_feature: MA Experiment 20000346 PARAMETER Experiment Name: At_2mM_SA_Sub_P Parameter: Age (day) Value: 14
  misc_feature: MA Experiment 20000346 PARAMETER Experiment Name: At_2mM_SA_Sub_P Parameter: Organism Value: A. thaliana
  misc_feature: MA Experiment 20000346 PARAMETER Experiment Name: At_2mM_SA_Sub_P Parameter: Plant Line Value: WS
  misc_feature: MA Experiment 20000346 PARAMETER Experiment Name: At_2mM_SA_Sub_P Parameter: Timepoint (hr) Value: 1
  misc_feature: MA Experiment 20000346 PARAMETER Experiment Name: At_2mM_SA_Sub_P Parameter: Tissue Value: Aerial
  misc_feature: MA Experiment 20000346 PARAMETER Experiment Name: At_2mM_SA_Sub_P Parameter: Treatment Value: 2mM SA vs. No Treatment
  misc_feature: MA Experiment ID: 20000347 Result: Up-regulated in Transcription
  misc_feature: MA Experiment 20000347 PARAMETER Experiment Name: At_2mM_SA_Sub_P Parameter: Age (day) Value: 14
  misc_feature: MA Experiment 20000347 PARAMETER Experiment Name: At_2mM_SA_Sub_P Parameter: Organism Value: A. thaliana
  misc_feature: MA Experiment 20000347 PARAMETER Experiment Name: At_2mM_SA_Sub_P Parameter: Plant Line Value: WS
  misc_feature: MA Experiment 20000347 PARAMETER Experiment Name: At_2mM_SA_Sub_P Parameter: Timepoint (hr) Value: 6
  misc_feature: MA Experiment 20000347 PARAMETER Experiment Name: At_2mM_SA_Sub_P Parameter: Tissue Value: Aerial
  misc_feature: MA Experiment 20000347 PARAMETER Experiment Name: At_2mM_SA_Sub_P Parameter: Treatment Value: 2mM SA vs. No Treatment
attgaatcggaaaaaaatggcgaacatctgcatagcgacgacggcaactaacaatcaggtgattctccgtgactacgtgagtggattccctaaacaatccgacctctacattgccacaaccaccattgacttacgtgtacctcccggatccatggcggttctagtcaagaatctctacttatcttgcgatcctcatagccgcactcgcatggggaagcctgatccctcatcccaggcttccatggctcatgctttcactatcggcaagccaatctctgggtttggagtggctaaagcaatagattcagggcacccaaattacaaaacaggagatttactttggggaagagttggttgggaagagtatagtgttattactccaactccttcttcacatttcaagattcatcacaccgatgttccattatctttctacactggacttcttggtattccgggtctcactgcgtatgttgggttttacgagatatgttctccgaagaaaggagagactgtatttgtatcagctgcatctggcgcagtaggtcaacttgtgggacagtttgcgaagatggcgggatgctatgtcgttggaagcgctagcagtaaagagaaggttgatcttctcaagactaagtttgggtatgatgacgctttcaattataaggaagaaaaggatcttagtgctgccctaaagaggtgtttcccagaaggaatagacatatactttgagaacgtgggaggcaaaatgttagacgcagtgctccaaaacatgaggacacatggccgaatcgcagcgtgtggaatgatttcacaatacaatctaaaggaaccagaaggtttacataacacagccaccattgtccacaaacgcatccgtgttcaagattttgcagctgtcgaattttttgatagatactccaagtttttggacttcatacttccacacgtaagagaagggaagataacatatgttgaggatatagcccaaggacttgagaatggaccttctgctttgatcggactcttccacggtaagaacgtcgggaaacaacttgtcgaagttgctcgcgagtgagattaaaattaacaaatgttttattaccgtttggttttagttgttgctggaaataagatcggtttgtacaagctgtgacaatgttttgtttgttggtcagaaataaatggactttgtttgtctgtaaagctttgtttctgacatg

SEQ ID NO: 80851 - protein, 358 aa, Arabidopsis thaliana; identical to SEQ ID NO: 29202
  peptide (1)..(358): Ceres Seq. ID no. 12657463
  misc_feature (139)..(355): Pfam Name: Zinc-binding dehydrogenase Pfam Description: Zinc-binding dehydrogenase
  misc_feature (6)..(358): Homolog of NCBI NO: 15240806 NR Description: quinone oxidoreductase -like protein; protein id: supported by cDNA: 13314., supported by cDNA: gi_15912200 thaliana] >gi|9758494|dbj|BAB09040.1| allyl alcohol
  misc_feature (6)..(357): Homolog of NCBI NO: 15240812 NR Description: oxidoreductase-like protein; protein id:
  misc_feature (6)..(358): Homolog of NCBI NO: 21537356 NR Description: quinone oxidoreductase-like protein [Arabidopsis
  misc_feature (6)..(358): Homolog of NCBI NO: 15240810 NR Description: quinone oxidoreductase -like protein; protein id:
  misc_feature (6)..(358): Homolog of NCBI NO: 21536967 NR Description: quinone oxidoreductase-like protein [Arabidopsis
  misc_feature (14)..(358): Homolog of NCBI NO: 15237888 NR Description: quinone oxidoreductase -like protein; protein id:
  misc_feature (14)..(358): Homolog of NCBI NO: 22326861 NR Description: quinone oxidoreductase - like protein; protein At5g17000.1, supported by cDNA: gi_16604343, supported by cDNA: [Arabidopsis thaliana] >gi|16604344|gb|AAL24178.1|
  misc_feature (14)..(358): Homolog of NCBI NO: 17529140 NR Description: putative quinone oxidoreductase [Arabidopsis
  misc_feature (14)..(358): Homolog of NCBI NO: 21539447 NR Description: quinone oxidoreductase-like protein [Arabidopsis
  misc_feature (12)..(358): Homolog of NCBI NO: 21593645 NR Description: allyl alcohol dehydrogenase, putative

SEQ ID NO: 80852 - protein, 353 aa, Arabidopsis thaliana; identical to SEQ ID NO: 29203
  peptide (1)..(353): Ceres Seq. ID no. 12657464
  misc_feature (134)..(350): Pfam Name: Zinc-binding dehydrogenase Pfam Description: Zinc-binding dehydrogenase
  misc_feature (1)..(353): Homolog of NCBI NO: 15240806 NR Description: quinone oxidoreductase -like protein; protein id: supported by cDNA: 13314., supported by cDNA: gi_15912200 thaliana] >gi|9758494|dbj|BAB09040.1| allyl alcohol
  misc_feature (1)..(352): Homolog of NCBI NO: 15240812 NR Description: oxidoreductase-like protein; protein id:
  misc_feature (1)..(353): Homolog of NCBI NO: 21537356 NR Description: quinone oxidoreductase-like protein [Arabidopsis
  misc_feature (1)..(353): Homolog of NCBI NO: 15240810 NR Description: quinone oxidoreductase -like protein; protein id:
  misc_feature (1)..(353): Homolog of NCBI NO: 21536967 NR Description: quinone oxidoreductase-like protein [Arabidopsis
  misc_feature (9)..(353): Homolog of NCBI NO: 15237888 NR Description: quinone oxidoreductase -like protein; protein id:
  misc_feature (9)..(353): Homolog of NCBI NO: 22326861 NR Description: quinone oxidoreductase - like protein; protein At5g17000.1, supported by cDNA: gi_16604343, supported by cDNA: [Arabidopsis thaliana] >gi|16604344|gb|AAL24178.1|
  misc_feature (9)..(353): Homolog of NCBI NO: 17529140 NR Description: putative quinone oxidoreductase [Arabidopsis
  misc_feature (9)..(353): Homolog of NCBI NO: 21539447 NR Description: quinone oxidoreductase-like protein [Arabidopsis
  misc_feature (7)..(353): Homolog of NCBI NO: 21593645 NR Description: allyl alcohol dehydrogenase, putative

SEQ ID NO: 80853 - protein, 308 aa, Arabidopsis thaliana; identical to SEQ ID NO: 29204
  peptide (1)..(308): Ceres Seq. ID no. 12657465
  misc_feature (89)..(305): Pfam Name: Zinc-binding dehydrogenase Pfam Description: Zinc-binding dehydrogenase
  misc_feature (1)..(308): Homolog of NCBI NO: 15240806 NR Description: quinone oxidoreductase -like protein; protein id: supported by cDNA: 13314., supported by cDNA: gi_15912200 thaliana] >gi|9758494|dbj|BAB09040.1| allyl alcohol
  misc_feature (1)..(307): Homolog of NCBI NO: 15240812 NR Description: oxidoreductase-like protein; protein id:
  misc_feature (1)..(308): Homolog of NCBI NO: 21537356 NR Description: quinone oxidoreductase-like protein [Arabidopsis
  misc_feature (1)..(308): Homolog of NCBI NO: 15240810 NR Description: quinone oxidoreductase -like protein; protein id:
  misc_feature (1)..(308): Homolog of NCBI NO: 21536967 NR Description: quinone oxidoreductase-like protein [Arabidopsis
  misc_feature (1)..(308): Homolog of NCBI NO: 15237888 NR Description: quinone oxidoreductase -like protein; protein id:
  misc_feature (1)..(308): Homolog of NCBI NO: 22326861 NR Description: quinone oxidoreductase - like protein; protein At5g17000.1, supported by cDNA: gi_16604343, supported by cDNA: [Arabidopsis thaliana] >gi|16604344|gb|AAL24178.1|
  misc_feature (1)..(308): Homolog of NCBI NO: 17529140 NR Description: putative quinone oxidoreductase [Arabidopsis
  misc_feature (1)..(308): Homolog of NCBI NO: 21539447 NR Description: quinone oxidoreductase-like protein [Arabidopsis
  misc_feature (1)..(308): Homolog of NCBI NO: 21593645 NR Description: allyl alcohol dehydrogenase, putative

SEQ ID NO: 80854 - DNA, 1239 bp, Arabidopsis thaliana
  misc_feature (1)..(1239): Ceres Seq. ID no. 12657466
  misc_feature: MA Experiment ID: 20000314 Result: Up-regulated in Transcription
  misc_feature: MA Experiment 20000314 PARAMETER Experiment Name: At_14day_Shoots-Roots_Sub_P Parameter: Age (day) Value: 14
  misc_feature: MA Experiment 20000314 PARAMETER Experiment Name: At_14day_Shoots-Roots_Sub_P Parameter: Organism Value: A. thaliana
  misc_feature: MA Experiment 20000314 PARAMETER Experiment Name: At_14day_Shoots-Roots_Sub_P Parameter: Plant Line Value: WS
  misc_feature: MA Experiment 20000314 PARAMETER Experiment Name: At_14day_Shoots-Roots_Sub_P Parameter: Tissue Value: Roots vs. Whole Plant
  misc_feature: MA Experiment ID: 20000315 Result: Up-regulated in Transcription
  misc_feature: MA Experiment 20000315 PARAMETER Experiment Name: At_14day_Shoots-Roots_Sub_P Parameter: Age (day) Value: 14
  misc_feature: MA Experiment 20000315 PARAMETER Experiment Name: At_14day_Shoots-Roots_Sub_P Parameter: Organism Value: A. thaliana
  misc_feature: MA Experiment 20000315 PARAMETER Experiment Name: At_14day_Shoots-Roots_Sub_P Parameter: Plant Line Value: WS
  misc_feature: MA Experiment 20000315 PARAMETER Experiment Name: At_14day_Shoots-Roots_Sub_P Parameter: Tissue Value: Shoots vs. Whole Plant
  misc_feature: MA Experiment ID: 20000634 Result: Down-regulated in Transcription
  misc_feature: MA Experiment 20000634 PARAMETER Experiment Name: At_10percent_PEG_Sub_P Parameter: Age (day) Value: 12
  misc_feature: MA Experiment 20000634 PARAMETER Experiment Name: At_10percent_PEG_Sub_P Parameter: Organism Value: A. thaliana
  misc_feature: MA Experiment 20000634 PARAMETER Experiment Name: At_10percent_PEG_Sub_P Parameter: Plant Line Value: WS
  misc_feature: MA Experiment 20000634 PARAMETER Experiment Name: At_10percent_PEG_Sub_P Parameter: Timepoint (day) Value: 12
  misc_feature: MA Experiment 20000634 PARAMETER Experiment Name: At_10percent_PEG_Sub_P Parameter: Tissue Value: Whole Plant
  misc_feature: MA Experiment 20000634 PARAMETER Experiment Name: At_10percent_PEG_Sub_P Parameter: Treatment Value: 10% PEG vs. No Treatment
atgttgagtgccttttggggtcatgcatcagctattgctatagcttcaccagttgtcagcattgtgggttttcagggtgatcgtactacgataagacgaccaacatacggagagatgaaatttgtggacgtagttgaaagacctagagagatgccaacatttcctcaatcgtttccaatgaacggtggtgatggtccgcacagttacatccacaattcttcctatcaaaaagtggcgatcgatggcgttaaagaaaggacaagcgaagcgatcttagaaaaactcgatcttgaattcctcaaccgtaactctgaagaaaatatcttgagaattgtggattttggttgttccattggacctaacacgtttgatgttgtccaaaatatcattgatacagtgaaacaaaaacgcctaaaagaaaacaaaacctatattggtgctcctcttgagttccaagtatgcttcaatgatcaaccaaacaatgattttaacacactttttcgaacccaaccgttcttttcccggaaagaatatttttccgtgggagttccaggctccttccatggtagagtattaccaaaaaatagcctccatataggtcacacttcctatacactccactggctttctaatgttccccaacatgtttgtgacaagaaatctccggcattgaataaaagctatattcaatgtaataatttagtagatgaagtgaccaaggcttacaagatccagttcagaaaagattttggaggatttcttgaggcaagggcggaagagcttgtctcgggcggattgatgatcctttcaggacaatgcttgcccgatggtatcccaaaggctttgacatggcaaggtgttgtgatcgatatgattggagattgtcttatggatctggctaaattgggaataacaagcaaggaaaagatcgaactgttcagtttacccacatacattccgcatattagtgaattcaaggcaaacattgaacaaaatgaaaactttaatgtcgagacaatggaggagataagtcatcctatggattatatgccattaaccaacgacttcatcacttccatgtttcgagccattctcaatacaattatcgaagaacactttggagaaggtgtggtcaacgagctattcagtcgacttgctaaaaggctcgacaagtacccaattgatttcaaaaggtgtaaaaagtatgtgaactattttatcgtgcttaagagaaagtga

SEQ ID NO: 80855 - protein, 412 aa, Arabidopsis thaliana
  peptide (1)..(412): Ceres Seq. ID no. 12657467
  misc_feature (87)..(412): Pfam Name: SAM dependent carboxyl methyltransferase Pfam Description: SAM dependent carboxyl methyltransferase
  misc_feature (1)..(412): Homolog of NCBI NO: 15240809 NR Description: methyltransferase-related; protein id:
  misc_feature (51)..(412): Homolog of NCBI NO: 9758496 NR Description: S-adenosyl-L-methionine:salicylic acid carboxyl
  misc_feature (39)..(412): Homolog of NCBI NO: 9758498 NR Description: S-adenosyl-L-methionine:salicylic acid carboxyl
  misc_feature (51)..(412): Homolog of NCBI NO: 15240811 NR Description: methyltransferase-related; protein id:
  misc_feature (51)..(412): Homolog of NCBI NO: 8885614 NR Description: S-adenosyl-L-methionine:salicylic acid carboxyl
  misc_feature (51)..(412): Homolog of NCBI NO: 15241002 NR Description: methyltransferase-related; protein id: supported by cDNA: gi_17380699, supported by cDNA: gi_20259006
  misc_feature (51)..(307): Homolog of NCBI NO: 15240841 NR Description: methyltransferase-related; protein id:
  misc_feature (57)..(411): Homolog of NCBI NO: 14009292 NR Description: defense-related protein [Brassica carinata]
  misc_feature (57)..(411): Homolog of NCBI NO: 15230529 NR Description: methyltransferase-related; protein id: supported by cDNA: gi_15293070 [Arabidopsis thaliana]
  misc_feature (57)..(411): Homolog of NCBI NO: 15293071 NR Description: putative AtPP protein [Arabidopsis thaliana]
MLSAFWGHASAIAIASPVVSIVGFQGDRTTIRRPTYGEMKFVDVVERPREMPTFPQSFPMNGGDGPHSYIHNSSYQKVAIDGVKERTSEAILEKLDLEFLNRNSEENILRIVDFGCSIGPNTFDVVQNIIDTVKQKRLKENKTYIGAPLEFQVCFNDQPNNDFNTLFRTQPFFSRKEYFSVGVPGSFHGRVLPKNSLHIGHTSYTLHWLSNVPQHVCDKKSPALNKSYIQCNNLVDEVTKAYKIQFRKDFGGFLEARAEELVSGGLMILSGQCLPDGIPKALTWQGVVIDMIGDCLMDLAKLGITSKEKIELFSLPTYIPHISEFKANIEQNENFNVETMEEISHPMDYMPLTNDFITSMFRAILNTIIEEHFGEGVVNELFSRLAKRLDKYPIDFKRCKKYVNYFIVLKRK

SEQ ID NO: 80856 - protein, 374 aa, Arabidopsis thaliana
  peptide (1)..(374): Ceres Seq. ID no. 12657468
  misc_feature (49)..(374): Pfam Name: SAM dependent carboxyl methyltransferase Pfam Description: SAM dependent carboxyl methyltransferase
  misc_feature (1)..(374): Homolog of NCBI NO: 15240809 NR Description: methyltransferase-related; protein id:
  misc_feature (13)..(374): Homolog of NCBI NO: 9758496 NR Description: S-adenosyl-L-methionine:salicylic acid carboxyl
  misc_feature (1)..(374): Homolog of NCBI NO: 9758498 NR Description: S-adenosyl-L-methionine:salicylic acid carboxyl
  misc_feature (13)..(374): Homolog of NCBI NO: 15240811 NR Description: methyltransferase-related; protein id:
  misc_feature (13)..(374): Homolog of NCBI NO: 8885614 NR Description: S-adenosyl-L-methionine:salicylic acid carboxyl
  misc_feature (13)..(374): Homolog of NCBI NO: 15241002 NR Description: methyltransferase-related; protein id: supported by cDNA: gi_17380699, supported by cDNA: gi_20259006
  misc_feature (13)..(269): Homolog of NCBI NO: 15240841 NR Description: methyltransferase-related; protein id:
  misc_feature (19)..(373): Homolog of NCBI NO: 14009292 NR Description: defense-related protein [Brassica carinata]
  misc_feature (19)..(373): Homolog of NCBI NO: 15230529 NR Description: methyltransferase-related; protein id: supported by cDNA: gi_15293070 [Arabidopsis thaliana]
  misc_feature (19)..(373): Homolog of NCBI NO: 15293071 NR Description: putative AtPP protein [Arabidopsis thaliana]
MKFVDVVERPREMPTFPQSFPMNGGDGPHSYIHNSSYQKVAIDGVKERTSEAILEKLDLEFLNRNSEENILRIVDFGCSIGPNTFDVVQNIIDTVKQKRLKENKTYIGAPLEFQVCFNDQPNNDFNTLFRTQPFFSRKEYFSVGVPGSFHGRVLPKNSLHIGHTSYTLHWLSNVPQHVCDKKSPALNKSYIQCNNLVDEVTKAYKIQFRKDFGGFLEARAEELVSGGLMILSGQCLPDGIPKALTWQGVVIDMIGDCLMDLAKLGITSKEKIELFSLPTYIPHISEFKANIEQNENFNVETMEEISHPMDYMPLTNDFITSMFRAILNTIIEEHFGEGVVNELFSRLAKRLDKYPIDFKRCKKYVNYFIVLKRK

SEQ ID NO: 80857 - protein, 362 aa, Arabidopsis thaliana
  peptide (1)..(362): Ceres Seq. ID no. 12657469
  misc_feature (37)..(362): Pfam Name: SAM dependent carboxyl methyltransferase Pfam Description: SAM dependent carboxyl methyltransferase
  misc_feature (1)..(362): Homolog of NCBI NO: 15240809 NR Description: methyltransferase-related; protein id:
  misc_feature (1)..(362): Homolog of NCBI NO: 9758496 NR Description: S-adenosyl-L-methionine:salicylic acid carboxyl
  misc_feature (1)..(362): Homolog of NCBI NO: 9758498 NR Description: S-adenosyl-L-methionine:salicylic acid carboxyl
  misc_feature (1)..(362): Homolog of NCBI NO: 15240811 NR Description: methyltransferase-related; protein id:
  misc_feature (1)..(362): Homolog of NCBI NO: 8885614 NR Description: S-adenosyl-L-methionine:salicylic acid carboxyl
  misc_feature (1)..(362): Homolog of NCBI NO: 15241002 NR Description: methyltransferase-related; protein id: supported by cDNA: gi_17380699, supported by cDNA: gi_20259006
  misc_feature (1)..(257): Homolog of NCBI NO: 15240841 NR Description: methyltransferase-related; protein id:
  misc_feature (7)..(361): Homolog of NCBI NO: 14009292 NR Description: defense-related protein [Brassica carinata]
  misc_feature (7)..(361): Homolog of NCBI NO: 15230529 NR Description: methyltransferase-related; protein id: supported by cDNA: gi_15293070 [Arabidopsis thaliana]
  misc_feature (7)..(361): Homolog of NCBI NO: 15293071 NR Description: putative AtPP protein [Arabidopsis thaliana]
MPTFPQSFPMNGGDGPHSYIHNSSYQKVAIDGVKERTSEAILEKLDLEFLNRNSEENILRIVDFGCSIGPNTFDVVQNIIDTVKQKRLKENKTYIGAPLEFQVCFNDQPNNDFNTLFRTQPFFSRKEYFSVGVPGSFHGRVLPKNSLHIGHTSYTLHWLSNVPQHVCDKKSPALNKSYIQCNNLVDEVTKAYKIQFRKDFGGFLEARAEELVSGGLMILSGQCLPDGIPKALTWQGVVIDMIGDCLMDLAKLGITSKEKIELFSLPTYIPHISEFKANIEQNENFNVETMEEISHPMDYMPLTNDFITSMFRAILNTIIEEHFGEGVVNELFSRLAKRLDKYPIDFKRCKKYVNYFIVLKRK

SEQ ID NO: 80858 - DNA, 1362 bp, Arabidopsis thaliana
  misc_feature (1)..(1362): Ceres Seq. ID no. 12657470
  misc_feature: MA Experiment ID: 20000314 Result: Up-regulated in Transcription
  misc_feature: MA Experiment 20000314 PARAMETER Experiment Name: At_14day_Shoots-Roots_Sub_P Parameter: Age (day) Value: 14
  misc_feature: MA Experiment 20000314 PARAMETER Experiment Name: At_14day_Shoots-Roots_Sub_P Parameter: Organism Value: A. thaliana
  misc_feature: MA Experiment 20000314 PARAMETER Experiment Name: At_14day_Shoots-Roots_Sub_P Parameter: Plant Line Value: WS
  misc_feature: MA Experiment 20000314 PARAMETER Experiment Name: At_14day_Shoots-Roots_Sub_P Parameter: Tissue Value: Roots vs. Whole Plant
  misc_feature: MA Experiment ID: 20000347 Result: Down-regulated in Transcription
  misc_feature: MA Experiment 20000347 PARAMETER Experiment Name: At_2mM_SA_Sub_P Parameter: Age (day) Value: 14
  misc_feature: MA Experiment 20000347 PARAMETER Experiment Name: At_2mM_SA_Sub_P Parameter: Organism Value: A. thaliana
  misc_feature: MA Experiment 20000347 PARAMETER Experiment Name: At_2mM_SA_Sub_P Parameter: Plant Line Value: WS
  misc_feature: MA Experiment 20000347 PARAMETER Experiment Name: At_2mM_SA_Sub_P Parameter: Timepoint (hr) Value: 6
  misc_feature: MA Experiment 20000347 PARAMETER Experiment Name: At_2mM_SA_Sub_P Parameter: Tissue Value: Aerial
  misc_feature: MA Experiment 20000347 PARAMETER Experiment Name: At_2mM_SA_Sub_P Parameter: Treatment Value: 2mM SA vs. No Treatment
  misc_feature: MA Experiment ID: 20000355 Result: Up-regulated in Transcription
  misc_feature: MA Experiment 20000355 PARAMETER Experiment Name: At_Siliques_Sub_P Parameter: Age (day) Value: 21
  misc_feature: MA Experiment 20000355 PARAMETER Experiment Name: At_Siliques_Sub_P Parameter: Organism Value: A. thaliana
  misc_feature: MA Experiment 20000355 PARAMETER Experiment Name: At_Siliques_Sub_P Parameter: Plant Line Value: WS
  misc_feature: MA Experiment 20000355 PARAMETER Experiment Name: At_Siliques_Sub_P Parameter: Tissue Value: Less Than 5mm Siliques vs. Whole Plant
atggaggaaaagcaagagaggaggagaaggatcgtgttgattcccgctccagcacaaggacacatatctccgatgatgcaacttgcaagagcccttcacttaaagggcttctccattacagttgctcaaaccaagttcaattacttgaagccttcaaaagacttagctgattttcagtttatcaccatcccagagagcttaccagcctcggatcttaagaatctaggaccagtttggtttcttcttaaactcaataaagagtgtgagtttagcttcaaggagtgtttaggtcaattgttgctgcaaaaacaacttataccggaagaagagatcgcttgtgtcatctacgacgagttcatgtactttgctgaagctgcagccaaagagtttaaccttcccaaagttattttcagtaccgaaaatgcgacggcttttgcttgtcgctctgccatgtgcaaactctatgcaaaagatggtttggctccccttaaagaaggatgtgggcgagaagaggagctagtgccaaagttgcatccccttagatacaaagacctaccaacttcagcatttgcaccagtagaagcctcagtggaagtgtttaaaagttcatgtgataaagggacagcttccgctatgataatcaacacagtgaggtgtctagagatatcatccttggagtggcttcaacaagaacttaagattccgatatatcctataggccctcttcacatggtttcttcagctcctcctacgagtctactagacgagaatgagagttgcattgattggctgaacaaacaaaagccgagctcggtgatttacataagtttgggaagctttactttgttggaaactaaagaagtgttggaaatggcttcgggcttggttagtagtaaccaacacttcttgtgggtgattcgacccgggtccatacttggttctgaattgactaatgaggaattattgagtatgatggaaataccggatcgaggctacattgtgaaatgggctccacaaaagcaagtgcttgcacattctgcggttggagcattttggagtcattgtggatggaactcgactctagagagcatgggtgaaggagttccgatgatttgtaggccttttactactgatcaaaaggtaaatgcgcggtatgtggagtgtgtctggagagttggggttcaagtggagggtgaactaaagagaggagtagtcgagagagctgtgaagaggttactggtggatgaagaaggagaagagatgaagttgagagctctcagtttgaaagagaaactcaaagtttctgttctaccgggaggttcttcacacagttcactagatgacttaatcaagactctatga

SEQ ID NO: 80859 - protein, 453 aa, Arabidopsis thaliana
  peptide (1)..(453): Ceres Seq. ID no. 12657471
  misc_feature (10)..(452): Pfam Name: UDP-glucoronosyl and UDP-glucosyl transferase Pfam Description: UDP-glucoronosyl and UDP-glucosyl transferase
  misc_feature (1)..(453): Homolog of NCBI NO: 15240822 NR Description: glucosyltransferase-like protein; protein id:
  misc_feature (1)..(453): Homolog of NCBI NO: 15240825 NR Description: glucosyltransferase-like protein; protein id:
  misc_feature (25)..(371): Homolog of NCBI NO: 15240807 NR Description: glucuronosyl transferase-like protein; protein
  misc_feature (1)..(450): Homolog of NCBI NO: 11258169 NR Description: glucosyltransferase-like protein - Arabidopsis
  misc_feature (1)..(450): Homolog of NCBI NO: 18408251 NR Description: glucosyltransferase-like protein; protein id: supported by cDNA: gi_15081808 [Arabidopsis thaliana]
  misc_feature (1)..(450): Homolog of NCBI NO: 15232618 NR Description: glucosyltransferase-like protein; protein id: supported by cDNA: 120105. [Arabidopsis thaliana]
  misc_feature (1)..(450): Homolog of NCBI NO: 21537102 NR Description: glucosyltransferase-like protein [Arabidopsis
  misc_feature (1)..(453): Homolog of NCBI NO: 15238467 NR Description: glucuronosyl transferase - like protein; protein
  misc_feature (8)..(453): Homolog of NCBI NO: 30697251 NR Description: glycosyltransferase family [Arabidopsis thaliana]
  misc_feature (8)..(450): Homolog of NCBI NO: 34900682 NR Description: glucuronosyl transferase-like protein [Oryza
MEEKQERRRRIVLIPAPAQGHISPMMQLARALHLKGFSITVAQTKFNYLKPSKDLADFQFITIPESLPASDLKNLGPVWFLLKLNKECEFSFKECLGQLLLQKQLIPEEEIACVIYDEFMYFAEAAAKEFNLPKVIFSTENATAFACRSAMCKLYAKDGLAPLKEGCGREEELVPKLHPLRYKDLPTSAFAPVEASVEVFKSSCDKGTASAMIINTVRCLEISSLEWLQQELKIPIYPIGPLHMVSSAPPTSLLDENESCIDWLNKQKPSSVIYISLGSFTLLETKEVLEMASGLVSSNQHFLWVIRPGSILGSELTNEELLSMMEIPDRGYIVKWAPQKQVLAHSAVGAFWSHCGWNSTLESMGEGVPMICRPFTTDQKVNARYVECVWRVGVQVEGELKRGVVERAVKRLLVDEEGEEMKLRALSLKEKLKVSVLPGGSSHSSLDDLIKTL

SEQ ID NO: 80860 - protein, 429 aa, Arabidopsis thaliana
  peptide (1)..(429): Ceres Seq. ID no. 12657472
  misc_feature (1)..(428): Pfam Name: UDP-glucoronosyl and UDP-glucosyl transferase Pfam Description: UDP-glucoronosyl and UDP-glucosyl transferase
  misc_feature (1)..(429): Homolog of NCBI NO: 15240822 NR Description: glucosyltransferase-like protein; protein id:
  misc_feature (1)..(429): Homolog of NCBI NO: 15240825 NR Description: glucosyltransferase-like protein; protein id:
  misc_feature (1)..(347): Homolog of NCBI NO: 15240807 NR Description: glucuronosyl transferase-like protein; protein
  misc_feature (1)..(426): Homolog of NCBI NO: 11258169 NR Description: glucosyltransferase-like protein - Arabidopsis
  misc_feature (1)..(426): Homolog of NCBI NO: 18408251 NR Description: glucosyltransferase-like protein; protein id: supported by cDNA: gi_15081808 [Arabidopsis thaliana]
  misc_feature (1)..(426): Homolog of NCBI NO: 15232618 NR Description: glucosyltransferase-like protein; protein id: supported by cDNA: 120105. [Arabidopsis thaliana]
  misc_feature (1)..(426): Homolog of NCBI NO: 21537102 NR Description: glucosyltransferase-like protein [Arabidopsis
  misc_feature (1)..(429): Homolog of NCBI NO: 15238467 NR Description: glucuronosyl transferase - like protein; protein
  misc_feature (1)..(429): Homolog of NCBI NO: 30697251 NR Description: glycosyltransferase family [Arabidopsis thaliana]
  misc_feature (1)..(426): Homolog of NCBI NO: 34900682 NR Description: glucuronosyl transferase-like protein [Oryza
MMQLARALHLKGFSITVAQTKFNYLKPSKDLADFQFITIPESLPASDLKNLGPVWFLLKLNKECEFSFKECLGQLLLQKQLIPEEEIACVIYDEFMYFAEAAAKEFNLPKVIFSTENATAFACRSAMCKLYAKDGLAPLKEGCGREEELVPKLHPLRYKDLPTSAFAPVEASVEVFKSSCDKGTASAMIINTVRCLEISSLEWLQQELKIPIYPIGPLHMVSSAPPTSLLDENESCIDWLNKQKPSSVIYISLGSFTLLETKEVLEMASGLVSSNQHFLWVIRPGSILGSELTNEELLSMMEIPDRGYIVKWAPQKQVLAHSAVGAFWSHCGWNSTLESMGEGVPMICRPFTTDQKVNARYVECVWRVGVQVEGELKRGVVERAVKRLLVDEEGEEMKLRALSLKEKLKVSVLPGGSSHSSLDDLIKTL

SEQ ID NO: 80861 - protein, 428 aa, Arabidopsis thaliana
  peptide (1)..(428): Ceres Seq. ID no. 12657473
  misc_feature (1)..(427): Pfam Name: UDP-glucoronosyl and UDP-glucosyl transferase Pfam Description: UDP-glucoronosyl and UDP-glucosyl transferase
  misc_feature (1)..(428): Homolog of NCBI NO: 15240822 NR Description: glucosyltransferase-like protein; protein id:
  misc_feature (1)..(428): Homolog of NCBI NO: 15240825 NR Description: glucosyltransferase-like protein; protein id:
  misc_feature (1)..(346): Homolog of NCBI NO: 15240807 NR Description: glucuronosyl transferase-like protein; protein
  misc_feature (1)..(425): Homolog of NCBI NO: 11258169 NR Description: glucosyltransferase-like protein - Arabidopsis
  misc_feature (1)..(425): Homolog of NCBI NO: 18408251 NR Description: glucosyltransferase-like protein; protein id: supported by cDNA: gi_15081808 [Arabidopsis thaliana]
  misc_feature (1)..(425): Homolog of NCBI NO: 15232618 NR Description: glucosyltransferase-like protein; protein id: supported by cDNA: 120105. [Arabidopsis thaliana]
  misc_feature (1)..(425): Homolog of NCBI NO: 21537102 NR Description: glucosyltransferase-like protein [Arabidopsis
  misc_feature (1)..(428): Homolog of NCBI NO: 15238467 NR Description: glucuronosyl transferase - like protein; protein
  misc_feature (1)..(428): Homolog of NCBI NO: 30697251 NR Description: glycosyltransferase family [Arabidopsis thaliana]
  misc_feature (1)..(425): Homolog of NCBI NO: 34900682 NR Description: glucuronosyl transferase-like protein [Oryza
MQLARALHLKGFSITVAQTKFNYLKPSKDLADFQFITIPESLPASDLKNLGPVWFLLKLNKECEFSFKECLGQLLLQKQLIPEEEIACVIYDEFMYFAEAAAKEFNLPKVIFSTENATAFACRSAMCKLYAKDGLAPLKEGCGREEELVPKLHPLRYKDLPTSAFAPVEASVEVFKSSCDKGTASAMIINTVRCLEISSLEWLQQELKIPIYPIGPLHMVSSAPPTSLLDENESCIDWLNKQKPSSVIYISLGSFTLLETKEVLEMASGLVSSNQHFLWVIRPGSILGSELTNEELLSMMEIPDRGYIVKWAPQKQVLAHSAVGAFWSHCGWNSTLESMGEGVPMICRPFTTDQKVNARYVECVWRVGVQVEGELKRGVVERAVKRLLVDEEGEEMKLRALSLKEKLKVSVLPGGSSHSSLDDLIKTL

SEQ ID NO: 80862 - DNA, 1107 bp, Arabidopsis thaliana
  misc_feature (1)..(1107): Ceres Seq. ID no. 12657474
  misc_feature: MA Experiment ID: 20000307 Result: Up-regulated in Transcription
  misc_feature: MA Experiment 20000307 PARAMETER Experiment Name: At_Germinating_Seeds_Sub_P Parameter: Age (hr) Value: 24 vs. 0
  misc_feature: MA Experiment 20000307 PARAMETER Experiment Name: At_Germinating_Seeds_Sub_P Parameter: Organism Value: A. thaliana
  misc_feature: MA Experiment 20000307 PARAMETER Experiment Name: At_Germinating_Seeds_Sub_P Parameter: Plant Line Value: WS
  misc_feature: MA Experiment 20000307 PARAMETER Experiment Name: At_Germinating_Seeds_Sub_P Parameter: Tissue Value: Germinating Seeds
  misc_feature: MA Experiment ID: 20000314 Result: Up-regulated in Transcription
  misc_feature: MA Experiment 20000314 PARAMETER Experiment Name: At_14day_Shoots-Roots_Sub_P Parameter: Age (day) Value: 14
  misc_feature: MA Experiment 20000314 PARAMETER Experiment Name: At_14day_Shoots-Roots_Sub_P Parameter: Organism Value: A. thaliana
  misc_feature: MA Experiment 20000314 PARAMETER Experiment Name: At_14day_Shoots-Roots_Sub_P Parameter: Plant Line Value: WS
  misc_feature: MA Experiment 20000314 PARAMETER Experiment Name: At_14day_Shoots-Roots_Sub_P Parameter: Tissue Value: Roots vs. Whole Plant
  misc_feature: MA Experiment ID: 20000315 Result: Up-regulated in Transcription
  misc_feature: MA Experiment 20000315 PARAMETER Experiment Name: At_14day_Shoots-Roots_Sub_P Parameter: Age (day) Value: 14
  misc_feature: MA Experiment 20000315 PARAMETER Experiment Name: At_14day_Shoots-Roots_Sub_P Parameter: Organism Value: A. thaliana
  misc_feature: MA Experiment 20000315 PARAMETER Experiment Name: At_14day_Shoots-Roots_Sub_P Parameter: Plant Line Value: WS
  misc_feature: MA Experiment 20000315 PARAMETER Experiment Name: At_14day_Shoots-Roots_Sub_P Parameter: Tissue Value: Shoots vs. Whole Plant
atgggtgttctaagcatgaagggaggagatggagaacacagttatgctaataattccgagggacagaaacgtcttgcttctgatgcaaaaccggtggtggtagaaaccgtaaaagaaatgatagtgaaaacagattttcctggttgtataaaagtggccgacttaggatgttcttccggggaaaacacgttattggtcatgtccgaaatagtcaacacgatcattacatcataccaacaaaaaggcaaaaacttaccagagatcaattgttgtttgaacgatctcccagacaacgatttcaacactactttcaagttggtccctgccttccacaagttgctgaagatggatgttaaagggaaatgcttcatctcaggagtcccaggctcattctactcaagacttttccctagcaagtctctccattttgttcattcatctctttgtctacattggctttccaaagttcctgatgggcttgaagataacaagaagaatgtgtaccttagaagtccatgccctccaaatgtgtacaagagttatttgactcagttcaagaatgatttctctttgtttctgagactgcgtgcggatgagactgtgccaaatggacgtatggctcttactttcgtgggcagaaaatctttggatcctttatctaaagattgtttccaaaattggtcgtcgatatctgattccctcctcgacttggtttctgagggtattgtgaaggaatcggatgtagattcttttaacttgccattctacaatcctgacgagagtgaggtgagggaagttatcgaaagcgagggctcgttcaaaatcagcaattttgagacaatctttggtcttctcttttcatacaaaactggtcgtactgaagtgaaagatgatgatgataatttggaccaatcatgtcgatttgaagtcattcgaaagagggcaagcatcataagatccattactgaaccaatgcttggtgctcattttggagacgccattatggatcgtctgttcgagaggtatacataccatcttgccgagcgttacgatactttgcgcaacaaaccaactgttcagttcttcgtttccttgacaaggaagtaa

SEQ ID NO: 80863 - protein, 368 aa, Arabidopsis thaliana
  peptide (1)..(368): Ceres Seq. ID no. 12657475
  misc_feature (33)..(368): Pfam Name: SAM dependent carboxyl methyltransferase Pfam Description: SAM dependent carboxyl methyltransferase
  misc_feature (1)..(368): Homolog of NCBI NO: 15240823 NR Description: S-adenosyl-L-methionine:carboxyl
  misc_feature (6)..(368): Homolog of NCBI NO: 8885604 NR Description: S-adenosyl-L-methionine:salicylic acid carboxyl
  misc_feature (1)..(368): Homolog of NCBI NO: 9279749 NR Description: S-adenosyl-L-methionine:salicylic acid carboxyl
  misc_feature (34)..(368): Homolog of NCBI NO: 15233213 NR Description: S-adenosyl-L-methionine:carboxyl
  misc_feature (6)..(368): Homolog of NCBI NO: 15225569 NR Description: S-adenosyl-L-methionine:carboxyl family; protein id: At2g14060.1 [Arabidopsis thaliana]
  misc_feature (4)..(368): Homolog of NCBI NO: 37904506 NR Description: methyl transferase [Arabidopsis lyrata subsp.
  misc_feature (6)..(368): Homolog of NCBI NO: 15239970 NR Description: S-adenosyl-L-methionine:carboxyl
  misc_feature (4)..(368): Homolog of NCBI NO: 22330992 NR Description: S-adenosyl-L-methionine:carboxyl
  misc_feature (4)..(368): Homolog of NCBI NO: 15237695 NR Description: S-adenosyl-L-methionine:carboxyl
  misc_feature (1)..(368): Homolog of NCBI NO: 15237696 NR Description: S-adenosyl-L-methionine:carboxyl
MGVLSMKGGDGEHSYANNSEGQKRLASDAKPVVVETVKEMIVKTDFPGCIKVADLGCSSGENTLLVMSEIVNTIITSYQQKGKNLPEINCCLNDLPDNDFNTTFKLVPAFHKLLKMDVKGKCFISGVPGSFYSRLFPSKSLHFVHSSLCLHWLSKVPDGLEDNKKNVYLRSPCPPNVYKSYLTQFKNDFSLFLRLRADETVPNGRMALTFVGRKSLDPLSKDCFQNWSSISDSLLDLVSEGIVKESDVDSFNLPFYNPDESEVREVIESEGSFKISNFETIFGLLFSYKTGRTEVKDDDDNLDQSCRFEVIRKRASIIRSITEPMLGAHFGDAIMDRLFERYTYHLAERYDTLRNKPTVQFFVSLTRK

SEQ ID NO: 80864 - protein, 363 aa, Arabidopsis thaliana
  peptide (1)..(363): Ceres Seq. ID no. 12657476
  misc_feature (28)..(363): Pfam Name: SAM dependent carboxyl methyltransferase Pfam Description: SAM dependent carboxyl methyltransferase
  misc_feature (1)..(363): Homolog of NCBI NO: 15240823 NR Description: S-adenosyl-L-methionine:carboxyl
  misc_feature (1)..(363): Homolog of NCBI NO: 8885604 NR Description: S-adenosyl-L-methionine:salicylic acid carboxyl
  misc_feature (1)..(363): Homolog of NCBI NO: 9279749 NR Description: S-adenosyl-L-methionine:salicylic acid carboxyl
  misc_feature (29)..(363): Homolog of NCBI NO: 15233213 NR Description: S-adenosyl-L-methionine:carboxyl
  misc_feature (1)..(363): Homolog of NCBI NO: 15225569 NR Description: S-adenosyl-L-methionine:carboxyl family; protein id: At2g14060.1 [Arabidopsis thaliana]
  misc_feature (1)..(363): Homolog of NCBI NO: 37904506 NR Description: methyl transferase [Arabidopsis lyrata subsp.
  misc_feature (1)..(363): Homolog of NCBI NO: 15239970 NR Description: S-adenosyl-L-methionine:carboxyl
  misc_feature (1)..(363): Homolog of NCBI NO: 22330992 NR Description: S-adenosyl-L-methionine:carboxyl
  misc_feature (1)..(363): Homolog of NCBI NO: 15237695 NR Description: S-adenosyl-L-methionine:carboxyl
  misc_feature (1)..(363): Homolog of NCBI NO: 15237696 NR Description: S-adenosyl-L-methionine:carboxyl
MKGGDGEHSYANNSEGQKRLASDAKPVVVETVKEMIVKTDFPGCIKVADLGCSSGENTLLVMSEIVNTIITSYQQKGKNLPEINCCLNDLPDNDFNTTFKLVPAFHKLLKMDVKGKCFISGVPGSFYSRLFPSKSLHFVHSSLCLHWLSKVPDGLEDNKKNVYLRSPCPPNVYKSYLTQFKNDFSLFLRLRADETVPNGRMALTFVGRKSLDPLSKDCFQNWSSISDSLLDLVSEGIVKESDVDSFNLPFYNPDESEVREVIESEGSFKISNFETIFGLLFSYKTGRTEVKDDDDNLDQSCRFEVIRKRASIIRSITEPMLGAHFGDAIMDRLFERYTYHLAERYDTLRNKPTVQFFVSLTRK

SEQ ID NO: 80865 - protein, 329 aa, Arabidopsis thaliana
  peptide (1)..(329): Ceres Seq. ID no. 12657477
  misc_feature (1)..(329): Pfam Name: SAM dependent carboxyl methyltransferase Pfam Description: SAM dependent carboxyl methyltransferase
  misc_feature (1)..(329): Homolog of NCBI NO: 15240823 NR Description: S-adenosyl-L-methionine:carboxyl
  misc_feature (1)..(329): Homolog of NCBI NO: 8885604 NR Description: S-adenosyl-L-methionine:salicylic acid carboxyl
  misc_feature (1)..(329): Homolog of NCBI NO: 9279749 NR Description: S-adenosyl-L-methionine:salicylic acid carboxyl
  misc_feature (1)..(329): Homolog of NCBI NO: 15233213 NR Description: S-adenosyl-L-methionine:carboxyl
  misc_feature (1)..(329): Homolog of NCBI NO: 15225569 NR Description: S-adenosyl-L-methionine:carboxyl family; protein id: At2g14060.1 [Arabidopsis thaliana]
  misc_feature (1)..(329): Homolog of NCBI NO: 37904506 NR Description: methyl transferase [Arabidopsis lyrata subsp.
  misc_feature (1)..(329): Homolog of NCBI NO: 15239970 NR Description: S-adenosyl-L-methionine:carboxyl
  misc_feature (1)..(329): Homolog of NCBI NO: 22330992 NR Description: S-adenosyl-L-methionine:carboxyl
  misc_feature (1)..(329): Homolog of NCBI NO: 15237695 NR Description: S-adenosyl-L-methionine:carboxyl
  misc_feature (1)..(329): Homolog of NCBI NO: 15237696 NR Description: S-adenosyl-L-methionine:carboxyl
MIVKTDFPGCIKVADLGCSSGENTLLVMSEIVNTIITSYQQKGKNLPEINCCLNDLPDNDFNTTFKLVPAFHKLLKMDVKGKCFISGVPGSFYSRLFPSKSLHFVHSSLCLHWLSKVPDGLEDNKKNVYLRSPCPPNVYKSYLTQFKNDFSLFLRLRADETVPNGRMALTFVGRKSLDPLSKDCFQNWSSISDSLLDLVSEGIVKESDVDSFNLPFYNPDESEVREVIESEGSFKISNFETIFGLLFSYKTGRTEVKDDDDNLDQSCRFEVIRKRASIIRSITEPMLGAHFGDAIMDRLFERYTYHLAERYDTLRNKPTVQFFVSLTRK

SEQ ID NO: 80866 - DNA, 1802 bp, Arabidopsis thaliana
  misc_feature (1)..(1802): Ceres Seq. ID no. 12657478
  misc_feature: MA Experiment ID: 20000307 Result: Up-regulated in Transcription
  misc_feature: MA Experiment 20000307 PARAMETER Experiment Name: At_Germinating_Seeds_Sub_P Parameter: Age (hr) Value: 24 vs. 0
  misc_feature: MA Experiment 20000307 PARAMETER Experiment Name: At_Germinating_Seeds_Sub_P Parameter: Organism Value: A. thaliana
  misc_feature: MA Experiment 20000307 PARAMETER Experiment Name: At_Germinating_Seeds_Sub_P Parameter: Plant Line Value: WS
  misc_feature: MA Experiment 20000307 PARAMETER Experiment Name: At_Germinating_Seeds_Sub_P Parameter: Tissue Value: Germinating Seeds
  misc_feature: MA Experiment ID: 20000314 Result: Up-regulated in Transcription
  misc_feature: MA Experiment 20000314 PARAMETER Experiment Name: At_14day_Shoots-Roots_Sub_P Parameter: Age (day) Value: 14
  misc_feature: MA Experiment 20000314 PARAMETER Experiment Name: At_14day_Shoots-Roots_Sub_P Parameter: Organism Value: A. thaliana
  misc_feature: MA Experiment 20000314 PARAMETER Experiment Name: At_14day_Shoots-Roots_Sub_P Parameter: Plant Line Value: WS
  misc_feature: MA Experiment 20000314 PARAMETER Experiment Name: At_14day_Shoots-Roots_Sub_P Parameter: Tissue Value: Roots vs. Whole Plant
  misc_feature: MA Experiment ID: 20000315 Result: Up-regulated in Transcription
  misc_feature: MA Experiment 20000315 PARAMETER Experiment Name: At_14day_Shoots-Roots_Sub_P Parameter: Age (day) Value: 14
  misc_feature: MA Experiment 20000315 PARAMETER Experiment Name: At_14day_Shoots-Roots_Sub_P Parameter: Organism Value: A. thaliana
  misc_feature: MA Experiment 20000315 PARAMETER Experiment Name: At_14day_Shoots-Roots_Sub_P Parameter: Plant Line Value: WS
  misc_feature: MA Experiment 20000315 PARAMETER Experiment Name: At_14day_Shoots-Roots_Sub_P Parameter: Tissue Value: Shoots vs. Whole Plant
gctcactctttggtctttagtcttttacatgctttaatctttccatctttgtctctatctcgtggatatggaagaagacaaaattcttacggagacccttctatctgcggcggaagaaccacctgctcttcctttctcatccgtggaagatattcctccgatcaccaccgttggtggcttcgtcaaggagttcaacgtggaggtcaaaaagctatggtacttggcagggccagccattttcatgtctataacccaatattctctcggcgctgctactcaggtcttcgccggacacatcagcaccatcgctctcgcagcggtctccgttgaaaactcggtcatcgctggattctcatttggtgtcatgcttggaatgggaagcgcgttagaaacgctatgtggacaagcgtttggagcagggaaattgtcaatgcttggcgtttacttgcaacgatcatgggtgatactaaacgtgaccgcggttattctctcgcttctttacatcttcgccgctccaatcctcgcgttcatcggtcaaacgccggcgatctctagcgccacgggaatattttccatctacatgatccctcagatctttgcttacgctgttaattacccaacggctaagttcttgcaatcacaaagcaaaatcatggtgatggctgcgatatcagcggttgcacttgttctacacgtgctcctcacgtggtttgtcattgaggggctccagtggggcacggcgggtctagccgtcgtgctcaacgcctcgtggtggttcattgtcgtggcgcagcttgtgtacatatttagtggtacatgcggtgaagcttggtctggattctcatgggaagcttttcataatttgtggagtttcgtcagattatctttggcttctgctgttatgctctgtttggaggtatggtatcttatggcagtcatattatttgctggatatttgaagaatgctgagatctccgtagctgctctctccatctgcatgaacattttgggatggactgcaatgattgctattgggatgaacgcagccgtaagtgtgagagtgtctaatgaattaggagcaaaacatccaagaaccgcaaaattctcactactagtggcagtgataacatctacagtgatcggacttgctatatcaattgctctactcatctttagagataaatatccatcgttatttgtgggagacgaagaagttatcattgttgttaaagatcttacaccaatactcgcagtctctattgtcatcaacaatgtccaacctgtcttatcaggggtggctgtgggagctggatggcaagcagttgtggcatacgttaacatagtatgttattacgtgtttggaatcccatttggtctgttactaggctacaagcttaactttggtgtaatgggaatctggtgcggaatgttgacaggaaccgtggttcagacaatagtcttaacatggatgatctgtagaacaaattgggacacagaggctgcaatggctgagggtaggataagagagtggggaggagaagtatcagatcaactcttaaactaaaaagacattataagaagtgatatagtttgtgttttattaatctcgtgatttgtattcatgtcgaatctttgttgcatcaaagtttgtttttgtgtctttttggttgtaccatgagtcttgtccaggttttgagatgatatgcttgagcttgacacttatggacttgttcggtcgagaaatggagagaaaagatacaaagagatcgactggtccctctttcttacgacttaaatttgtt

SEQ ID NO: 80867 - protein, 498 aa, Arabidopsis thaliana
  peptide (1)..(498): Ceres Seq. ID no. 12657479
  misc_feature (1)..(498): Homolog of NCBI NO: 15240824 NR Description: putative transmembrane protein; protein id: supported by cDNA: gi_13937233 [Arabidopsis thaliana] emb|CAA66809.1~gene_id:F16F17.3~strong similarity to unknown
  misc_feature (1)..(498): Homolog of NCBI NO: 15231577 NR Description: integral membrane protein, putative; protein id: supported by cDNA: gi_16323120 [Arabidopsis thaliana] unknown [Arabidopsis thaliana] >gi|9293938|dbj|BAB01841.1|
  misc_feature (1)..(498): Homolog of NCBI NO: 15222119 NR Description: unknown protein; protein id: At1g12950.1
  misc_feature (1)..(408): Homolog of NCBI NO: 1495259 NR Description: orf04 [Arabidopsis thaliana]
  misc_feature (1)..(491): Homolog of NCBI NO: 15220701 NR Description: conserved hypothetical protein; protein id:
  misc_feature (1)..(477): Homolog of NCBI NO: 25402978 NR Description: protein F26F24.14 [imported] - Arabidopsis >gi|9295710|gb|AAF87016.1|AC005292_25 F26F24.14 [Arabidopsis
  misc_feature (1)..(282): Homolog of NCBI NO: 15810018 NR Description: AT5g38030/F16F17_30 [Arabidopsis thaliana]
  misc_feature (38)..(494): Homolog of NCBI NO: 15220246 NR Description: unknown protein; protein id: At1g47530.1, by cDNA: gi_16604504 [Arabidopsis thaliana]
  misc_feature (38)..(494): Homolog of NCBI NO: 16604505 NR Description: At1g47530/F16N3_20 [Arabidopsis thaliana]
  misc_feature (27)..(490): Homolog of NCBI NO: 30686958 NR Description: MATE efflux protein family [Arabidopsis thaliana]
MEEDKILTETLLSAAEEPPALPFSSVEDIPPITTVGGFVKEFNVEVKKLWYLAGPAIFMSITQYSLGAATQVFAGHISTIALAAVSVENSVIAGFSFGVMLGMGSALETLCGQAFGAGKLSMLGVYLQRSWVILNVTAVILSLLYIFAAPILAFIGQTPAISSATGIFSIYMIPQIFAYAVNYPTAKFLQSQSKIMVMAAISAVALVLHVLLTWFVIEGLQWGTAGLAVVLNASWWFIVVAQLVYIFSGTCGEAWSGFSWEAFHNLWSFVRLSLASAVMLCLEVWYLMAVILFAGYLKNAEISVAALSICMNILGWTAMIAIGMNAAVSVRVSNELGAKHPRTAKFSLLVAVITSTVIGLAISIALLIFRDKYPSLFVGDEEVIIVVKDLTPILAVSIVINNVQPVLSGVAVGAGWQAVVAYVNIVCYYVFGIPFGLLLGYKLNFGVMGIWCGMLTGTVVQTIVLTWMICRTNWDTEAAMAEGRIREWGGEVSDQLLN

SEQ ID NO: 80868 - protein, 440 aa, Arabidopsis thaliana
  peptide (1)..(440): Ceres Seq. ID no. 12657480
  misc_feature (1)..(440): Homolog of NCBI NO: 15240824 NR Description: putative transmembrane protein; protein id: supported by cDNA: gi_13937233 [Arabidopsis thaliana] emb|CAA66809.1~gene_id:F16F17.3~strong similarity to unknown
  misc_feature (1)..(440): Homolog of NCBI NO: 15231577 NR Description: integral membrane protein, putative; protein id: supported by cDNA: gi_16323120 [Arabidopsis thaliana] unknown [Arabidopsis thaliana] >gi|9293938|dbj|BAB01841.1|
  misc_feature (1)..(440): Homolog of NCBI NO: 15222119 NR Description: unknown protein; protein id: At1g12950.1
  misc_feature (1)..(350): Homolog of NCBI NO: 1495259 NR Description: orf04 [Arabidopsis thaliana]
  misc_feature (1)..(433): Homolog of NCBI NO: 15220701 NR Description: conserved hypothetical protein; protein id:
  misc_feature (1)..(419): Homolog of NCBI NO: 25402978 NR Description: protein F26F24.14 [imported] - Arabidopsis >gi|9295710|gb|AAF87016.1|AC005292_25 F26F24.14 [Arabidopsis
  misc_feature (1)..(224): Homolog of NCBI NO: 15810018 NR Description: AT5g38030/F16F17_30 [Arabidopsis thaliana]
  misc_feature (1)..(436): Homolog of NCBI NO: 15220246 NR Description: unknown protein; protein id: At1g47530.1, by cDNA: gi_16604504 [Arabidopsis thaliana]
  misc_feature (1)..(436): Homolog of NCBI NO: 16604505 NR Description: At1g47530/F16N3_20 [Arabidopsis thaliana]
  misc_feature (1)..(432): Homolog of NCBI NO: 30686958 NR Description: MATE efflux protein family [Arabidopsis thaliana]
MSITQYSLGAATQVFAGHISTIALAAVSVENSVIAGFSFGVMLGMGSALETLCGQAFGAGKLSMLGVYLQRSWVILNVTAVILSLLYIFAAPILAFIGQTPAISSATGIFSIYMIPQIFAYAVNYPTAKFLQSQSKIMVMAAISAVALVLHVLLTWFVIEGLQWGTAGLAVVLNASWWFIVVAQLVYIFSGTCGEAWSGFSWEAFHNLWSFVRLSLASAVMLCLEVWYLMAVILFAGYLKNAEISVAALSICMNILGWTAMIAIGMNAAVSVRVSNELGAKHPRTAKFSLLVAVITSTVIGLAISIALLIFRDKYPSLFVGDEEVIIVVKDLTPILAVSIVINNVQPVLSGVAVGAGWQAVVAYVNIVCYYVFGIPFGLLLGYKLNFGVMGIWCGMLTGTVVQTIVLTWMICRTNWDTEAAMAEGRIREWGGEVSDQLLN

SEQ ID NO: 80869 - protein, 399 aa, Arabidopsis thaliana
  peptide (1)..(399): Ceres Seq. ID no. 12657481
  misc_feature (1)..(399): Homolog of NCBI NO: 15240824 NR Description: putative transmembrane protein; protein id: supported by cDNA: gi_13937233 [Arabidopsis thaliana] emb|CAA66809.1~gene_id:F16F17.3~strong similarity to unknown
  misc_feature (1)..(399): Homolog of NCBI NO: 15231577 NR Description: integral membrane protein, putative; protein id: supported by cDNA: gi_16323120 [Arabidopsis thaliana] unknown [Arabidopsis thaliana] >gi|9293938|dbj|BAB01841.1|
  misc_feature (1)..(399): Homolog of NCBI NO: 15222119 NR Description: unknown protein; protein id: At1g12950.1
  misc_feature (1)..(309): Homolog of NCBI NO: 1495259 NR Description: orf04 [Arabidopsis thaliana]
  misc_feature (1)..(392): Homolog of NCBI NO: 15220701 NR Description: conserved hypothetical protein; protein id:
  misc_feature (1)..(378): Homolog of NCBI NO: 25402978 NR Description: protein F26F24.14 [imported] - Arabidopsis >gi|9295710|gb|AAF87016.1|AC005292_25 F26F24.14 [Arabidopsis
  misc_feature (1)..(183): Homolog of NCBI NO: 15810018 NR Description: AT5g38030/F16F17_30 [Arabidopsis thaliana]
  misc_feature (1)..(395): Homolog of NCBI NO: 15220246 NR Description: unknown protein; protein id: At1g47530.1, by cDNA: gi_16604504 [Arabidopsis thaliana]
  misc_feature (1)..(395): Homolog of NCBI NO: 16604505 NR Description: At1g47530/F16N3_20 [Arabidopsis thaliana]
  misc_feature (1)..(391): Homolog of NCBI NO: 30686958 NR Description: MATE efflux protein family [Arabidopsis thaliana]
MLGMGSALETLCGQAFGAGKLSMLGVYLQRSWVILNVTAVILSLLYIFAAPILAFIGQTPAISSATGIFSIYMIPQIFAYAVNYPTAKFLQSQSKIMVMAAISAVALVLHVLLTWFVIEGLQWGTAGLAVVLNASWWFIVVAQLVYIFSGTCGEAWSGFSWEAFHNLWSFVRLSLASAVMLCLEVWYLMAVILFAGYLKNAEISVAALSICMNILGWTAMIAIGMNAAVSVRVSNELGAKHPRTAKFSLLVAVITSTVIGLAISIALLIFRDKYPSLFVGDEEVIIVVKDLTPILAVSIVINNVQPVLSGVAVGAGWQAVVAYVNIVCYYVFGIPFGLLLGYKLNFGVMGIWCGMLTGTVVQTIVLTWMICRTNWDTEAAMAEGRIREWGGEVSDQLLN

SEQ ID NO: 80870 - DNA, 846 bp, Arabidopsis thaliana
  misc_feature (1)..(846): Ceres Seq. ID no. 12657485
  misc_feature: MA Experiment ID: 20000171 Result: Down-regulated in Transcription
  misc_feature: MA Experiment 20000171 PARAMETER Experiment Name: At_42deg_Heat_P Parameter: Age (day) Value: 14
  misc_feature: MA Experiment 20000171 PARAMETER Experiment Name: At_42deg_Heat_P Parameter: Organism Value: A. thaliana
  misc_feature: MA Experiment 20000171 PARAMETER Experiment Name: At_42deg_Heat_P Parameter: Plant Line Value: WS
  misc_feature: MA Experiment 20000171 PARAMETER Experiment Name: At_42deg_Heat_P Parameter: Temperature (deg C) Value: 42 vs. 22
  misc_feature: MA Experiment 20000171 PARAMETER Experiment Name: At_42deg_Heat_P Parameter: Timepoint (hr) Value: 1
  misc_feature: MA Experiment 20000171 PARAMETER Experiment Name: At_42deg_Heat_P Parameter: Tissue Value: Aerial
  misc_feature: MA Experiment ID: 20000573 Result: Up-regulated in Transcription
  misc_feature: MA Experiment 20000573 PARAMETER Experiment Name: At_100uM_ABA_Mutants__P Parameter: Organism Value: A. thaliana
  misc_feature: MA Experiment 20000573 PARAMETER Experiment Name: At_100uM_ABA_Mutants__P Parameter: Plant Line Value: CS22 vs. Ler wt
  misc_feature: MA Experiment 20000573 PARAMETER Experiment Name: At_100uM_ABA_Mutants__P Parameter: Timepoint (hr) Value: N/A
  misc_feature: MA Experiment 20000573 PARAMETER Experiment Name: At_100uM_ABA_Mutants__P Parameter: Tissue Value: Whole Plant
  misc_feature: MA Experiment 20000573 PARAMETER Experiment Name: At_100uM_ABA_Mutants__P Parameter: Treatment Value: None
  misc_feature: MA Experiment ID: 20000574 Result: Up-regulated in Transcription
  misc_feature: MA Experiment 20000574 PARAMETER Experiment Name: At_100uM_ABA_Mutants__P Parameter: Organism Value: A. thaliana
  misc_feature: MA Experiment 20000574 PARAMETER Experiment Name: At_100uM_ABA_Mutants__P Parameter: Plant Line Value: CS23 vs. Ler wt
  misc_feature: MA Experiment 20000574 PARAMETER Experiment Name: At_100uM_ABA_Mutants__P Parameter: Timepoint (hr) Value: N/A
  misc_feature: MA Experiment 20000574 PARAMETER Experiment Name: At_100uM_ABA_Mutants__P Parameter: Tissue Value: Whole Plant
  misc_feature: MA Experiment 20000574 PARAMETER Experiment Name: At_100uM_ABA_Mutants__P Parameter: Treatment Value: None
atggacaatcacaatgaagaaccaaaaatcgcaccagaacctaatcgttggtacaacattacgttaggaccaacactactcaacaacaatcactcatactctcccaaattctgcactttacgatatgagtttaaacctgcttcaattgacagtactaaaccaggattgttacataagagtaaagacaataaggttacgttggagtttcaaaacaatcaacttaataaaccaaaagttagatttgatggtgttagtgaggattacaatgacagagataaagatgcaatcctcttctttgatggcgaaaatttccgattggagaagcttcaccgctctgttaagcgtttaaaatgcttacgtgtgcctgatgaatctgcttcagctagtagagtagtaacaaagattgttcctccagttgaaaaaccggttaagatggcacatattgacattaacaaccctgtagactttgaggaggatgtgaacattgaagatgacaatgaagaagaaactttatcgagaaaggagtttcaaacgggtggccttgacattgacattaaccttccgcatcctgctgaaatggaagatgatgagatagcagttgtagacattaatgatgacgaatcttacaaaggtcttaacgcggcagaagcactcagagcgcaagtaaatgcagaagcgagagaggagtctcgaaagagttcgagttcaggtagcgggagagaaagtgagagtagtgaaagtggagttgagagtagtggtagcggtagtagtagtaccagtgaaagcagaaaaagcggtagtgaaggtggaaccgctagcgagagcggaagccgagatagtctctag

SEQ ID NO: 80871 - protein, 281 aa, Arabidopsis thaliana
  peptide (1)..(281): Ceres Seq. ID no. 12657486
  misc_feature (224)..(278): Pfam Name: Lipoprotein amino terminal region Pfam Description: Lipoprotein amino terminal region
  misc_feature (1)..(281): Homolog of NCBI NO: 15240826 NR Description: putative protein; protein id: At5g38050.1 thaliana] >gi|8885609|dbj|BAA97539.1|
  misc_feature (1)..(280): Homolog of NCBI NO: 18409756 NR Description: expressed protein; protein id: At1g71080.1, by cDNA: gi_16974549 [Arabidopsis thaliana]
  misc_feature (7)..(277): Homolog of NCBI NO: 34914534 NR Description: OSJNBa0094H06.13 [Oryza sativa (japonica
  misc_feature (152)..(279): Homolog of NCBI NO: 34914534 NR Description: OSJNBa0094H06.13 [Oryza sativa (japonica
  misc_feature (113)..(274): Homolog of NCBI NO: 18409756 NR Description: expressed protein; protein id: At1g71080.1, by cDNA: gi_16974549 [Arabidopsis thaliana]
MDNHNEEPKIAPEPNRWYNITLGPTLLNNNHSYSPKFCTLRYEFKPASIDSTKPGLLHKSKDNKVTLEFQNNQLNKPKVRFDGVSEDYNDRDKDAILFFDGENFRLEKLHRSVKRLKCLRVPDESASASRVVTKIVPPVEKPVKMAHIDINNPVDFEEDVNIEDDNEEETLSRKEFQTGGLDIDINLPHPAEMEDDEIAVVDINDDESYKGLNAAEALRAQVNAEAREESRKSSSSGSGRESESSESGVESSGSGSSSTSESRKSGSEGGTASESGSRDSL

SEQ ID NO: 80872 - DNA, 2289 bp, Arabidopsis thaliana
  misc_feature (1)..(2289): Ceres Seq. ID no. 12657514
  misc_feature: MA Experiment ID: 20000307 Result: Down-regulated in Transcription
  misc_feature: MA Experiment 20000307 PARAMETER Experiment Name: At_Germinating_Seeds_Sub_P Parameter: Age (hr) Value: 24 vs. 0
  misc_feature: MA Experiment 20000307 PARAMETER Experiment Name: At_Germinating_Seeds_Sub_P Parameter: Organism Value: A. thaliana
  misc_feature: MA Experiment 20000307 PARAMETER Experiment Name: At_Germinating_Seeds_Sub_P Parameter: Plant Line Value: WS
  misc_feature: MA Experiment 20000307 PARAMETER Experiment Name: At_Germinating_Seeds_Sub_P Parameter: Tissue Value: Germinating Seeds
  misc_feature: MA Experiment ID: 20000315 Result: Down-regulated in Transcription
  misc_feature: MA Experiment 20000315 PARAMETER Experiment Name: At_14day_Shoots-Roots_Sub_P Parameter: Age (day) Value: 14
  misc_feature: MA Experiment 20000315 PARAMETER Experiment Name: At_14day_Shoots-Roots_Sub_P Parameter: Organism Value: A. thaliana
  misc_feature: MA Experiment 20000315 PARAMETER Experiment Name: At_14day_Shoots-Roots_Sub_P Parameter: Plant Line Value: WS
  misc_feature: MA Experiment 20000315 PARAMETER Experiment Name: At_14day_Shoots-Roots_Sub_P Parameter: Tissue Value: Shoots vs. Whole Plant
  misc_feature: MA Experiment ID: 20000328 Result: Down-regulated in Transcription
  misc_feature: MA Experiment 20000328 PARAMETER Experiment Name: At_42deg_Heat_Sub_P Parameter: Age (day) Value: 14
  misc_feature: MA Experiment 20000328 PARAMETER Experiment Name: At_42deg_Heat_Sub_P Parameter: Organism Value: A. thaliana
  misc_feature: MA Experiment 20000328 PARAMETER Experiment Name: At_42deg_Heat_Sub_P Parameter: Plant Line Value: WS
  misc_feature: MA Experiment 20000328 PARAMETER Experiment Name: At_42deg_Heat_Sub_P Parameter: Temperature (deg C) Value: 42 vs. 22
  misc_feature: MA Experiment 20000328 PARAMETER Experiment Name: At_42deg_Heat_Sub_P Parameter: Timepoint (hr) Value: 6
  misc_feature: MA Experiment 20000328 PARAMETER Experiment Name: At_42deg_Heat_Sub_P Parameter: Tissue Value: Aerial
  misc_feature: MA Experiment ID: 20000355 Result: Down-regulated in Transcription
  misc_feature: MA Experiment 20000355 PARAMETER Experiment Name: At_Siliques_Sub_P Parameter: Age (day) Value: 21
  misc_feature: MA Experiment 20000355 PARAMETER Experiment Name: At_Siliques_Sub_P Parameter: Organism Value: A. thaliana
  misc_feature: MA Experiment 20000355 PARAMETER Experiment Name: At_Siliques_Sub_P Parameter: Plant Line Value: WS
  misc_feature: MA Experiment 20000355 PARAMETER Experiment Name: At_Siliques_Sub_P Parameter: Tissue Value: Less Than 5mm Siliques vs. Whole Plant
  misc_feature: MA Experiment ID: 20000440 Result: Down-regulated in Transcription
  misc_feature: MA Experiment 20000440 PARAMETER Experiment Name: At_Closed-Flower__Sub_P Parameter: Tissue Value: Closed Flower vs. Whole Plant
aaaaaagaaactactttccagatatcaatcatgttctctccagtactcttcagattctcaaaacctaattcttttctggtccttctcttcttcttatcctatattcactttcttccttgtgctcaaagtcaacgagaaccatgtgacactctgtttcgttgtggggatctcacagccggtttccctttctggggagtggctcggccccaaccttgtggtcatccatctttaggacttcactgccaaaaacaaacaaattcgacttctctaatcatctcaagtctgatgtaccgtgttctcgaagtaaataccactactagtactcttaaattagtaaggcaagacttttcaggtccattctgctcggcttcattcagcggagcaacgttgactcctgaactttttgagcttttgccagactacaagaccctctccgcttactacctctgcaaccctagtcttcactatcctgcgaaattcatatgtccaaataagggtgttggctcaatacatcaggatgatttgtatcacaatcactgtggtgggattttcaacatcactgttcccataggttatgctccagaggaaggagctttgaatgtaaccaatttggaaagtgttcttaaaaaaggatttgaggtgaaacttagcatcgatgagagaccgtgtcaagaatgtaaaaccaatggtggaatctgcgcctaccatgttgcaactccggtttgctgcaagacaaactcgtcatcagaagtcaattgcactccaatgatgccatctggatctagtgctcatgcaggtctctccaaaaaagggaaaataggcatcggattcgcttctggattcttgggtgccacacttatcggcggatgtttactctgtatcttcatccggagaaggaagaaactagcaacacaatacacaaacaaaggcctatcaacaacaacaccttactcaagcaattatacaatgtcaaacactccaacctccacaacaatctctggcagcaatcactctcttgtaccttcaatatctaaccttggaaacggaagcgtctactctggaattcaagtcttcagctacgaagaactcgaggaagccactgaaaatttctccaaagaactcggagatggaggcttcggtactgtctactacggtacactaaaagacggacgagcagtagctgtgaaacgactcttcgaaagatcactaaaacgcgtggaacaattcaagaacgaaatcgatatcttgaaatccctaaaacacccgaacctagtgattctatacggatgcacaacaagacatagcagagagttactcctagtatacgaatacatctccaatggcacactcgctgaacatctccatggaaaccaagcacaatctcgccctatttgttggcctgctcgactccaaatagccatcgaaaccgctagcgccttgtcctatctccacgcctcagggatcatacacagagacgttaagactactaacattctcttagatagcaattaccaagtcaaagtagctgatttcggactctcacggttgtttccgatggatcaaactcacatctccactgctccacaaggtactccaggatatgtagatcctgagtattaccaatgttaccgattaaacgagaagagtgacgtttacagcttcggagtcgtactctccgaactaatctcatcgaaagaagctgttgatatcaccagacaccgccacgatattaacctcgccaacatggcgatttcgaaaatccaaaacgacgccgtacatgagctcgcggatctatcactcggattcgcgagagatccttcggtgaagaagatgatgtcgtcggttgctgaattagcattccgatgtttgcaacaggagagagacgtacggccatcgatggatgagatcgttgaggttttgagagtgattcagaaggatgggataagtgattcgaaggatgtggttgtggagattgatgtgaacggtggtgatgatgttggattgttgaagcatggtgttcctccgccgttatcgccggagactgataaaacgacggcgagtagttcgaatactacggcgagttcgttttgaagagagtaggaaggagactctagttctgaaggaaggttcgttttgtcagtaaataaaaaaaatcatttttcatttttgccttttgaaatttttttttataaatcttgtcgttaaccttttgactttttttttttgtcgacaccttttgacttttttcatcggttccgatattttatcctttctatatattatttttgt

SEQ ID NO: 80873 - protein, 696 aa, Arabidopsis thaliana
  peptide (1)..(696): Ceres Seq. ID no. 12657515
  misc_feature (44)..(696): Homolog of NCBI NO: 10177797 NR Description: contains similarity to protein
  misc_feature (28)..(694): Homolog of NCBI NO: 24417464 NR Description: unknown [Arabidopsis thaliana]
  misc_feature (35)..(694): Homolog of NCBI NO: 25404646 NR Description: probable wall-associated kinase T4O24.5
  misc_feature (35)..(694): Homolog of NCBI NO: 12597754 NR Description: protein kinase, putative [Arabidopsis thaliana]
  misc_feature (48)..(694): Homolog of NCBI NO: 30697422 NR Description: serine/threonine protein kinase family
  misc_feature (11)..(262): Homolog of NCBI NO: 10177797 NR Description: contains similarity to protein
  misc_feature (354)..(661): Homolog of NCBI NO: 15221764 NR Description: wall-associated kinase, putative; protein id:
  misc_feature (29)..(263): Homolog of NCBI NO: 15221764 NR Description: wall-associated kinase, putative; protein id:
  misc_feature (354)..(661): Homolog of NCBI NO: 25402857 NR Description: protein F15H18.11 [imported] - Arabidopsis >gi|6714300|gb|AAF25996.1|AC013354_15 F15H18.11 [Arabidopsis
  misc_feature (61)..(254): Homolog of NCBI NO: 25402857 NR Description: protein F15H18.11 [imported] - Arabidopsis >gi|6714300|gb|AAF25996.1|AC013354_15 F15H18.11 [Arabidopsis
KKETTFQISIMFSPVLFRFSKPNSFLVLLFFLSYIHFLPCAQSQREPCDTLFRCGDLTAGFPFWGVARPQPCGHPSLGLHCQKQTNSTSLIISSLMYRVLEVNTTTSTLKLVRQDFSGPFCSASFSGATLTPELFELLPDYKTLSAYYLCNPSLHYPAKFICPNKGVGSIHQDDLYHNHCGGIFNITVPIGYAPEEGALNVTNLESVLKKGFEVKLSIDERPCQECKTNGGICAYHVATPVCCKTNSSSEVNCTPMMPSGSSAHAGLSKKGKIGIGFASGFLGATLIGGCLLCIFIRRRKKLATQYTNKGLSTTTPYSSNYTMSNTPTSTTISGSNHSLVPSISNLGNGSVYSGIQVFSYEELEEATENFSKELGDGGFGTVYYGTLKDGRAVAVKRLFERSLKRVEQFKNEIDILKSLKHPNLVILYGCTTRHSRELLLVYEYISNGTLAEHLHGNQAQSRPICWPARLQIAIETASALSYLHASGIIHRDVKTTNILLDSNYQVKVADFGLSRLFPMDQTHISTAPQGTPGYVDPEYYQCYRLNEKSDVYSFGVVLSELISSKEAVDITRHRHDINLANMAISKIQNDAVHELADLSLGFARDPSVKKMMSSVAELAFRCLQQERDVRPSMDEIVEVLRVIQKDGISDSKDVVVEIDVNGGDDVGLLKHGVPPPLSPETDKTTASSSNTTASSF

SEQ ID NO: 80874 - protein, 686 aa, Arabidopsis thaliana
  peptide (1)..(686): Ceres Seq. ID no. 12657516
  misc_feature (34)..(686): Homolog of NCBI NO: 10177797 NR Description: contains similarity to protein
  misc_feature (18)..(684): Homolog of NCBI NO: 24417464 NR Description: unknown [Arabidopsis thaliana]
  misc_feature (25)..(684): Homolog of NCBI NO: 25404646 NR Description: probable wall-associated kinase T4O24.5
  misc_feature (25)..(684): Homolog of NCBI NO: 12597754 NR Description: protein kinase, putative [Arabidopsis thaliana]
  misc_feature (38)..(684): Homolog of NCBI NO: 30697422 NR Description: serine/threonine protein kinase family
  misc_feature (1)..(252): Homolog of NCBI NO: 10177797 NR Description: contains similarity to protein
  misc_feature (344)..(651): Homolog of NCBI NO: 15221764 NR Description: wall-associated kinase, putative; protein id:
  misc_feature (19)..(253): Homolog of NCBI NO: 15221764 NR Description: wall-associated kinase, putative; protein id:
  misc_feature (344)..(651): Homolog of NCBI NO: 25402857 NR Description: protein F15H18.11 [imported] - Arabidopsis >gi|6714300|gb|AAF25996.1|AC013354_15 F15H18.11 [Arabidopsis
  misc_feature (51)..(244): Homolog of NCBI NO: 25402857 NR Description: protein F15H18.11 [imported] - Arabidopsis >gi|6714300|gb|AAF25996.1|AC013354_15 F15H18.11 [Arabidopsis
MFSPVLFRFSKPNSFLVLLFFLSYIHFLPCAQSQREPCDTLFRCGDLTAGFPFWGVARPQPCGHPSLGLHCQKQTNSTSLIISSLMYRVLEVNTTTSTLKLVRQDFSGPFCSASFSGATLTPELFELLPDYKTLSAYYLCNPSLHYPAKFICPNKGVGSIHQDDLYHNHCGGIFNITVPIGYAPEEGALNVTNLESVLKKGFEVKLSIDERPCQECKTNGGICAYHVATPVCCKTNSSSEVNCTPMMPSGSSAHAGLSKKGKIGIGFASGFLGATLIGGCLLCIFIRRRKKLATQYTNKGLSTTTPYSSNYTMSNTPTSTTISGSNHSLVPSISNLGNGSVYSGIQVFSYEELEEATENFSKELGDGGFGTVYYGTLKDGRAVAVKRLFERSLKRVEQFKNEIDILKSLKHPNLVILYGCTTRHSRELLLVYEYISNGTLAEHLHGNQAQSRPICWPARLQIAIETASALSYLHASGIIHRDVKTTNILLDSNYQVKVADFGLSRLFPMDQTHISTAPQGTPGYVDPEYYQCYRLNEKSDVYSFGVVLSELISSKEAVDITRHRHDINLANMAISKIQNDAVHELADLSLGFARDPSVKKMMSSVAELAFRCLQQERDVRPSMDEIVEVLRVIQKDGISDSKDVVVEIDVNGGDDVGLLKHGVPPPLSPETDKTTASSSNTTASSF

SEQ ID NO: 80875 - protein, 601 aa, Arabidopsis thaliana
  peptide (1)..(601): Ceres Seq. ID no. 12657517
  misc_feature (1)..(601): Homolog of NCBI NO: 10177797 NR Description: contains similarity to protein
  misc_feature (1)..(599): Homolog of NCBI NO: 24417464 NR Description: unknown [Arabidopsis thaliana]
  misc_feature (1)..(599): Homolog of NCBI NO: 25404646 NR Description: probable wall-associated kinase T4O24.5
  misc_feature (1)..(599): Homolog of NCBI NO: 12597754 NR Description: protein kinase, putative [Arabidopsis thaliana]
  misc_feature (1)..(599): Homolog of NCBI NO: 30697422 NR Description: serine/threonine protein kinase family
  misc_feature (1)..(167): Homolog of NCBI NO: 10177797 NR Description: contains similarity to protein
  misc_feature (259)..(566): Homolog of NCBI NO: 15221764 NR Description: wall-associated kinase, putative; protein id:
  misc_feature (1)..(168): Homolog of NCBI NO: 15221764 NR Description: wall-associated kinase, putative; protein id:
  misc_feature (259)..(566): Homolog of NCBI NO: 25402857 NR Description: protein F15H18.11 [imported] - Arabidopsis >gi|6714300|gb|AAF25996.1|AC013354_15 F15H18.11 [Arabidopsis
  misc_feature (1)..(159): Homolog of NCBI NO: 25402857 NR Description: protein F15H18.11 [imported] - Arabidopsis >gi|6714300|gb|AAF25996.1|AC013354_15 F15H18.11 [Arabidopsis
MYRVLEVNTTTSTLKLVRQDFSGPFCSASFSGATLTPELFELLPDYKTLSAYYLCNPSLHYPAKFICPNKGVGSIHQDDLYHNHCGGIFNITVPIGYAPEEGALNVTNLESVLKKGFEVKLSIDERPCQECKTNGGICAYHVATPVCCKTNSSSEVNCTPMMPSGSSAHAGLSKKGKIGIGFASGFLGATLIGGCLLCIFIRRRKKLATQYTNKGLSTTTPYSSNYTMSNTPTSTTISGSNHSLVPSISNLGNGSVYSGIQVFSYEELEEATENFSKELGDGGFGTVYYGTLKDGRAVAVKRLFERSLKRVEQFKNEIDILKSLKHPNLVILYGCTTRHSRELLLVYEYISNGTLAEHLHGNQAQSRPICWPARLQIAIETASALSYLHASGIIHRDVKTTNILLDSNYQVKVADFGLSRLFPMDQTHISTAPQGTPGYVDPEYYQCYRLNEKSDVYSFGVVLSELISSKEAVDITRHRHDINLANMAISKIQNDAVHELADLSLGFARDPSVKKMMSSVAELAFRCLQQERDVRPSMDEIVEVLRVIQKDGISDSKDVVVEIDVNGGDDVGLLKHGVPPPLSPETDKTTASSSNTTASSF

SEQ ID NO: 80876 - DNA, 1917 bp, Arabidopsis thaliana
  misc_feature (1)..(1917): Ceres Seq. ID no. 12657518
  misc_feature: MA Experiment ID: 20000173 Result: Down-regulated in Transcription
  misc_feature: MA Experiment 20000173 PARAMETER Experiment Name: At_42deg_Heat_P Parameter: Age (day) Value: 14
  misc_feature: MA Experiment 20000173 PARAMETER Experiment Name: At_42deg_Heat_P Parameter: Organism Value: A. thaliana
  misc_feature: MA Experiment 20000173 PARAMETER Experiment Name: At_42deg_Heat_P Parameter: Plant Line Value: WS
  misc_feature: MA Experiment 20000173 PARAMETER Experiment Name: At_42deg_Heat_P Parameter: Temperature (deg C) Value: 42 vs. 22
  misc_feature: MA Experiment 20000173 PARAMETER Experiment Name: At_42deg_Heat_P Parameter: Timepoint (hr) Value: 6
  misc_feature: MA Experiment 20000173 PARAMETER Experiment Name: At_42deg_Heat_P Parameter: Tissue Value: Aerial
  misc_feature: MA Experiment ID: 20001560 Result: Down-regulated in Transcription
  misc_feature: MA Experiment 20001560 PARAMETER Experiment Name: At_Drought_Soil_Dry_P Parameter: Age (day) Value: 28
  misc_feature: MA Experiment 20001560 PARAMETER Experiment Name: At_Drought_Soil_Dry_P Parameter: Organism Value: A. thaliana
  misc_feature: MA Experiment 20001560 PARAMETER Experiment Name: At_Drought_Soil_Dry_P Parameter: Plant Line Value: WS
  misc_feature: MA Experiment 20001560 PARAMETER Experiment Name: At_Drought_Soil_Dry_P Parameter: Post Timepoint (hr) Value: None
  misc_feature: MA Experiment 20001560 PARAMETER Experiment Name: At_Drought_Soil_Dry_P Parameter: Post-Treatment Value: None
  misc_feature: MA Experiment 20001560 PARAMETER Experiment Name: At_Drought_Soil_Dry_P Parameter: Timepoint (day) Value: 14
  misc_feature: MA Experiment 20001560 PARAMETER Experiment Name: At_Drought_Soil_Dry_P Parameter: Treatment Value: Drought vs. No Drought
atgatcaatctttctctatatcagacaaattctttgtcctatacaatcatatggatgctctttgtgattccctcttgtgtgttgtcagttgatgagcgacagaaacactgctctcctacgtttagatgtggcaagcagacagatctctattatcccttttggtcacctgaccgagaagagtgcggtcacccggttttcaaggtcaactgcagcggagatttcgcagagtttactatatccacggttaagttccacgtcctcgagatgaactatgagtctcgtataataagacttgtaagaacagagtatctcaacaatctttgtccttggcatccagagaacagatcaatcaaccaagaagtccttccatttcttcaagacaccgagctaggaaccttttattacaactgctctggtccaacggtagacgaacttgccaatggttacatcagacagcttgggtgtgatgaagaagttggtgggaaaagttactttgtctcgtccccttcacatcctgggaatagagctatcttagatgggttaagtgcatcgtgtgaaagaaacgtcgatatccctgtttctcgatctgccatggagacaacagcgacaaatcagagtctcgaggctataaagaaggttcttgatgtgggtttcgaacttggctttaacagtgattgttccctatgcgtagcatcaaaaggtgcttgtggctttaatcagagctcaaaagcattcgtctgttattgtaaagatgagcctcacgagcatacatgtggaaagatgggtataggcattggacttggctgtggatttttgggtgccactcttattaccgtatgtttgctctgtttctttttccaaaagagacgaacttcacatcatctaagaccaagagacaataacctaaaggggctagtacaactgaaacagtacagttatgccgaagtgaggaaaattacaaaattattttctcacacgcttgggaaaggaggatttggaactgtctatgggggaaacctttgcgatggtcgtaaggttgcagtgaaaatattgaaagattttaagagtaatggtgaagacttcatcaatgaagtcgcaagcatgagccaaacatctcatgttaacattgtttctttgcttggtttttgctatgaagggtccaaaagagctattgtgtatgagtttctagagaatgggtcgctggatcaattcctctctgaaaagaagtcactgaatctagatgtaagtacgctatacagaatcgctctaggtgttgcccggggacttgattacttgcaccatggctgcaaaacaaggattgttcatttcgacatcaaacctcagaatatactattagatgacacattctgccctaaagtctcagactttggccttgctaagctctgcgaaaaaagagaaagcattttgtccttgctagacgcaagaggaacaataggttacattgcacctgaggtgttttcaggaatgtatggaagagtctctcacaagtcagatgtttacagctatggaatgttagtcctcgagatgatcggagcaaagaacaaagaaatagaggaaactgctgcttctaactctagttcagcttattttccagattggatctataaaaatcttgaaaatggagaggatacatggaaatttggtgatgagataagtagagaggataaagaggttgcaaagaagatgaccttggtgggtctctggtgtatacaaccatctccattaaatcgtccaccgatgaacagaattgttgagatgatggaaggaagtttggatgttcttgaagtccctcctaagccttctatacattattctgcagagcctcttccgcaactgtcttctttctcagaagagaattcaatctacactgaggtatttataggatccacaagttga

SEQ ID NO: 80877 - protein, 638 aa, Arabidopsis thaliana
  peptide (1)..(638): Ceres Seq. ID no. 12657519
  misc_feature (23)..(632): Homolog of NCBI NO: 9755446 NR Description: Putative protein kinase [Arabidopsis thaliana]
  misc_feature (23)..(632): Homolog of NCBI NO: 25404653 NR Description: probable receptor serine/threonine kinase PR5K
  misc_feature (263)..(632): Homolog of NCBI NO: 15219781 NR Description: receptor serine/threonine kinase PR5K, putative; id: At1g66910.1 [Arabidopsis thaliana] >gi|25404649|pir||H96692
  misc_feature (12)..(261): Homolog of NCBI NO: 15219781 NR Description: receptor serine/threonine kinase PR5K, putative; id: At1g66910.1 [Arabidopsis thaliana] >gi|25404649|pir||H96692
  misc_feature (25)..(638): Homolog of NCBI NO: 15219806 NR Description: receptor-like kinase, putative; protein id:
  misc_feature (23)..(632): Homolog of NCBI NO: 15219785 NR Description: receptor-like kinase, putative; protein id:
  misc_feature (256)..(624): Homolog of NCBI NO: 15241612 NR Description: receptor protein kinase - like protein; protein At5g39030.1 [Arabidopsis thaliana] >gi|10177548|dbj|BAB10827.1|
  misc_feature (250)..(624): Homolog of NCBI NO: 15241610 NR Description: receptor protein kinase - like protein; protein At5g39020.1 [Arabidopsis thaliana] >gi|10177547|dbj|BAB10826.1|
  misc_feature (10)..(312): Homolog of NCBI NO: 10177797 NR Description: contains similarity to protein
  misc_feature (291)..(594): Homolog of NCBI NO: 10177797 NR Description: contains similarity to protein
MINLSLYQTNSLSYTIIWMLFVIPSCVLSVDERQKHCSPTFRCGKQTDLYYPFWSPDREECGHPVFKVNCSGDFAEFTISTVKFHVLEMNYESRIIRLVRTEYLNNLCPWHPENRSINQEVLPFLQDTELGTFYYNCSGPTVDELANGYIRQLGCDEEVGGKSYFVSSPSHPGNRAILDGLSASCERNVDIPVSRSAMETTATNQSLEAIKKVLDVGFELGFNSDCSLCVASKGACGFNQSSKAFVCYCKDEPHEHTCGKMGIGIGLGCGFLGATLITVCLLCFFFQKRRTSHHLRPRDNNLKGLVQLKQYSYAEVRKITKLFSHTLGKGGFGTVYGGNLCDGRKVAVKILKDFKSNGEDFINEVASMSQTSHVNIVSLLGFCYEGSKRAIVYEFLENGSLDQFLSEKKSLNLDVSTLYRIALGVARGLDYLHHGCKTRIVHFDIKPQNILLDDTFCPKVSDFGLAKLCEKRESILSLLDARGTIGYIAPEVFSGMYGRVSHKSDVYSYGMLVLEMIGAKNKEIEETAASNSSSAYFPDWIYKNLENGEDTWKFGDEISREDKEVAKKMTLVGLWCIQPSPLNRPPMNRIVEMMEGSLDVLEVPPKPSIHYSAEPLPQLSSFSEENSIYTEVFIGSTS

SEQ ID NO: 80878 - protein, 620 aa, Arabidopsis thaliana
  peptide (1)..(620): Ceres Seq. ID no. 12657520
  misc_feature (5)..(614): Homolog of NCBI NO: 9755446 NR Description: Putative protein kinase [Arabidopsis thaliana]
  misc_feature (5)..(614): Homolog of NCBI NO: 25404653 NR Description: probable receptor serine/threonine kinase PR5K
  misc_feature (245)..(614): Homolog of NCBI NO: 15219781 NR Description: receptor serine/threonine kinase PR5K, putative; id: At1g66910.1 [Arabidopsis thaliana] >gi|25404649|pir||H96692
  misc_feature (1)..(243): Homolog of NCBI NO: 15219781 NR Description: receptor serine/threonine kinase PR5K, putative; id: At1g66910.1 [Arabidopsis thaliana] >gi|25404649|pir||H96692
  misc_feature (7)..(620): Homolog of NCBI NO: 15219806 NR Description: receptor-like kinase, putative; protein id:
  misc_feature (5)..(614): Homolog of NCBI NO: 15219785 NR Description: receptor-like kinase, putative; protein id:
  misc_feature (238)..(606): Homolog of NCBI NO: 15241612 NR Description: receptor protein kinase - like protein; protein At5g39030.1 [Arabidopsis thaliana] >gi|10177548|dbj|BAB10827.1|
  misc_feature (232)..(606): Homolog of NCBI NO: 15241610 NR Description: receptor protein kinase - like protein; protein At5g39020.1 [Arabidopsis thaliana] >gi|10177547|dbj|BAB10826.1|
  misc_feature (1)..(294): Homolog of NCBI NO: 10177797 NR Description: contains similarity to protein
  misc_feature (273)..(576): Homolog of NCBI NO: 10177797 NR Description: contains similarity to protein
MLFVIPSCVLSVDERQKHCSPTFRCGKQTDLYYPFWSPDREECGHPVFKVNCSGDFAEFTISTVKFHVLEMNYESRIIRLVRTEYLNNLCPWHPENRSINQEVLPFLQDTELGTFYYNCSGPTVDELANGYIRQLGCDEEVGGKSYFVSSPSHPGNRAILDGLSASCERNVDIPVSRSAMETTATNQSLEAIKKVLDVGFELGFNSDCSLCVASKGACGFNQSSKAFVCYCKDEPHEHTCGKMGIGIGLGCGFLGATLITVCLLCFFFQKRRTSHHLRPRDNNLKGLVQLKQYSYAEVRKITKLFSHTLGKGGFGTVYGGNLCDGRKVAVKILKDFKSNGEDFINEVASMSQTSHVNIVSLLGFCYEGSKRAIVYEFLENGSLDQFLSEKKSLNLDVSTLYRIALGVARGLDYLHHGCKTRIVHFDIKPQNILLDDTFCPKVSDFGLAKLCEKRESILSLLDARGTIGYIAPEVFSGMYGRVSHKSDVYSYGMLVLEMIGAKNKEIEETAASNSSSAYFPDWIYKNLENGEDTWKFGDEISREDKEVAKKMTLVGLWCIQPSPLNRPPMNRIVEMMEGSLDVLEVPPKPSIHYSAEPLPQLSSFSEENSIYTEVFIGSTS

SEQ ID NO: 80879 - protein, 550 aa, Arabidopsis thaliana
  peptide (1)..(550): Ceres Seq. ID no. 12657521
  misc_feature (1)..(544): Homolog of NCBI NO: 9755446 NR Description: Putative protein kinase [Arabidopsis thaliana]
  misc_feature (1)..(544): Homolog of NCBI NO: 25404653 NR Description: probable receptor serine/threonine kinase PR5K
  misc_feature (175)..(544): Homolog of NCBI NO: 15219781 NR Description: receptor serine/threonine kinase PR5K, putative; id: At1g66910.1 [Arabidopsis thaliana] >gi|25404649|pir||H96692
  misc_feature (1)..(173): Homolog of NCBI NO: 15219781 NR Description: receptor serine/threonine kinase PR5K, putative; id: At1g66910.1 [Arabidopsis thaliana] >gi|25404649|pir||H96692
  misc_feature (1)..(550): Homolog of NCBI NO: 15219806 NR Description: receptor-like kinase, putative; protein id:
  misc_feature (1)..(544): Homolog of NCBI NO: 15219785 NR Description: receptor-like kinase, putative; protein id:
  misc_feature (168)..(536): Homolog of NCBI NO: 15241612 NR Description: receptor protein kinase - like protein; protein At5g39030.1 [Arabidopsis thaliana] >gi|10177548|dbj|BAB10827.1|
  misc_feature (162)..(536): Homolog of NCBI NO: 15241610 NR Description: receptor protein kinase - like protein; protein At5g39020.1 [Arabidopsis thaliana] >gi|10177547|dbj|BAB10826.1|
  misc_feature (1)..(224): Homolog of NCBI NO: 10177797 NR Description: contains similarity to protein
  misc_feature (203)..(506): Homolog of NCBI NO: 10177797 NR Description: contains similarity to protein
MNYESRIIRLVRTEYLNNLCPWHPENRSINQEVLPFLQDTELGTFYYNCSGPTVDELANGYIRQLGCDEEVGGKSYFVSSPSHPGNRAILDGLSASCERNVDIPVSRSAMETTATNQSLEAIKKVLDVGFELGFNSDCSLCVASKGACGFNQSSKAFVCYCKDEPHEHTCGKMGIGIGLGCGFLGATLITVCLLCFFFQKRRTSHHLRPRDNNLKGLVQLKQYSYAEVRKITKLFSHTLGKGGFGTVYGGNLCDGRKVAVKILKDFKSNGEDFINEVASMSQTSHVNIVSLLGFCYEGSKRAIVYEFLENGSLDQFLSEKKSLNLDVSTLYRIALGVARGLDYLHHGCKTRIVHFDIKPQNILLDDTFCPKVSDFGLAKLCEKRESILSLLDARGTIGYIAPEVFSGMYGRVSHKSDVYSYGMLVLEMIGAKNKEIEETAASNSSSAYFPDWIYKNLENGEDTWKFGDEISREDKEVAKKMTLVGLWCIQPSPLNRPPMNRIVEMMEGSLDVLEVPPKPSIHYSAEPLPQLSSFSEENSIYTEVFIGSTS

SEQ ID NO: 80880 - DNA, 1215 bp, Arabidopsis thaliana
  misc_feature (1)..(1215): Ceres Seq. ID no. 12657614
  misc_feature: MA Experiment ID: 20000307 Result: Up-regulated in Transcription
  misc_feature: MA Experiment 20000307 PARAMETER Experiment Name: At_Germinating_Seeds_Sub_P Parameter: Age (hr) Value: 24 vs. 0
  misc_feature: MA Experiment 20000307 PARAMETER Experiment Name: At_Germinating_Seeds_Sub_P Parameter: Organism Value: A. thaliana
  misc_feature: MA Experiment 20000307 PARAMETER Experiment Name: At_Germinating_Seeds_Sub_P Parameter: Plant Line Value: WS
  misc_feature: MA Experiment 20000307 PARAMETER Experiment Name: At_Germinating_Seeds_Sub_P Parameter: Tissue Value: Germinating Seeds
gcaatttgctttcatctctttcgttgtaactgagaaattttaagagaataacgatcaaacacagagtcacatgtcaacatcttctcagtcgtacccaatgagtggcggcgatgatcaacacagttacatccataattcctcataccaaaaagcaggcatagatggggttcaagaaaaggcaagacaatacattttagaaaacctcgatctccttaatatgaatcccaatcttagtacttttacaattgcagattttggttgttctattggccctaacacttttcatgctgttcaaaatatcattgatattgtgaaacttaaacacctcaaagaaagccaagaagatagtcgtgtggcgcctctcgagttccaagtttacttcaacgatctaccgaacaatgactttaacacgctctttaggactcaacctccttcctccaaacaagaatatttctcggttggagttccaggttctttctatggaagggtgttaccaagaaatagcatccacatcggaaacacttccttcacgactcactggctttcaaaagttcccgaagaagtttgtgacaagaactctctagcttggaacaaaaattacattcattgtaataatttgatagaagaagttaccgaggcttacaaggtccagttcgaaaaagacatgggggtctttcttaaagctagagccgaagaacttgtgcctggaggattgatgatcacattaggacaatgtttgcctgatggtgtggccatgtatgagacatggtcaggtattgtgaaggataccattggtgattgtcttcaggatatggccactttgggagtaaccaccgaggaaaagatcgaaatgttcaacttgcccgtgtattttcctcaagttagtgaattgaaaggagcgattgaacaaaacataaggtttacaattgagatgatggagattgtaagccatccattggaggctgtgcaattatccaacaacttcatcacttccatgtatcgagcaattctctctacagttatagaaagacactttggaggtagtgtggtagatgaactattccgtcaatttgctaagaaactctccgagcacccgattgattttgaaaagtgtaagaaacaaatggtctatcatatcgttcttaaacgaaagtgaatattgagattatccaaaactttgtgtattgttcaaatccaaactgtttcctcctttgt

SEQ ID NO: 80881 - protein, 361 aa, Arabidopsis thaliana
  peptide (1)..(361): Ceres Seq. ID no. 12657615
  misc_feature (37)..(361): Pfam Name: SAM dependent carboxyl methyltransferase Pfam Description: SAM dependent carboxyl methyltransferase
  misc_feature (1)..(361): Homolog of NCBI NO: 15241002 NR Description: methyltransferase-related; protein id: supported by cDNA: gi_17380699, supported by cDNA: gi_20259006
  misc_feature (1)..(361): Homolog of NCBI NO: 8885614 NR Description: S-adenosyl-L-methionine:salicylic acid carboxyl
  misc_feature (1)..(361): Homolog of NCBI NO: 9758498 NR Description: S-adenosyl-L-methionine:salicylic acid carboxyl
  misc_feature (1)..(361): Homolog of NCBI NO: 15240811 NR Description: methyltransferase-related; protein id:
  misc_feature (1)..(252): Homolog of NCBI NO: 15240841 NR Description: methyltransferase-related; protein id:
  misc_feature (241)..(352): Homolog of NCBI NO: 15240841 NR Description: methyltransferase-related; protein id:
  misc_feature (1)..(361): Homolog of NCBI NO: 9758496 NR Description: S-adenosyl-L-methionine:salicylic acid carboxyl
  misc_feature (1)..(361): Homolog of NCBI NO: 15240809 NR Description: methyltransferase-related; protein id:
  misc_feature (7)..(360): Homolog of NCBI NO: 14009292 NR Description: defense-related protein [Brassica carinata]
  misc_feature (5)..(360): Homolog of NCBI NO: 15230523 NR Description: methyltransferase-related; protein id: At3g44840.1
MSTSSQSYPMSGGDDQHSYIHNSSYQKAGIDGVQEKARQYILENLDLLNMNPNLSTFTIADFGCSIGPNTFHAVQNIIDIVKLKHLKESQEDSRVAPLEFQVYFNDLPNNDFNTLFRTQPPSSKQEYFSVGVPGSFYGRVLPRNSIHIGNTSFTTHWLSKVPEEVCDKNSLAWNKNYIHCNNLIEEVTEAYKVQFEKDMGVFLKARAEELVPGGLMITLGQCLPDGVAMYETWSGIVKDTIGDCLQDMATLGVTTEEKIEMFNLPVYFPQVSELKGAIEQNIRFTIEMMEIVSHPLEAVQLSNNFITSMYRAILSTVIERHFGGSVVDELFRQFAKKLSEHPIDFEKCKKQMVYHIVLKRK

SEQ ID NO: 80882 - protein, 352 aa, Arabidopsis thaliana
  peptide (1)..(352): Ceres Seq. ID no. 12657616
  misc_feature (28)..(352): Pfam Name: SAM dependent carboxyl methyltransferase Pfam Description: SAM dependent carboxyl methyltransferase
  misc_feature (1)..(352): Homolog of NCBI NO: 15241002 NR Description: methyltransferase-related; protein id: supported by cDNA: gi_17380699, supported by cDNA: gi_20259006
  misc_feature (1)..(352): Homolog of NCBI NO: 8885614 NR Description: S-adenosyl-L-methionine:salicylic acid carboxyl
  misc_feature (1)..(352): Homolog of NCBI NO: 9758498 NR Description: S-adenosyl-L-methionine:salicylic acid carboxyl
  misc_feature (1)..(352): Homolog of NCBI NO: 15240811 NR Description: methyltransferase-related; protein id:
  misc_feature (1)..(243): Homolog of NCBI NO: 15240841 NR Description: methyltransferase-related; protein id:
  misc_feature (232)..(343): Homolog of NCBI NO: 15240841 NR Description: methyltransferase-related; protein id:
  misc_feature (1)..(352): Homolog of NCBI NO: 9758496 NR Description: S-adenosyl-L-methionine:salicylic acid carboxyl
  misc_feature (1)..(352): Homolog of NCBI NO: 15240809 NR Description: methyltransferase-related; protein id:
  misc_feature (1)..(351): Homolog of NCBI NO: 14009292 NR Description: defense-related protein [Brassica carinata]
  misc_feature (1)..(351): Homolog of NCBI NO: 15230523 NR Description: methyltransferase-related; protein id: At3g44840.1
MSGGDDQHSYIHNSSYQKAGIDGVQEKARQYILENLDLLNMNPNLSTFTIADFGCSIGPNTFHAVQNIIDIVKLKHLKESQEDSRVAPLEFQVYFNDLPNNDFNTLFRTQPPSSKQEYFSVGVPGSFYGRVLPRNSIHIGNTSFTTHWLSKVPEEVCDKNSLAWNKNYIHCNNLIEEVTEAYKVQFEKDMGVFLKARAEELVPGGLMITLGQCLPDGVAMYETWSGIVKDTIGDCLQDMATLGVTTEEKIEMFNLPVYFPQVSELKGAIEQNIRFTIEMMEIVSHPLEAVQLSNNFITSMYRAILSTVIERHFGGSVVDELFRQFAKKLSEHPIDFEKCKKQMVYHIVLKRK

SEQ ID NO: 80883 - protein, 312 aa, Arabidopsis thaliana
  peptide (1)..(312): Ceres Seq. ID no. 12657617
  misc_feature (1)..(312): Pfam Name: SAM dependent carboxyl methyltransferase Pfam Description: SAM dependent carboxyl methyltransferase
  misc_feature (1)..(312): Homolog of NCBI NO: 15241002 NR Description: methyltransferase-related; protein id: supported by cDNA: gi_17380699, supported by cDNA: gi_20259006
  misc_feature (1)..(312): Homolog of NCBI NO: 8885614 NR Description: S-adenosyl-L-methionine:salicylic acid carboxyl
  misc_feature (1)..(312): Homolog of NCBI NO: 9758498 NR Description: S-adenosyl-L-methionine:salicylic acid carboxyl
  misc_feature (1)..(312): Homolog of NCBI NO: 15240811 NR Description: methyltransferase-related; protein id:
  misc_feature (1)..(203): Homolog of NCBI NO: 15240841 NR Description: methyltransferase-related; protein id:
  misc_feature (192)..(303): Homolog of NCBI NO: 15240841 NR Description: methyltransferase-related; protein id:
  misc_feature (1)..(312): Homolog of NCBI NO: 9758496 NR Description: S-adenosyl-L-methionine:salicylic acid carboxyl
  misc_feature (1)..(312): Homolog of NCBI NO: 15240809 NR Description: methyltransferase-related; protein id:
  misc_feature (1)..(311): Homolog of NCBI NO: 14009292 NR Description: defense-related protein [Brassica carinata]
  misc_feature (1)..(311): Homolog of NCBI NO: 15230523 NR Description: methyltransferase-related; protein id: At3g44840.1
MNPNLSTFTIADFGCSIGPNTFHAVQNIIDIVKLKHLKESQEDSRVAPLEFQVYFNDLPNNDFNTLFRTQPPSSKQEYFSVGVPGSFYGRVLPRNSIHIGNTSFTTHWLSKVPEEVCDKNSLAWNKNYIHCNNLIEEVTEAYKVQFEKDMGVFLKARAEELVPGGLMITLGQCLPDGVAMYETWSGIVKDTIGDCLQDMATLGVTTEEKIEMFNLPVYFPQVSELKGAIEQNIRFTIEMMEIVSHPLEAVQLSNNFITSMYRAILSTVIERHFGGSVVDELFRQFAKKLSEHPIDFEKCKKQMVYHIVLKRK

SEQ ID NO: 80884 - DNA, 1371 bp, Arabidopsis thaliana
  misc_feature (1)..(1371): Ceres Seq. ID no. 12657618
  misc_feature: MA Experiment ID: 20000314 Result: Up-regulated in Transcription
  misc_feature: MA Experiment 20000314 PARAMETER Experiment Name: At_14day_Shoots-Roots_Sub_P Parameter: Age (day) Value: 14
  misc_feature: MA Experiment 20000314 PARAMETER Experiment Name: At_14day_Shoots-Roots_Sub_P Parameter: Organism Value: A. thaliana
  misc_feature: MA Experiment 20000314 PARAMETER Experiment Name: At_14day_Shoots-Roots_Sub_P Parameter: Plant Line Value: WS
  misc_feature: MA Experiment 20000314 PARAMETER Experiment Name: At_14day_Shoots-Roots_Sub_P Parameter: Tissue Value: Roots vs. Whole Plant
atggagaatctagatgaaatccgtaccgatattgtcgaatctactgctccgttgttgcaagaatcatcatcagagagcaacggaggaggagaattcaacggagcttcgtttagtggtgcggttttcaatctcgctacaacgatcatcggagctggtatcatggcattgcctgcgacgatgaagatcctcggtcttattcccggaatcacgatcatcgttctcatggctttcttaaccgatgcttcgattgagttcttgcttaggtttagtaacattgggaatcaaagatcttacggtggtgttatggatgattcttttggtaaatgtggaaggattatgttgcaagtttcgattctcgttagcaacattggtgttttgatcgtttatatgatcatcattggtgatgttttggctggtaagaatgaatatggaatccatcatgctggtatgcttgaaggatggtttgggattagttggtggaacagaagaacttttgttcttcttgttactactctcactgtctttgctccattgacttgcttcaaacgaattgattctttgagattcacatctgctatatcagttgctttagcggttgtttttcttgtcatcactgctggaattactatcattaagctgtttactgatggtttgatgatgccgagacttctacctaatgtcactgacttgtcgtcgttttggaaactcttcacggttgttcctgtgcttgtcaatgcatacatttgccattacaatgttcatagtatacagaacgagcttgaagacccttctcggataaaacctgttgttcgatcagcacttgcgatgtgttcttctgtttacgttatgacgagtttattcggatacctcttattcggtgatggtactcttgatgatgttcttgcaaactttgacacggatcttggaatcccttttggttcggttcttaatgatgcagtgagatttagctacgcagctcatctcatgcttgtgttccctgttgtcttctatcctctgcggattaacatcgacggtctcatctttcctacggctccaccacttacttcctctgagtctgatctgaggtttggctctattactgctggtctcattgctgtaatcttcttgggagcaaacttcataccaagcatttgggatgctttccaatttactggagcaactgctgctgtctgcatcggtttcatattccctgctgctgttatcttaaaggatcgtcataaccaagcaaccaagcgagacaagactatagccatttgcatgatcgtccttgcggttttctccaatgcaatcgccatttacagtgacgcctacgccttattcaagaagcacacatacgtatatccaatatga

SEQ ID NO: 80885 - protein, 456 aa, Arabidopsis thaliana
  peptide (1)..(456): Ceres Seq. ID no. 12657619
  misc_feature (1)..(456): Homolog of NCBI NO: 9758059 NR Description: amino acid transporter-like protein [Arabidopsis
  misc_feature (1)..(456): Homolog of NCBI NO: 15241555 NR Description: transporter -like protein; protein id:
  misc_feature (16)..(450): Homolog of NCBI NO: 18406463 NR Description: expressed protein; protein id: At3g30390.1, by cDNA: gi_15529154, supported by cDNA: gi_16226266 [Arabidopsis >gi|9294342|dbj|BAB02239.1|
  misc_feature (14)..(449): Homolog of NCBI NO: 34898706 NR Description: hypothetical protein [Oryza sativa (japonica group)] >gi|11862972|dbj|BAB19353.1| hypothetical protein [Oryza
  misc_feature (20)..(446): Homolog of NCBI NO: 15228851 NR Description: putative protein; protein id: At3g56200.1, by cDNA: gi_20453044 [Arabidopsis thaliana]
  misc_feature (2)..(449): Homolog of NCBI NO: 18412864 NR Description: expressed protein; protein id: At1g80510.1, by cDNA: gi_16226718 [Arabidopsis thaliana]
  misc_feature (16)..(444): Homolog of NCBI NO: 30688270 NR Description: amino acid transporter family [Arabidopsis
  misc_feature (35)..(410): Homolog of NCBI NO: 34907894 NR Description: P0439E11.11 [Oryza sativa (japonica
  misc_feature (58)..(444): Homolog of NCBI NO: 25408697 NR Description: hypothetical protein At2g40420 [imported] - thaliana >gi|20198010|gb|AAM15348.1| unknown protein [Arabidopsis
  misc_feature (16)..(63): Homolog of NCBI NO: 25408697 NR Description: hypothetical protein At2g40420 [imported] - thaliana >gi|20198010|gb|AAM15348.1| unknown protein [Arabidopsis
MENLDEIRTDIVESTAPLLQESSSESNGGGEFNGASFSGAVFNLATTIIGAGIMALPATMKILGLIPGITIIVLMAFLTDASIEFLLRFSNIGNQRSYGGVMDDSFGKCGRIMLQVSILVSNIGVLIVYMIIIGDVLAGKNEYGIHHAGMLEGWFGISWWNRRTFVLLVTTLTVFAPLTCFKRIDSLRFTSAISVALAVVFLVITAGITIIKLFTDGLMMPRLLPNVTDLSSFWKLFTVVPVLVNAYICHYNVHSIQNELEDPSRIKPVVRSALAMCSSVYVMTSLFGYLLFGDGTLDDVLANFDTDLGIPFGSVLNDAVRFSYAAHLMLVFPVVFYPLRINIDGLIFPTAPPLTSSESDLRFGSITAGLIAVIFLGANFIPSIWDAFQFTGATAAVCIGFIFPAAVILKDRHNQATKRDKTIAICMIVLAVFSNAIAIYSDAYALFKKHTYVYPI

SEQ ID NO: 80886 - protein, 403 aa, Arabidopsis thaliana
  peptide (1)..(403): Ceres Seq. ID no. 12657620
  misc_feature (1)..(403): Homolog of NCBI NO: 9758059 NR Description: amino acid transporter-like protein [Arabidopsis
  misc_feature (1)..(403): Homolog of NCBI NO: 15241555 NR Description: transporter -like protein; protein id:
  misc_feature (1)..(397): Homolog of NCBI NO: 18406463 NR Description: expressed protein; protein id: At3g30390.1, by cDNA: gi_15529154, supported by cDNA: gi_16226266 [Arabidopsis >gi|9294342|dbj|BAB02239.1|
  misc_feature (1)..(396): Homolog of NCBI NO: 34898706 NR Description: hypothetical protein [Oryza sativa (japonica group)] >gi|11862972|dbj|BAB19353.1| hypothetical protein [Oryza
  misc_feature (1)..(393): Homolog of NCBI NO: 15228851 NR Description: putative protein; protein id: At3g56200.1, by cDNA: gi_20453044 [Arabidopsis thaliana]
  misc_feature (1)..(396): Homolog of NCBI NO: 18412864 NR Description: expressed protein; protein id: At1g80510.1, by cDNA: gi_16226718 [Arabidopsis thaliana]
  misc_feature (1)..(391): Homolog of NCBI NO: 30688270 NR Description: amino acid transporter family [Arabidopsis
  misc_feature (1)..(357): Homolog of NCBI NO: 34907894 NR Description: P0439E11.11 [Oryza sativa (japonica
  misc_feature (5)..(391): Homolog of NCBI NO: 25408697 NR Description: hypothetical protein At2g40420 [imported] - thaliana >gi|20198010|gb|AAM15348.1| unknown protein [Arabidopsis
  misc_feature (1)..(349): Homolog of NCBI NO: 24461850 NR Description: CTV.3 [Poncirus trifoliata]
MALPATMKILGLIPGITIIVLMAFLTDASIEFLLRFSNIGNQRSYGGVMDDSFGKCGRIMLQVSILVSNIGVLIVYMIIIGDVLAGKNEYGIHHAGMLEGWFGISWWNRRTFVLLVTTLTVFAPLTCFKRIDSLRFTSAISVALAVVFLVITAGITIIKLFTDGLMMPRLLPNVTDLSSFWKLFTVVPVLVNAYICHYNVHSIQNELEDPSRIKPVVRSALAMCSSVYVMTSLFGYLLFGDGTLDDVLANFDTDLGIPFGSVLNDAVRFSYAAHLMLVFPVVFYPLRINIDGLIFPTAPPLTSSESDLRFGSITAGLIAVIFLGANFIPSIWDAFQFTGATAAVCIGFIFPAAVILKDRHNQATKRDKTIAICMIVLAVFSNAIAIYSDAYALFKKHTYVYPI

SEQ ID NO: 80887 - protein, 397 aa, Arabidopsis thaliana
  peptide (1)..(397): Ceres Seq. ID no. 12657621
  misc_feature (1)..(397): Homolog of NCBI NO: 9758059 NR Description: amino acid transporter-like protein [Arabidopsis
  misc_feature (1)..(397): Homolog of NCBI NO: 15241555 NR Description: transporter -like protein; protein id:
  misc_feature (1)..(391): Homolog of NCBI NO: 18406463 NR Description: expressed protein; protein id: At3g30390.1, by cDNA: gi_15529154, supported by cDNA: gi_16226266 [Arabidopsis >gi|9294342|dbj|BAB02239.1|
  misc_feature (1)..(390): Homolog of NCBI NO: 34898706 NR Description: hypothetical protein [Oryza sativa (japonica group)] >gi|11862972|dbj|BAB19353.1| hypothetical protein [Oryza
  misc_feature (1)..(387): Homolog of NCBI NO: 15228851 NR Description: putative protein; protein id: At3g56200.1, by cDNA: gi_20453044 [Arabidopsis thaliana]
  misc_feature (1)..(390): Homolog of NCBI NO: 18412864 NR Description: expressed protein; protein id: At1g80510.1, by cDNA: gi_16226718 [Arabidopsis thaliana]
  misc_feature (1)..(385): Homolog of NCBI NO: 30688270 NR Description: amino acid transporter family [Arabidopsis
  misc_feature (1)..(351): Homolog of NCBI NO: 34907894 NR Description: P0439E11.11 [Oryza sativa (japonica
  misc_feature (1)..(385): Homolog of NCBI NO: 25408697 NR Description: hypothetical protein At2g40420 [imported] - thaliana >gi|20198010|gb|AAM15348.1| unknown protein [Arabidopsis
  misc_feature (1)..(343): Homolog of NCBI NO: 24461850 NR Description: CTV.3 [Poncirus trifoliata]
MKILGLIPGITIIVLMAFLTDASIEFLLRFSNIGNQRSYGGVMDDSFGKCGRIMLQVSILVSNIGVLIVYMIIIGDVLAGKNEYGIHHAGMLEGWFGISWWNRRTFVLLVTTLTVFAPLTCFKRIDSLRFTSAISVALAVVFLVITAGITIIKLFTDGLMMPRLLPNVTDLSSFWKLFTVVPVLVNAYICHYNVHSIQNELEDPSRIKPVVRSALAMCSSVYVMTSLFGYLLFGDGTLDDVLANFDTDLGIPFGSVLNDAVRFSYAAHLMLVFPVVFYPLRINIDGLIFPTAPPLTSSESDLRFGSITAGLIAVIFLGANFIPSIWDAFQFTGATAAVCIGFIFPAAVILKDRHNQATKRDKTIAICMIVLAVFSNAIAIYSDAYALFKKHTYVYPI

SEQ ID NO: 80888 - DNA, 669 bp, Arabidopsis thaliana
  misc_feature (1)..(669): Ceres Seq. ID no. 12657642
  misc_feature: MA Experiment ID: 20000440 Result: Down-regulated in Transcription
  misc_feature: MA Experiment 20000440 PARAMETER Experiment Name: At_Closed-Flower__Sub_P Parameter: Tissue Value: Closed Flower vs. Whole Plant
atgaaaagtttctcatttcttgcagttttatctatcttggcaataacactttcattaagcaaggcttcggacccaagctctcttcaggacttttgcgttggtgtcaacaccccagcagatggtgtttttgtgaacggaaagttctgcaaggacccgaagctcgtcacagtagaagacttcttttttacagggctccacgaggcaagaccacctaatccaaaaactgggtctaacgtaacagccgtcaatgttaacaacctaccagggttaaacactcttggaatctcacttgtccgtatcgactatggagtttacggacagaacccacctcacacccacccacgtgcctccgaggtcttgtatgtcgcggttggaacacttttcgttgggtttgtcacgtcaaaccccgaaaatcgccttttcagtaaaacactttacgagggtgatgtctttgtgtttccacagggactcattcatttccaagtgaacgttggaaaatatccggcggttgcattcgctggtctcagcagccaaaaccctggtgtcatcactattgctgacaccgtgtttgggtctaacccacagatagacccaagttttcttgcaagtgcattccaggttgaccctaagattgtcatggatctacagaccaagttcataaaaccataa

SEQ ID NO: 80889 - protein, 222 aa, Arabidopsis thaliana
  peptide (1)..(222): Ceres Seq. ID no. 12657643
  misc_feature (63)..(213): Pfam Name: Cupin Pfam Description: Cupin
  misc_feature (1)..(222): Homolog of NCBI NO: 15241579 NR Description: germin - like protein; protein id: At5g38910.1
  misc_feature (1)..(221): Homolog of NCBI NO: 15241585 NR Description: germin - like protein; protein id: At5g38940.1
  misc_feature (1)..(221): Homolog of NCBI NO: 18202910 NR Description: Germin-like protein subfamily 1 member 11
  misc_feature (1)..(221): Homolog of NCBI NO: 15241583 NR Description: germin - like protein; protein id: At5g38930.1
  misc_feature (1)..(219): Homolog of NCBI NO: 15241589 NR Description: germin - like protein; protein id: At5g38960.1
  misc_feature (1)..(219): Homolog of NCBI NO: 18202909 NR Description: Putative germin-like protein subfamily 1 member
  misc_feature (1)..(219): Homolog of NCBI NO: 15233510 NR Description: germin precursor oxalate oxidase; protein id:
  misc_feature (3)..(219): Homolog of NCBI NO: 4098968 NR Description: germin-like protein [Arabidopsis thaliana]
  misc_feature (1)..(219): Homolog of NCBI NO: 18202454 NR Description: Germin-like protein subfamily 1 member 13
  misc_feature (1)..(219): Homolog of NCBI NO: 15241636 NR Description: germin -like protein; protein id: At5g39110.1
MKSFSFLAVLSILAITLSLSKASDPSSLQDFCVGVNTPADGVFVNGKFCKDPKLVTVEDFFFTGLHEARPPNPKTGSNVTAVNVNNLPGLNTLGISLVRIDYGVYGQNPPHTHPRASEVLYVAVGTLFVGFVTSNPENRLFSKTLYEGDVFVFPQGLIHFQVNVGKYPAVAFAGLSSQNPGVITIADTVFGSNPQIDPSFLASAFQVDPKIVMDLQTKFIKP

SEQ ID NO: 80890 - DNA, 1742 bp, Arabidopsis thaliana
  misc_feature (1)..(1742): Ceres Seq. ID no. 12657646
  misc_feature: MA Experiment ID: 20000185 Result: Up-regulated in Transcription
  misc_feature: MA Experiment 20000185 PARAMETER Experiment Name: At_Roots__P Parameter: Age (day) Value: 7 vs. 21
  misc_feature: MA Experiment 20000185 PARAMETER Experiment Name: At_Roots__P Parameter: Organism Value: A. thaliana
  misc_feature: MA Experiment 20000185 PARAMETER Experiment Name: At_Roots__P Parameter: Tissue Value: Roots vs. Whole Plant
  misc_feature: MA Experiment ID: 20000234 Result: Up-regulated in Transcription
  misc_feature: MA Experiment 20000234 PARAMETER Experiment Name: At_Siliques_P Parameter: Age (day) Value: 21
  misc_feature: MA Experiment 20000234 PARAMETER Experiment Name: At_Siliques_P Parameter: Organism Value: A. thaliana
  misc_feature: MA Experiment 20000234 PARAMETER Experiment Name: At_Siliques_P Parameter: Plant Line Value: WS
  misc_feature: MA Experiment 20000234 PARAMETER Experiment Name: At_Siliques_P Parameter: Tissue Value: Less Than 5mm Siliques vs. Whole Plant
  misc_feature: MA Experiment ID: 20000235 Result: Up-regulated in Transcription
  misc_feature: MA Experiment 20000235 PARAMETER Experiment Name: At_Siliques_P Parameter: Age (day) Value: 21
  misc_feature: MA Experiment 20000235 PARAMETER Experiment Name: At_Siliques_P Parameter: Organism Value: A. thaliana
  misc_feature: MA Experiment 20000235 PARAMETER Experiment Name: At_Siliques_P Parameter: Plant Line Value: WS
  misc_feature: MA Experiment 20000235 PARAMETER Experiment Name: At_Siliques_P Parameter: Tissue Value: 5-10mm Siliques vs. Whole Plant
ctttctctctttctctggtctgtttcaaaacatagtacataataatagagacaacaagagaaagaaaaaacagagtgatctgttttaaaacagagcagaaaacagagtgagatgggagcaatgatggtgatgatgggtcttctcttgatcatcgtgtctctctgttccgctctccttcgatggaatcagatgcgatataccaagaatggtcttcctcctggaaccatgggctggccaatctttggcgaaaccaccgagtttctcaaacaaggccccaacttcatgagaaaccaaagactccgatacgggagtttcttcaaatctcatcttctaggttgtccaacgttaatctcaatggactcagaagtaaacagatacattttaaagaacgaatcaaaaggtttggttcctggttacccacaatcgatgcttgatatacttgggacttgtaacatggctgcggttcacggttcgagccaccggcttatgagaggctcgcttctgtctctcataagctcgaccatgatgagagatcatatcttgcctaaagttgatcacttcatgagaagctatcttgatcagtggaatgagcttgaggttattgatatccaagataagaccaaacatatggcatttttatcttcactgacacaaatcgctgggaacttaagaaaaccatttgttgaagaattcaaaactgcattcttcaagcttgttgttgggactttatccgttccgattgatcttccgggcacaaattatcgttgcggaatccaagcaagaaataacattgataggttgctaagagagctgatgcaagaacgtagagattctggagaaacattcacagacatgttaggttacttgatgaagaaggaaggtaaccgatacccgttaaccgatgaagagataagagaccaagttgtgacgattttgtattcgggttacgaaactgtctctacgacctcaatgatggctcttaagtaccttcatgatcacccaaaagctcttcaagaactaagagctgagcatttggcattcagggaaagaaaacgacaggacgaaccactcggtcttgaggacgtgaagtcaatgaagttcactcgagctgtgatttatgagacatcaagattggcaacgatcgttaatggggtcctaaggaaaactactcgtgacttggaaatcaacggttatttaatcccaaaaggatggagaatttatgtatacacgagggaaattaattacgatgcaaatctttatgaagacccattgatctttaatccatggagatggatgaagaagagcttggagtcacaaaactcatgctttgtgtttggaggtgggacaaggctttgtcctggtaaggaactagggattgtcgagatctcgagctttctccattactttgttacgagatacagatgggaggaaataggaggggatgaattaatggtgtttccgagagtttttgcaccaaaaggcttccatcttaggatttcaccctactaatttctaactttttaaataaaataatatagattttatgcacgcagaggatacagaagacgtatatgaagaaacaagagaagataattataaatttttttttttttttgacacatatttttgttctcatttaagagtcttctggtcatatgtacataaccataagcagcataatcttattatatatctatttctgtataactctatttgaacttgaagtatatctctggctattt

SEQ ID NO: 80891 - protein, 465 aa, Arabidopsis thaliana
  peptide (1)..(465): Ceres Seq. ID no. 12657647
  misc_feature (1)..(465): Homolog of NCBI NO: 30693327 NR Description: cytochrome p450, putative [Arabidopsis thaliana]
  misc_feature (1)..(411): Homolog of NCBI NO: 30693331 NR Description: cytochrome p450, putative [Arabidopsis thaliana]
  misc_feature (1)..(465): Homolog of NCBI NO: 18406372 NR Description: cytochrome p450, putative; protein id: supported by cDNA: 11278., supported by cDNA: gi_15450574, by cDNA: gi_17380629 [Arabidopsis thaliana]
  misc_feature (1)..(465): Homolog of NCBI NO: 9294419 NR Description: cytochrome P450 [Arabidopsis thaliana]
  misc_feature (4)..(465): Homolog of NCBI NO: 21536828 NR Description: cytochrome P450 homolog, putative [Arabidopsis
  misc_feature (1)..(465): Homolog of NCBI NO: 5921933 NR Description: Cytochrome P450 85 (Dwarf protein)
  misc_feature (4)..(465): Homolog of NCBI NO: 27127269 NR Description: cytochrome P450 [Oryza sativa (japonica
  misc_feature (5)..(465): Homolog of NCBI NO: 15239203 NR Description: cytochrome p450, putative; protein id: supported by cDNA: 36334., supported by cDNA: gi_14596098, by cDNA: gi_15450716, supported by cDNA: gi_17380617, supported
  misc_feature (4)..(458): Homolog of NCBI NO: 9587211 NR Description: cytochrome P450 [Vigna radiata]
  misc_feature (34)..(462): Homolog of NCBI NO: 34902330 NR Description: Putative steroid 22-alpha-hydroxylase [Oryza
MGAMMVMMGLLLIIVSLCSALLRWNQMRYTKNGLPPGTMGWPIFGETTEFLKQGPNFMRNQRLRYGSFFKSHLLGCPTLISMDSEVNRYILKNESKGLVPGYPQSMLDILGTCNMAAVHGSSHRLMRGSLLSLISSTMMRDHILPKVDHFMRSYLDQWNELEVIDIQDKTKHMAFLSSLTQIAGNLRKPFVEEFKTAFFKLVVGTLSVPIDLPGTNYRCGIQARNNIDRLLRELMQERRDSGETFTDMLGYLMKKEGNRYPLTDEEIRDQVVTILYSGYETVSTTSMMALKYLHDHPKALQELRAEHLAFRERKRQDEPLGLEDVKSMKFTRAVIYETSRLATIVNGVLRKTTRDLEINGYLIPKGWRIYVYTREINYDANLYEDPLIFNPWRWMKKSLESQNSCFVFGGGTRLCPGKELGIVEISSFLHYFVTRYRWEEIGGDELMVFPRVFAPKGFHLRISPY

SEQ ID NO: 80892 - protein, 462 aa, Arabidopsis thaliana
  peptide (1)..(462): Ceres Seq. ID no. 12657648
  misc_feature (1)..(462): Homolog of NCBI NO: 30693327 NR Description: cytochrome p450, putative [Arabidopsis thaliana]
  misc_feature (1)..(408): Homolog of NCBI NO: 30693331 NR Description: cytochrome p450, putative [Arabidopsis thaliana]
  misc_feature (1)..(462): Homolog of NCBI NO: 18406372 NR Description: cytochrome p450, putative; protein id: supported by cDNA: 11278., supported by cDNA: gi_15450574, by cDNA: gi_17380629 [Arabidopsis thaliana]
  misc_feature (1)..(462): Homolog of NCBI NO: 9294419 NR Description: cytochrome P450 [Arabidopsis thaliana]
  misc_feature (1)..(462): Homolog of NCBI NO: 21536828 NR Description: cytochrome P450 homolog, putative [Arabidopsis
  misc_feature (1)..(462): Homolog of NCBI NO: 5921933 NR Description: Cytochrome P450 85 (Dwarf protein)
  misc_feature (1)..(462): Homolog of NCBI NO: 27127269 NR Description: cytochrome P450 [Oryza sativa (japonica
  misc_feature (2)..(462): Homolog of NCBI NO: 15239203 NR Description: cytochrome p450, putative; protein id: supported by cDNA: 36334., supported by cDNA: gi_14596098, by cDNA: gi_15450716, supported by cDNA: gi_17380617, supported
  misc_feature (1)..(455): Homolog of NCBI NO: 9587211 NR Description: cytochrome P450 [Vigna radiata]
  misc_feature (31)..(459): Homolog of NCBI NO: 34902330 NR Description: Putative steroid 22-alpha-hydroxylase [Oryza
MMVMMGLLLIIVSLCSALLRWNQMRYTKNGLPPGTMGWPIFGETTEFLKQGPNFMRNQRLRYGSFFKSHLLGCPTLISMDSEVNRYILKNESKGLVPGYPQSMLDILGTCNMAAVHGSSHRLMRGSLLSLISSTMMRDHILPKVDHFMRSYLDQWNELEVIDIQDKTKHMAFLSSLTQIAGNLRKPFVEEFKTAFFKLVVGTLSVPIDLPGTNYRCGIQARNNIDRLLRELMQERRDSGETFTDMLGYLMKKEGNRYPLTDEEIRDQVVTILYSGYETVSTTSMMALKYLHDHPKALQELRAEHLAFRERKRQDEPLGLEDVKSMKFTRAVIYETSRLATIVNGVLRKTTRDLEINGYLIPKGWRIYVYTREINYDANLYEDPLIFNPWRWMKKSLESQNSCFVFGGGTRLCPGKELGIVEISSFLHYFVTRYRWEEIGGDELMVFPRVFAPKGFHLRISPY

SEQ ID NO: 80893 - protein, 461 aa, Arabidopsis thaliana
  peptide (1)..(461): Ceres Seq. ID no. 12657649
  misc_feature (1)..(461): Homolog of NCBI NO: 30693327 NR Description: cytochrome p450, putative [Arabidopsis thaliana]
  misc_feature (1)..(407): Homolog of NCBI NO: 30693331 NR Description: cytochrome p450, putative [Arabidopsis thaliana]
  misc_feature (1)..(461): Homolog of NCBI NO: 18406372 NR Description: cytochrome p450, putative; protein id: supported by cDNA: 11278., supported by cDNA: gi_15450574, by cDNA: gi_17380629 [Arabidopsis thaliana]
  misc_feature (1)..(461): Homolog of NCBI NO: 9294419 NR Description: cytochrome P450 [Arabidopsis thaliana]
  misc_feature (1)..(461): Homolog of NCBI NO: 21536828 NR Description: cytochrome P450 homolog, putative [Arabidopsis
  misc_feature (1)..(461): Homolog of NCBI NO: 5921933 NR Description: Cytochrome P450 85 (Dwarf protein)
  misc_feature (1)..(461): Homolog of NCBI NO: 27127269 NR Description: cytochrome P450 [Oryza sativa (japonica
  misc_feature (1)..(461): Homolog of NCBI NO: 15239203 NR Description: cytochrome p450, putative; protein id: supported by cDNA: 36334., supported by cDNA: gi_14596098, by cDNA: gi_15450716, supported by cDNA: gi_17380617, supported
  misc_feature (1)..(454): Homolog of NCBI NO: 9587211 NR Description: cytochrome P450 [Vigna radiata]
  misc_feature (30)..(458): Homolog of NCBI NO: 34902330 NR Description: Putative steroid 22-alpha-hydroxylase [Oryza
MVMMGLLLIIVSLCSALLRWNQMRYTKNGLPPGTMGWPIFGETTEFLKQGPNFMRNQRLRYGSFFKSHLLGCPTLISMDSEVNRYILKNESKGLVPGYPQSMLDILGTCNMAAVHGSSHRLMRGSLLSLISSTMMRDHILPKVDHFMRSYLDQWNELEVIDIQDKTKHMAFLSSLTQIAGNLRKPFVEEFKTAFFKLVVGTLSVPIDLPGTNYRCGIQARNNIDRLLRELMQERRDSGETFTDMLGYLMKKEGNRYPLTDEEIRDQVVTILYSGYETVSTTSMMALKYLHDHPKALQELRAEHLAFRERKRQDEPLGLEDVKSMKFTRAVIYETSRLATIVNGVLRKTTRDLEINGYLIPKGWRIYVYTREINYDANLYEDPLIFNPWRWMKKSLESQNSCFVFGGGTRLCPGKELGIVEISSFLHYFVTRYRWEEIGGDELMVFPRVFAPKGFHLRISPY

SEQ ID NO: 80894 - DNA, 2421 bp, Arabidopsis thaliana
  misc_feature (1)..(2421): Ceres Seq. ID no. 12657656
  misc_feature: MA Experiment ID: 20000314 Result: Down-regulated in Transcription
  misc_feature: MA Experiment 20000314 PARAMETER Experiment Name: At_14day_Shoots-Roots_Sub_P Parameter: Age (day) Value: 14
  misc_feature: MA Experiment 20000314 PARAMETER Experiment Name: At_14day_Shoots-Roots_Sub_P Parameter: Organism Value: A. thaliana
  misc_feature: MA Experiment 20000314 PARAMETER Experiment Name: At_14day_Shoots-Roots_Sub_P Parameter: Plant Line Value: WS
  misc_feature: MA Experiment 20000314 PARAMETER Experiment Name: At_14day_Shoots-Roots_Sub_P Parameter: Tissue Value: Roots vs. Whole Plant
  misc_feature: MA Experiment ID: 20000315 Result: Down-regulated in Transcription
  misc_feature: MA Experiment 20000315 PARAMETER Experiment Name: At_14day_Shoots-Roots_Sub_P Parameter: Age (day) Value: 14
  misc_feature: MA Experiment 20000315 PARAMETER Experiment Name: At_14day_Shoots-Roots_Sub_P Parameter: Organism Value: A. thaliana
  misc_feature: MA Experiment 20000315 PARAMETER Experiment Name: At_14day_Shoots-Roots_Sub_P Parameter: Plant Line Value: WS
  misc_feature: MA Experiment 20000315 PARAMETER Experiment Name: At_14day_Shoots-Roots_Sub_P Parameter: Tissue Value: Shoots vs. Whole Plant
  misc_feature: MA Experiment ID: 20000355 Result: Down-regulated in Transcription
  misc_feature: MA Experiment 20000355 PARAMETER Experiment Name: At_Siliques_Sub_P Parameter: Age (day) Value: 21
  misc_feature: MA Experiment 20000355 PARAMETER Experiment Name: At_Siliques_Sub_P Parameter: Organism Value: A. thaliana
  misc_feature: MA Experiment 20000355 PARAMETER Experiment Name: At_Siliques_Sub_P Parameter: Plant Line Value: WS
  misc_feature: MA Experiment 20000355 PARAMETER Experiment Name: At_Siliques_Sub_P Parameter: Tissue Value: Less Than 5mm Siliques vs. Whole Plant
  misc_feature: MA Experiment ID: 20000440 Result: Down-regulated in Transcription
  misc_feature: MA Experiment 20000440 PARAMETER Experiment Name: At_Closed-Flower__Sub_P Parameter: Tissue Value: Closed Flower vs. Whole Plant
atgatctgtttcattttgtttgttttctcttttctcgtttccgtctccgcaacagcgccatacaagccagacgatgtttttctcatcaactgtggagaaaccgatgtccccttcgacaaccacggtcgaacttggacgcaggaggagaagaatattcttccgaagaattcagacaacgcgtcgttctcttcagttgtatcatacaaagaagaatcagggattcctcaagtgccttacatgactgctcggattttccgatctgatttcacgtacagttttccagtctctcccggctggaaattcctccgcttatacttttaccctacaagttacaaatccggttttgacgccgttaactccttcgtctccgtcaccgtcaatgatttcactctcttgcaaaacttcagcgccgatttaacagtaaaggcttcaataccagaatcaaaatctctaatcaaagaattcatcgttccggtttacctgactctgaatctcacgttcaggccgtctaataattcgttagcttttgttaacggaatcgagattgtctccatgcctgaccggttttactcaaagggaggatttgacgaccttataactaacgtcggtagtttaattgacttcgagatagacaactccactgcttccgagaccgttcacaggttaaacgtaggtggacatatggtggacgaggtcaacgattcagggatgttccgacggtggctttctgatgattatgagttcttaattggtggagtcagtccatatatgccagatgtaaatatcagctacactgagaaaactcccgcgtatgttgcgccagcttacgtgtactccacgtgtcgcatgatggggaacgcccaagacacttatctaaacctgaatttcaacctgacctggctctttacagtcgatgccgggtttagttaccttgtgaggcttcatttctttgagaagtacctgaacaaagccaatcaacgcgtcttctccatcttccttggaaatcagatggctagggaagagatggacgtgattcggttgagtggtggtcctcggattccgatttatctagatttcagaatatatgttggttccgaaagtgggcccagacctgatctacgacttgacttgcatcctctggtgaaggataatccagagtattatgaagctattctgaatggtgtagagattctcaagctaaacaactcaggtaatctcgctatcatccaagacaatgaactaaaaccaaatcctccactatcatcgaacttgacaccaaaccatgtaacgcagcagatcaaaggtaagtcttcacatcttctggtgaaaatcttcatagccgttggtcccggaactgggctggcgactttcgttgttgttctcatgttgtggatgcgtcagatgaagaggaagaataggaaggaagaaagggtcgtcatgttcaagaaactactgaatatgtacacttatgcagaactaaagaaaattacaaagtcattttcttacataattgggaaaggaggatttggaactgtttatggaggaaaccttagtaatggtcgtaaggttgcagtaaaagttttgaaagatttgaagggaagtgctgaagatttcatcaatgaagttgcaagcatgagccaaacatctcatgtgaacattgtttctcttcttggtttctgcttcgaagggtctaagagagccattgtgtatgagtttttggagaatgggtctctcgatcagttcatgtctagaaataagtcattgacacaggatgtaacaacactatatggaatcgcgctaggcatcgctcggggattggagtatttgcattatggctgcaaaacaagaattgtgcatttcgacattaaacctcagaatattctgttagatggcaatctttgtcctaaagtctcagactttggccttgctaagctttgtgagaaaagagaaagtgtattgtcattgatggacacaagaggaactataggttacattgcaccagaggtcttctcaagaatgtatggcagagtctcacataagtctgatgtgtatagctttggaatgcttgtcatcgacatgattggagcaaggagcaaagaaatagtagaaactgttgattccgccgctagttcaacttactttccagattggatttataaggatcttgaggatggagaacaaacatggatatttggtgatgaaataaccaaagaagaaaaagagattgctaagaagatgattgtggtaggactctggtgtatccaaccatgcccatcagatcgtccatcgatgaatagagtcgttgaaatgatggaaggaagtttagatgctcttgaaattcctccaaaaccttctatgcatatctccactgaggttattaccgaatcttcttcactctctgatggcggggaagatgtataa

SEQ ID NO: 80895 - protein, 806 aa, Arabidopsis thaliana
  peptide (1)..(806): Ceres Seq. ID no. 12657657
  misc_feature (1)..(804): Homolog of NCBI NO: 15241610 NR Description: receptor protein kinase - like protein; protein At5g39020.1 [Arabidopsis thaliana] >gi|10177547|dbj|BAB10826.1|
  misc_feature (1)..(520): Homolog of NCBI NO: 15241606 NR Description: protein kinase - like protein; protein id:
  misc_feature (484)..(806): Homolog of NCBI NO: 15241606 NR Description: protein kinase - like protein; protein id:
  misc_feature (1)..(479): Homolog of NCBI NO: 20147233 NR Description: AT5g38990/K15E6_170 [Arabidopsis thaliana]
  misc_feature (484)..(806): Homolog of NCBI NO: 20147233 NR Description: AT5g38990/K15E6_170 [Arabidopsis thaliana]
  misc_feature (1)..(479): Homolog of NCBI NO: 15241605 NR Description: protein kinase - like protein; protein id:
  misc_feature (484)..(806): Homolog of NCBI NO: 15241605 NR Description: protein kinase - like protein; protein id:
  misc_feature (439)..(801): Homolog of NCBI NO: 15240865 NR Description: receptor serine/threonine protein kinase - like; id: At5g38260.1 [Arabidopsis thaliana]
  misc_feature (2)..(461): Homolog of NCBI NO: 15230520 NR Description: receptor-protein kinase-like protein; protein id:
  misc_feature (484)..(802): Homolog of NCBI NO: 15230520 NR Description: receptor-protein kinase-like protein; protein id:
MICFILFVFSFLVSVSATAPYKPDDVFLINCGETDVPFDNHGRTWTQEEKNILPKNSDNASFSSVVSYKEESGIPQVPYMTARIFRSDFTYSFPVSPGWKFLRLYFYPTSYKSGFDAVNSFVSVTVNDFTLLQNFSADLTVKASIPESKSLIKEFIVPVYLTLNLTFRPSNNSLAFVNGIEIVSMPDRFYSKGGFDDLITNVGSLIDFEIDNSTASETVHRLNVGGHMVDEVNDSGMFRRWLSDDYEFLIGGVSPYMPDVNISYTEKTPAYVAPAYVYSTCRMMGNAQDTYLNLNFNLTWLFTVDAGFSYLVRLHFFEKYLNKANQRVFSIFLGNQMAREEMDVIRLSGGPRIPIYLDFRIYVGSESGPRPDLRLDLHPLVKDNPEYYEAILNGVEILKLNNSGNLAIIQDNELKPNPPLSSNLTPNHVTQQIKGKSSHLLVKIFIAVGPGTGLATFVVVLMLWMRQMKRKNRKEERVVMFKKLLNMYTYAELKKITKSFSYIIGKGGFGTVYGGNLSNGRKVAVKVLKDLKGSAEDFINEVASMSQTSHVNIVSLLGFCFEGSKRAIVYEFLENGSLDQFMSRNKSLTQDVTTLYGIALGIARGLEYLHYGCKTRIVHFDIKPQNILLDGNLCPKVSDFGLAKLCEKRESVLSLMDTRGTIGYIAPEVFSRMYGRVSHKSDVYSFGMLVIDMIGARSKEIVETVDSAASSTYFPDWIYKDLEDGEQTWIFGDEITKEEKEIAKKMIVVGLWCIQPCPSDRPSMNRVVEMMEGSLDALEIPPKPSMHISTEVITESSSLSDGGEDV

SEQ ID NO: 80896 - protein, 727 aa, Arabidopsis thaliana
  peptide (1)..(727): Ceres Seq. ID no. 12657658
  misc_feature (1)..(725): Homolog of NCBI NO: 15241610 NR Description: receptor protein kinase - like protein; protein At5g39020.1 [Arabidopsis thaliana] >gi|10177547|dbj|BAB10826.1|
  misc_feature (1)..(441): Homolog of NCBI NO: 15241606 NR Description: protein kinase - like protein; protein id:
  misc_feature (405)..(727): Homolog of NCBI NO: 15241606 NR Description: protein kinase - like protein; protein id:
  misc_feature (1)..(400): Homolog of NCBI NO: 20147233 NR Description: AT5g38990/K15E6_170 [Arabidopsis thaliana]
  misc_feature (405)..(727): Homolog of NCBI NO: 20147233 NR Description: AT5g38990/K15E6_170 [Arabidopsis thaliana]
  misc_feature (1)..(400): Homolog of NCBI NO: 15241605 NR Description: protein kinase - like protein; protein id:
  misc_feature (405)..(727): Homolog of NCBI NO: 15241605 NR Description: protein kinase - like protein; protein id:
  misc_feature (360)..(722): Homolog of NCBI NO: 15240865 NR Description: receptor serine/threonine protein kinase - like; id: At5g38260.1 [Arabidopsis thaliana]
  misc_feature (1)..(382): Homolog of NCBI NO: 15230520 NR Description: receptor-protein kinase-like protein; protein id:
  misc_feature (405)..(723): Homolog of NCBI NO: 15230520 NR Description: receptor-protein kinase-like protein; protein id:
MTARIFRSDFTYSFPVSPGWKFLRLYFYPTSYKSGFDAVNSFVSVTVNDFTLLQNFSADLTVKASIPESKSLIKEFIVPVYLTLNLTFRPSNNSLAFVNGIEIVSMPDRFYSKGGFDDLITNVGSLIDFEIDNSTASETVHRLNVGGHMVDEVNDSGMFRRWLSDDYEFLIGGVSPYMPDVNISYTEKTPAYVAPAYVYSTCRMMGNAQDTYLNLNFNLTWLFTVDAGFSYLVRLHFFEKYLNKANQRVFSIFLGNQMAREEMDVIRLSGGPRIPIYLDFRIYVGSESGPRPDLRLDLHPLVKDNPEYYEAILNGVEILKLNNSGNLAIIQDNELKPNPPLSSNLTPNHVTQQIKGKSSHLLVKIFIAVGPGTGLATFVVVLMLWMRQMKRKNRKEERVVMFKKLLNMYTYAELKKITKSFSYIIGKGGFGTVYGGNLSNGRKVAVKVLKDLKGSAEDFINEVASMSQTSHVNIVSLLGFCFEGSKRAIVYEFLENGSLDQFMSRNKSLTQDVTTLYGIALGIARGLEYLHYGCKTRIVHFDIKPQNILLDGNLCPKVSDFGLAKLCEKRESVLSLMDTRGTIGYIAPEVFSRMYGRVSHKSDVYSFGMLVIDMIGARSKEIVETVDSAASSTYFPDWIYKDLEDGEQTWIFGDEITKEEKEIAKKMIVVGLWCIQPCPSDRPSMNRVVEMMEGSLDALEIPPKPSMHISTEVITESSSLSDGGEDV

SEQ ID NO: 80897 - protein, 622 aa, Arabidopsis thaliana
  peptide (1)..(622): Ceres Seq. ID no. 12657659
  misc_feature (1)..(620): Homolog of NCBI NO: 15241610 NR Description: receptor protein kinase - like protein; protein At5g39020.1 [Arabidopsis thaliana] >gi|10177547|dbj|BAB10826.1|
  misc_feature (1)..(336): Homolog of NCBI NO: 15241606 NR Description: protein kinase - like protein; protein id:
  misc_feature (300)..(622): Homolog of NCBI NO: 15241606 NR Description: protein kinase - like protein; protein id:
  misc_feature (1)..(295): Homolog of NCBI NO: 20147233 NR Description: AT5g38990/K15E6_170 [Arabidopsis thaliana]
  misc_feature (300)..(622): Homolog of NCBI NO: 20147233 NR Description: AT5g38990/K15E6_170 [Arabidopsis thaliana]
  misc_feature (1)..(295): Homolog of NCBI NO: 15241605 NR Description: protein kinase - like protein; protein id:
  misc_feature (300)..(622): Homolog of NCBI NO: 15241605 NR Description: protein kinase - like protein; protein id:
  misc_feature (255)..(617): Homolog of NCBI NO: 15240865 NR Description: receptor serine/threonine protein kinase - like; id: At5g38260.1 [Arabidopsis thaliana]
  misc_feature (1)..(277): Homolog of NCBI NO: 15230520 NR Description: receptor-protein kinase-like protein; protein id:
  misc_feature (300)..(618): Homolog of NCBI NO: 15230520 NR Description: receptor-protein kinase-like protein; protein id:
MPDRFYSKGGFDDLITNVGSLIDFEIDNSTASETVHRLNVGGHMVDEVNDSGMFRRWLSDDYEFLIGGVSPYMPDVNISYTEKTPAYVAPAYVYSTCRMMGNAQDTYLNLNFNLTWLFTVDAGFSYLVRLHFFEKYLNKANQRVFSIFLGNQMAREEMDVIRLSGGPRIPIYLDFRIYVGSESGPRPDLRLDLHPLVKDNPEYYEAILNGVEILKLNNSGNLAIIQDNELKPNPPLSSNLTPNHVTQQIKGKSSHLLVKIFIAVGPGTGLATFVVVLMLWMRQMKRKNRKEERVVMFKKLLNMYTYAELKKITKSFSYIIGKGGFGTVYGGNLSNGRKVAVKVLKDLKGSAEDFINEVASMSQTSHVNIVSLLGFCFEGSKRAIVYEFLENGSLDQFMSRNKSLTQDVTTLYGIALGIARGLEYLHYGCKTRIVHFDIKPQNILLDGNLCPKVSDFGLAKLCEKRESVLSLMDTRGTIGYIAPEVFSRMYGRVSHKSDVYSFGMLVIDMIGARSKEIVETVDSAASSTYFPDWIYKDLEDGEQTWIFGDEITKEEKEIAKKMIVVGLWCIQPCPSDRPSMNRVVEMMEGSLDALEIPPKPSMHISTEVITESSSLSDGGEDV

SEQ ID NO: 80898 - DNA, 833 bp, Arabidopsis thaliana
  misc_feature (1)..(833): Ceres Seq. ID no. 12657663
  misc_feature: MA Experiment ID: 20000451 Result: Up-regulated in Transcription
  misc_feature: MA Experiment 20000451 PARAMETER Experiment Name: At_CS6879_Shoots-Roots_P Parameter: Age (day) Value: 14
  misc_feature: MA Experiment 20000451 PARAMETER Experiment Name: At_CS6879_Shoots-Roots_P Parameter: Organism Value: A. thaliana
  misc_feature: MA Experiment 20000451 PARAMETER Experiment Name: At_CS6879_Shoots-Roots_P Parameter: Plant Line Value: CS6879 vs. WS
  misc_feature: MA Experiment 20000451 PARAMETER Experiment Name: At_CS6879_Shoots-Roots_P Parameter: Tissue Value: Roots
cacacacatataaaagtctttgaaaagcattagcatatccctttgtttcaaaatgagggtttccaagtctctcatcctgattaccttatcggctttggtcatttcctttgctgaagcttatgatccaagtccacttcaagatttctgtgtggccattgatgacctcaaaaatggtgtttttgtgaatggaaagttctgtaaggatcccaagcaagcgaaggcagaataattcttcttctcaggcctcaaccaggcaggaagcactaataataaagtcagatccaacgtgacaacagtcaatgtcgaccagattccagggttaaacactatgggaatatccttggtccgcatagactatgcaccatatggacaaaacccgcctcacacgcaccctcgtgctactgagatccttgtccttatcgagggaacgttatatgttggttttgtctcttccaatcaagacaataaccgtctattcgccaaagttctgtacccgggtgacgtgtttgtgtttcccataggaatgatccattttcaagtgaatatcgggaaaacgcctgcggtggccttcgctggattgagtagtcagaatgctggtgttatcacgatcgctgatactgtgtttgggtcaacgcctccgattaatccagatattttagctcaagcatttcaattagatgtcaatattgtcgaggatcttgaggccaagtttagaaactaaatctagtcaccacaatacgagtgtttatggttgtaacacttaagtaatgatgtaacaagagttaaagatttatgctcaatataataaagaaaggtgttgttcacctaatttg

SEQ ID NO: 80899 - protein, 130 aa, Arabidopsis thaliana
  peptide (1)..(130): Ceres Seq. ID no. 12657664
  misc_feature (1)..(122): Pfam Name: Cupin Pfam Description: Cupin
  misc_feature (1)..(130): Homolog of NCBI NO: 18202454 NR Description: Germin-like protein subfamily 1 member 13
  misc_feature (1)..(130): Homolog of NCBI NO: 15241636 NR Description: germin -like protein; protein id: At5g39110.1
  misc_feature (1)..(130): Homolog of NCBI NO: 15241653 NR Description: germin - like protein; protein id: At5g39150.1
  misc_feature (1)..(130): Homolog of NCBI NO: 15241660 NR Description: germin-like protein; protein id: At5g39180.1
  misc_feature (1)..(130): Homolog of NCBI NO: 15241638 NR Description: germin - like protein; protein id: At5g39120.1
  misc_feature (1)..(128): Homolog of NCBI NO: 22327459 NR Description: germin-like protein (GLP2a) copy1; protein id:
  misc_feature (1)..(128): Homolog of NCBI NO: 15241662 NR Description: germin-like protein (GLP2a) copy2; protein id:
  misc_feature (1)..(128): Homolog of NCBI NO: 15241640 NR Description: germin - like protein; protein id: At5g39130.1, by cDNA: gi_17065441 [Arabidopsis thaliana]
  misc_feature (1)..(128): Homolog of NCBI NO: 2129594 NR Description: germin type 2 - Arabidopsis thaliana
  misc_feature (1)..(128): Homolog of NCBI NO: 15230587 NR Description: germin-like protein; protein id: At3g05950.1
MGISLVRIDYAPYGQNPPHTHPRATEILVLIEGTLYVGFVSSNQDNNRLFAKVLYPGDVFVFPIGMIHFQVNIGKTPAVAFAGLSSQNAGVITIADTVFGSTPPINPDILAQAFQLDVNIVEDLEAKFRN

SEQ ID NO: 80900 - protein, 65 aa, Arabidopsis thaliana
  peptide (1)..(65): Ceres Seq. ID no. 12657665
  misc_feature (1)..(57): Pfam Name: Cupin Pfam Description: Cupin
  misc_feature (1)..(65): Homolog of NCBI NO: 18202454 NR Description: Germin-like protein subfamily 1 member 13
  misc_feature (1)..(65): Homolog of NCBI NO: 15241636 NR Description: germin -like protein; protein id: At5g39110.1
  misc_feature (1)..(65): Homolog of NCBI NO: 15241653 NR Description: germin - like protein; protein id: At5g39150.1
  misc_feature (1)..(65): Homolog of NCBI NO: 15241660 NR Description: germin-like protein; protein id: At5g39180.1
  misc_feature (1)..(65): Homolog of NCBI NO: 15241638 NR Description: germin - like protein; protein id: At5g39120.1
  misc_feature (1)..(63): Homolog of NCBI NO: 22327459 NR Description: germin-like protein (GLP2a) copy1; protein id:
  misc_feature (1)..(63): Homolog of NCBI NO: 15241662 NR Description: germin-like protein (GLP2a) copy2; protein id:
  misc_feature (1)..(63): Homolog of NCBI NO: 15241640 NR Description: germin - like protein; protein id: At5g39130.1, by cDNA: gi_17065441 [Arabidopsis thaliana]
  misc_feature (1)..(63): Homolog of NCBI NO: 2129594 NR Description: germin type 2 - Arabidopsis thaliana
  misc_feature (1)..(63): Homolog of NCBI NO: 15230587 NR Description: germin-like protein; protein id: At3g05950.1
MIHFQVNIGKTPAVAFAGLSSQNAGVITIADTVFGSTPPINPDILAQAFQLDVNIVEDLEAKFRN

SEQ ID NO: 80901 - DNA, 669 bp, Arabidopsis thaliana
  misc_feature (1)..(669): Ceres Seq. ID no. 12657666
  misc_feature: MA Experiment ID: 20000327 Result: Up-regulated in Transcription
  misc_feature: MA Experiment 20000327 PARAMETER Experiment Name: At_42deg_Heat_Sub_P Parameter: Age (day) Value: 14
  misc_feature: MA Experiment 20000327 PARAMETER Experiment Name: At_42deg_Heat_Sub_P Parameter: Organism Value: A. thaliana
  misc_feature: MA Experiment 20000327 PARAMETER Experiment Name: At_42deg_Heat_Sub_P Parameter: Plant Line Value: WS
  misc_feature: MA Experiment 20000327 PARAMETER Experiment Name: At_42deg_Heat_Sub_P Parameter: Temperature (deg C) Value: 42 vs. 22
  misc_feature: MA Experiment 20000327 PARAMETER Experiment Name: At_42deg_Heat_Sub_P Parameter: Timepoint (hr) Value: 1
  misc_feature: MA Experiment 20000327 PARAMETER Experiment Name: At_42deg_Heat_Sub_P Parameter: Tissue Value: Aerial
  misc_feature: MA Experiment ID: 20000328 Result: Up-regulated in Transcription
  misc_feature: MA Experiment 20000328 PARAMETER Experiment Name: At_42deg_Heat_Sub_P Parameter: Age (day) Value: 14
  misc_feature: MA Experiment 20000328 PARAMETER Experiment Name: At_42deg_Heat_Sub_P Parameter: Organism Value: A. thaliana
  misc_feature: MA Experiment 20000328 PARAMETER Experiment Name: At_42deg_Heat_Sub_P Parameter: Plant Line Value: WS
  misc_feature: MA Experiment 20000328 PARAMETER Experiment Name: At_42deg_Heat_Sub_P Parameter: Temperature (deg C) Value: 42 vs. 22
  misc_feature: MA Experiment 20000328 PARAMETER Experiment Name: At_42deg_Heat_Sub_P Parameter: Timepoint (hr) Value: 6
  misc_feature: MA Experiment 20000328 PARAMETER Experiment Name: At_42deg_Heat_Sub_P Parameter: Tissue Value: Aerial
atgaggttttccaagtctctcatcctgattaccttatcggctttggtcatttcctttgccgaagctaatgatccaagtccacttcaagacttttgtgtggccattggcgacctcaaaaatggtgtttttgtgaatggtaagttttgcaaggatccaaagcaagcaaaggcagaagatttcttttactcaggcctcaaccaagcaggaaccactaataataaagtcaaatccaacgtgacaacagtcaatgtcgatcagattccagggttaaacactttgggaatatccttggtccgcatagactatgcgccatatggtcaaaacccgcctcacacacaccctcgtgccactgagatccttgttcttgttgagggaacattatatgttggttttgtctcttccaatcaagacaacaaccgtttattcgctaaagtgctgaacccgggcgacgtgtttgtgttccccataggaatgatccattttcaagtgaatatcgggaagacccctgcagtggcctttgctggactaagtagtcaaaatgctggtgtcatcacgattgcagatactgtgtttgggtcaacgcctccgattaatccagatattttggctcaggcgtttcagttagacgtcaatgttgttaaagaccttgaggccaagtttaaaaactaa

SEQ ID NO: 80902 - protein, 222 aa, Arabidopsis thaliana
  peptide (1)..(222): Ceres Seq. ID no. 12657667
  misc_feature (63)..(214): Pfam Name: Cupin Pfam Description: Cupin
  misc_feature (1)..(222): Homolog of NCBI NO: 15241636 NR Description: germin -like protein; protein id: At5g39110.1
  misc_feature (1)..(222): Homolog of NCBI NO: 18202454 NR Description: Germin-like protein subfamily 1 member 13
  misc_feature (1)..(222): Homolog of NCBI NO: 15241653 NR Description: germin - like protein; protein id: At5g39150.1
  misc_feature (1)..(222): Homolog of NCBI NO: 15241660 NR Description: germin-like protein; protein id: At5g39180.1
  misc_feature (1)..(222): Homolog of NCBI NO: 15241638 NR Description: germin - like protein; protein id: At5g39120.1
  misc_feature (1)..(220): Homolog of NCBI NO: 22327459 NR Description: germin-like protein (GLP2a) copy1; protein id:
  misc_feature (1)..(220): Homolog of NCBI NO: 15241662 NR Description: germin-like protein (GLP2a) copy2; protein id:
  misc_feature (1)..(220): Homolog of NCBI NO: 15241640 NR Description: germin - like protein; protein id: At5g39130.1, by cDNA: gi_17065441 [Arabidopsis thaliana]
  misc_feature (1)..(220): Homolog of NCBI NO: 2129594 NR Description: germin type 2 - Arabidopsis thaliana
  misc_feature (12)..(222): Homolog of NCBI NO: 15230587 NR Description: germin-like protein; protein id: At3g05950.1
MRFSKSLILITLSALVISFAEANDPSPLQDFCVAIGDLKNGVFVNGKFCKDPKQAKAEDFFYSGLNQAGTTNNKVKSNVTTVNVDQIPGLNTLGISLVRIDYAPYGQNPPHTHPRATEILVLVEGTLYVGFVSSNQDNNRLFAKVLNPGDVFVFPIGMIHFQVNIGKTPAVAFAGLSSQNAGVITIADTVFGSTPPINPDILAQAFQLDVNVVKDLEAKFKN

SEQ ID NO: 80903 - DNA, 831 bp, Arabidopsis thaliana
  misc_feature (1)..(831): Ceres Seq. ID no. 12657671
  misc_feature: MA Experiment ID: 20000314 Result: Down-regulated in Transcription
  misc_feature: MA Experiment 20000314 PARAMETER Experiment Name: At_14day_Shoots-Roots_Sub_P Parameter: Age (day) Value: 14
  misc_feature: MA Experiment 20000314 PARAMETER Experiment Name: At_14day_Shoots-Roots_Sub_P Parameter: Organism Value: A. thaliana
  misc_feature: MA Experiment 20000314 PARAMETER Experiment Name: At_14day_Shoots-Roots_Sub_P Parameter: Plant Line Value: WS
  misc_feature: MA Experiment 20000314 PARAMETER Experiment Name: At_14day_Shoots-Roots_Sub_P Parameter: Tissue Value: Roots vs. Whole Plant
  misc_feature: MA Experiment ID: 20000315 Result: Down-regulated in Transcription
  misc_feature: MA Experiment 20000315 PARAMETER Experiment Name: At_14day_Shoots-Roots_Sub_P Parameter: Age (day) Value: 14
  misc_feature: MA Experiment 20000315 PARAMETER Experiment Name: At_14day_Shoots-Roots_Sub_P Parameter: Organism Value: A. thaliana
  misc_feature: MA Experiment 20000315 PARAMETER Experiment Name: At_14day_Shoots-Roots_Sub_P Parameter: Plant Line Value: WS
  misc_feature: MA Experiment 20000315 PARAMETER Experiment Name: At_14day_Shoots-Roots_Sub_P Parameter: Tissue Value: Shoots vs. Whole Plant
  misc_feature: MA Experiment ID: 20000440 Result: Down-regulated in Transcription
  misc_feature: MA Experiment 20000440 PARAMETER Experiment Name: At_Closed-Flower__Sub_P Parameter: Tissue Value: Closed Flower vs. Whole Plant
gcataacaaatttagagcgagcaataatgagggtttctcaatctctaatcccttttgccataattgctttggtcctttcctttgtcaatgcttatgatccaagtccactccaagacttctgtgttgccattgatgacctaaaaggcgtttttgtgaatggtaggttttgtaaagacccggagcgagtcgatgcaaaagattttttcttctcaggtctcaatgtgcccgggaacaccaataatcaagttggctctaatgtgaccactgttaatgttgatcagatccccgggctaaacaccatgggaatatcattggtccgcatagactacgcaccgcatggccaaaatccacctcacacgcaccctcgtggctcagagatccttgtccttgtcgaaggaacattatacgtcggttttgtctcttccaatcaagataacaaccggttattcgccaaagtattgcaccccggtgatgtttttgtgttccccataggaatgatccattttcagttaaatatcgggaaaattccagcaattgcttttgcgggattgagtagccagaacgctggtgttatcacaattgcaaacactgtgttcgggtcaaaccctccgatttatccagagcttcttgccagggcgttccagttggatgcaaatgttgtcaaagaacttcaagccaagtttgggtccatatgaactgatcatctaagtcgtttaagagtgtttatcattgaaacacaaattaaaggaatacactactatgaaatatttatgtaacaaagtaaaaatggcttatgtacctatttctatattataatataacaactttaat

SEQ ID NO: 80904 - protein, 230 aa, Arabidopsis thaliana
  peptide (1)..(230): Ceres Seq. ID no. 12657672
  misc_feature (70)..(221): Pfam Name: Cupin Pfam Description: Cupin
  misc_feature (9)..(230): Homolog of NCBI NO: 15241640 NR Description: germin - like protein; protein id: At5g39130.1, by cDNA: gi_17065441 [Arabidopsis thaliana]
  misc_feature (9)..(230): Homolog of NCBI NO: 15241662 NR Description: germin-like protein (GLP2a) copy2; protein id:
  misc_feature (9)..(230): Homolog of NCBI NO: 22327459 NR Description: germin-like protein (GLP2a) copy1; protein id:
  misc_feature (9)..(230): Homolog of NCBI NO: 2129594 NR Description: germin type 2 - Arabidopsis thaliana
  misc_feature (9)..(227): Homolog of NCBI NO: 18202454 NR Description: Germin-like protein subfamily 1 member 13
  misc_feature (9)..(227): Homolog of NCBI NO: 15241636 NR Description: germin -like protein; protein id: At5g39110.1
  misc_feature (9)..(227): Homolog of NCBI NO: 15241653 NR Description: germin - like protein; protein id: At5g39150.1
  misc_feature (9)..(227): Homolog of NCBI NO: 15241638 NR Description: germin - like protein; protein id: At5g39120.1
  misc_feature (9)..(227): Homolog of NCBI NO: 15241660 NR Description: germin-like protein; protein id: At5g39180.1
  misc_feature (59)..(230): Homolog of NCBI NO: 1755186 NR Description: germin-like protein [Arabidopsis thaliana]
ITNLERAIMRVSQSLIPFAIIALVLSFVNAYDPSPLQDFCVAIDDLKGVFVNGRFCKDPERVDAKDFFFSGLNVPGNTNNQVGSNVTTVNVDQIPGLNTMGISLVRIDYAPHGQNPPHTHPRGSEILVLVEGTLYVGFVSSNQDNNRLFAKVLHPGDVFVFPIGMIHFQLNIGKIPAIAFAGLSSQNAGVITIANTVFGSNPPIYPELLARAFQLDANVVKELQAKFGSI

SEQ ID NO: 80905 - protein, 222 aa, Arabidopsis thaliana
  peptide (1)..(222): Ceres Seq. ID no. 12657673
  misc_feature (62)..(213): Pfam Name: Cupin Pfam Description: Cupin
  misc_feature (1)..(222): Homolog of NCBI NO: 15241640 NR Description: germin - like protein; protein id: At5g39130.1, by cDNA: gi_17065441 [Arabidopsis thaliana]
  misc_feature (1)..(222): Homolog of NCBI NO: 15241662 NR Description: germin-like protein (GLP2a) copy2; protein id:
  misc_feature (1)..(222): Homolog of NCBI NO: 22327459 NR Description: germin-like protein (GLP2a) copy1; protein id:
  misc_feature (1)..(222): Homolog of NCBI NO: 2129594 NR Description: germin type 2 - Arabidopsis thaliana
  misc_feature (1)..(219): Homolog of NCBI NO: 18202454 NR Description: Germin-like protein subfamily 1 member 13
  misc_feature (1)..(219): Homolog of NCBI NO: 15241636 NR Description: germin -like protein; protein id: At5g39110.1
  misc_feature (1)..(219): Homolog of NCBI NO: 15241653 NR Description: germin - like protein; protein id: At5g39150.1
  misc_feature (1)..(219): Homolog of NCBI NO: 15241638 NR Description: germin - like protein; protein id: At5g39120.1
  misc_feature (1)..(219): Homolog of NCBI NO: 15241660 NR Description: germin-like protein; protein id: At5g39180.1
  misc_feature (51)..(222): Homolog of NCBI NO: 1755186 NR Description: germin-like protein [Arabidopsis thaliana]
MRVSQSLIPFAIIALVLSFVNAYDPSPLQDFCVAIDDLKGVFVNGRFCKDPERVDAKDFFFSGLNVPGNTNNQVGSNVTTVNVDQIPGLNTMGISLVRIDYAPHGQNPPHTHPRGSEILVLVEGTLYVGFVSSNQDNNRLFAKVLHPGDVFVFPIGMIHFQLNIGKIPAIAFAGLSSQNAGVITIANTVFGSNPPIYPELLARAFQLDANVVKELQAKFGSI

SEQ ID NO: 80906 - protein, 131 aa, Arabidopsis thaliana
  peptide (1)..(131): Ceres Seq. ID no. 12657674
  misc_feature (1)..(122): Pfam Name: Cupin Pfam Description: Cupin
  misc_feature (1)..(131): Homolog of NCBI NO: 15241640 NR Description: germin - like protein; protein id: At5g39130.1, by cDNA: gi_17065441 [Arabidopsis thaliana]
  misc_feature (1)..(131): Homolog of NCBI NO: 15241662 NR Description: germin-like protein (GLP2a) copy2; protein id:
  misc_feature (1)..(131): Homolog of NCBI NO: 22327459 NR Description: germin-like protein (GLP2a) copy1; protein id:
  misc_feature (1)..(131): Homolog of NCBI NO: 2129594 NR Description: germin type 2 - Arabidopsis thaliana
  misc_feature (1)..(128): Homolog of NCBI NO: 18202454 NR Description: Germin-like protein subfamily 1 member 13
  misc_feature (1)..(128): Homolog of NCBI NO: 15241636 NR Description: germin -like protein; protein id: At5g39110.1
  misc_feature (1)..(128): Homolog of NCBI NO: 15241653 NR Description: germin - like protein; protein id: At5g39150.1
  misc_feature (1)..(128): Homolog of NCBI NO: 15241638 NR Description: germin - like protein; protein id: At5g39120.1
  misc_feature (1)..(128): Homolog of NCBI NO: 15241660 NR Description: germin-like protein; protein id: At5g39180.1
  misc_feature (1)..(131): Homolog of NCBI NO: 1755186 NR Description: germin-like protein [Arabidopsis thaliana]
MGISLVRIDYAPHGQNPPHTHPRGSEILVLVEGTLYVGFVSSNQDNNRLFAKVLHPGDVFVFPIGMIHFQLNIGKIPAIAFAGLSSQNAGVITIANTVFGSNPPIYPELLARAFQLDANVVKELQAKFGSI

SEQ ID NO: 80907 - DNA, 666 bp, Arabidopsis thaliana
  misc_feature (1)..(666): Ceres Seq. ID no. 12657678
  misc_feature: MA Experiment ID: 20000355 Result: Down-regulated in Transcription
  misc_feature: MA Experiment 20000355 PARAMETER Experiment Name: At_Siliques_Sub_P Parameter: Age (day) Value: 21
  misc_feature: MA Experiment 20000355 PARAMETER Experiment Name: At_Siliques_Sub_P Parameter: Organism Value: A. thaliana
  misc_feature: MA Experiment 20000355 PARAMETER Experiment Name: At_Siliques_Sub_P Parameter: Plant Line Value: WS
  misc_feature: MA Experiment 20000355 PARAMETER Experiment Name: At_Siliques_Sub_P Parameter: Tissue Value: Less Than 5mm Siliques vs. Whole Plant
  misc_feature: MA Experiment ID: 20000440 Result: Down-regulated in Transcription
  misc_feature: MA Experiment 20000440 PARAMETER Experiment Name: At_Closed-Flower__Sub_P Parameter: Tissue Value: Closed Flower vs. Whole Plant
atgaaggtgtccatgtctctcatcctgataaccttatcagctttggtcaccattgccaaagcatatgatccaagtccacttcaagacttctgtgtggccattgatgaccctaaaaatggtgtttttgtgaatggtaagttttgcaaggatccaaagcaagcaaaggcagaagatttcttttcctcaggcctcaaccaagcaggaatcactaataacaaagtccaatccaacgtgacaacagtcaatgtcgatcagattccagggttaaacactttgggaatatccttggtccgcatagactatgcgccatatggtcaaaacccgcctcacacacaccctcgtgccactgagatccttgttcttgttgaaggaacattatatgttggttttgtctcttcgaatcaagacaacaaccgtttattcgccaaagtgctgaacccgggagacgtgttcgtgttccccataggaatgatccattttcaagtgaatatcgggaagacccccgcagtggcctttgctggactaagtagtcaaaatgctggtgtcatcacgatcgcagatacagtgtttggatcaacgcctccgattaatccagatattttggctcaggcgtttcagttagatgtcaatgttgtcaaagaccttgaggccaagtttaaaaactaa

SEQ ID NO: 80908 - protein, 221 aa, Arabidopsis thaliana
  peptide (1)..(221): Ceres Seq. ID no. 12657679
  misc_feature (62)..(213): Pfam Name: Cupin Pfam Description: Cupin
  misc_feature (1)..(221): Homolog of NCBI NO: 15241653 NR Description: germin - like protein; protein id: At5g39150.1
  misc_feature (1)..(221): Homolog of NCBI NO: 15241660 NR Description: germin-like protein; protein id: At5g39180.1
  misc_feature (1)..(221): Homolog of NCBI NO: 15241638 NR Description: germin - like protein; protein id: At5g39120.1
  misc_feature (1)..(221): Homolog of NCBI NO: 18202454 NR Description: Germin-like protein subfamily 1 member 13
  misc_feature (1)..(221): Homolog of NCBI NO: 15241636 NR Description: germin -like protein; protein id: At5g39110.1
  misc_feature (1)..(219): Homolog of NCBI NO: 22327459 NR Description: germin-like protein (GLP2a) copy1; protein id:
  misc_feature (1)..(219): Homolog of NCBI NO: 15241662 NR Description: germin-like protein (GLP2a) copy2; protein id:
  misc_feature (1)..(219): Homolog of NCBI NO: 15241640 NR Description: germin - like protein; protein id: At5g39130.1, by cDNA: gi_17065441 [Arabidopsis thaliana]
  misc_feature (1)..(219): Homolog of NCBI NO: 2129594 NR Description: germin type 2 - Arabidopsis thaliana
  misc_feature (3)..(221): Homolog of NCBI NO: 15230587 NR Description: germin-like protein; protein id: At3g05950.1
MKVSMSLILITLSALVTIAKAYDPSPLQDFCVAIDDPKNGVFVNGKFCKDPKQAKAEDFFSSGLNQAGITNNKVQSNVTTVNVDQIPGLNTLGISLVRIDYAPYGQNPPHTHPRATEILVLVEGTLYVGFVSSNQDNNRLFAKVLNPGDVFVFPIGMIHFQVNIGKTPAVAFAGLSSQNAGVITIADTVFGSTPPINPDILAQAFQLDVNVVKDLEAKFKN

SEQ ID NO: 80909 - protein, 217 aa, Arabidopsis thaliana
  peptide (1)..(217): Ceres Seq. ID no. 12657680
  misc_feature (58)..(209): Pfam Name: Cupin Pfam Description: Cupin
  misc_feature (1)..(217): Homolog of NCBI NO: 15241653 NR Description: germin - like protein; protein id: At5g39150.1
  misc_feature (1)..(217): Homolog of NCBI NO: 15241660 NR Description: germin-like protein; protein id: At5g39180.1
  misc_feature (1)..(217): Homolog of NCBI NO: 15241638 NR Description: germin - like protein; protein id: At5g39120.1
  misc_feature (1)..(217): Homolog of NCBI NO: 18202454 NR Description: Germin-like protein subfamily 1 member 13
  misc_feature (1)..(217): Homolog of NCBI NO: 15241636 NR Description: germin -like protein; protein id: At5g39110.1
  misc_feature (1)..(215): Homolog of NCBI NO: 22327459 NR Description: germin-like protein (GLP2a) copy1; protein id:
  misc_feature (1)..(215): Homolog of NCBI NO: 15241662 NR Description: germin-like protein (GLP2a) copy2; protein id:
  misc_feature (1)..(215): Homolog of NCBI NO: 15241640 NR Description: germin - like protein; protein id: At5g39130.1, by cDNA: gi_17065441 [Arabidopsis thaliana]
  misc_feature (1)..(215): Homolog of NCBI NO: 2129594 NR Description: germin type 2 - Arabidopsis thaliana
  misc_feature (1)..(217): Homolog of NCBI NO: 15230587 NR Description: germin-like protein; protein id: At3g05950.1
MSLILITLSALVTIAKAYDPSPLQDFCVAIDDPKNGVFVNGKFCKDPKQAKAEDFFSSGLNQAGITNNKVQSNVTTVNVDQIPGLNTLGISLVRIDYAPYGQNPPHTHPRATEILVLVEGTLYVGFVSSNQDNNRLFAKVLNPGDVFVFPIGMIHFQVNIGKTPAVAFAGLSSQNAGVITIADTVFGSTPPINPDILAQAFQLDVNVVKDLEAKFKN

SEQ ID NO: 80910 - DNA, 669 bp, Arabidopsis thaliana
  misc_feature (1)..(669): Ceres Seq. ID no. 12657681
  misc_feature: MA Experiment ID: 20000314 Result: Down-regulated in Transcription
  misc_feature: MA Experiment 20000314 PARAMETER Experiment Name: At_14day_Shoots-Roots_Sub_P Parameter: Age (day) Value: 14
  misc_feature: MA Experiment 20000314 PARAMETER Experiment Name: At_14day_Shoots-Roots_Sub_P Parameter: Organism Value: A. thaliana
  misc_feature: MA Experiment 20000314 PARAMETER Experiment Name: At_14day_Shoots-Roots_Sub_P Parameter: Plant Line Value: WS
  misc_feature: MA Experiment 20000314 PARAMETER Experiment Name: At_14day_Shoots-Roots_Sub_P Parameter: Tissue Value: Roots vs. Whole Plant
  misc_feature: MA Experiment ID: 20000315 Result: Down-regulated in Transcription
  misc_feature: MA Experiment 20000315 PARAMETER Experiment Name: At_14day_Shoots-Roots_Sub_P Parameter: Age (day) Value: 14
  misc_feature: MA Experiment 20000315 PARAMETER Experiment Name: At_14day_Shoots-Roots_Sub_P Parameter: Organism Value: A. thaliana
  misc_feature: MA Experiment 20000315 PARAMETER Experiment Name: At_14day_Shoots-Roots_Sub_P Parameter: Plant Line Value: WS
  misc_feature: MA Experiment 20000315 PARAMETER Experiment Name: At_14day_Shoots-Roots_Sub_P Parameter: Tissue Value: Shoots vs. Whole Plant
  misc_feature: MA Experiment ID: 20000440 Result: Down-regulated in Transcription
  misc_feature: MA Experiment 20000440 PARAMETER Experiment Name: At_Closed-Flower__Sub_P Parameter: Tissue Value: Closed Flower vs. Whole Plant
atgagggtttctcaatctcttgtcccttttgccataattgctttggtcctttcctttgtcaatgcttatgatccaagtccactccaagacttctgtgttgccattgatgacctaaaaggcgtttttgtgaatggtaggttttgtaaagacccgaagcgagtcgatgcaaaagattttttcttctcaggtctcaatatgcccgggaacaccaataatcaagttggctctaatgtgaccactgttaatgttgatcagatcccagggctaaacaccatgggaatatcattggtccgcatagactacgcaccgcatggccaaaatccacctcacacgcaccctcgtggctcagagatccttgtccttgtcgaaggaacattatacgtcggttttgtctcttccaatcaagataacaaccggttattcgccaaagtattgcaccccggtgatgttttcgtgttccccataggaatgatccattttcaggtaaatgtggggaaaattccagcagttgcttttgcgggattgagtagccagaacgcaggtgttatcacaattgcaaacactgtgtttgggtccaatcctccgatttatccagagcttcttgccagggcgttccagttggatgcaagtgttgtcaaagaacttcaggccaagtttgggtccatatga

SEQ ID NO: 80911 - protein, 222 aa, Arabidopsis thaliana; identical to SEQ ID NO: 77800
  peptide (1)..(222): Ceres Seq. ID no. 12657682
  misc_feature (62)..(213): Pfam Name: Cupin Pfam Description: Cupin
  misc_feature (1)..(222): Homolog of NCBI NO: 22327459 NR Description: germin-like protein (GLP2a) copy1; protein id:
  misc_feature (1)..(222): Homolog of NCBI NO: 15241662 NR Description: germin-like protein (GLP2a) copy2; protein id:
  misc_feature (1)..(222): Homolog of NCBI NO: 15241640 NR Description: germin - like protein; protein id: At5g39130.1, by cDNA: gi_17065441 [Arabidopsis thaliana]
  misc_feature (1)..(222): Homolog of NCBI NO: 2129594 NR Description: germin type 2 - Arabidopsis thaliana
  misc_feature (1)..(219): Homolog of NCBI NO: 18202454 NR Description: Germin-like protein subfamily 1 member 13
  misc_feature (1)..(219): Homolog of NCBI NO: 15241636 NR Description: germin -like protein; protein id: At5g39110.1
  misc_feature (1)..(219): Homolog of NCBI NO: 15241653 NR Description: germin - like protein; protein id: At5g39150.1
  misc_feature (1)..(219): Homolog of NCBI NO: 15241638 NR Description: germin - like protein; protein id: At5g39120.1
  misc_feature (1)..(219): Homolog of NCBI NO: 15241660 NR Description: germin-like protein; protein id: At5g39180.1
  misc_feature (51)..(222): Homolog of NCBI NO: 1755186 NR Description: germin-like protein [Arabidopsis thaliana]

SEQ ID NO: 80912 - protein, 157 aa, Arabidopsis thaliana; identical to SEQ ID NO: 77801
  peptide (1)..(157): Ceres Seq. ID no. 12657683
  misc_feature (1)..(148): Pfam Name: Cupin Pfam Description: Cupin
  misc_feature (1)..(157): Homolog of NCBI NO: 22327459 NR Description: germin-like protein (GLP2a) copy1; protein id:
  misc_feature (1)..(157): Homolog of NCBI NO: 15241662 NR Description: germin-like protein (GLP2a) copy2; protein id:
  misc_feature (1)..(157): Homolog of NCBI NO: 15241640 NR Description: germin - like protein; protein id: At5g39130.1, by cDNA: gi_17065441 [Arabidopsis thaliana]
  misc_feature (1)..(157): Homolog of NCBI NO: 2129594 NR Description: germin type 2 - Arabidopsis thaliana
  misc_feature (1)..(154): Homolog of NCBI NO: 18202454 NR Description: Germin-like protein subfamily 1 member 13
  misc_feature (1)..(154): Homolog of NCBI NO: 15241636 NR Description: germin -like protein; protein id: At5g39110.1
  misc_feature (1)..(154): Homolog of NCBI NO: 15241653 NR Description: germin - like protein; protein id: At5g39150.1
  misc_feature (1)..(154): Homolog of NCBI NO: 15241638 NR Description: germin - like protein; protein id: At5g39120.1
  misc_feature (1)..(154): Homolog of NCBI NO: 15241660 NR Description: germin-like protein; protein id: At5g39180.1
  misc_feature (1)..(157): Homolog of NCBI NO: 1755186 NR Description: germin-like protein [Arabidopsis thaliana]

SEQ ID NO: 80913 - protein, 131 aa, Arabidopsis thaliana; identical to SEQ ID NO: 77802
  peptide (1)..(131): Ceres Seq. ID no. 12657684
  misc_feature (1)..(122): Pfam Name: Cupin Pfam Description: Cupin
  misc_feature (1)..(131): Homolog of NCBI NO: 22327459 NR Description: germin-like protein (GLP2a) copy1; protein id:
  misc_feature (1)..(131): Homolog of NCBI NO: 15241662 NR Description: germin-like protein (GLP2a) copy2; protein id:
  misc_feature (1)..(131): Homolog of NCBI NO: 15241640 NR Description: germin - like protein; protein id: At5g39130.1, by cDNA: gi_17065441 [Arabidopsis thaliana]
  misc_feature (1)..(131): Homolog of NCBI NO: 2129594 NR Description: germin type 2 - Arabidopsis thaliana
  misc_feature (1)..(128): Homolog of NCBI NO: 18202454 NR Description: Germin-like protein subfamily 1 member 13
  misc_feature (1)..(128): Homolog of NCBI NO: 15241636 NR Description: germin -like protein; protein id: At5g39110.1
  misc_feature (1)..(128): Homolog of NCBI NO: 15241653 NR Description: germin - like protein; protein id: At5g39150.1
  misc_feature (1)..(128): Homolog of NCBI NO: 15241638 NR Description: germin - like protein; protein id: At5g39120.1
  misc_feature (1)..(128): Homolog of NCBI NO: 15241660 NR Description: germin-like protein; protein id: At5g39180.1
  misc_feature (1)..(131): Homolog of NCBI NO: 1755186 NR Description: germin-like protein [Arabidopsis thaliana]

SEQ ID NO: 80914 - DNA, 669 bp, Arabidopsis thaliana
  misc_feature (1)..(669): Ceres Seq. ID no. 12657685
  misc_feature: MA Experiment ID: 20000314 Result: Down-regulated in Transcription
  misc_feature: MA Experiment 20000314 PARAMETER Experiment Name: At_14day_Shoots-Roots_Sub_P Parameter: Age (day) Value: 14
  misc_feature: MA Experiment 20000314 PARAMETER Experiment Name: At_14day_Shoots-Roots_Sub_P Parameter: Organism Value: A. thaliana
  misc_feature: MA Experiment 20000314 PARAMETER Experiment Name: At_14day_Shoots-Roots_Sub_P Parameter: Plant Line Value: WS
  misc_feature: MA Experiment 20000314 PARAMETER Experiment Name: At_14day_Shoots-Roots_Sub_P Parameter: Tissue Value: Roots vs. Whole Plant
  misc_feature: MA Experiment ID: 20000315 Result: Down-regulated in Transcription
  misc_feature: MA Experiment 20000315 PARAMETER Experiment Name: At_14day_Shoots-Roots_Sub_P Parameter: Age (day) Value: 14
  misc_feature: MA Experiment 20000315 PARAMETER Experiment Name: At_14day_Shoots-Roots_Sub_P Parameter: Organism Value: A. thaliana
  misc_feature: MA Experiment 20000315 PARAMETER Experiment Name: At_14day_Shoots-Roots_Sub_P Parameter: Plant Line Value: WS
  misc_feature: MA Experiment 20000315 PARAMETER Experiment Name: At_14day_Shoots-Roots_Sub_P Parameter: Tissue Value: Shoots vs. Whole Plant
  misc_feature: MA Experiment ID: 20000440 Result: Down-regulated in Transcription
  misc_feature: MA Experiment 20000440 PARAMETER Experiment Name: At_Closed-Flower__Sub_P Parameter: Tissue Value: Closed Flower vs. Whole Plant
atgagggtttctcaatctcttgtcccttttgccataattgctttggtcctttcctttgtcaatgcttatgatccaagtccactccaagacttctgtgttgccattgatgacctaaaaggcgtttttgtgaatggtaggttttgtaaagacccgaagcgagtcgatgcaaaagattttttcttctcaggtctcaatgtgcccgggaacaccaataatcaagttggctctaatgtgaccactgttaatgttgatcagatcccagggctaaacaccatgggaatatcattggtccgcatagactacgcaccgcatggccaaaatccacctcacacgcaccctcgtggctcagagatccttgtccttgtcgaaggaacattatacgtcggttttgtctcttccaatcaagataacaaccggttattcgccaaagtattgcaccccggtgatgttttcgtgttccccataggaatgatccattttcaggtaaatgtggggaaaattccagcagttgcttttgcgggattgagtagccagaacgcaggtgttatcacaattgcaaacactgtgtttgggtccaatcctccgatttatccagagcttcttgccagggcgttccagttggatgcaagtgttgtcaaagaacttcaggccaagtttgggtccatatga

SEQ ID NO: 80915 - protein, 222 aa, Arabidopsis thaliana
  peptide (1)..(222): Ceres Seq. ID no. 12657686
  misc_feature (62)..(213): Pfam Name: Cupin Pfam Description: Cupin
  misc_feature (1)..(222): Homolog of NCBI NO: 15241662 NR Description: germin-like protein (GLP2a) copy2; protein id:
  misc_feature (1)..(222): Homolog of NCBI NO: 22327459 NR Description: germin-like protein (GLP2a) copy1; protein id:
  misc_feature (1)..(222): Homolog of NCBI NO: 15241640 NR Description: germin - like protein; protein id: At5g39130.1, by cDNA: gi_17065441 [Arabidopsis thaliana]
  misc_feature (1)..(222): Homolog of NCBI NO: 2129594 NR Description: germin type 2 - Arabidopsis thaliana
  misc_feature (1)..(219): Homolog of NCBI NO: 18202454 NR Description: Germin-like protein subfamily 1 member 13
  misc_feature (1)..(219): Homolog of NCBI NO: 15241636 NR Description: germin -like protein; protein id: At5g39110.1
  misc_feature (1)..(219): Homolog of NCBI NO: 15241653 NR Description: germin - like protein; protein id: At5g39150.1
  misc_feature (1)..(219): Homolog of NCBI NO: 15241638 NR Description: germin - like protein; protein id: At5g39120.1
  misc_feature (1)..(219): Homolog of NCBI NO: 15241660 NR Description: germin-like protein; protein id: At5g39180.1
  misc_feature (51)..(222): Homolog of NCBI NO: 1755186 NR Description: germin-like protein [Arabidopsis thaliana]
MRVSQSLVPFAIIALVLSFVNAYDPSPLQDFCVAIDDLKGVFVNGRFCKDPKRVDAKDFFFSGLNVPGNTNNQVGSNVTTVNVDQIPGLNTMGISLVRIDYAPHGQNPPHTHPRGSEILVLVEGTLYVGFVSSNQDNNRLFAKVLHPGDVFVFPIGMIHFQVNVGKIPAVAFAGLSSQNAGVITIANTVFGSNPPIYPELLARAFQLDASVVKELQAKFGSI

SEQ ID NO: 80916 - protein, 131 aa, Arabidopsis thaliana; identical to SEQ ID NO: 77802
  peptide (1)..(131): Ceres Seq. ID no. 12657687
  misc_feature (1)..(122): Pfam Name: Cupin Pfam Description: Cupin
  misc_feature (1)..(131): Homolog of NCBI NO: 15241662 NR Description: germin-like protein (GLP2a) copy2; protein id:
  misc_feature (1)..(131): Homolog of NCBI NO: 22327459 NR Description: germin-like protein (GLP2a) copy1; protein id:
  misc_feature (1)..(131): Homolog of NCBI NO: 15241640 NR Description: germin - like protein; protein id: At5g39130.1, by cDNA: gi_17065441 [Arabidopsis thaliana]
  misc_feature (1)..(131): Homolog of NCBI NO: 2129594 NR Description: germin type 2 - Arabidopsis thaliana
  misc_feature (1)..(128): Homolog of NCBI NO: 18202454 NR Description: Germin-like protein subfamily 1 member 13
  misc_feature (1)..(128): Homolog of NCBI NO: 15241636 NR Description: germin -like protein; protein id: At5g39110.1
  misc_feature (1)..(128): Homolog of NCBI NO: 15241653 NR Description: germin - like protein; protein id: At5g39150.1
  misc_feature (1)..(128): Homolog of NCBI NO: 15241638 NR Description: germin - like protein; protein id: At5g39120.1
  misc_feature (1)..(128): Homolog of NCBI NO: 15241660 NR Description: germin-like protein; protein id: At5g39180.1
  misc_feature (1)..(131): Homolog of NCBI NO: 1755186 NR Description: germin-like protein [Arabidopsis thaliana]

SEQ ID NO: 80917 - DNA, 780 bp, Arabidopsis thaliana
  misc_feature (1)..(780): Ceres Seq. ID no. 12657696
  misc_feature: MA Experiment ID: 20000355 Result: Up-regulated in Transcription
  misc_feature: MA Experiment 20000355 PARAMETER Experiment Name: At_Siliques_Sub_P Parameter: Age (day) Value: 21
  misc_feature: MA Experiment 20000355 PARAMETER Experiment Name: At_Siliques_Sub_P Parameter: Organism Value: A. thaliana
  misc_feature: MA Experiment 20000355 PARAMETER Experiment Name: At_Siliques_Sub_P Parameter: Plant Line Value: WS
  misc_feature: MA Experiment 20000355 PARAMETER Experiment Name: At_Siliques_Sub_P Parameter: Tissue Value: Less Than 5mm Siliques vs. Whole Plant
atggctacattgttagtgtccatgagttacggtcatcgagcgatgattaatgatgtagccgaagcacccgtgtttgacgatgtagtcagcccaaacggactcgacagttcttggtatgatgcacgagcaacattttacggtgatatccatggtggagaaactcaacagggagcgtgtggatacggtgatctattcaaacaaggctatggtctagagacagcggcattgagcacagcactcttcaacgaagggtatacatgtggggcttgttaccagatcatgtgtgtgaacgatccacaatggtgtttacccggatccgtcaagatcacagcaactaatttctgtccaccagattacagcaaaaccgaaggcgtttggtgcaacccaccacaaaagcactttgacctctccctaccaatgttcctcaagatcgcccaatacaaagctggagttgtcccagttaaatacagacgtatttcttgtgcaagaactggtggtgtcaagtttgaaaccaaaggaaacccttatttcttaatgatcttgccatacaatgtaggaggagctggagatatcaagttgatgcaagttaaaggagacaagaccgggtggataacaatgcaaaagaactggggacaaaactggaccactggtgttaatttgactggtcagggtatttcattcagggttacgacgagtgatggggttacaaaagattttaataatgtgatgccaaacaattggggatttggacagacttttgatggaaagattaacttttag

SEQ ID NO: 80918 - protein, 259 aa, Arabidopsis thaliana
  peptide (1)..(259): Ceres Seq. ID no. 12657697
  misc_feature (167)..(244): Pfam Name: Pollen allergen Pfam Description: Pollen allergen
  misc_feature (1)..(259): Homolog of NCBI NO: 15241680 NR Description: expansin, putative; protein id: At5g39280.1
  misc_feature (1)..(259): Homolog of NCBI NO: 20137957 NR Description: Putative alpha-expansin 23 precursor (At-EXP23)
  misc_feature (8)..(259): Homolog of NCBI NO: 9758857 NR Description: expansin-like protein [Arabidopsis thaliana]
  misc_feature (1)..(259): Homolog of NCBI NO: 15241684 NR Description: expansin, putative; protein id: At5g39300.1
  misc_feature (1)..(259): Homolog of NCBI NO: 20137955 NR Description: Putative alpha-expansin 25 precursor (At-EXP25)
  misc_feature (8)..(259): Homolog of NCBI NO: 9758859 NR Description: expansin-like protein [Arabidopsis thaliana]
  misc_feature (1)..(259): Homolog of NCBI NO: 9758856 NR Description: expansin-like protein [Arabidopsis thaliana]
  misc_feature (1)..(259): Homolog of NCBI NO: 20137958 NR Description: Putative alpha-expansin 22 precursor (At-EXP22)
  misc_feature (1)..(259): Homolog of NCBI NO: 15241682 NR Description: expansin, putative; protein id: At5g39290.1
  misc_feature (1)..(259): Homolog of NCBI NO: 20137956 NR Description: Putative alpha-expansin 26 precursor (At-EXP26)
MATLLVSMSYGHRAMINDVAEAPVFDDVVSPNGLDSSWYDARATFYGDIHGGETQQGACGYGDLFKQGYGLETAALSTALFNEGYTCGACYQIMCVNDPQWCLPGSVKITATNFCPPDYSKTEGVWCNPPQKHFDLSLPMFLKIAQYKAGVVPVKYRRISCARTGGVKFETKGNPYFLMILPYNVGGAGDIKLMQVKGDKTGWITMQKNWGQNWTTGVNLTGQGISFRVTTSDGVTKDFNNVMPNNWGFGQTFDGKINF

SEQ ID NO: 80919 - protein, 252 aa, Arabidopsis thaliana
  peptide (1)..(252): Ceres Seq. ID no. 12657698
  misc_feature (160)..(237): Pfam Name: Pollen allergen Pfam Description: Pollen allergen
  misc_feature (1)..(252): Homolog of NCBI NO: 15241680 NR Description: expansin, putative; protein id: At5g39280.1
  misc_feature (1)..(252): Homolog of NCBI NO: 20137957 NR Description: Putative alpha-expansin 23 precursor (At-EXP23)
  misc_feature (1)..(252): Homolog of NCBI NO: 9758857 NR Description: expansin-like protein [Arabidopsis thaliana]
  misc_feature (1)..(252): Homolog of NCBI NO: 15241684 NR Description: expansin, putative; protein id: At5g39300.1
  misc_feature (1)..(252): Homolog of NCBI NO: 20137955 NR Description: Putative alpha-expansin 25 precursor (At-EXP25)
  misc_feature (1)..(252): Homolog of NCBI NO: 9758859 NR Description: expansin-like protein [Arabidopsis thaliana]
  misc_feature (1)..(252): Homolog of NCBI NO: 9758856 NR Description: expansin-like protein [Arabidopsis thaliana]
  misc_feature (1)..(252): Homolog of NCBI NO: 20137958 NR Description: Putative alpha-expansin 22 precursor (At-EXP22)
  misc_feature (1)..(252): Homolog of NCBI NO: 15241682 NR Description: expansin, putative; protein id: At5g39290.1
  misc_feature (1)..(252): Homolog of NCBI NO: 20137956 NR Description: Putative alpha-expansin 26 precursor (At-EXP26)
MSYGHRAMINDVAEAPVFDDVVSPNGLDSSWYDARATFYGDIHGGETQQGACGYGDLFKQGYGLETAALSTALFNEGYTCGACYQIMCVNDPQWCLPGSVKITATNFCPPDYSKTEGVWCNPPQKHFDLSLPMFLKIAQYKAGVVPVKYRRISCARTGGVKFETKGNPYFLMILPYNVGGAGDIKLMQVKGDKTGWITMQKNWGQNWTTGVNLTGQGISFRVTTSDGVTKDFNNVMPNNWGFGQTFDGKINF

SEQ ID NO: 80920 - protein, 245 aa, Arabidopsis thaliana
  peptide (1)..(245): Ceres Seq. ID no. 12657699
  misc_feature (153)..(230): Pfam Name: Pollen allergen Pfam Description: Pollen allergen
  misc_feature (1)..(245): Homolog of NCBI NO: 15241680 NR Description: expansin, putative; protein id: At5g39280.1
  misc_feature (1)..(245): Homolog of NCBI NO: 20137957 NR Description: Putative alpha-expansin 23 precursor (At-EXP23)
  misc_feature (1)..(245): Homolog of NCBI NO: 9758857 NR Description: expansin-like protein [Arabidopsis thaliana]
  misc_feature (1)..(245): Homolog of NCBI NO: 15241684 NR Description: expansin, putative; protein id: At5g39300.1
  misc_feature (1)..(245): Homolog of NCBI NO: 20137955 NR Description: Putative alpha-expansin 25 precursor (At-EXP25)
  misc_feature (1)..(245): Homolog of NCBI NO: 9758859 NR Description: expansin-like protein [Arabidopsis thaliana]
  misc_feature (1)..(245): Homolog of NCBI NO: 9758856 NR Description: expansin-like protein [Arabidopsis thaliana]
  misc_feature (1)..(245): Homolog of NCBI NO: 20137958 NR Description: Putative alpha-expansin 22 precursor (At-EXP22)
  misc_feature (1)..(245): Homolog of NCBI NO: 15241682 NR Description: expansin, putative; protein id: At5g39290.1
  misc_feature (1)..(245): Homolog of NCBI NO: 20137956 NR Description: Putative alpha-expansin 26 precursor (At-EXP26)
MINDVAEAPVFDDVVSPNGLDSSWYDARATFYGDIHGGETQQGACGYGDLFKQGYGLETAALSTALFNEGYTCGACYQIMCVNDPQWCLPGSVKITATNFCPPDYSKTEGVWCNPPQKHFDLSLPMFLKIAQYKAGVVPVKYRRISCARTGGVKFETKGNPYFLMILPYNVGGAGDIKLMQVKGDKTGWITMQKNWGQNWTTGVNLTGQGISFRVTTSDGVTKDFNNVMPNNWGFGQTFDGKINF

SEQ ID NO: 80921 - DNA, 891 bp, Arabidopsis thaliana
  misc_feature (1)..(891): Ceres Seq. ID no. 12657700
  misc_feature: MA Experiment ID: 20000440 Result: Up-regulated in Transcription
  misc_feature: MA Experiment 20000440 PARAMETER Experiment Name: At_Closed-Flower__Sub_P Parameter: Tissue Value: Closed Flower vs. Whole Plant
atggtgatatggattgcacctatgactaacggtcatgatcatgcaagccacgtacccggtggaagacccggtgcccacccatcccatggcgcccacccagcccatggcgcccacccatcccatggtgctcacccatcccatggtgcccacccatcccatggtgctcacccatcccatggcgccctcccatcccatggtggccaagtgccgcattctggttggggtcatggccgtgccacattctacggtgacatcaatggtggagaaactcaacagggagcttgtggatatggtgatctacacaaacaaggatatggtctagagaccgcagcactaagcaccgcactatttaacaacggctcaaggtgtggggcttgttacgagatcatgtgcgaacacgctccacaatggtgtttgccaggttccatcaagatcacagctacaaacttctgtccaccagattttaccaagcccaatgacaattggtgcaacccgccacaaaaacactttgatctctcgcaaccaatgttcctcaaaatagctaaatacaaagccggggttgtcccggttaaatttagacgtgttccttgtgcgaaaatcggaggtgtcaagtttgaaatcaagggaaatcctcatttcttaatgatcttaccgtacaatgtaggaggagctggagctgttagggctatgcaaattaagggaacaaggacccagtggattgcgatgaagaagaattggggacagatttggagcactggtgttgtgttgaccggacaatgtttatcgtttaggcttaccacaagtgatggagttatgaaagagtttattgatgttacaccgccggactggaaatgtaatggacagagttttgatggaaaggttaatttttag

SEQ ID NO: 80922 - protein, 296 aa, Arabidopsis thaliana
  peptide (1)..(296): Ceres Seq. ID no. 12657701
  misc_feature (203)..(280): Pfam Name: Pollen allergen Pfam Description: Pollen allergen
  misc_feature (1)..(296): Homolog of NCBI NO: 15241686 NR Description: expansin-like protein; protein id: At5g39310.1
  misc_feature (1)..(296): Homolog of NCBI NO: 20137954 NR Description: Putative alpha-expansin 24 precursor (At-EXP24)
  misc_feature (38)..(296): Homolog of NCBI NO: 9758860 NR Description: expansin-like protein [Arabidopsis thaliana]
  misc_feature (72)..(296): Homolog of NCBI NO: 9758859 NR Description: expansin-like protein [Arabidopsis thaliana]
  misc_feature (72)..(296): Homolog of NCBI NO: 15241684 NR Description: expansin, putative; protein id: At5g39300.1
  misc_feature (72)..(296): Homolog of NCBI NO: 20137955 NR Description: Putative alpha-expansin 25 precursor (At-EXP25)
  misc_feature (72)..(296): Homolog of NCBI NO: 9758857 NR Description: expansin-like protein [Arabidopsis thaliana]
  misc_feature (72)..(296): Homolog of NCBI NO: 20137957 NR Description: Putative alpha-expansin 23 precursor (At-EXP23)
  misc_feature (72)..(296): Homolog of NCBI NO: 15241680 NR Description: expansin, putative; protein id: At5g39280.1
  misc_feature (72)..(296): Homolog of NCBI NO: 9758856 NR Description: expansin-like protein [Arabidopsis thaliana]
MVIWIAPMTNGHDHASHVPGGRPGAHPSHGAHPAHGAHPSHGAHPSHGAHPSHGAHPSHGALPSHGGQVPHSGWGHGRATFYGDINGGETQQGACGYGDLHKQGYGLETAALSTALFNNGSRCGACYEIMCEHAPQWCLPGSIKITATNFCPPDFTKPNDNWCNPPQKHFDLSQPMFLKIAKYKAGVVPVKFRRVPCAKIGGVKFEIKGNPHFLMILPYNVGGAGAVRAMQIKGTRTQWIAMKKNWGQIWSTGVVLTGQCLSFRLTTSDGVMKEFIDVTPPDWKCNGQSFDGKVNF

SEQ ID NO: 80923 - protein, 289 aa, Arabidopsis thaliana
  peptide (1)..(289): Ceres Seq. ID no. 12657702
  misc_feature (196)..(273): Pfam Name: Pollen allergen Pfam Description: Pollen allergen
  misc_feature (1)..(289): Homolog of NCBI NO: 15241686 NR Description: expansin-like protein; protein id: At5g39310.1
  misc_feature (1)..(289): Homolog of NCBI NO: 20137954 NR Description: Putative alpha-expansin 24 precursor (At-EXP24)
  misc_feature (31)..(289): Homolog of NCBI NO: 9758860 NR Description: expansin-like protein [Arabidopsis thaliana]
  misc_feature (65)..(289): Homolog of NCBI NO: 9758859 NR Description: expansin-like protein [Arabidopsis thaliana]
  misc_feature (65)..(289): Homolog of NCBI NO: 15241684 NR Description: expansin, putative; protein id: At5g39300.1
  misc_feature (65)..(289): Homolog of NCBI NO: 20137955 NR Description: Putative alpha-expansin 25 precursor (At-EXP25)
  misc_feature (65)..(289): Homolog of NCBI NO: 9758857 NR Description: expansin-like protein [Arabidopsis thaliana]
  misc_feature (65)..(289): Homolog of NCBI NO: 20137957 NR Description: Putative alpha-expansin 23 precursor (At-EXP23)
  misc_feature (65)..(289): Homolog of NCBI NO: 15241680 NR Description: expansin, putative; protein id: At5g39280.1
  misc_feature (65)..(289): Homolog of NCBI NO: 9758856 NR Description: expansin-like protein [Arabidopsis thaliana]
MTNGHDHASHVPGGRPGAHPSHGAHPAHGAHPSHGAHPSHGAHPSHGAHPSHGALPSHGGQVPHSGWGHGRATFYGDINGGETQQGACGYGDLHKQGYGLETAALSTALFNNGSRCGACYEIMCEHAPQWCLPGSIKITATNFCPPDFTKPNDNWCNPPQKHFDLSQPMFLKIAKYKAGVVPVKFRRVPCAKIGGVKFEIKGNPHFLMILPYNVGGAGAVRAMQIKGTRTQWIAMKKNWGQIWSTGVVLTGQCLSFRLTTSDGVMKEFIDVTPPDWKCNGQSFDGKVNF

SEQ ID NO: 80924 - protein, 167 aa, Arabidopsis thaliana
  peptide (1)..(167): Ceres Seq. ID no. 12657703
  misc_feature (74)..(151): Pfam Name: Pollen allergen Pfam Description: Pollen allergen
  misc_feature (1)..(167): Homolog of NCBI NO: 15241686 NR Description: expansin-like protein; protein id: At5g39310.1
  misc_feature (1)..(167): Homolog of NCBI NO: 20137954 NR Description: Putative alpha-expansin 24 precursor (At-EXP24)
  misc_feature (1)..(167): Homolog of NCBI NO: 9758860 NR Description: expansin-like protein [Arabidopsis thaliana]
  misc_feature (1)..(167): Homolog of NCBI NO: 9758859 NR Description: expansin-like protein [Arabidopsis thaliana]
  misc_feature (1)..(167): Homolog of NCBI NO: 20137955 NR Description: Putative alpha-expansin 25 precursor (At-EXP25)
  misc_feature (1)..(167): Homolog of NCBI NO: 15241684 NR Description: expansin, putative; protein id: At5g39300.1
  misc_feature (1)..(167): Homolog of NCBI NO: 9758857 NR Description: expansin-like protein [Arabidopsis thaliana]
  misc_feature (1)..(167): Homolog of NCBI NO: 20137957 NR Description: Putative alpha-expansin 23 precursor (At-EXP23)
  misc_feature (1)..(167): Homolog of NCBI NO: 15241680 NR Description: expansin, putative; protein id: At5g39280.1
  misc_feature (1)..(167): Homolog of NCBI NO: 9758856 NR Description: expansin-like protein [Arabidopsis thaliana]
MCEHAPQWCLPGSIKITATNFCPPDFTKPNDNWCNPPQKHFDLSQPMFLKIAKYKAGVVPVKFRRVPCAKIGGVKFEIKGNPHFLMILPYNVGGAGAVRAMQIKGTRTQWIAMKKNWGQIWSTGVVLTGQCLSFRLTTSDGVMKEFIDVTPPDWKCNGQSFDGKVNF

SEQ ID NO: 80925 - DNA, 1485 bp, Arabidopsis thaliana
  misc_feature (1)..(1485): Ceres Seq. ID no. 12657716
atggatggatcatcggaaaaaactaccaataaattagtatcgattctaccaaattataggattggtaagactcttggacatggatcctttgcgaaagtgaaattagcactgcatgtagctactggtcacaaagttgctatcaaaattcttaatcgctctaagattaagaacatgggtattgagatcaaagtacaaagggagatcaaaattctcagatttttgatgcatcctcatatcatccgtcaatatgaagttatagagacgccaaatgacatttatgttgtgatggaatatgttaagtctggagaactatttgactatattgtagagaaaggtaaattacaggaagacgaggctcgtcatctttttcagcagatcatatctggtgtagagtattgtcatcgcaatatgatcgttcatagagatcttaagcccgagaatgtgcttttggattcgcaatgcaacataaagattgttgactttggattgagtaatgtcatgcatgatggtcattttttaaagactagttgtggaagccctaattatgctgctccagaggttatttcaggaaaaccatatggaccagatgtagatatatggagttgtggggtgatattatatgctctgttgtgtggtactcttcctttcgatgacgaaaatattcctaatgtattcgagaaaataaagagaggaatgtatactcttccaaatcatttatcacattttgctagagatttgataccgagaatgcttatggttgatcctactatgagaattagcattactgagattcgtcaacatccttggttcaataatcatcttcctctttatctttctattcctccattagataccatagaccaagctaaaaagattgaggaggagataattcaaaacgtggttaacatagggtttgatagaaaccatgttgttgattctcttgccaatagaatccaaaacgaggctacagttgcataccatctaatcctagacaaccgaaaccaaaattctgttcccaatgaccctttccaatccaagtttaaagagatttcggatggtatatttaattcgacgttaccagttcaaaatattacttcacatgttggccattcattttcggcattgtatggactaaaatccaatgtcaaagatgacaaaacatggacccttggacttcagtctcaagggagtccttatgatatcatgactgaaatttttaaagctcttcaaaatctaaaaatatgctggaaaaaaatcggactctacaatataaaatgtagatgggtccgaagctttgcttactataagaatcatacaattgaggatgaatgtgccatcatcttaccgaccgtcatcaaatttgaaattcagctatacaaagtacgcgaaggcaaatatttgctggacatcctaagaattgatggacctcagtttatcttctttgatctatgtgttgcgtttctcagagagctaggtgtcctctaa

SEQ ID NO: 80926 - protein, 494 aa, Arabidopsis thaliana
  peptide (1)..(494): Ceres Seq. ID no. 12657717
  misc_feature (19)..(270): Pfam Name: Protein kinase domain Pfam Description: Protein kinase domain
  misc_feature (1)..(494): Homolog of NCBI NO: 15241748 NR Description: serine/threonine-specific protein kinase -like protein id: At5g39440.1 [Arabidopsis thaliana]
  misc_feature (16)..(429): Homolog of NCBI NO: 7434354 NR Description: probable serine/threonine-specific protein kinase
  misc_feature (429)..(494): Homolog of NCBI NO: 7434354 NR Description: probable serine/threonine-specific protein kinase
  misc_feature (1)..(431): Homolog of NCBI NO: 7672782 NR Description: SNF1 [Lycopersicon esculentum]
  misc_feature (440)..(494): Homolog of NCBI NO: 7672782 NR Description: SNF1 [Lycopersicon esculentum]
  misc_feature (1)..(431): Homolog of NCBI NO: 26051191 NR Description: StubSNF1 protein [Solanum tuberosum]
  misc_feature (440)..(494): Homolog of NCBI NO: 26051191 NR Description: StubSNF1 protein [Solanum tuberosum]
  misc_feature (16)..(494): Homolog of NCBI NO: 4107009 NR Description: OSK1 [Oryza sativa] >gi|28201240|dbj|BAC56588.1|
  misc_feature (1)..(443): Homolog of NCBI NO: 18406082 NR Description: Snf1-related protein kinase KIN11 (AKIN11); id: At3g29160.1, supported by cDNA: gi_17979234 [Arabidopsis
  misc_feature (1)..(431): Homolog of NCBI NO: 7434358 NR Description: probable serine/threonine-specific protein kinase
MDGSSEKTTNKLVSILPNYRIGKTLGHGSFAKVKLALHVATGHKVAIKILNRSKIKNMGIEIKVQREIKILRFLMHPHIIRQYEVIETPNDIYVVMEYVKSGELFDYIVEKGKLQEDEARHLFQQIISGVEYCHRNMIVHRDLKPENVLLDSQCNIKIVDFGLSNVMHDGHFLKTSCGSPNYAAPEVISGKPYGPDVDIWSCGVILYALLCGTLPFDDENIPNVFEKIKRGMYTLPNHLSHFARDLIPRMLMVDPTMRISITEIRQHPWFNNHLPLYLSIPPLDTIDQAKKIEEEIIQNVVNIGFDRNHVVDSLANRIQNEATVAYHLILDNRNQNSVPNDPFQSKFKEISDGIFNSTLPVQNITSHVGHSFSALYGLKSNVKDDKTWTLGLQSQGSPYDIMTEIFKALQNLKICWKKIGLYNIKCRWVRSFAYYKNHTIEDECAIILPTVIKFEIQLYKVREGKYLLDILRIDGPQFIFFDLCVAFLRELGVL

SEQ ID NO: 80927 - protein, 437 aa, Arabidopsis thaliana
  peptide (1)..(437): Ceres Seq. ID no. 12657718
  misc_feature (1)..(213): Pfam Name: Protein kinase domain Pfam Description: Protein kinase domain
  misc_feature (1)..(437): Homolog of NCBI NO: 15241748 NR Description: serine/threonine-specific protein kinase -like protein id: At5g39440.1 [Arabidopsis thaliana]
  misc_feature (1)..(372): Homolog of NCBI NO: 7434354 NR Description: probable serine/threonine-specific protein kinase
  misc_feature (372)..(437): Homolog of NCBI NO: 7434354 NR Description: probable serine/threonine-specific protein kinase
  misc_feature (1)..(374): Homolog of NCBI NO: 7672782 NR Description: SNF1 [Lycopersicon esculentum]
  misc_feature (383)..(437): Homolog of NCBI NO: 7672782 NR Description: SNF1 [Lycopersicon esculentum]
  misc_feature (1)..(374): Homolog of NCBI NO: 26051191 NR Description: StubSNF1 protein [Solanum tuberosum]
  misc_feature (383)..(437): Homolog of NCBI NO: 26051191 NR Description: StubSNF1 protein [Solanum tuberosum]
  misc_feature (1)..(437): Homolog of NCBI NO: 4107009 NR Description: OSK1 [Oryza sativa] >gi|28201240|dbj|BAC56588.1|
  misc_feature (1)..(386): Homolog of NCBI NO: 18406082 NR Description: Snf1-related protein kinase KIN11 (AKIN11); id: At3g29160.1, supported by cDNA: gi_17979234 [Arabidopsis
  misc_feature (1)..(374): Homolog of NCBI NO: 7434358 NR Description: probable serine/threonine-specific protein kinase
MGIEIKVQREIKILRFLMHPHIIRQYEVIETPNDIYVVMEYVKSGELFDYIVEKGKLQEDEARHLFQQIISGVEYCHRNMIVHRDLKPENVLLDSQCNIKIVDFGLSNVMHDGHFLKTSCGSPNYAAPEVISGKPYGPDVDIWSCGVILYALLCGTLPFDDENIPNVFEKIKRGMYTLPNHLSHFARDLIPRMLMVDPTMRISITEIRQHPWFNNHLPLYLSIPPLDTIDQAKKIEEEIIQNVVNIGFDRNHVVDSLANRIQNEATVAYHLILDNRNQNSVPNDPFQSKFKEISDGIFNSTLPVQNITSHVGHSFSALYGLKSNVKDDKTWTLGLQSQGSPYDIMTEIFKALQNLKICWKKIGLYNIKCRWVRSFAYYKNHTIEDECAIILPTVIKFEIQLYKVREGKYLLDILRIDGPQFIFFDLCVAFLRELGVL

SEQ ID NO: 80928 - protein, 420 aa, Arabidopsis thaliana
  peptide (1)..(420): Ceres Seq. ID no. 12657719
  misc_feature (1)..(196): Pfam Name: Protein kinase domain Pfam Description: Protein kinase domain
  misc_feature (1)..(420): Homolog of NCBI NO: 15241748 NR Description: serine/threonine-specific protein kinase -like protein id: At5g39440.1 [Arabidopsis thaliana]
  misc_feature (1)..(355): Homolog of NCBI NO: 7434354 NR Description: probable serine/threonine-specific protein kinase
  misc_feature (355)..(420): Homolog of NCBI NO: 7434354 NR Description: probable serine/threonine-specific protein kinase
  misc_feature (1)..(357): Homolog of NCBI NO: 7672782 NR Description: SNF1 [Lycopersicon esculentum]
  misc_feature (366)..(420): Homolog of NCBI NO: 7672782 NR Description: SNF1 [Lycopersicon esculentum]
  misc_feature (1)..(357): Homolog of NCBI NO: 26051191 NR Description: StubSNF1 protein [Solanum tuberosum]
  misc_feature (366)..(420): Homolog of NCBI NO: 26051191 NR Description: StubSNF1 protein [Solanum tuberosum]
  misc_feature (1)..(420): Homolog of NCBI NO: 4107009 NR Description: OSK1 [Oryza sativa] >gi|28201240|dbj|BAC56588.1|
  misc_feature (1)..(369): Homolog of NCBI NO: 18406082 NR Description: Snf1-related protein kinase KIN11 (AKIN11); id: At3g29160.1, supported by cDNA: gi_17979234 [Arabidopsis
  misc_feature (1)..(357): Homolog of NCBI NO: 7434358 NR Description: probable serine/threonine-specific protein kinase
MHPHIIRQYEVIETPNDIYVVMEYVKSGELFDYIVEKGKLQEDEARHLFQQIISGVEYCHRNMIVHRDLKPENVLLDSQCNIKIVDFGLSNVMHDGHFLKTSCGSPNYAAPEVISGKPYGPDVDIWSCGVILYALLCGTLPFDDENIPNVFEKIKRGMYTLPNHLSHFARDLIPRMLMVDPTMRISITEIRQHPWFNNHLPLYLSIPPLDTIDQAKKIEEEIIQNVVNIGFDRNHVVDSLANRIQNEATVAYHLILDNRNQNSVPNDPFQSKFKEISDGIFNSTLPVQNITSHVGHSFSALYGLKSNVKDDKTWTLGLQSQGSPYDIMTEIFKALQNLKICWKKIGLYNIKCRWVRSFAYYKNHTIEDECAIILPTVIKFEIQLYKVREGKYLLDILRIDGPQFIFFDLCVAFLRELGVL

SEQ ID NO: 80929 - DNA, 1005 bp, Arabidopsis thaliana
  misc_feature (1)..(1005): Ceres Seq. ID no. 12657769
  misc_feature: MA Experiment ID: 20000182 Result: Up-regulated in Transcription
  misc_feature: MA Experiment 20000182 PARAMETER Experiment Name: At_2mM_SA_P Parameter: Age (day) Value: 14
  misc_feature: MA Experiment 20000182 PARAMETER Experiment Name: At_2mM_SA_P Parameter: Organism Value: A. thaliana
  misc_feature: MA Experiment 20000182 PARAMETER Experiment Name: At_2mM_SA_P Parameter: Plant Line Value: WS
  misc_feature: MA Experiment 20000182 PARAMETER Experiment Name: At_2mM_SA_P Parameter: Timepoint (hr) Value: 6
  misc_feature: MA Experiment 20000182 PARAMETER Experiment Name: At_2mM_SA_P Parameter: Tissue Value: Aerial
  misc_feature: MA Experiment 20000182 PARAMETER Experiment Name: At_2mM_SA_P Parameter: Treatment Value: 2mM SA vs. No Treatment
atggttctagttatggatgatgaagagagtaacaacgttgaaagatatgacgacgtcgtattgccagggtttaggttccatcccactgatgaagaactcgtaagtttctacttgaaacggaaggttttacacaaatctcttccctttgatctcatcaagaaagtcgacatttacaaatacgatccatgggacctcccaacgatgggggaaaaagagtggtacttttattgtcctagagacaggaaataccgcaacagcacaagacctaaccgagtaactggaggtggcttctggaaagcaaccggaacagaccggcctatatactcattggactccactcgatgcatcggtttgaagaaatcacttgtgttctaccgtggtcgagctgctaaaggagtcaaaaccgattggatgatgcatgaatttcgtctcccttctctctctgactctcatcactcatcatatcccaattacaataacaagaagcaacaccttaacaataacaacaacagcaaggagcttccttcaaacgatgcttgggcgatatgtagaatatttaagaagacaaatgcagtatcctcacaaagatcaatcccacaatcttgggtttatccaacgattcctgacaacaatcaacagtcacacaacaacaccgcaactctcttagcttcatcagacgttctcagccacatatcaacaagacaaaactttattccttctccagtcaacgaacccgcaagcttcacagaatcagctgcttcttacttcgcgtctcagatgctcggagtcacgtacaatacagccagaaacaacggaacaggggatgctctgtttctgagaaacaatggaacaggggatgctctggttctgagcaacaatgagaataactacttcaacaacttgactggagggttgactcatgaggttccgaatgtaagatcaatggtgatggaggagactacggggagtgagatgtcggcgacgtcgtattccactaacaattaa

SEQ ID NO: 80930 - protein, 334 aa, Arabidopsis thaliana
  peptide (1)..(334): Ceres Seq. ID no. 12657770
  misc_feature (20)..(145): Pfam Name: No apical meristem (NAM) protein Pfam Description: No apical meristem (NAM) protein
  misc_feature (1)..(334): Homolog of NCBI NO: 15242479 NR Description: NAC domain/ NAM like protein; protein id:
  misc_feature (1)..(334): Homolog of NCBI NO: 10177980 NR Description: NAM (no apical meristem)-like protein
  misc_feature (5)..(254): Homolog of NCBI NO: 15223376 NR Description: putative NAM protein; protein id: At1g26870.1
  misc_feature (5)..(254): Homolog of NCBI NO: 25518578 NR Description: hypothetical protein T2P11.6 - Arabidopsis
  misc_feature (1)..(205): Homolog of NCBI NO: 34897020 NR Description: putative NAM (no apical meristem) protein [Oryza
  misc_feature (3)..(273): Homolog of NCBI NO: 27260923 NR Description: OJ1417_E01.2 [Oryza sativa (japonica
  misc_feature (14)..(146): Homolog of NCBI NO: 15224202 NR Description: NAM (no apical meristem)-like protein; protein At2g43000.1 [Arabidopsis thaliana] >gi|25408827|pir||G84860 NAM
  misc_feature (22)..(226): Homolog of NCBI NO: 34899790 NR Description: OJ1773_H01.21 [Oryza sativa (japonica >gi|24417196|dbj|BAC22555.1| putative OsNAC5 protein [Oryza
  misc_feature (22)..(191): Homolog of NCBI NO: 15232606 NR Description: putative jasmonic acid regulatory protein; id: At3g15510.1, supported by cDNA: gi_12060425 [Arabidopsis
  misc_feature (22)..(322): Homolog of NCBI NO: 30679026 NR Description: No apical meristem (NAM) protein family thaliana] >gi|29029082|gb|AAO64920.1| At3g04070 [Arabidopsis
MVLVMDDEESNNVERYDDVVLPGFRFHPTDEELVSFYLKRKVLHKSLPFDLIKKVDIYKYDPWDLPTMGEKEWYFYCPRDRKYRNSTRPNRVTGGGFWKATGTDRPIYSLDSTRCIGLKKSLVFYRGRAAKGVKTDWMMHEFRLPSLSDSHHSSYPNYNNKKQHLNNNNNSKELPSNDAWAICRIFKKTNAVSSQRSIPQSWVYPTIPDNNQQSHNNTATLLASSDVLSHISTRQNFIPSPVNEPASFTESAASYFASQMLGVTYNTARNNGTGDALFLRNNGTGDALVLSNNENNYFNNLTGGLTHEVPNVRSMVMEETTGSEMSATSYSTNN

SEQ ID NO: 80931 - protein, 330 aa, Arabidopsis thaliana
  peptide (1)..(330): Ceres Seq. ID no. 12657771
  misc_feature (16)..(141): Pfam Name: No apical meristem (NAM) protein Pfam Description: No apical meristem (NAM) protein
  misc_feature (1)..(330): Homolog of NCBI NO: 15242479 NR Description: NAC domain/ NAM like protein; protein id:
  misc_feature (1)..(330): Homolog of NCBI NO: 10177980 NR Description: NAM (no apical meristem)-like protein
  misc_feature (1)..(250): Homolog of NCBI NO: 15223376 NR Description: putative NAM protein; protein id: At1g26870.1
  misc_feature (1)..(250): Homolog of NCBI NO: 25518578 NR Description: hypothetical protein T2P11.6 - Arabidopsis
  misc_feature (1)..(201): Homolog of NCBI NO: 34897020 NR Description: putative NAM (no apical meristem) protein [Oryza
  misc_feature (1)..(269): Homolog of NCBI NO: 27260923 NR Description: OJ1417_E01.2 [Oryza sativa (japonica
  misc_feature (10)..(142): Homolog of NCBI NO: 15224202 NR Description: NAM (no apical meristem)-like protein; protein At2g43000.1 [Arabidopsis thaliana] >gi|25408827|pir||G84860 NAM
  misc_feature (18)..(222): Homolog of NCBI NO: 34899790 NR Description: OJ1773_H01.21 [Oryza sativa (japonica >gi|24417196|dbj|BAC22555.1| putative OsNAC5 protein [Oryza
  misc_feature (18)..(187): Homolog of NCBI NO: 15232606 NR Description: putative jasmonic acid regulatory protein; id: At3g15510.1, supported by cDNA: gi_12060425 [Arabidopsis
  misc_feature (18)..(318): Homolog of NCBI NO: 30679026 NR Description: No apical meristem (NAM) protein family thaliana] >gi|29029082|gb|AAO64920.1| At3g04070 [Arabidopsis
MDDEESNNVERYDDVVLPGFRFHPTDEELVSFYLKRKVLHKSLPFDLIKKVDIYKYDPWDLPTMGEKEWYFYCPRDRKYRNSTRPNRVTGGGFWKATGTDRPIYSLDSTRCIGLKKSLVFYRGRAAKGVKTDWMMHEFRLPSLSDSHHSSYPNYNNKKQHLNNNNNSKELPSNDAWAICRIFKKTNAVSSQRSIPQSWVYPTIPDNNQQSHNNTATLLASSDVLSHISTRQNFIPSPVNEPASFTESAASYFASQMLGVTYNTARNNGTGDALFLRNNGTGDALVLSNNENNYFNNLTGGLTHEVPNVRSMVMEETTGSEMSATSYSTNN

SEQ ID NO: 80932 - protein, 267 aa, Arabidopsis thaliana; identical to SEQ ID NO: 78615
  peptide (1)..(267): Ceres Seq. ID no. 12657772
  misc_feature (1)..(78): Pfam Name: No apical meristem (NAM) protein Pfam Description: No apical meristem (NAM) protein
  misc_feature (1)..(267): Homolog of NCBI NO: 15242479 NR Description: NAC domain/ NAM like protein; protein id:
  misc_feature (1)..(267): Homolog of NCBI NO: 10177980 NR Description: NAM (no apical meristem)-like protein
  misc_feature (1)..(187): Homolog of NCBI NO: 15223376 NR Description: putative NAM protein; protein id: At1g26870.1
  misc_feature (1)..(187): Homolog of NCBI NO: 25518578 NR Description: hypothetical protein T2P11.6 - Arabidopsis
  misc_feature (1)..(138): Homolog of NCBI NO: 34897020 NR Description: putative NAM (no apical meristem) protein [Oryza
  misc_feature (1)..(206): Homolog of NCBI NO: 27260923 NR Description: OJ1417_E01.2 [Oryza sativa (japonica
  misc_feature (1)..(79): Homolog of NCBI NO: 15224202 NR Description: NAM (no apical meristem)-like protein; protein At2g43000.1 [Arabidopsis thaliana] >gi|25408827|pir||G84860 NAM
  misc_feature (1)..(159): Homolog of NCBI NO: 34899790 NR Description: OJ1773_H01.21 [Oryza sativa (japonica >gi|24417196|dbj|BAC22555.1| putative OsNAC5 protein [Oryza
  misc_feature (1)..(124): Homolog of NCBI NO: 15232606 NR Description: putative jasmonic acid regulatory protein; id: At3g15510.1, supported by cDNA: gi_12060425 [Arabidopsis
  misc_feature (1)..(255): Homolog of NCBI NO: 30679026 NR Description: No apical meristem (NAM) protein family thaliana] >gi|29029082|gb|AAO64920.1| At3g04070 [Arabidopsis

SEQ ID NO: 80933 - DNA, 1545 bp, Arabidopsis thaliana
  misc_feature (1)..(1545): Ceres Seq. ID no. 12657785
  misc_feature: MA Experiment ID: 20000180 Result: Down-regulated in Transcription
  misc_feature: MA Experiment 20000180 PARAMETER Experiment Name: At_Germinating_Seeds_P Parameter: Age (hr) Value: 24 vs. 0
  misc_feature: MA Experiment 20000180 PARAMETER Experiment Name: At_Germinating_Seeds_P Parameter: Tissue Value: Germinating Seeds
  misc_feature: MA Experiment ID: 20000182 Result: Up-regulated in Transcription
  misc_feature: MA Experiment 20000182 PARAMETER Experiment Name: At_2mM_SA_P Parameter: Age (day) Value: 14
  misc_feature: MA Experiment 20000182 PARAMETER Experiment Name: At_2mM_SA_P Parameter: Organism Value: A. thaliana
  misc_feature: MA Experiment 20000182 PARAMETER Experiment Name: At_2mM_SA_P Parameter: Plant Line Value: WS
  misc_feature: MA Experiment 20000182 PARAMETER Experiment Name: At_2mM_SA_P Parameter: Timepoint (hr) Value: 6
  misc_feature: MA Experiment 20000182 PARAMETER Experiment Name: At_2mM_SA_P Parameter: Tissue Value: Aerial
  misc_feature: MA Experiment 20000182 PARAMETER Experiment Name: At_2mM_SA_P Parameter: Treatment Value: 2mM SA vs. No Treatment
  misc_feature: MA Experiment ID: 20000227 Result: Down-regulated in Transcription
  misc_feature: MA Experiment 20000227 PARAMETER Experiment Name: At_Root-Tips-vs-Tops_P Parameter: Tissue Value: Root Tips vs. Root Tops
  misc_feature: MA Experiment ID: 20000235 Result: Down-regulated in Transcription
  misc_feature: MA Experiment 20000235 PARAMETER Experiment Name: At_Siliques_P Parameter: Age (day) Value: 21
  misc_feature: MA Experiment 20000235 PARAMETER Experiment Name: At_Siliques_P Parameter: Organism Value: A. thaliana
  misc_feature: MA Experiment 20000235 PARAMETER Experiment Name: At_Siliques_P Parameter: Plant Line Value: WS
  misc_feature: MA Experiment 20000235 PARAMETER Experiment Name: At_Siliques_P Parameter: Tissue Value: 5-10mm Siliques vs. Whole Plant
  misc_feature: MA Experiment ID: 20000265 Result: Down-regulated in Transcription
  misc_feature: MA Experiment 20000265 PARAMETER Experiment Name: At_Open_Flower_P Parameter: Age (day) Value: 21
  misc_feature: MA Experiment 20000265 PARAMETER Experiment Name: At_Open_Flower_P Parameter: Plant Line Value: WS
  misc_feature: MA Experiment 20000265 PARAMETER Experiment Name: At_Open_Flower_P Parameter: Tissue Value: Closed Flower vs. Whole Plant
  misc_feature: MA Experiment ID: 20000573 Result: Up-regulated in Transcription
  misc_feature: MA Experiment 20000573 PARAMETER Experiment Name: At_100uM_ABA_Mutants__P Parameter: Organism Value: A. thaliana
  misc_feature: MA Experiment 20000573 PARAMETER Experiment Name: At_100uM_ABA_Mutants__P Parameter: Plant Line Value: CS22 vs. Ler wt
  misc_feature: MA Experiment 20000573 PARAMETER Experiment Name: At_100uM_ABA_Mutants__P Parameter: Timepoint (hr) Value: N/A
  misc_feature: MA Experiment 20000573 PARAMETER Experiment Name: At_100uM_ABA_Mutants__P Parameter: Tissue Value: Whole Plant
  misc_feature: MA Experiment 20000573 PARAMETER Experiment Name: At_100uM_ABA_Mutants__P Parameter: Treatment Value: None
  misc_feature: MA Experiment ID: 20000574 Result: Up-regulated in Transcription
  misc_feature: MA Experiment 20000574 PARAMETER Experiment Name: At_100uM_ABA_Mutants__P Parameter: Organism Value: A. thaliana
  misc_feature: MA Experiment 20000574 PARAMETER Experiment Name: At_100uM_ABA_Mutants__P Parameter: Plant Line Value: CS23 vs. Ler wt
  misc_feature: MA Experiment 20000574 PARAMETER Experiment Name: At_100uM_ABA_Mutants__P Parameter: Timepoint (hr) Value: N/A
  misc_feature: MA Experiment 20000574 PARAMETER Experiment Name: At_100uM_ABA_Mutants__P Parameter: Tissue Value: Whole Plant
  misc_feature: MA Experiment 20000574 PARAMETER Experiment Name: At_100uM_ABA_Mutants__P Parameter: Treatment Value: None
  misc_feature: MA Experiment ID: 20001558 Result: Down-regulated in Transcription
  misc_feature: MA Experiment 20001558 PARAMETER Experiment Name: At_Drought_Soil_Dry_P Parameter: Age (day) Value: 27
  misc_feature: MA Experiment 20001558 PARAMETER Experiment Name: At_Drought_Soil_Dry_P Parameter: Organism Value: A. thaliana
  misc_feature: MA Experiment 20001558 PARAMETER Experiment Name: At_Drought_Soil_Dry_P Parameter: Plant Line Value: WS
  misc_feature: MA Experiment 20001558 PARAMETER Experiment Name: At_Drought_Soil_Dry_P Parameter: Post Timepoint (hr) Value: 6
  misc_feature: MA Experiment 20001558 PARAMETER Experiment Name: At_Drought_Soil_Dry_P Parameter: Post-Treatment Value: Re-Water vs. No Drought
  misc_feature: MA Experiment 20001558 PARAMETER Experiment Name: At_Drought_Soil_Dry_P Parameter: Timepoint (day) Value: 13
  misc_feature: MA Experiment 20001558 PARAMETER Experiment Name: At_Drought_Soil_Dry_P Parameter: Treatment Value: Drought vs. No Drought
atggtgaaaatgggtgaagtatggactaatacgggctctgctctcgcaagtttagtgtttatatacacaatcttcgaaagattcttcccttaccgtctcagagagcacttcgaaccattagctcagagcctcatcggttttatctacccttatattcagataacgttccatgaatatagcggtgagcggttcaagcgaagcgatgtctatgacgcgatccagagctatcttagcaaagactcttcttctcgagccaagaaactaacagcaaacacaatcaaaggaaataaatctattatccttagcatggacgaccacgaagagatcactgatgagtttcaaggggtcaaagtttggtggcaatctaagaagcatcaaagtgaaagccgggcgatctccttttaccctaaagccgacgagtcaagattctacatgcttaagtttcatagacgtgacagggaagtaatcacaaagaaatatcttaatcatgttattagtgaaggcaagacaattgaggttaagaacagagaaaggaagctttattcaaataatcctagccagaattggtctggctataagcaaacgaagtggagccacgtcactttcgagcatcctgctacatttgatacacttgctatggaatataagaagaaggaagagatcaagaacgatttgatcaagtttagtaatagcaaagattactacaagaagatcgggaaagcgtggaaacgagggtatctcttgtttggtccaccaggaaccggaaaatcaacaatgatcgctgcgatggcgaatctcttggagtatgatgtttatgatcttgaattgacaacagtcaaggataacacagagctgagaaggttgttgattgagacttcagggaaatcgataattgttattgaagatatcgattgttctcttgacctaactggtcagagaaagcagaagaaggacgaggaggaagacgaagatgagactagcccgattgagaagcagatgaagaaagatcaaggtgagaataaaggaagtaaagtgacattatcagggttactgaatttcattgatgggttatggtcagcttgtggtggtgagaggatcattgtgttcactactaatttcatagataagttagatccggctttgattcgaaaaggaagaatggataagcatatagagatgtcctactgcggttttgaagcgtttaaagtgttggcaaacaattacttggatgctaaggaagaagatgataatgagttgtttgatgagatcaagaggttacttgaggtagaagaaataaagatgactcctgctgatgtgggagagaatctgttgaagaaatcagaagttgagactaaggagatttgtttgaagcgattgattgaagcgttgaaggaggagaaagaggaagcgaagaggaggattgaggatgaggagaagaagaagaaagaagaggaagagattaagaggaagaagagagaggagaagaagataaagaaggaagagaaggaagagaaggaagaaaatgaaacaacgatgaaagattaa

SEQ ID NO: 80934 - protein, 514 aa, Arabidopsis thaliana
  peptide (1)..(514): Ceres Seq. ID no. 12657786
  misc_feature (245)..(453): Pfam Name: ATPase family associated with various cellular Pfam Description: ATPase family associated with various cellular
  misc_feature (1)..(514): Homolog of NCBI NO: 15242536 NR Description: putative protein; protein id: At5g40010.1
  misc_feature (1)..(503): Homolog of NCBI NO: 15233037 NR Description: hypothetical protein; protein id: At3g28580.1, by cDNA: gi_18175626 [Arabidopsis thaliana]
  misc_feature (1)..(509): Homolog of NCBI NO: 15233010 NR Description: hypothetical protein; protein id: At3g28510.1, by cDNA: gi_20466451 [Arabidopsis thaliana]
  misc_feature (1)..(504): Homolog of NCBI NO: 15233016 NR Description: hypothetical protein; protein id: At3g28540.1
  misc_feature (1)..(498): Homolog of NCBI NO: 9294102 NR Description: contains similarity to AAA-type
  misc_feature (15)..(498): Homolog of NCBI NO: 15233012 NR Description: hypothetical protein; protein id: At3g28520.1
  misc_feature (12)..(490): Homolog of NCBI NO: 9294274 NR Description: mitochondrial protein-like [Arabidopsis thaliana]
  misc_feature (12)..(490): Homolog of NCBI NO: 15233040 NR Description: unknown protein; protein id: At3g28610.1
  misc_feature (36)..(486): Homolog of NCBI NO: 29150372 NR Description: putative AAA-type ATPase [Oryza sativa (japonica
  misc_feature (10)..(481): Homolog of NCBI NO: 15233039 NR Description: unknown protein; protein id: At3g28600.1
MVKMGEVWTNTGSALASLVFIYTIFERFFPYRLREHFEPLAQSLIGFIYPYIQITFHEYSGERFKRSDVYDAIQSYLSKDSSSRAKKLTANTIKGNKSIILSMDDHEEITDEFQGVKVWWQSKKHQSESRAISFYPKADESRFYMLKFHRRDREVITKKYLNHVISEGKTIEVKNRERKLYSNNPSQNWSGYKQTKWSHVTFEHPATFDTLAMEYKKKEEIKNDLIKFSNSKDYYKKIGKAWKRGYLLFGPPGTGKSTMIAAMANLLEYDVYDLELTTVKDNTELRRLLIETSGKSIIVIEDIDCSLDLTGQRKQKKDEEEDEDETSPIEKQMKKDQGENKGSKVTLSGLLNFIDGLWSACGGERIIVFTTNFIDKLDPALIRKGRMDKHIEMSYCGFEAFKVLANNYLDAKEEDDNELFDEIKRLLEVEEIKMTPADVGENLLKKSEVETKEICLKRLIEALKEEKEEAKRRIEDEEKKKKEEEEIKRKKREEKKIKKEEKEEKEENETTMKD

SEQ ID NO: 80935 - protein, 511 aa, Arabidopsis thaliana
  peptide (1)..(511): Ceres Seq. ID no. 12657787
  misc_feature (242)..(450): Pfam Name: ATPase family associated with various cellular Pfam Description: ATPase family associated with various cellular
  misc_feature (1)..(511): Homolog of NCBI NO: 15242536 NR Description: putative protein; protein id: At5g40010.1
  misc_feature (1)..(500): Homolog of NCBI NO: 15233037 NR Description: hypothetical protein; protein id: At3g28580.1, by cDNA: gi_18175626 [Arabidopsis thaliana]
  misc_feature (1)..(506): Homolog of NCBI NO: 15233010 NR Description: hypothetical protein; protein id: At3g28510.1, by cDNA: gi_20466451 [Arabidopsis thaliana]
  misc_feature (1)..(501): Homolog of NCBI NO: 15233016 NR Description: hypothetical protein; protein id: At3g28540.1
  misc_feature (1)..(495): Homolog of NCBI NO: 9294102 NR Description: contains similarity to AAA-type
  misc_feature (12)..(495): Homolog of NCBI NO: 15233012 NR Description: hypothetical protein; protein id: At3g28520.1
  misc_feature (9)..(487): Homolog of NCBI NO: 9294274 NR Description: mitochondrial protein-like [Arabidopsis thaliana]
  misc_feature (9)..(487): Homolog of NCBI NO: 15233040 NR Description: unknown protein; protein id: At3g28610.1
  misc_feature (33)..(483): Homolog of NCBI NO: 29150372 NR Description: putative AAA-type ATPase [Oryza sativa (japonica
  misc_feature (7)..(478): Homolog of NCBI NO: 15233039 NR Description: unknown protein; protein id: At3g28600.1
MGEVWTNTGSALASLVFIYTIFERFFPYRLREHFEPLAQSLIGFIYPYIQITFHEYSGERFKRSDVYDAIQSYLSKDSSSRAKKLTANTIKGNKSIILSMDDHEEITDEFQGVKVWWQSKKHQSESRAISFYPKADESRFYMLKFHRRDREVITKKYLNHVISEGKTIEVKNRERKLYSNNPSQNWSGYKQTKWSHVTFEHPATFDTLAMEYKKKEEIKNDLIKFSNSKDYYKKIGKAWKRGYLLFGPPGTGKSTMIAAMANLLEYDVYDLELTTVKDNTELRRLLIETSGKSIIVIEDIDCSLDLTGQRKQKKDEEEDEDETSPIEKQMKKDQGENKGSKVTLSGLLNFIDGLWSACGGERIIVFTTNFIDKLDPALIRKGRMDKHIEMSYCGFEAFKVLANNYLDAKEEDDNELFDEIKRLLEVEEIKMTPADVGENLLKKSEVETKEICLKRLIEALKEEKEEAKRRIEDEEKKKKEEEEIKRKKREEKKIKKEEKEEKEENETTMKD

SEQ ID NO: 80936 - protein, 412 aa, Arabidopsis thaliana
  peptide (1)..(412): Ceres Seq. ID no. 12657788
  misc_feature (143)..(351): Pfam Name: ATPase family associated with various cellular Pfam Description: ATPase family associated with various cellular
  misc_feature (1)..(412): Homolog of NCBI NO: 15242536 NR Description: putative protein; protein id: At5g40010.1
  misc_feature (1)..(401): Homolog of NCBI NO: 15233037 NR Description: hypothetical protein; protein id: At3g28580.1, by cDNA: gi_18175626 [Arabidopsis thaliana]
  misc_feature (1)..(407): Homolog of NCBI NO: 15233010 NR Description: hypothetical protein; protein id: At3g28510.1, by cDNA: gi_20466451 [Arabidopsis thaliana]
  misc_feature (1)..(402): Homolog of NCBI NO: 15233016 NR Description: hypothetical protein; protein id: At3g28540.1
  misc_feature (1)..(396): Homolog of NCBI NO: 9294102 NR Description: contains similarity to AAA-type
  misc_feature (1)..(396): Homolog of NCBI NO: 15233012 NR Description: hypothetical protein; protein id: At3g28520.1
  misc_feature (1)..(388): Homolog of NCBI NO: 9294274 NR Description: mitochondrial protein-like [Arabidopsis thaliana]
  misc_feature (1)..(388): Homolog of NCBI NO: 15233040 NR Description: unknown protein; protein id: At3g28610.1
  misc_feature (1)..(384): Homolog of NCBI NO: 29150372 NR Description: putative AAA-type ATPase [Oryza sativa (japonica
  misc_feature (1)..(379): Homolog of NCBI NO: 15233039 NR Description: unknown protein; protein id: At3g28600.1
MDDHEEITDEFQGVKVWWQSKKHQSESRAISFYPKADESRFYMLKFHRRDREVITKKYLNHVISEGKTIEVKNRERKLYSNNPSQNWSGYKQTKWSHVTFEHPATFDTLAMEYKKKEEIKNDLIKFSNSKDYYKKIGKAWKRGYLLFGPPGTGKSTMIAAMANLLEYDVYDLELTTVKDNTELRRLLIETSGKSIIVIEDIDCSLDLTGQRKQKKDEEEDEDETSPIEKQMKKDQGENKGSKVTLSGLLNFIDGLWSACGGERIIVFTTNFIDKLDPALIRKGRMDKHIEMSYCGFEAFKVLANNYLDAKEEDDNELFDEIKRLLEVEEIKMTPADVGENLLKKSEVETKEICLKRLIEALKEEKEEAKRRIEDEEKKKKEEEEIKRKKREEKKIKKEEKEEKEENETTMKD

SEQ ID NO: 80937 - DNA, 2445 bp, Arabidopsis thaliana
  misc_feature (1)..(2445): Ceres Seq. ID no. 12657825
  misc_feature: MA Experiment ID: 20000180 Result: Up-regulated in Transcription
  misc_feature: MA Experiment 20000180 PARAMETER Experiment Name: At_Germinating_Seeds_P Parameter: Age (hr) Value: 24 vs. 0
  misc_feature: MA Experiment 20000180 PARAMETER Experiment Name: At_Germinating_Seeds_P Parameter: Tissue Value: Germinating Seeds
  misc_feature: MA Experiment ID: 20000496 Result: Down-regulated in Transcription
  misc_feature: MA Experiment 20000496 PARAMETER Experiment Name: At_Guard_Cells_P Parameter: Harvest Date Value: 7/19/2002
  misc_feature: MA Experiment 20000496 PARAMETER Experiment Name: At_Guard_Cells_P Parameter: Organism Value: Canola
  misc_feature: MA Experiment 20000496 PARAMETER Experiment Name: At_Guard_Cells_P Parameter: Tissue Value: Guard Cells vs. Leaves
  misc_feature: MA Experiment ID: 20001451 Result: Down-regulated in Transcription
  misc_feature: MA Experiment 20001451 PARAMETER Experiment Name: At_Far-red-induction_P Parameter: Age (day) Value: 7
  misc_feature: MA Experiment 20001451 PARAMETER Experiment Name: At_Far-red-induction_P Parameter: Light Value: Far-red vs. White
  misc_feature: MA Experiment 20001451 PARAMETER Experiment Name: At_Far-red-induction_P Parameter: Organism Value: A. thaliana
  misc_feature: MA Experiment 20001451 PARAMETER Experiment Name: At_Far-red-induction_P Parameter: Plant Line Value: Columbia
  misc_feature: MA Experiment 20001451 PARAMETER Experiment Name: At_Far-red-induction_P Parameter: Timepoint (hr) Value: 24
  misc_feature: MA Experiment 20001451 PARAMETER Experiment Name: At_Far-red-induction_P Parameter: Tissue Value: Whole Plant
  misc_feature: MA Experiment ID: 20001557 Result: Down-regulated in Transcription
  misc_feature: MA Experiment 20001557 PARAMETER Experiment Name: At_Drought_Soil_Dry_P Parameter: Age (day) Value: 27
  misc_feature: MA Experiment 20001557 PARAMETER Experiment Name: At_Drought_Soil_Dry_P Parameter: Organism Value: A. thaliana
  misc_feature: MA Experiment 20001557 PARAMETER Experiment Name: At_Drought_Soil_Dry_P Parameter: Plant Line Value: WS
  misc_feature: MA Experiment 20001557 PARAMETER Experiment Name: At_Drought_Soil_Dry_P Parameter: Post Timepoint (hr) Value: 3
  misc_feature: MA Experiment 20001557 PARAMETER Experiment Name: At_Drought_Soil_Dry_P Parameter: Post-Treatment Value: Re-Water vs. No Drought
  misc_feature: MA Experiment 20001557 PARAMETER Experiment Name: At_Drought_Soil_Dry_P Parameter: Timepoint (day) Value: 13
  misc_feature: MA Experiment 20001557 PARAMETER Experiment Name: At_Drought_Soil_Dry_P Parameter: Treatment Value: Drought vs. No Drought
  misc_feature: MA Experiment ID: 20001560 Result: Down-regulated in Transcription
  misc_feature: MA Experiment 20001560 PARAMETER Experiment Name: At_Drought_Soil_Dry_P Parameter: Age (day) Value: 28
  misc_feature: MA Experiment 20001560 PARAMETER Experiment Name: At_Drought_Soil_Dry_P Parameter: Organism Value: A. thaliana
  misc_feature: MA Experiment 20001560 PARAMETER Experiment Name: At_Drought_Soil_Dry_P Parameter: Plant Line Value: WS
  misc_feature: MA Experiment 20001560 PARAMETER Experiment Name: At_Drought_Soil_Dry_P Parameter: Post Timepoint (hr) Value: None
  misc_feature: MA Experiment 20001560 PARAMETER Experiment Name: At_Drought_Soil_Dry_P Parameter: Post-Treatment Value: None
  misc_feature: MA Experiment 20001560 PARAMETER Experiment Name: At_Drought_Soil_Dry_P Parameter: Timepoint (day) Value: 14
  misc_feature: MA Experiment 20001560 PARAMETER Experiment Name: At_Drought_Soil_Dry_P Parameter: Treatment Value: Drought vs. No Drought
  misc_feature: MA Experiment ID: 20001911 Result: Up-regulated in Transcription
  misc_feature: MA Experiment 20001911 PARAMETER Experiment Name: At_Drought_Reproduction_P Parameter: Age (day) Value: 40
  misc_feature: MA Experiment 20001911 PARAMETER Experiment Name: At_Drought_Reproduction_P Parameter: Organism Value: A. thaliana
  misc_feature: MA Experiment 20001911 PARAMETER Experiment Name: At_Drought_Reproduction_P Parameter: Plant Line Value: WS
  misc_feature: MA Experiment 20001911 PARAMETER Experiment Name: At_Drought_Reproduction_P Parameter: Timepoint (day) Value: 10
  misc_feature: MA Experiment 20001911 PARAMETER Experiment Name: At_Drought_Reproduction_P Parameter: Tissue Value: Flowers
  misc_feature: MA Experiment 20001911 PARAMETER Experiment Name: At_Drought_Reproduction_P Parameter: Treatment Value: Drought vs. No Drought
atccactctttcgcttcttctttcttctgatcatcctcccgtagctgattcatggagtcaatccactgcaatagtttactaaaccctaatttctccttaaaccagcgtcgtcggaggattaatcacgctgttcttaatcggagagatgctcttttgcgatccctcaacgccgtggagttgcggcggagcaggacgttctcggctgtacggacttctaatttctcagttactgcggcggcgacggatgttggtggtcggaattcgacggatgcatcggtaatgacaacggcgatgagcggggtggagagaggtgtgcgagtagggaaatcgagctccgcgcttgagcagctagatattgagcgaggcgtttgcgttccattccgaaagtattctccggagactgtgaggagtaaagtgctggaatcaagaggagcagtcgtgtctctagtttcaaggggtgtggagattgtttggactcttgggttgtattggtctaccttaacgtatgattttttggttggaagggatgaggaagttgtcccctttcgtgctaggcagcttaggaacctgttgtgcaatttgggaccttcatttatcaaagctggacaagttctcgcaaataggcctgatatcatccgtgaagactacatgaacgagctctgcatactccaagatgatgttcctccattcccaaacgaggttgctttcaatatcatcgaggaagagttaggccaacctcttgagaacatatttagcaagatttcttcacaaacaatagcagctgcaagcttaggacaagtttatcgagctactctacgtgccactggagaggatgttgctatcaaggtgcagagaccacaaatagagcctataatttaccgggatctctttcttttccgaaccctcgcctccttcttaaatggcttcagtctacagaaactgggttgcaacgcagagctaatagttgatgaatttggagaaaagcttttggaggagcttgactacaccttggaagccagaaacattgaagactttctggagaacttcaaagatgaccccacagtcaaaattcctggagtatacaagaatctttgtggtccgcgggttctggtaatggagtggattgatggtattcggtgcactgacccacaggccatcaaggatgcagggattgatttaaatggattcttgactgttggcgtaagtgctgctctaaggcagctgttggaatttggattgttccatggagatccacatcctggaaatatctttgcaatgcaagatgggcgtatcgcttatgtggacttcggtaatgttgctgtactgagtcagcaaaacaagcaaattttgattgatgctgttgttcatgcggttaatgaggactatggggagatggcaaatgatttcactaggcttgggttcttggccaaggataccgatgtttctcctatcgttccagctttagaagccatctggcagaactctgcagggaaaggacttgcagatttcaatttccgaagtgttacaggacaattcaacaagcttgtgtacgactttcccatccgtatcccagagcggttctctcttgttattcgttctctgcttacgcaggagggtatatgtttcacactgaagcctgattttaaatttctagaggttgcttatccatatgtagcaaaacggctcctaacggatccaaatcctgcacttcgggaacgcttgatacaggttctattcaaagatggtgttttccaatggaaaaggctagaaaaccttttatcacttgcaaaggaaaacgtcgccaagatgagtagcaatcctaatctacgagtaaagcgtgtggagagtaagcttgacttgacagataccattaaggacggagctcgtcttttcctccttgacgaaggcatccgcaggaaacttattcttgcactcacagaggactcgaagcttcatgtagaagagcttgtggacgtatacagattggttgaagacgaagtagatattcccacactggccatgcaagtcgtgcaagatttaccgaatgttttccgagattttgtgttgtcatggagcaactcagtattatccgacagatgatgaatcagcttctcacttactttttttggctctttttgaagaggaaagaggtaatatatattacagggagtagatggagaagaaaagcgtagattaatatatagtttaatcttcgatgcatacatgttattaacttatacaccaatccatacatgtaattatataaaagcacacacaaacttcacttcacttgttacccagtttgagtcttggtctcttggacgttgtctactgtagttggatatctaaacacattaatcgacgtcatcaaatcaaagttgtagtgttctcacaacacaactgattcacaatctggactcgaatgaattgaatcgttttgcgtct

SEQ ID NO: 80938 - protein, 682 aa, Arabidopsis thaliana
  peptide (1)..(682): Ceres Seq. ID no. 12657826
  misc_feature (224)..(344): Pfam Name: ABC1 family Pfam Description: ABC1 family
  misc_feature (1)..(536): Homolog of NCBI NO: 7486669 NR Description: hypothetical protein F8F16.210 - Arabidopsis >gi|2827534|emb|CAA16542.1| predicted protein [Arabidopsis >gi|7270041|emb|CAB79857.1| predicted protein [Arabidopsis
  misc_feature (135)..(669): Homolog of NCBI NO: 23129126 NR Description: hypothetical protein [Nostoc punctiforme]
  misc_feature (111)..(663): Homolog of NCBI NO: 17228088 NR Description: hypothetical protein [Nostoc sp. PCC 7120]
  misc_feature (111)..(650): Homolog of NCBI NO: 23040126 NR Description: hypothetical protein [Trichodesmium erythraeum
  misc_feature (135)..(649): Homolog of NCBI NO: 16329739 NR Description: ABC1-like [Synechocystis sp. PCC 6803]
  misc_feature (111)..(650): Homolog of NCBI NO: 22299203 NR Description: ORF_ID:tlr1660~hypothetical protein
  misc_feature (111)..(663): Homolog of NCBI NO: 37523981 NR Description: hypothetical protein gll4412 [Gloeobacter
  misc_feature (112)..(582): Homolog of NCBI NO: 16331408 NR Description: ABC1-like [Synechocystis sp. PCC 6803]
  misc_feature (112)..(582): Homolog of NCBI NO: 23042448 NR Description: hypothetical protein [Trichodesmium erythraeum
  misc_feature (136)..(582): Homolog of NCBI NO: 17232452 NR Description: hypothetical protein [Nostoc sp. PCC 7120]
MESIHCNSLLNPNFSLNQRRRRINHAVLNRRDALLRSLNAVELRRSRTFSAVRTSNFSVTAAATDVGGRNSTDASVMTTAMSGVERGVRVGKSSSALEQLDIERGVCVPFRKYSPETVRSKVLESRGAVVSLVSRGVEIVWTLGLYWSTLTYDFLVGRDEEVVPFRARQLRNLLCNLGPSFIKAGQVLANRPDIIREDYMNELCILQDDVPPFPNEVAFNIIEEELGQPLENIFSKISSQTIAAASLGQVYRATLRATGEDVAIKVQRPQIEPIIYRDLFLFRTLASFLNGFSLQKLGCNAELIVDEFGEKLLEELDYTLEARNIEDFLENFKDDPTVKIPGVYKNLCGPRVLVMEWIDGIRCTDPQAIKDAGIDLNGFLTVGVSAALRQLLEFGLFHGDPHPGNIFAMQDGRIAYVDFGNVAVLSQQNKQILIDAVVHAVNEDYGEMANDFTRLGFLAKDTDVSPIVPALEAIWQNSAGKGLADFNFRSVTGQFNKLVYDFPIRIPERFSLVIRSLLTQEGICFTLKPDFKFLEVAYPYVAKRLLTDPNPALRERLIQVLFKDGVFQWKRLENLLSLAKENVAKMSSNPNLRVKRVESKLDLTDTIKDGARLFLLDEGIRRKLILALTEDSKLHVEELVDVYRLVEDEVDIPTLAMQVVQDLPNVFRDFVLSWSNSVLSDR

SEQ ID NO: 80939 - protein, 606 aa, Arabidopsis thaliana
  peptide (1)..(606): Ceres Seq. ID no. 12657827
  misc_feature (148)..(268): Pfam Name: ABC1 family Pfam Description: ABC1 family
  misc_feature (1)..(460): Homolog of NCBI NO: 7486669 NR Description: hypothetical protein F8F16.210 - Arabidopsis >gi|2827534|emb|CAA16542.1| predicted protein [Arabidopsis >gi|7270041|emb|CAB79857.1| predicted protein [Arabidopsis
  misc_feature (59)..(593): Homolog of NCBI NO: 23129126 NR Description: hypothetical protein [Nostoc punctiforme]
  misc_feature (35)..(587): Homolog of NCBI NO: 17228088 NR Description: hypothetical protein [Nostoc sp. PCC 7120]
  misc_feature (35)..(574): Homolog of NCBI NO: 23040126 NR Description: hypothetical protein [Trichodesmium erythraeum
  misc_feature (59)..(573): Homolog of NCBI NO: 16329739 NR Description: ABC1-like [Synechocystis sp. PCC 6803]
  misc_feature (35)..(574): Homolog of NCBI NO: 22299203 NR Description: ORF_ID:tlr1660~hypothetical protein
  misc_feature (35)..(587): Homolog of NCBI NO: 37523981 NR Description: hypothetical protein gll4412 [Gloeobacter
  misc_feature (36)..(506): Homolog of NCBI NO: 16331408 NR Description: ABC1-like [Synechocystis sp. PCC 6803]
  misc_feature (36)..(506): Homolog of NCBI NO: 23042448 NR Description: hypothetical protein [Trichodesmium erythraeum
  misc_feature (60)..(506): Homolog of NCBI NO: 17232452 NR Description: hypothetical protein [Nostoc sp. PCC 7120]
MTTAMSGVERGVRVGKSSSALEQLDIERGVCVPFRKYSPETVRSKVLESRGAVVSLVSRGVEIVWTLGLYWSTLTYDFLVGRDEEVVPFRARQLRNLLCNLGPSFIKAGQVLANRPDIIREDYMNELCILQDDVPPFPNEVAFNIIEEELGQPLENIFSKISSQTIAAASLGQVYRATLRATGEDVAIKVQRPQIEPIIYRDLFLFRTLASFLNGFSLQKLGCNAELIVDEFGEKLLEELDYTLEARNIEDFLENFKDDPTVKIPGVYKNLCGPRVLVMEWIDGIRCTDPQAIKDAGIDLNGFLTVGVSAALRQLLEFGLFHGDPHPGNIFAMQDGRIAYVDFGNVAVLSQQNKQILIDAVVHAVNEDYGEMANDFTRLGFLAKDTDVSPIVPALEAIWQNSAGKGLADFNFRSVTGQFNKLVYDFPIRIPERFSLVIRSLLTQEGICFTLKPDFKFLEVAYPYVAKRLLTDPNPALRERLIQVLFKDGVFQWKRLENLLSLAKENVAKMSSNPNLRVKRVESKLDLTDTIKDGARLFLLDEGIRRKLILALTEDSKLHVEELVDVYRLVEDEVDIPTLAMQVVQDLPNVFRDFVLSWSNSVLSDR

SEQ ID NO: 80940 - protein, 602 aa, Arabidopsis thaliana
  peptide (1)..(602): Ceres Seq. ID no. 12657828
  misc_feature (144)..(264): Pfam Name: ABC1 family Pfam Description: ABC1 family
  misc_feature (1)..(456): Homolog of NCBI NO: 7486669 NR Description: hypothetical protein F8F16.210 - Arabidopsis >gi|2827534|emb|CAA16542.1| predicted protein [Arabidopsis >gi|7270041|emb|CAB79857.1| predicted protein [Arabidopsis
  misc_feature (55)..(589): Homolog of NCBI NO: 23129126 NR Description: hypothetical protein [Nostoc punctiforme]
  misc_feature (31)..(583): Homolog of NCBI NO: 17228088 NR Description: hypothetical protein [Nostoc sp. PCC 7120]
  misc_feature (31)..(570): Homolog of NCBI NO: 23040126 NR Description: hypothetical protein [Trichodesmium erythraeum
  misc_feature (55)..(569): Homolog of NCBI NO: 16329739 NR Description: ABC1-like [Synechocystis sp. PCC 6803]
  misc_feature (31)..(570): Homolog of NCBI NO: 22299203 NR Description: ORF_ID:tlr1660~hypothetical protein
  misc_feature (31)..(583): Homolog of NCBI NO: 37523981 NR Description: hypothetical protein gll4412 [Gloeobacter
  misc_feature (32)..(502): Homolog of NCBI NO: 16331408 NR Description: ABC1-like [Synechocystis sp. PCC 6803]
  misc_feature (32)..(502): Homolog of NCBI NO: 23042448 NR Description: hypothetical protein [Trichodesmium erythraeum
  misc_feature (56)..(502): Homolog of NCBI NO: 17232452 NR Description: hypothetical protein [Nostoc sp. PCC 7120]
MSGVERGVRVGKSSSALEQLDIERGVCVPFRKYSPETVRSKVLESRGAVVSLVSRGVEIVWTLGLYWSTLTYDFLVGRDEEVVPFRARQLRNLLCNLGPSFIKAGQVLANRPDIIREDYMNELCILQDDVPPFPNEVAFNIIEEELGQPLENIFSKISSQTIAAASLGQVYRATLRATGEDVAIKVQRPQIEPIIYRDLFLFRTLASFLNGFSLQKLGCNAELIVDEFGEKLLEELDYTLEARNIEDFLENFKDDPTVKIPGVYKNLCGPRVLVMEWIDGIRCTDPQAIKDAGIDLNGFLTVGVSAALRQLLEFGLFHGDPHPGNIFAMQDGRIAYVDFGNVAVLSQQNKQILIDAVVHAVNEDYGEMANDFTRLGFLAKDTDVSPIVPALEAIWQNSAGKGLADFNFRSVTGQFNKLVYDFPIRIPERFSLVIRSLLTQEGICFTLKPDFKFLEVAYPYVAKRLLTDPNPALRERLIQVLFKDGVFQWKRLENLLSLAKENVAKMSSNPNLRVKRVESKLDLTDTIKDGARLFLLDEGIRRKLILALTEDSKLHVEELVDVYRLVEDEVDIPTLAMQVVQDLPNVFRDFVLSWSNSVLSDR

SEQ ID NO: 80941 - DNA, 1478 bp, Arabidopsis thaliana
  misc_feature (1)..(1478): Ceres Seq. ID no. 12657829
  misc_feature: MA Experiment ID: 20000436 Result: Up-regulated in Transcription
  misc_feature: MA Experiment 20000436 PARAMETER Experiment Name: At_Drought_P Parameter: Age (day) Value: 7
  misc_feature: MA Experiment 20000436 PARAMETER Experiment Name: At_Drought_P Parameter: Organism Value: A. thaliana
  misc_feature: MA Experiment 20000436 PARAMETER Experiment Name: At_Drought_P Parameter: Plant Line Value: WS
  misc_feature: MA Experiment 20000436 PARAMETER Experiment Name: At_Drought_P Parameter: Timepoint (hr) Value: 12
  misc_feature: MA Experiment 20000436 PARAMETER Experiment Name: At_Drought_P Parameter: Tissue Value: Whole Plant
  misc_feature: MA Experiment 20000436 PARAMETER Experiment Name: At_Drought_P Parameter: Treatment Value: Drought vs. No Drought
  misc_feature: MA Experiment ID: 20000437 Result: Up-regulated in Transcription
  misc_feature: MA Experiment 20000437 PARAMETER Experiment Name: At_Drought_P Parameter: Age (day) Value: 8
  misc_feature: MA Experiment 20000437 PARAMETER Experiment Name: At_Drought_P Parameter: Organism Value: A. thaliana
  misc_feature: MA Experiment 20000437 PARAMETER Experiment Name: At_Drought_P Parameter: Plant Line Value: WS
  misc_feature: MA Experiment 20000437 PARAMETER Experiment Name: At_Drought_P Parameter: Timepoint (hr) Value: 24
  misc_feature: MA Experiment 20000437 PARAMETER Experiment Name: At_Drought_P Parameter: Tissue Value: Whole Plant
  misc_feature: MA Experiment 20000437 PARAMETER Experiment Name: At_Drought_P Parameter: Treatment Value: Drought vs. No Drought
  misc_feature: MA Experiment ID: 20001248 Result: Up-regulated in Transcription
  misc_feature: MA Experiment 20001248 PARAMETER Experiment Name: At_Far-red-induction_P Parameter: Age (day) Value: 7
  misc_feature: MA Experiment 20001248 PARAMETER Experiment Name: At_Far-red-induction_P Parameter: Light Value: Far-red vs. White
  misc_feature: MA Experiment 20001248 PARAMETER Experiment Name: At_Far-red-induction_P Parameter: Organism Value: A. thaliana
  misc_feature: MA Experiment 20001248 PARAMETER Experiment Name: At_Far-red-induction_P Parameter: Plant Line Value: Columbia
  misc_feature: MA Experiment 20001248 PARAMETER Experiment Name: At_Far-red-induction_P Parameter: Timepoint (hr) Value: 4
  misc_feature: MA Experiment 20001248 PARAMETER Experiment Name: At_Far-red-induction_P Parameter: Tissue Value: Whole Plant
  misc_feature: MA Experiment ID: 20001450 Result: Up-regulated in Transcription
  misc_feature: MA Experiment 20001450 PARAMETER Experiment Name: At_Far-red-induction_P Parameter: Age (day) Value: 7
  misc_feature: MA Experiment 20001450 PARAMETER Experiment Name: At_Far-red-induction_P Parameter: Light Value: Far-red vs. White
  misc_feature: MA Experiment 20001450 PARAMETER Experiment Name: At_Far-red-induction_P Parameter: Organism Value: A. thaliana
  misc_feature: MA Experiment 20001450 PARAMETER Experiment Name: At_Far-red-induction_P Parameter: Plant Line Value: Columbia
  misc_feature: MA Experiment 20001450 PARAMETER Experiment Name: At_Far-red-induction_P Parameter: Timepoint (hr) Value: 8
  misc_feature: MA Experiment 20001450 PARAMETER Experiment Name: At_Far-red-induction_P Parameter: Tissue Value: Whole Plant
  misc_feature: MA Experiment ID: 20001451 Result: Up-regulated in Transcription
  misc_feature: MA Experiment 20001451 PARAMETER Experiment Name: At_Far-red-induction_P Parameter: Age (day) Value: 7
  misc_feature: MA Experiment 20001451 PARAMETER Experiment Name: At_Far-red-induction_P Parameter: Light Value: Far-red vs. White
  misc_feature: MA Experiment 20001451 PARAMETER Experiment Name: At_Far-red-induction_P Parameter: Organism Value: A. thaliana
  misc_feature: MA Experiment 20001451 PARAMETER Experiment Name: At_Far-red-induction_P Parameter: Plant Line Value: Columbia
  misc_feature: MA Experiment 20001451 PARAMETER Experiment Name: At_Far-red-induction_P Parameter: Timepoint (hr) Value: 24
  misc_feature: MA Experiment 20001451 PARAMETER Experiment Name: At_Far-red-induction_P Parameter: Tissue Value: Whole Plant
  misc_feature: MA Experiment ID: 20001911 Result: Up-regulated in Transcription
  misc_feature: MA Experiment 20001911 PARAMETER Experiment Name: At_Drought_Reproduction_P Parameter: Age (day) Value: 40
  misc_feature: MA Experiment 20001911 PARAMETER Experiment Name: At_Drought_Reproduction_P Parameter: Organism Value: A. thaliana
  misc_feature: MA Experiment 20001911 PARAMETER Experiment Name: At_Drought_Reproduction_P Parameter: Plant Line Value: WS
  misc_feature: MA Experiment 20001911 PARAMETER Experiment Name: At_Drought_Reproduction_P Parameter: Timepoint (day) Value: 10
  misc_feature: MA Experiment 20001911 PARAMETER Experiment Name: At_Drought_Reproduction_P Parameter: Tissue Value: Flowers
  misc_feature: MA Experiment 20001911 PARAMETER Experiment Name: At_Drought_Reproduction_P Parameter: Treatment Value: Drought vs. No Drought
gacgcttttttagagacaaacacgatcgccgatccatttacgagccgtcgttgctctacacatatcaacaacaaatcttatcctcccaactatcttttctctgattttcttttcttctccagtttccatttctagaatcgatcgatattgaaggagagaagatgcctggtttaacatgtaacgcgtgtaacatggagttcaaggacgaagaagaacgtaaccttcattacaaatccgattggcaccgctacaatctcaagcgcaaggtggctggagttcctggagttacagaagccttgtttgaggctagacaatctgctcttgctcaggagaagaataaatcaaatgaagcacctatgctttatacttgtgcaatctgtgctaaaggttacaggagttccaaggctcatgagcagcatcttcagtcgcgtagccatgttttgcgggtttcacaagggacatcaatcaacggagaggaggatatagcgattatcaggcaacttcctcgccgtgttcaacacaggggttccattgatgatgatagtgaagatgaatgggtggaggttgattctgacgaggaattggctgctgaagaagcctctgattctttgtctaagttgaatgtgaatgagtctggatctgctgaagatatggatgatgatggtgatgcagataagtatgagctggatccaacctgctgtttgatgtgtgacaaaaaacataagaccttagagagctgtatgcttcacatgcataagcatcatggtttctttattcccgatattgagtatctcaaggatcctgaagggcttctcacttaccttggtcttaaggtcaagagagacttcatgtgtctgtactgcaatgagctgtgccgtccattcagcagcttagaagctgtaagaaaacatatggaagcaaagagtcattgcaaactgcattatggtgatggtgatgatgaagaagatgctgagctagaagagttttatgactacagcagcagctatgttgatgaagctggaaagcaaattgttgtatctggtgaaacagacaatactgtagaactcgttggtggttctgagctcttgatcacggagaagtccgagaacacaacaacgtctaaaactctcgggtcccgtgaattcatgcgttactacagacagaagccacgcccaacttctcaagacagcaaccagataattgcctctttatcttcaaggtacaagagcctgggtctgaagacagtaccgtcgaaagaggagactttgaggatgaaagtgcgcaaggagatgagcaagagaggcgagacaatgcgtaccaagatcggagtgaagagtaatgtcataagaaacttgcccaataacgtcccatattagtttctgtgtatgtgccacttgttctcaagtgttggattgtatgatgatttcatgtacttttgagtctttgaccaagttgtgttgctacttggtaataagagt

SEQ ID NO: 80942 - protein, 404 aa, Arabidopsis thaliana
  peptide (1)..(404): Ceres Seq. ID no. 12657830
  misc_feature (229)..(256): Pfam Name: Zinc finger, C2H2 type Pfam Description: Zinc finger, C2H2 type
  misc_feature (1)..(404): Homolog of NCBI NO: 18417803 NR Description: putative zinc finger protein; protein id: supported by cDNA: gi_13878012 [Arabidopsis thaliana]
  misc_feature (1)..(404): Homolog of NCBI NO: 13878013 NR Description: putative zinc finger protein [Arabidopsis
  misc_feature (1)..(354): Homolog of NCBI NO: 7486672 NR Description: hypothetical protein F8F16.240 - Arabidopsis >gi|2827537|emb|CAA16545.1| putative zinc finger protein thaliana] >gi|7270045|emb|CAB79860.1| putative zinc finger
  misc_feature (1)..(404): Homolog of NCBI NO: 15224153 NR Description: putative C2H2-type zinc finger protein; protein At2g24500.1, supported by cDNA: gi_17065087, supported by cDNA: [Arabidopsis thaliana] >gi|25453524|pir||T52423 C2H2 zinc finger
  misc_feature (159)..(326): Homolog of NCBI NO: 28207607 NR Description: putative C2H2-type zinc finger protein [Brassica
  misc_feature (125)..(398): Homolog of NCBI NO: 21362307 NR Description: hypothetical protein D15Ertd806e [Mus musculus] Similar to CG6769 gene product [Mus musculus]
  misc_feature (1)..(92): Homolog of NCBI NO: 21362307 NR Description: hypothetical protein D15Ertd806e [Mus musculus] Similar to CG6769 gene product [Mus musculus]
  misc_feature (125)..(358): Homolog of NCBI NO: 33286946 NR Description: Unknown (protein for IMAGE:6795513) [Danio rerio]
  misc_feature (5)..(134): Homolog of NCBI NO: 33286946 NR Description: Unknown (protein for IMAGE:6795513) [Danio rerio]
  misc_feature (125)..(398): Homolog of NCBI NO: 34854897 NR Description: similar to Ac1133 [Rattus norvegicus]
MPGLTCNACNMEFKDEEERNLHYKSDWHRYNLKRKVAGVPGVTEALFEARQSALAQEKNKSNEAPMLYTCAICAKGYRSSKAHEQHLQSRSHVLRVSQGTSINGEEDIAIIRQLPRRVQHRGSIDDDSEDEWVEVDSDEELAAEEASDSLSKLNVNESGSAEDMDDDGDADKYELDPTCCLMCDKKHKTLESCMLHMHKHHGFFIPDIEYLKDPEGLLTYLGLKVKRDFMCLYCNELCRPFSSLEAVRKHMEAKSHCKLHYGDGDDEEDAELEEFYDYSSSYVDEAGKQIVVSGETDNTVELVGGSELLITEKSENTTTSKTLGSREFMRYYRQKPRPTSQDSNQIIASLSSRYKSLGLKTVPSKEETLRMKVRKEMSKRGETMRTKIGVKSNVIRNLPNNVPY

SEQ ID NO: 80943 - protein, 394 aa, Arabidopsis thaliana
  peptide (1)..(394): Ceres Seq. ID no. 12657831
  misc_feature (219)..(246): Pfam Name: Zinc finger, C2H2 type Pfam Description: Zinc finger, C2H2 type
  misc_feature (1)..(394): Homolog of NCBI NO: 18417803 NR Description: putative zinc finger protein; protein id: supported by cDNA: gi_13878012 [Arabidopsis thaliana]
  misc_feature (1)..(394): Homolog of NCBI NO: 13878013 NR Description: putative zinc finger protein [Arabidopsis
  misc_feature (1)..(344): Homolog of NCBI NO: 7486672 NR Description: hypothetical protein F8F16.240 - Arabidopsis >gi|2827537|emb|CAA16545.1| putative zinc finger protein thaliana] >gi|7270045|emb|CAB79860.1| putative zinc finger
  misc_feature (1)..(394): Homolog of NCBI NO: 15224153 NR Description: putative C2H2-type zinc finger protein; protein At2g24500.1, supported by cDNA: gi_17065087, supported by cDNA: [Arabidopsis thaliana] >gi|25453524|pir||T52423 C2H2 zinc finger
  misc_feature (149)..(316): Homolog of NCBI NO: 28207607 NR Description: putative C2H2-type zinc finger protein [Brassica
  misc_feature (115)..(388): Homolog of NCBI NO: 21362307 NR Description: hypothetical protein D15Ertd806e [Mus musculus] Similar to CG6769 gene product [Mus musculus]
  misc_feature (1)..(82): Homolog of NCBI NO: 21362307 NR Description: hypothetical protein D15Ertd806e [Mus musculus] Similar to CG6769 gene product [Mus musculus]
  misc_feature (115)..(348): Homolog of NCBI NO: 33286946 NR Description: Unknown (protein for IMAGE:6795513) [Danio rerio]
  misc_feature (1)..(124): Homolog of NCBI NO: 33286946 NR Description: Unknown (protein for IMAGE:6795513) [Danio rerio]
  misc_feature (115)..(388): Homolog of NCBI NO: 34854897 NR Description: similar to Ac1133 [Rattus norvegicus]
MEFKDEEERNLHYKSDWHRYNLKRKVAGVPGVTEALFEARQSALAQEKNKSNEAPMLYTCAICAKGYRSSKAHEQHLQSRSHVLRVSQGTSINGEEDIAIIRQLPRRVQHRGSIDDDSEDEWVEVDSDEELAAEEASDSLSKLNVNESGSAEDMDDDGDADKYELDPTCCLMCDKKHKTLESCMLHMHKHHGFFIPDIEYLKDPEGLLTYLGLKVKRDFMCLYCNELCRPFSSLEAVRKHMEAKSHCKLHYGDGDDEEDAELEEFYDYSSSYVDEAGKQIVVSGETDNTVELVGGSELLITEKSENTTTSKTLGSREFMRYYRQKPRPTSQDSNQIIASLSSRYKSLGLKTVPSKEETLRMKVRKEMSKRGETMRTKIGVKSNVIRNLPNNVPY

SEQ ID NO: 80944 - protein, 339 aa, Arabidopsis thaliana
  peptide (1)..(339): Ceres Seq. ID no. 12657832
  misc_feature (164)..(191): Pfam Name: Zinc finger, C2H2 type Pfam Description: Zinc finger, C2H2 type
  misc_feature (1)..(339): Homolog of NCBI NO: 18417803 NR Description: putative zinc finger protein; protein id: supported by cDNA: gi_13878012 [Arabidopsis thaliana]
  misc_feature (1)..(339): Homolog of NCBI NO: 13878013 NR Description: putative zinc finger protein [Arabidopsis
  misc_feature (1)..(289): Homolog of NCBI NO: 7486672 NR Description: hypothetical protein F8F16.240 - Arabidopsis >gi|2827537|emb|CAA16545.1| putative zinc finger protein thaliana] >gi|7270045|emb|CAB79860.1| putative zinc finger
  misc_feature (1)..(339): Homolog of NCBI NO: 15224153 NR Description: putative C2H2-type zinc finger protein; protein At2g24500.1, supported by cDNA: gi_17065087, supported by cDNA: [Arabidopsis thaliana] >gi|25453524|pir||T52423 C2H2 zinc finger
  misc_feature (94)..(261): Homolog of NCBI NO: 28207607 NR Description: putative C2H2-type zinc finger protein [Brassica
  misc_feature (60)..(333): Homolog of NCBI NO: 21362307 NR Description: hypothetical protein D15Ertd806e [Mus musculus] Similar to CG6769 gene product [Mus musculus]
  misc_feature (1)..(27): Homolog of NCBI NO: 21362307 NR Description: hypothetical protein D15Ertd806e [Mus musculus] Similar to CG6769 gene product [Mus musculus]
  misc_feature (60)..(293): Homolog of NCBI NO: 33286946 NR Description: Unknown (protein for IMAGE:6795513) [Danio rerio]
  misc_feature (1)..(69): Homolog of NCBI NO: 33286946 NR Description: Unknown (protein for IMAGE:6795513) [Danio rerio]
  misc_feature (60)..(333): Homolog of NCBI NO: 34854897 NR Description: similar to Ac1133 [Rattus norvegicus]
MLYTCAICAKGYRSSKAHEQHLQSRSHVLRVSQGTSINGEEDIAIIRQLPRRVQHRGSIDDDSEDEWVEVDSDEELAAEEASDSLSKLNVNESGSAEDMDDDGDADKYELDPTCCLMCDKKHKTLESCMLHMHKHHGFFIPDIEYLKDPEGLLTYLGLKVKRDFMCLYCNELCRPFSSLEAVRKHMEAKSHCKLHYGDGDDEEDAELEEFYDYSSSYVDEAGKQIVVSGETDNTVELVGGSELLITEKSENTTTSKTLGSREFMRYYRQKPRPTSQDSNQIIASLSSRYKSLGLKTVPSKEETLRMKVRKEMSKRGETMRTKIGVKSNVIRNLPNNVPY

SEQ ID NO: 80945 - DNA, 558 bp, Arabidopsis thaliana
  misc_feature (1)..(558): Ceres Seq. ID no. 12657837
  misc_feature: MA Experiment ID: 20000307 Result: Up-regulated in Transcription
  misc_feature: MA Experiment 20000307 PARAMETER Experiment Name: At_Germinating_Seeds_Sub_P Parameter: Age (hr) Value: 24 vs. 0
  misc_feature: MA Experiment 20000307 PARAMETER Experiment Name: At_Germinating_Seeds_Sub_P Parameter: Organism Value: A. thaliana
  misc_feature: MA Experiment 20000307 PARAMETER Experiment Name: At_Germinating_Seeds_Sub_P Parameter: Plant Line Value: WS
  misc_feature: MA Experiment 20000307 PARAMETER Experiment Name: At_Germinating_Seeds_Sub_P Parameter: Tissue Value: Germinating Seeds
  misc_feature: MA Experiment ID: 20000314 Result: Up-regulated in Transcription
  misc_feature: MA Experiment 20000314 PARAMETER Experiment Name: At_14day_Shoots-Roots_Sub_P Parameter: Age (day) Value: 14
  misc_feature: MA Experiment 20000314 PARAMETER Experiment Name: At_14day_Shoots-Roots_Sub_P Parameter: Organism Value: A. thaliana
  misc_feature: MA Experiment 20000314 PARAMETER Experiment Name: At_14day_Shoots-Roots_Sub_P Parameter: Plant Line Value: WS
  misc_feature: MA Experiment 20000314 PARAMETER Experiment Name: At_14day_Shoots-Roots_Sub_P Parameter: Tissue Value: Roots vs. Whole Plant
  misc_feature: MA Experiment ID: 20000355 Result: Up-regulated in Transcription
  misc_feature: MA Experiment 20000355 PARAMETER Experiment Name: At_Siliques_Sub_P Parameter: Age (day) Value: 21
  misc_feature: MA Experiment 20000355 PARAMETER Experiment Name: At_Siliques_Sub_P Parameter: Organism Value: A. thaliana
  misc_feature: MA Experiment 20000355 PARAMETER Experiment Name: At_Siliques_Sub_P Parameter: Plant Line Value: WS
  misc_feature: MA Experiment 20000355 PARAMETER Experiment Name: At_Siliques_Sub_P Parameter: Tissue Value: Less Than 5mm Siliques vs. Whole Plant
atggaacaaaaaactctgatattcatcatcattatcatagttatcagcactccacttccttctctctcttttcaaatcccatcaaacagaacaccgacaacatcaacactaattttttctcaagacaaagctctagcccgcaacaccattcagcagcagtttctccgaccacacaacatcttacgagccaagcttcgtctccctcctctcaaatggagcaatagcctcgccctctatgcgagccggtgggccagaacccgccgtggagattgcaaacttatccactccgggggaccttacggggagaatctcttctggggaagcggaaaaggttggactccacgggatgcggtggctgcatgggcctcggagatgaaatactatgaccggaggacttcccactgcaaggcgaatggggattgtttgcattacacgcaacttgtatggaagaagagttcgaggattgggtgtgcaatcagtttttgcaagaccggtgacacatttattatttgtaactatgatcctcctggtaacattgttggacaaccacccttttga

SEQ ID NO: 80946 - protein, 185 aa, Arabidopsis thaliana
  peptide (1)..(185): Ceres Seq. ID no. 12657838
  misc_feature (55)..(172): Pfam Name: SCP-like extracellular protein Pfam Description: SCP-like extracellular protein
  misc_feature (1)..(185): Homolog of NCBI NO: 15235962 NR Description: pathogenesis-related protein homolog; protein id:
  misc_feature (18)..(185): Homolog of NCBI NO: 22327916 NR Description: similar to putative pathogenesis-related protein; id: At5g57625.1 [Arabidopsis thaliana]
  misc_feature (49)..(185): Homolog of NCBI NO: 15234704 NR Description: PR-1-like protein; protein id: At4g30320.1
  misc_feature (31)..(185): Homolog of NCBI NO: 15235994 NR Description: putative pathogenesis-related protein; protein id:
  misc_feature (46)..(185): Homolog of NCBI NO: 7442179 NR Description: pathogenesis related protein-1 - maize
  misc_feature (52)..(185): Homolog of NCBI NO: 100907 NR Description: pathogenesis-related protein 1 - maize
  misc_feature (48)..(185): Homolog of NCBI NO: 15223370 NR Description: pathogenesis related protein, putative; protein
  misc_feature (48)..(185): Homolog of NCBI NO: 25518458 NR Description: hypothetical protein F6F3.11 - Arabidopsis
  misc_feature (46)..(185): Homolog of NCBI NO: 3702665 NR Description: pathogenisis-related protein 1.2 [Triticum
  misc_feature (8)..(185): Homolog of NCBI NO: 15235992 NR Description: putative pathogenesis-related protein; protein id:
MEQKTLIFIIIIIVISTPLPSLSFQIPSNRTPTTSTLIFSQDKALARNTIQQQFLRPHNILRAKLRLPPLKWSNSLALYASRWARTRRGDCKLIHSGGPYGENLFWGSGKGWTPRDAVAAWASEMKYYDRRTSHCKANGDCLHYTQLVWKKSSRIGCAISFCKTGDTFIICNYDPPGNIVGQPPF

SEQ ID NO: 80947 - DNA, 1437 bp, Arabidopsis thaliana
  misc_feature (1)..(1437): Ceres Seq. ID no. 12657850
atggatgatccagcaatttcctctccaaccaacaagcatttcttcgtcatagttcttcatggacacaaatccagtcccatgattcctgctgagtttttttcgacttacgtggaaggtaaaaaccaccagtctacaaaactgaaactgacctcggacgctttcgatagaacctgggaagtgaaattgaacggccgcagattcgccggcggctgggaaaatttctccaccgtacactctctccaagatgacgacgttgtgattttcagggaaatcggggacatgacctttcacgtcacagcctccggtcgcagtttctgtaagttacagtacatatcctctgacgaagatagggctgatgaagatgatgcatggaacgtgtattcagattccaagaacattgtgtcgaagaagaagccaagaacagaagcagagtcttcatccaaaaactattatcttgttgcgcatgtcacgccttcgaacctaagccgagatagattgtatcttataaaggcttttgcgaggtcaaatggcctgaacgagagatgctgtgagattgatctaatgaataaacatggaaaatcatggacacttggtctgagatacagtacagtcaatgatcaggctagtatcagtggaggctggagagacttctgcttagtaaatgggctagaagctggatcattctacaggtttaagcttgtccaaaacggggaaaggcctttactacggttgtgttacgacactattccagaagaagactgttacaaaggaaacagaaaagttaatctttcagagagtgcttcaatgaagcagggcaagtttctgacaatgacctttaagccttacatgctcaagtcaggtcaacttcgtctctcgagaccctttgcaatagagaatgaaataaaggaggcagaggatataacactagtggacaaaaatggaggaaactggccatcctatgtagcttctggcgatggtcaaggaggaaagtattatttggcaaaaggttggagaagtttttgtgcagccaataggttaaagacgggagagaccttcacgttggagtttgttcgaggagaaggcacaactccaatgctaaagttctgctccaagtccaaggacaagatagaacaagtaccatttgatgaaggaggggagactcaagaagaaacagagactagggtcaaaaagagagctcgagtttctgcagaaagaggatcttctcgccgcaatcaggcatcaaataaacccaatgctgatccacaaaacttgcagcctgggcaaccacattgctcaatctctgatcaagtgcaaaaggtgaaacagattattgttgacactttaaccgggataaaacggattcggtcagagctagaaagaaagggacaaaagttagaagcttcgatactggaaattgatgctttaggtatgatctga

SEQ ID NO: 80948 - protein, 478 aa, Arabidopsis thaliana
  peptide (1)..(478): Ceres Seq. ID no. 12657851
  misc_feature (274)..(375): Pfam Name: B3 DNA binding domain Pfam Description: B3 DNA binding domain
  misc_feature (1)..(478): Homolog of NCBI NO: 22329058 NR Description: similar to meristem protein - like; protein id:
  misc_feature (27)..(478): Homolog of NCBI NO: 7486326 NR Description: hypothetical protein F28M20.190 - Arabidopsis >gi|3281865|emb|CAA19761.1| putative protein [Arabidopsis >gi|7270065|emb|CAB79880.1| putative protein [Arabidopsis
  misc_feature (1)..(47): Homolog of NCBI NO: 7486326 NR Description: hypothetical protein F28M20.190 - Arabidopsis >gi|3281865|emb|CAA19761.1| putative protein [Arabidopsis >gi|7270065|emb|CAB79880.1| putative protein [Arabidopsis
  misc_feature (4)..(289): Homolog of NCBI NO: 7486326 NR Description: hypothetical protein F28M20.190 - Arabidopsis >gi|3281865|emb|CAA19761.1| putative protein [Arabidopsis >gi|7270065|emb|CAB79880.1| putative protein [Arabidopsis
  misc_feature (256)..(477): Homolog of NCBI NO: 7486326 NR Description: hypothetical protein F28M20.190 - Arabidopsis >gi|3281865|emb|CAA19761.1| putative protein [Arabidopsis >gi|7270065|emb|CAB79880.1| putative protein [Arabidopsis
  misc_feature (4)..(476): Homolog of NCBI NO: 22329060 NR Description: putative protein; protein id: At4g31620.1, by cDNA: gi_17380947 [Arabidopsis thaliana] unknown protein [Arabidopsis thaliana]
  misc_feature (114)..(478): Homolog of NCBI NO: 15236028 NR Description: putative protein; protein id: At4g31630.1
  misc_feature (110)..(399): Homolog of NCBI NO: 7486327 NR Description: hypothetical protein F28M20.200 - Arabidopsis >gi|3281866|emb|CAA19762.1| putative protein [Arabidopsis >gi|7270064|emb|CAB79879.1| putative protein [Arabidopsis
  misc_feature (41)..(122): Homolog of NCBI NO: 7486327 NR Description: hypothetical protein F28M20.200 - Arabidopsis >gi|3281866|emb|CAA19762.1| putative protein [Arabidopsis >gi|7270064|emb|CAB79879.1| putative protein [Arabidopsis
  misc_feature (400)..(477): Homolog of NCBI NO: 7486327 NR Description: hypothetical protein F28M20.200 - Arabidopsis >gi|3281866|emb|CAA19762.1| putative protein [Arabidopsis >gi|7270064|emb|CAB79879.1| putative protein [Arabidopsis
MDDPAISSPTNKHFFVIVLHGHKSSPMIPAEFFSTYVEGKNHQSTKLKLTSDAFDRTWEVKLNGRRFAGGWENFSTVHSLQDDDVVIFREIGDMTFHVTASGRSFCKLQYISSDEDRADEDDAWNVYSDSKNIVSKKKPRTEAESSSKNYYLVAHVTPSNLSRDRLYLIKAFARSNGLNERCCEIDLMNKHGKSWTLGLRYSTVNDQASISGGWRDFCLVNGLEAGSFYRFKLVQNGERPLLRLCYDTIPEEDCYKGNRKVNLSESASMKQGKFLTMTFKPYMLKSGQLRLSRPFAIENEIKEAEDITLVDKNGGNWPSYVASGDGQGGKYYLAKGWRSFCAANRLKTGETFTLEFVRGEGTTPMLKFCSKSKDKIEQVPFDEGGETQEETETRVKKRARVSAERGSSRRNQASNKPNADPQNLQPGQPHCSISDQVQKVKQIIVDTLTGIKRIRSELERKGQKLEASILEIDALGMI

SEQ ID NO: 80949 - protein, 452 aa, Arabidopsis thaliana
  peptide (1)..(452): Ceres Seq. ID no. 12657852
  misc_feature (248)..(349): Pfam Name: B3 DNA binding domain Pfam Description: B3 DNA binding domain
  misc_feature (1)..(452): Homolog of NCBI NO: 22329058 NR Description: similar to meristem protein - like; protein id:
  misc_feature (1)..(452): Homolog of NCBI NO: 7486326 NR Description: hypothetical protein F28M20.190 - Arabidopsis >gi|3281865|emb|CAA19761.1| putative protein [Arabidopsis >gi|7270065|emb|CAB79880.1| putative protein [Arabidopsis
  misc_feature (1)..(21): Homolog of NCBI NO: 7486326 NR Description: hypothetical protein F28M20.190 - Arabidopsis >gi|3281865|emb|CAA19761.1| putative protein [Arabidopsis >gi|7270065|emb|CAB79880.1| putative protein [Arabidopsis
  misc_feature (1)..(263): Homolog of NCBI NO: 7486326 NR Description: hypothetical protein F28M20.190 - Arabidopsis >gi|3281865|emb|CAA19761.1| putative protein [Arabidopsis >gi|7270065|emb|CAB79880.1| putative protein [Arabidopsis
  misc_feature (230)..(451): Homolog of NCBI NO: 7486326 NR Description: hypothetical protein F28M20.190 - Arabidopsis >gi|3281865|emb|CAA19761.1| putative protein [Arabidopsis >gi|7270065|emb|CAB79880.1| putative protein [Arabidopsis
  misc_feature (1)..(450): Homolog of NCBI NO: 22329060 NR Description: putative protein; protein id: At4g31620.1, by cDNA: gi_17380947 [Arabidopsis thaliana] unknown protein [Arabidopsis thaliana]
  misc_feature (88)..(452): Homolog of NCBI NO: 15236028 NR Description: putative protein; protein id: At4g31630.1
  misc_feature (84)..(373): Homolog of NCBI NO: 7486327 NR Description: hypothetical protein F28M20.200 - Arabidopsis >gi|3281866|emb|CAA19762.1| putative protein [Arabidopsis >gi|7270064|emb|CAB79879.1| putative protein [Arabidopsis
  misc_feature (15)..(96): Homolog of NCBI NO: 7486327 NR Description: hypothetical protein F28M20.200 - Arabidopsis >gi|3281866|emb|CAA19762.1| putative protein [Arabidopsis >gi|7270064|emb|CAB79879.1| putative protein [Arabidopsis
  misc_feature (374)..(451): Homolog of NCBI NO: 7486327 NR Description: hypothetical protein F28M20.200 - Arabidopsis >gi|3281866|emb|CAA19762.1| putative protein [Arabidopsis >gi|7270064|emb|CAB79879.1| putative protein [Arabidopsis
MIPAEFFSTYVEGKNHQSTKLKLTSDAFDRTWEVKLNGRRFAGGWENFSTVHSLQDDDVVIFREIGDMTFHVTASGRSFCKLQYISSDEDRADEDDAWNVYSDSKNIVSKKKPRTEAESSSKNYYLVAHVTPSNLSRDRLYLIKAFARSNGLNERCCEIDLMNKHGKSWTLGLRYSTVNDQASISGGWRDFCLVNGLEAGSFYRFKLVQNGERPLLRLCYDTIPEEDCYKGNRKVNLSESASMKQGKFLTMTFKPYMLKSGQLRLSRPFAIENEIKEAEDITLVDKNGGNWPSYVASGDGQGGKYYLAKGWRSFCAANRLKTGETFTLEFVRGEGTTPMLKFCSKSKDKIEQVPFDEGGETQEETETRVKKRARVSAERGSSRRNQASNKPNADPQNLQPGQPHCSISDQVQKVKQIIVDTLTGIKRIRSELERKGQKLEASILEIDALGMI

SEQ ID NO: 80950 - protein, 385 aa, Arabidopsis thaliana
  peptide (1)..(385): Ceres Seq. ID no. 12657853
  misc_feature (181)..(282): Pfam Name: B3 DNA binding domain Pfam Description: B3 DNA binding domain
  misc_feature (1)..(385): Homolog of NCBI NO: 22329058 NR Description: similar to meristem protein - like; protein id:
  misc_feature (1)..(385): Homolog of NCBI NO: 7486326 NR Description: hypothetical protein F28M20.190 - Arabidopsis >gi|3281865|emb|CAA19761.1| putative protein [Arabidopsis >gi|7270065|emb|CAB79880.1| putative protein [Arabidopsis
  misc_feature (1)..(196): Homolog of NCBI NO: 7486326 NR Description: hypothetical protein F28M20.190 - Arabidopsis >gi|3281865|emb|CAA19761.1| putative protein [Arabidopsis >gi|7270065|emb|CAB79880.1| putative protein [Arabidopsis
  misc_feature (163)..(384): Homolog of NCBI NO: 7486326 NR Description: hypothetical protein F28M20.190 - Arabidopsis >gi|3281865|emb|CAA19761.1| putative protein [Arabidopsis >gi|7270065|emb|CAB79880.1| putative protein [Arabidopsis
  misc_feature (1)..(383): Homolog of NCBI NO: 22329060 NR Description: putative protein; protein id: At4g31620.1, by cDNA: gi_17380947 [Arabidopsis thaliana] unknown protein [Arabidopsis thaliana]
  misc_feature (21)..(385): Homolog of NCBI NO: 15236028 NR Description: putative protein; protein id: At4g31630.1
  misc_feature (17)..(306): Homolog of NCBI NO: 7486327 NR Description: hypothetical protein F28M20.200 - Arabidopsis >gi|3281866|emb|CAA19762.1| putative protein [Arabidopsis >gi|7270064|emb|CAB79879.1| putative protein [Arabidopsis
  misc_feature (1)..(29): Homolog of NCBI NO: 7486327 NR Description: hypothetical protein F28M20.200 - Arabidopsis >gi|3281866|emb|CAA19762.1| putative protein [Arabidopsis >gi|7270064|emb|CAB79879.1| putative protein [Arabidopsis
  misc_feature (307)..(384): Homolog of NCBI NO: 7486327 NR Description: hypothetical protein F28M20.200 - Arabidopsis >gi|3281866|emb|CAA19762.1| putative protein [Arabidopsis >gi|7270064|emb|CAB79879.1| putative protein [Arabidopsis
  misc_feature (17)..(383): Homolog of NCBI NO: 13604227 NR Description: reproductive meristem protein 1 [Arabidopsis
MTFHVTASGRSFCKLQYISSDEDRADEDDAWNVYSDSKNIVSKKKPRTEAESSSKNYYLVAHVTPSNLSRDRLYLIKAFARSNGLNERCCEIDLMNKHGKSWTLGLRYSTVNDQASISGGWRDFCLVNGLEAGSFYRFKLVQNGERPLLRLCYDTIPEEDCYKGNRKVNLSESASMKQGKFLTMTFKPYMLKSGQLRLSRPFAIENEIKEAEDITLVDKNGGNWPSYVASGDGQGGKYYLAKGWRSFCAANRLKTGETFTLEFVRGEGTTPMLKFCSKSKDKIEQVPFDEGGETQEETETRVKKRARVSAERGSSRRNQASNKPNADPQNLQPGQPHCSISDQVQKVKQIIVDTLTGIKRIRSELERKGQKLEASILEIDALGMI

SEQ ID NO: 80951 - DNA, 981 bp, Arabidopsis thaliana
  misc_feature (1)..(981): Ceres Seq. ID no. 12657866
  misc_feature: MA Experiment ID: 20000180 Result: Up-regulated in Transcription
  misc_feature: MA Experiment 20000180 PARAMETER Experiment Name: At_Germinating_Seeds_P Parameter: Age (hr) Value: 24 vs. 0
  misc_feature: MA Experiment 20000180 PARAMETER Experiment Name: At_Germinating_Seeds_P Parameter: Tissue Value: Germinating Seeds
  misc_feature: MA Experiment ID: 20001451 Result: Up-regulated in Transcription
  misc_feature: MA Experiment 20001451 PARAMETER Experiment Name: At_Far-red-induction_P Parameter: Age (day) Value: 7
  misc_feature: MA Experiment 20001451 PARAMETER Experiment Name: At_Far-red-induction_P Parameter: Light Value: Far-red vs. White
  misc_feature: MA Experiment 20001451 PARAMETER Experiment Name: At_Far-red-induction_P Parameter: Organism Value: A. thaliana
  misc_feature: MA Experiment 20001451 PARAMETER Experiment Name: At_Far-red-induction_P Parameter: Plant Line Value: Columbia
  misc_feature: MA Experiment 20001451 PARAMETER Experiment Name: At_Far-red-induction_P Parameter: Timepoint (hr) Value: 24
  misc_feature: MA Experiment 20001451 PARAMETER Experiment Name: At_Far-red-induction_P Parameter: Tissue Value: Whole Plant
atggcgtcctcttacagaataaactgttccactcttcttcatctccttatgtttctgtctagtcttctcacttcctccgccaacctctcctttaatttctatgctagttcttgttctgtagccgagtttctagtcagaaacaccgttagatcagctacctcctccgatccaacgatccccgggaaactccttcgtcttttcttccacgactgtttcgtccagggttgtgatgcatcagtgttgatacaagggaatagcacagagaaaagcgatcccggaaacgcatctcttggaggattctcagtcatagacacagccaagaatgccatcgagaatttatgtccggccactgtttcttgcgctgacatagttgcacttgctgctagagacgccgtcgaagctgcaggaggaccggtggttgagattccgacagggaggagagacgggaaagaatcgatggctgcaaacgtgagaccgaacatcatcgacacagattttactctcgatcaaatgatcgatgccttctcttccaaaggcttgtccattcaagatctcgtcgtcctctcaggagcacacacaattggagcatcacactgtaacgcattcaatggaaggtttcaacgagactcgaaaggaaacttcgaggtaattgatgcgtctctcgacaactcctacgcagagacactaatgaacaagtgttcgtcctcggaatcctcatcattgactgtgagcaacgatccagagacatctgccgtattcgataatcagtactataggaatcttgagacgcacaagggtttgtttcagacggattctgctttgatggaggataatcggacgaggacaatggtggaggaattagcgagtgatgaggaaagcttttttcaaagatggagtgagtcgtttgtgaaactgagtatggttggtgtgagagttggtgaagatggtgagataagacgttcttgttcttccgtcaattaa

SEQ ID NO: 80952 - protein, 326 aa, Arabidopsis thaliana
  peptide (1)..(326): Ceres Seq. ID no. 12657867
  misc_feature (45)..(290): Pfam Name: Peroxidase Pfam Description: Peroxidase
  misc_feature (1)..(326): Homolog of NCBI NO: 15236066 NR Description: peroxidase, putative; protein id: At4g31760.1 thaliana] >gi|26397591|sp|O81772|PE46_ARATH Peroxidase 46
  misc_feature (11)..(326): Homolog of NCBI NO: 15224621 NR Description: peroxidase, putative; protein id: At2g24800.1 thaliana] >gi|25453218|sp|Q9SK52|PE18_ARATH Peroxidase 18 (Atperox P18) >gi|25285617|pir||F84640 probable peroxidase
  misc_feature (27)..(326): Homolog of NCBI NO: 7433090 NR Description: probable peroxidase (EC 1.11.1.7) (clone PC56) - (fragment) >gi|1781338|emb|CAA71496.1| peroxidase [Spinacia
  misc_feature (20)..(326): Homolog of NCBI NO: 38345019 NR Description: OSJNBa0029H02.3 [Oryza sativa (japonica
  misc_feature (12)..(326): Homolog of NCBI NO: 15242213 NR Description: peroxidase, putative; protein id: At5g51890.1, by cDNA: gi_18175872 [Arabidopsis thaliana] Peroxidase 66 precursor (Atperox P66) (ATP27a)
  misc_feature (10)..(326): Homolog of NCBI NO: 7484677 NR Description: peroxidase (EC 1.11.1.7) prx11 precursor - spinach
  misc_feature (13)..(326): Homolog of NCBI NO: 15241315 NR Description: peroxidase, putative; protein id: At5g14130.1, by cDNA: gi_16209688 [Arabidopsis thaliana] Peroxidase 55 precursor (Atperox P55) (ATP20a)
  misc_feature (1)..(323): Homolog of NCBI NO: 1402920 NR Description: peroxidase [Arabidopsis thaliana]
  misc_feature (1)..(323): Homolog of NCBI NO: 15233153 NR Description: peroxidase, putative; protein id: At3g21770.1, by cDNA: 118626., supported by cDNA: gi_18252200 [Arabidopsis >gi|25453212|sp|Q9LSY7|PE30_ARATH Peroxidase 30 precursor
  misc_feature (6)..(323): Homolog of NCBI NO: 1546704 NR Description: peroxidase ATP7a [Arabidopsis thaliana]
MASSYRINCSTLLHLLMFLSSLLTSSANLSFNFYASSCSVAEFLVRNTVRSATSSDPTIPGKLLRLFFHDCFVQGCDASVLIQGNSTEKSDPGNASLGGFSVIDTAKNAIENLCPATVSCADIVALAARDAVEAAGGPVVEIPTGRRDGKESMAANVRPNIIDTDFTLDQMIDAFSSKGLSIQDLVVLSGAHTIGASHCNAFNGRFQRDSKGNFEVIDASLDNSYAETLMNKCSSSESSSLTVSNDPETSAVFDNQYYRNLETHKGLFQTDSALMEDNRTRTMVEELASDEESFFQRWSESFVKLSMVGVRVGEDGEIRRSCSSVN

SEQ ID NO: 80953 - protein, 310 aa, Arabidopsis thaliana
  peptide (1)..(310): Ceres Seq. ID no. 12657868
  misc_feature (29)..(274): Pfam Name: Peroxidase Pfam Description: Peroxidase
  misc_feature (1)..(310): Homolog of NCBI NO: 15236066 NR Description: peroxidase, putative; protein id: At4g31760.1 thaliana] >gi|26397591|sp|O81772|PE46_ARATH Peroxidase 46
  misc_feature (1)..(310): Homolog of NCBI NO: 15224621 NR Description: peroxidase, putative; protein id: At2g24800.1 thaliana] >gi|25453218|sp|Q9SK52|PE18_ARATH Peroxidase 18 (Atperox P18) >gi|25285617|pir||F84640 probable peroxidase
  misc_feature (11)..(310): Homolog of NCBI NO: 7433090 NR Description: probable peroxidase (EC 1.11.1.7) (clone PC56) - (fragment) >gi|1781338|emb|CAA71496.1| peroxidase [Spinacia
  misc_feature (4)..(310): Homolog of NCBI NO: 38345019 NR Description: OSJNBa0029H02.3 [Oryza sativa (japonica
  misc_feature (1)..(310): Homolog of NCBI NO: 15242213 NR Description: peroxidase, putative; protein id: At5g51890.1, by cDNA: gi_18175872 [Arabidopsis thaliana] Peroxidase 66 precursor (Atperox P66) (ATP27a)
  misc_feature (1)..(310): Homolog of NCBI NO: 7484677 NR Description: peroxidase (EC 1.11.1.7) prx11 precursor - spinach
  misc_feature (1)..(310): Homolog of NCBI NO: 15241315 NR Description: peroxidase, putative; protein id: At5g14130.1, by cDNA: gi_16209688 [Arabidopsis thaliana] Peroxidase 55 precursor (Atperox P55) (ATP20a)
  misc_feature (1)..(307): Homolog of NCBI NO: 1402920 NR Description: peroxidase [Arabidopsis thaliana]
  misc_feature (1)..(307): Homolog of NCBI NO: 15233153 NR Description: peroxidase, putative; protein id: At3g21770.1, by cDNA: 118626., supported by cDNA: gi_18252200 [Arabidopsis >gi|25453212|sp|Q9LSY7|PE30_ARATH Peroxidase 30 precursor
  misc_feature (1)..(307): Homolog of NCBI NO: 1546704 NR Description: peroxidase ATP7a [Arabidopsis thaliana]
MFLSSLLTSSANLSFNFYASSCSVAEFLVRNTVRSATSSDPTIPGKLLRLFFHDCFVQGCDASVLIQGNSTEKSDPGNASLGGFSVIDTAKNAIENLCPATVSCADIVALAARDAVEAAGGPVVEIPTGRRDGKESMAANVRPNIIDTDFTLDQMIDAFSSKGLSIQDLVVLSGAHTIGASHCNAFNGRFQRDSKGNFEVIDASLDNSYAETLMNKCSSSESSSLTVSNDPETSAVFDNQYYRNLETHKGLFQTDSALMEDNRTRTMVEELASDEESFFQRWSESFVKLSMVGVRVGEDGEIRRSCSSVN

SEQ ID NO: 80954 - protein, 174 aa, Arabidopsis thaliana
  peptide (1)..(174): Ceres Seq. ID no. 12657869
  misc_feature (1)..(138): Pfam Name: Peroxidase Pfam Description: Peroxidase
  misc_feature (1)..(174): Homolog of NCBI NO: 15236066 NR Description: peroxidase, putative; protein id: At4g31760.1 thaliana] >gi|26397591|sp|O81772|PE46_ARATH Peroxidase 46
  misc_feature (1)..(174): Homolog of NCBI NO: 15224621 NR Description: peroxidase, putative; protein id: At2g24800.1 thaliana] >gi|25453218|sp|Q9SK52|PE18_ARATH Peroxidase 18 (Atperox P18) >gi|25285617|pir||F84640 probable peroxidase
  misc_feature (1)..(174): Homolog of NCBI NO: 7433090 NR Description: probable peroxidase (EC 1.11.1.7) (clone PC56) - (fragment) >gi|1781338|emb|CAA71496.1| peroxidase [Spinacia
  misc_feature (1)..(174): Homolog of NCBI NO: 38345019 NR Description: OSJNBa0029H02.3 [Oryza sativa (japonica
  misc_feature (1)..(174): Homolog of NCBI NO: 15242213 NR Description: peroxidase, putative; protein id: At5g51890.1, by cDNA: gi_18175872 [Arabidopsis thaliana] Peroxidase 66 precursor (Atperox P66) (ATP27a)
  misc_feature (1)..(174): Homolog of NCBI NO: 7484677 NR Description: peroxidase (EC 1.11.1.7) prx11 precursor - spinach
  misc_feature (1)..(174): Homolog of NCBI NO: 15241315 NR Description: peroxidase, putative; protein id: At5g14130.1, by cDNA: gi_16209688 [Arabidopsis thaliana] Peroxidase 55 precursor (Atperox P55) (ATP20a)
  misc_feature (1)..(171): Homolog of NCBI NO: 1402920 NR Description: peroxidase [Arabidopsis thaliana]
  misc_feature (1)..(171): Homolog of NCBI NO: 15233153 NR Description: peroxidase, putative; protein id: At3g21770.1, by cDNA: 118626., supported by cDNA: gi_18252200 [Arabidopsis >gi|25453212|sp|Q9LSY7|PE30_ARATH Peroxidase 30 precursor
  misc_feature (1)..(171): Homolog of NCBI NO: 1546704 NR Description: peroxidase ATP7a [Arabidopsis thaliana]
MAANVRPNIIDTDFTLDQMIDAFSSKGLSIQDLVVLSGAHTIGASHCNAFNGRFQRDSKGNFEVIDASLDNSYAETLMNKCSSSESSSLTVSNDPETSAVFDNQYYRNLETHKGLFQTDSALMEDNRTRTMVEELASDEESFFQRWSESFVKLSMVGVRVGEDGEIRRSCSSVN

SEQ ID NO: 80955 - DNA, 3339 bp, Arabidopsis thaliana
  misc_feature (1)..(3339): Ceres Seq. ID no. 12657885
  misc_feature: MA Experiment ID: 20000171 Result: Down-regulated in Transcription
  misc_feature: MA Experiment 20000171 PARAMETER Experiment Name: At_42deg_Heat_P Parameter: Age (day) Value: 14
  misc_feature: MA Experiment 20000171 PARAMETER Experiment Name: At_42deg_Heat_P Parameter: Organism Value: A. thaliana
  misc_feature: MA Experiment 20000171 PARAMETER Experiment Name: At_42deg_Heat_P Parameter: Plant Line Value: WS
  misc_feature: MA Experiment 20000171 PARAMETER Experiment Name: At_42deg_Heat_P Parameter: Temperature (deg C) Value: 42 vs. 22
  misc_feature: MA Experiment 20000171 PARAMETER Experiment Name: At_42deg_Heat_P Parameter: Timepoint (hr) Value: 1
  misc_feature: MA Experiment 20000171 PARAMETER Experiment Name: At_42deg_Heat_P Parameter: Tissue Value: Aerial
  misc_feature: MA Experiment ID: 20000173 Result: Down-regulated in Transcription
  misc_feature: MA Experiment 20000173 PARAMETER Experiment Name: At_42deg_Heat_P Parameter: Age (day) Value: 14
  misc_feature: MA Experiment 20000173 PARAMETER Experiment Name: At_42deg_Heat_P Parameter: Organism Value: A. thaliana
  misc_feature: MA Experiment 20000173 PARAMETER Experiment Name: At_42deg_Heat_P Parameter: Plant Line Value: WS
  misc_feature: MA Experiment 20000173 PARAMETER Experiment Name: At_42deg_Heat_P Parameter: Temperature (deg C) Value: 42 vs. 22
  misc_feature: MA Experiment 20000173 PARAMETER Experiment Name: At_42deg_Heat_P Parameter: Timepoint (hr) Value: 6
  misc_feature: MA Experiment 20000173 PARAMETER Experiment Name: At_42deg_Heat_P Parameter: Tissue Value: Aerial
  misc_feature: MA Experiment ID: 20000182 Result: Down-regulated in Transcription
  misc_feature: MA Experiment 20000182 PARAMETER Experiment Name: At_2mM_SA_P Parameter: Age (day) Value: 14
  misc_feature: MA Experiment 20000182 PARAMETER Experiment Name: At_2mM_SA_P Parameter: Organism Value: A. thaliana
  misc_feature: MA Experiment 20000182 PARAMETER Experiment Name: At_2mM_SA_P Parameter: Plant Line Value: WS
  misc_feature: MA Experiment 20000182 PARAMETER Experiment Name: At_2mM_SA_P Parameter: Timepoint (hr) Value: 6
  misc_feature: MA Experiment 20000182 PARAMETER Experiment Name: At_2mM_SA_P Parameter: Tissue Value: Aerial
  misc_feature: MA Experiment 20000182 PARAMETER Experiment Name: At_2mM_SA_P Parameter: Treatment Value: 2mM SA vs. No Treatment
  misc_feature: MA Experiment ID: 20000185 Result: Down-regulated in Transcription
  misc_feature: MA Experiment 20000185 PARAMETER Experiment Name: At_Roots__P Parameter: Age (day) Value: 7 vs. 21
  misc_feature: MA Experiment 20000185 PARAMETER Experiment Name: At_Roots__P Parameter: Organism Value: A. thaliana
  misc_feature: MA Experiment 20000185 PARAMETER Experiment Name: At_Roots__P Parameter: Tissue Value: Roots vs. Whole Plant
  misc_feature: MA Experiment ID: 20000437 Result: Down-regulated in Transcription
  misc_feature: MA Experiment 20000437 PARAMETER Experiment Name: At_Drought_P Parameter: Age (day) Value: 8
  misc_feature: MA Experiment 20000437 PARAMETER Experiment Name: At_Drought_P Parameter: Organism Value: A. thaliana
  misc_feature: MA Experiment 20000437 PARAMETER Experiment Name: At_Drought_P Parameter: Plant Line Value: WS
  misc_feature: MA Experiment 20000437 PARAMETER Experiment Name: At_Drought_P Parameter: Timepoint (hr) Value: 24
  misc_feature: MA Experiment 20000437 PARAMETER Experiment Name: At_Drought_P Parameter: Tissue Value: Whole Plant
  misc_feature: MA Experiment 20000437 PARAMETER Experiment Name: At_Drought_P Parameter: Treatment Value: Drought vs. No Drought
  misc_feature: MA Experiment ID: 20000438 Result: Up-regulated in Transcription
  misc_feature: MA Experiment 20000438 PARAMETER Experiment Name: At_Shoots__P Parameter: Age (day) Value: 14
  misc_feature: MA Experiment 20000438 PARAMETER Experiment Name: At_Shoots__P Parameter: Tissue Value: Shoots vs. Whole Plant
  misc_feature: MA Experiment ID: 20001451 Result: Down-regulated in Transcription
  misc_feature: MA Experiment 20001451 PARAMETER Experiment Name: At_Far-red-induction_P Parameter: Age (day) Value: 7
  misc_feature: MA Experiment 20001451 PARAMETER Experiment Name: At_Far-red-induction_P Parameter: Light Value: Far-red vs. White
  misc_feature: MA Experiment 20001451 PARAMETER Experiment Name: At_Far-red-induction_P Parameter: Organism Value: A. thaliana
  misc_feature: MA Experiment 20001451 PARAMETER Experiment Name: At_Far-red-induction_P Parameter: Plant Line Value: Columbia
  misc_feature: MA Experiment 20001451 PARAMETER Experiment Name: At_Far-red-induction_P Parameter: Timepoint (hr) Value: 24
  misc_feature: MA Experiment 20001451 PARAMETER Experiment Name: At_Far-red-induction_P Parameter: Tissue Value: Whole Plant
atggtcgcgttactctgctctgcgagtttgtgtggtgatatatcagttggtgatgcttgtcttgttagtaacatcaaagcaaaatgtcgcgataatttggttactggaggattaaagttccacgctttgaagattgggtctcggaagaaacactggagaaggaagagtatgagatgtagtgtagtctccatgaaaagttctgacttttcgggttctatgataagaaagagctcaaaacctgatttgtcatcgagtgaagaagtaacgaggggtttaaagtcgtttcctgatactgattcttcattttcgtatttcaaatcagtggctgggaatttgaatttagttcacactactgagacttgtaactacatgcttgaagctttgagggttgatggtaaacttgaggaaatggcttatgtgtttgatttgatgcagaaaagaatcataaagagggatactaatacttacttgactatcttcaagagtctttctgtgaaaggtggattgaagcaagcaccttatgcacttcggaagatgagagaatttggttttgtgttgaatgcatattcatacaatgggttgattcatcttctgcttaagtctaggttttgcacagaggcaatggaggtttatagaagaatgatcttggaaggttttagacctagtttgcagacttactcttcacttatggtaggtttggggaaaagaagggatattgattctgtgatgggtttacttaaagagatggagactttggggttaaagccgaatgtttacacctttacgatatgtattcgggtgcttggtagggcagggaagattaatgaagcatatgaaatactgaagcggatggatgatgaaggatgtggacctgatgtagttacttacactgttcttattgatgctctgtgtactgctaggaagctcgattgtgcgaaggaggttttcgaaaagatgaaaacaggaagacacaaaccagatcgtgtaacttacattactttgctggacaggtttagtgataacagagatctggattcagtgaagcagttttggagtgaaatggagaaggatggtcatgtacctgatgttgtaacctttaccattctcgtggatgctctgtgcaaagctgggaattttggtgaagcatttgatacattggatgtgatgagggaccaaggtatcttaccgaaccttcatacatataacacattgatttgcggtcttctaagagtccaccggttggatgatgcacttgaactgtttggtaatatggagtctctgggcgtgaagcccactgcctatacgtacatagttttcattgattactatggaaagtctggagattccgtcagtgctcttgagacttttgagaagatgaaaaccaaaggaatagctccgaacattgtagcctgtaatgcgtctctctacagtctagctaaagcgggaagggaccgagaagcgaaacaaatcttctatggcttgaaagacataggactggtccctgattcagtaacttataacatgatgatgaagtgctacagtaaggttggggagatagatgaagccatcaagctgctttctgagatgatggagaatggttgtgaacctgatgttattgttgttaattctttgatcaatacactttacaaagctgatagagtagatgaggcgtggaagatgtttatgagaatgaaggaaatgaagctgaagcctacagttgtgacttacaacacattgctcgcaggtctaggcaaaaatggaaaaattcaagaggccattgagttgttcgaggggatggtgcagaaaggttgtccacctaacacaattactttcaacactctctttgattgcctttgcaaaaatgacgaggtgactctagccttgaagatgttgttcaagatgatggacatgggttgtgtcccagatgtttttacttacaatacgattatctttggtttggtgaagaatggtcaagtcaaagaggcaatgtgtttcttccaccagatgaagaaactggtttaccctgattttgttacactctgcactcttctcccaggtgttgtcaaggccagtttaatcgaagatgcttacaaaatcatcaccaactttctttacaattgtgcagaccaaccggctaatcttttctgggaagacttgataggctctatcttggctgaagctggaatagacaatgccgtttcattttctgagagattggtagctaatgggatttgtcgagatggtgactctatcctggtgccaataatcagatattcttgtaaacataataacgtctcaggtgctcgaactttattcgagaaattcacaaaagatcttggtgtccaacccaaactcccgacttataatctgctaatcggcgggcttcttgaagctgatatgattgaaatagcacaggacgtgttcctacaggtgaagagcactggttgcatcccagatgtggcgacctacaacttcttgcttgatgcttatggaaaatcaggaaaaatcgacgaactgtttgagctatacaaagaaatgtctacccatgagtgcgaagcaaacacaattactcacaacattgtcatctccgggcttgtgaaggcaggaaatgtggacgatgctcttgatttatactacgaccttatgagtgatcgggacttctccccaactgcctgcacgtatggtccccttatcgatggcctctctaagtcaggaagactatatgaagcaaaacaactctttgaaggaatgttggactacggttgcaggccaaactgtgctatctacaacattctcattaacgggtttggaaaagcaggtgaggctgatgcagcgtgtgcattgttcaaaaggatggtaaaagaaggagtaagaccggatctcaagacttactcggttctagtagattgcctttgtatggtcggaagagttgatgaaggcttgcattacttcaaggagctgaaggaatcaggcctcaatcccgatgtagtatgttacaatctcataatcaatggacttgggaaatctcatagacttgaagaagctcttgtgcttttcaacgagatgaagaccagcagaggaatcacccctgatctctacacttacaactccttgattctaaacttgggtatcgccgggatggtggaagaagctgggaagatttacaatgagattcaaagagcaggtcttgaaccgaatgtttttacatttaacgctctgatccgcggatacagtttgtctggaaaacctgagcacgcttacgctgtgtaccagacaatggtgaccggtggttttagccccaacacaggaacatacgaacagctccccaatagagcttga

SEQ ID NO: 80956 - protein, 1112 aa, Arabidopsis thaliana
  peptide (1)..(1112): Ceres Seq. ID no. 12657886
  misc_feature (892)..(926): Pfam Name: PPR repeat Pfam Description: PPR repeat
  misc_feature (84)..(1104): Homolog of NCBI NO: 37534450 NR Description: unknown protein [Oryza sativa (japonica
  misc_feature (122)..(1108): Homolog of NCBI NO: 6630464 NR Description: F23N19.4 [Arabidopsis thaliana]
  misc_feature (113)..(1110): Homolog of NCBI NO: 6630464 NR Description: F23N19.4 [Arabidopsis thaliana]
  misc_feature (178)..(1108): Homolog of NCBI NO: 15221621 NR Description: unknown protein; protein id: At1g62910.1
  misc_feature (68)..(1105): Homolog of NCBI NO: 15221621 NR Description: unknown protein; protein id: At1g62910.1
  misc_feature (206)..(1110): Homolog of NCBI NO: 15221621 NR Description: unknown protein; protein id: At1g62910.1
  misc_feature (237)..(1108): Homolog of NCBI NO: 6630464 NR Description: F23N19.4 [Arabidopsis thaliana]
  misc_feature (316)..(1063): Homolog of NCBI NO: 15231338 NR Description: hypothetical protein; protein id: At3g06920.1 thaliana] >gi|6728999|gb|AAF26996.1|AC016827_7 hypothetical
  misc_feature (144)..(1019): Homolog of NCBI NO: 15221621 NR Description: unknown protein; protein id: At1g62910.1
  misc_feature (178)..(1110): Homolog of NCBI NO: 15221621 NR Description: unknown protein; protein id: At1g62910.1
MVALLCSASLCGDISVGDACLVSNIKAKCRDNLVTGGLKFHALKIGSRKKHWRRKSMRCSVVSMKSSDFSGSMIRKSSKPDLSSSEEVTRGLKSFPDTDSSFSYFKSVAGNLNLVHTTETCNYMLEALRVDGKLEEMAYVFDLMQKRIIKRDTNTYLTIFKSLSVKGGLKQAPYALRKMREFGFVLNAYSYNGLIHLLLKSRFCTEAMEVYRRMILEGFRPSLQTYSSLMVGLGKRRDIDSVMGLLKEMETLGLKPNVYTFTICIRVLGRAGKINEAYEILKRMDDEGCGPDVVTYTVLIDALCTARKLDCAKEVFEKMKTGRHKPDRVTYITLLDRFSDNRDLDSVKQFWSEMEKDGHVPDVVTFTILVDALCKAGNFGEAFDTLDVMRDQGILPNLHTYNTLICGLLRVHRLDDALELFGNMESLGVKPTAYTYIVFIDYYGKSGDSVSALETFEKMKTKGIAPNIVACNASLYSLAKAGRDREAKQIFYGLKDIGLVPDSVTYNMMMKCYSKVGEIDEAIKLLSEMMENGCEPDVIVVNSLINTLYKADRVDEAWKMFMRMKEMKLKPTVVTYNTLLAGLGKNGKIQEAIELFEGMVQKGCPPNTITFNTLFDCLCKNDEVTLALKMLFKMMDMGCVPDVFTYNTIIFGLVKNGQVKEAMCFFHQMKKLVYPDFVTLCTLLPGVVKASLIEDAYKIITNFLYNCADQPANLFWEDLIGSILAEAGIDNAVSFSERLVANGICRDGDSILVPIIRYSCKHNNVSGARTLFEKFTKDLGVQPKLPTYNLLIGGLLEADMIEIAQDVFLQVKSTGCIPDVATYNFLLDAYGKSGKIDELFELYKEMSTHECEANTITHNIVISGLVKAGNVDDALDLYYDLMSDRDFSPTACTYGPLIDGLSKSGRLYEAKQLFEGMLDYGCRPNCAIYNILINGFGKAGEADAACALFKRMVKEGVRPDLKTYSVLVDCLCMVGRVDEGLHYFKELKESGLNPDVVCYNLIINGLGKSHRLEEALVLFNEMKTSRGITPDLYTYNSLILNLGIAGMVEEAGKIYNEIQRAGLEPNVFTFNALIRGYSLSGKPEHAYAVYQTMVTGGFSPNTGTYEQLPNRA

SEQ ID NO: 80957 - protein, 1056 aa, Arabidopsis thaliana
  peptide (1)..(1056): Ceres Seq. ID no. 12657887
  misc_feature (836)..(870): Pfam Name: PPR repeat Pfam Description: PPR repeat
  misc_feature (28)..(1048): Homolog of NCBI NO: 37534450 NR Description: unknown protein [Oryza sativa (japonica
  misc_feature (66)..(1052): Homolog of NCBI NO: 6630464 NR Description: F23N19.4 [Arabidopsis thaliana]
  misc_feature (57)..(1054): Homolog of NCBI NO: 6630464 NR Description: F23N19.4 [Arabidopsis thaliana]
  misc_feature (122)..(1052): Homolog of NCBI NO: 15221621 NR Description: unknown protein; protein id: At1g62910.1
  misc_feature (12)..(1049): Homolog of NCBI NO: 15221621 NR Description: unknown protein; protein id: At1g62910.1
  misc_feature (150)..(1054): Homolog of NCBI NO: 15221621 NR Description: unknown protein; protein id: At1g62910.1
  misc_feature (181)..(1052): Homolog of NCBI NO: 6630464 NR Description: F23N19.4 [Arabidopsis thaliana]
  misc_feature (260)..(1007): Homolog of NCBI NO: 15231338 NR Description: hypothetical protein; protein id: At3g06920.1 thaliana] >gi|6728999|gb|AAF26996.1|AC016827_7 hypothetical
  misc_feature (88)..(963): Homolog of NCBI NO: 15221621 NR Description: unknown protein; protein id: At1g62910.1
  misc_feature (122)..(1054): Homolog of NCBI NO: 15221621 NR Description: unknown protein; protein id: At1g62910.1
MRCSVVSMKSSDFSGSMIRKSSKPDLSSSEEVTRGLKSFPDTDSSFSYFKSVAGNLNLVHTTETCNYMLEALRVDGKLEEMAYVFDLMQKRIIKRDTNTYLTIFKSLSVKGGLKQAPYALRKMREFGFVLNAYSYNGLIHLLLKSRFCTEAMEVYRRMILEGFRPSLQTYSSLMVGLGKRRDIDSVMGLLKEMETLGLKPNVYTFTICIRVLGRAGKINEAYEILKRMDDEGCGPDVVTYTVLIDALCTARKLDCAKEVFEKMKTGRHKPDRVTYITLLDRFSDNRDLDSVKQFWSEMEKDGHVPDVVTFTILVDALCKAGNFGEAFDTLDVMRDQGILPNLHTYNTLICGLLRVHRLDDALELFGNMESLGVKPTAYTYIVFIDYYGKSGDSVSALETFEKMKTKGIAPNIVACNASLYSLAKAGRDREAKQIFYGLKDIGLVPDSVTYNMMMKCYSKVGEIDEAIKLLSEMMENGCEPDVIVVNSLINTLYKADRVDEAWKMFMRMKEMKLKPTVVTYNTLLAGLGKNGKIQEAIELFEGMVQKGCPPNTITFNTLFDCLCKNDEVTLALKMLFKMMDMGCVPDVFTYNTIIFGLVKNGQVKEAMCFFHQMKKLVYPDFVTLCTLLPGVVKASLIEDAYKIITNFLYNCADQPANLFWEDLIGSILAEAGIDNAVSFSERLVANGICRDGDSILVPIIRYSCKHNNVSGARTLFEKFTKDLGVQPKLPTYNLLIGGLLEADMIEIAQDVFLQVKSTGCIPDVATYNFLLDAYGKSGKIDELFELYKEMSTHECEANTITHNIVISGLVKAGNVDDALDLYYDLMSDRDFSPTACTYGPLIDGLSKSGRLYEAKQLFEGMLDYGCRPNCAIYNILINGFGKAGEADAACALFKRMVKEGVRPDLKTYSVLVDCLCMVGRVDEGLHYFKELKESGLNPDVVCYNLIINGLGKSHRLEEALVLFNEMKTSRGITPDLYTYNSLILNLGIAGMVEEAGKIYNEIQRAGLEPNVFTFNALIRGYSLSGKPEHAYAVYQTMVTGGFSPNTGTYEQLPNRA

SEQ ID NO: 80958 - protein, 1049 aa, Arabidopsis thaliana
  peptide (1)..(1049): Ceres Seq. ID no. 12657888
  misc_feature (829)..(863): Pfam Name: PPR repeat Pfam Description: PPR repeat
  misc_feature (21)..(1041): Homolog of NCBI NO: 37534450 NR Description: unknown protein [Oryza sativa (japonica
  misc_feature (59)..(1045): Homolog of NCBI NO: 6630464 NR Description: F23N19.4 [Arabidopsis thaliana]
  misc_feature (50)..(1047): Homolog of NCBI NO: 6630464 NR Description: F23N19.4 [Arabidopsis thaliana]
  misc_feature (115)..(1045): Homolog of NCBI NO: 15221621 NR Description: unknown protein; protein id: At1g62910.1
  misc_feature (5)..(1042): Homolog of NCBI NO: 15221621 NR Description: unknown protein; protein id: At1g62910.1
  misc_feature (143)..(1047): Homolog of NCBI NO: 15221621 NR Description: unknown protein; protein id: At1g62910.1
  misc_feature (174)..(1045): Homolog of NCBI NO: 6630464 NR Description: F23N19.4 [Arabidopsis thaliana]
  misc_feature (253)..(1000): Homolog of NCBI NO: 15231338 NR Description: hypothetical protein; protein id: At3g06920.1 thaliana] >gi|6728999|gb|AAF26996.1|AC016827_7 hypothetical
  misc_feature (81)..(956): Homolog of NCBI NO: 15221621 NR Description: unknown protein; protein id: At1g62910.1
  misc_feature (115)..(1047): Homolog of NCBI NO: 15221621 NR Description: unknown protein; protein id: At1g62910.1
MKSSDFSGSMIRKSSKPDLSSSEEVTRGLKSFPDTDSSFSYFKSVAGNLNLVHTTETCNYMLEALRVDGKLEEMAYVFDLMQKRIIKRDTNTYLTIFKSLSVKGGLKQAPYALRKMREFGFVLNAYSYNGLIHLLLKSRFCTEAMEVYRRMILEGFRPSLQTYSSLMVGLGKRRDIDSVMGLLKEMETLGLKPNVYTFTICIRVLGRAGKINEAYEILKRMDDEGCGPDVVTYTVLIDALCTARKLDCAKEVFEKMKTGRHKPDRVTYITLLDRFSDNRDLDSVKQFWSEMEKDGHVPDVVTFTILVDALCKAGNFGEAFDTLDVMRDQGILPNLHTYNTLICGLLRVHRLDDALELFGNMESLGVKPTAYTYIVFIDYYGKSGDSVSALETFEKMKTKGIAPNIVACNASLYSLAKAGRDREAKQIFYGLKDIGLVPDSVTYNMMMKCYSKVGEIDEAIKLLSEMMENGCEPDVIVVNSLINTLYKADRVDEAWKMFMRMKEMKLKPTVVTYNTLLAGLGKNGKIQEAIELFEGMVQKGCPPNTITFNTLFDCLCKNDEVTLALKMLFKMMDMGCVPDVFTYNTIIFGLVKNGQVKEAMCFFHQMKKLVYPDFVTLCTLLPGVVKASLIEDAYKIITNFLYNCADQPANLFWEDLIGSILAEAGIDNAVSFSERLVANGICRDGDSILVPIIRYSCKHNNVSGARTLFEKFTKDLGVQPKLPTYNLLIGGLLEADMIEIAQDVFLQVKSTGCIPDVATYNFLLDAYGKSGKIDELFELYKEMSTHECEANTITHNIVISGLVKAGNVDDALDLYYDLMSDRDFSPTACTYGPLIDGLSKSGRLYEAKQLFEGMLDYGCRPNCAIYNILINGFGKAGEADAACALFKRMVKEGVRPDLKTYSVLVDCLCMVGRVDEGLHYFKELKESGLNPDVVCYNLIINGLGKSHRLEEALVLFNEMKTSRGITPDLYTYNSLILNLGIAGMVEEAGKIYNEIQRAGLEPNVFTFNALIRGYSLSGKPEHAYAVYQTMVTGGFSPNTGTYEQLPNRA

SEQ ID NO: 80959 - DNA, 702 bp, Arabidopsis thaliana
  misc_feature (1)..(702): Ceres Seq. ID no. 12657889
  misc_feature: MA Experiment ID: 20000328 Result: Up-regulated in Transcription
  misc_feature: MA Experiment 20000328 PARAMETER Experiment Name: At_42deg_Heat_Sub_P Parameter: Age (day) Value: 14
  misc_feature: MA Experiment 20000328 PARAMETER Experiment Name: At_42deg_Heat_Sub_P Parameter: Organism Value: A. thaliana
  misc_feature: MA Experiment 20000328 PARAMETER Experiment Name: At_42deg_Heat_Sub_P Parameter: Plant Line Value: WS
  misc_feature: MA Experiment 20000328 PARAMETER Experiment Name: At_42deg_Heat_Sub_P Parameter: Temperature (deg C) Value: 42 vs. 22
  misc_feature: MA Experiment 20000328 PARAMETER Experiment Name: At_42deg_Heat_Sub_P Parameter: Timepoint (hr) Value: 6
  misc_feature: MA Experiment 20000328 PARAMETER Experiment Name: At_42deg_Heat_Sub_P Parameter: Tissue Value: Aerial
  misc_feature: MA Experiment ID: 20000329 Result: Up-regulated in Transcription
  misc_feature: MA Experiment 20000329 PARAMETER Experiment Name: At_4deg_Cold_Sub_P Parameter: Age (day) Value: 14
  misc_feature: MA Experiment 20000329 PARAMETER Experiment Name: At_4deg_Cold_Sub_P Parameter: Organism Value: A. thaliana
  misc_feature: MA Experiment 20000329 PARAMETER Experiment Name: At_4deg_Cold_Sub_P Parameter: Plant Line Value: WS
  misc_feature: MA Experiment 20000329 PARAMETER Experiment Name: At_4deg_Cold_Sub_P Parameter: Temperature (deg C) Value: 4 vs. 22
  misc_feature: MA Experiment 20000329 PARAMETER Experiment Name: At_4deg_Cold_Sub_P Parameter: Timepoint (hr) Value: 6
  misc_feature: MA Experiment 20000329 PARAMETER Experiment Name: At_4deg_Cold_Sub_P Parameter: Tissue Value: Aerial
  misc_feature: MA Experiment ID: 20000332 Result: Up-regulated in Transcription
  misc_feature: MA Experiment 20000332 PARAMETER Experiment Name: At_4deg_Cold_Sub_P Parameter: Age (day) Value: 14
  misc_feature: MA Experiment 20000332 PARAMETER Experiment Name: At_4deg_Cold_Sub_P Parameter: Organism Value: A. thaliana
  misc_feature: MA Experiment 20000332 PARAMETER Experiment Name: At_4deg_Cold_Sub_P Parameter: Plant Line Value: WS
  misc_feature: MA Experiment 20000332 PARAMETER Experiment Name: At_4deg_Cold_Sub_P Parameter: Temperature (deg C) Value: 4 vs. 22
  misc_feature: MA Experiment 20000332 PARAMETER Experiment Name: At_4deg_Cold_Sub_P Parameter: Timepoint (hr) Value: 2
  misc_feature: MA Experiment 20000332 PARAMETER Experiment Name: At_4deg_Cold_Sub_P Parameter: Tissue Value: Aerial
  misc_feature: MA Experiment ID: 20000355 Result: Up-regulated in Transcription
  misc_feature: MA Experiment 20000355 PARAMETER Experiment Name: At_Siliques_Sub_P Parameter: Age (day) Value: 21
  misc_feature: MA Experiment 20000355 PARAMETER Experiment Name: At_Siliques_Sub_P Parameter: Organism Value: A. thaliana
  misc_feature: MA Experiment 20000355 PARAMETER Experiment Name: At_Siliques_Sub_P Parameter: Plant Line Value: WS
  misc_feature: MA Experiment 20000355 PARAMETER Experiment Name: At_Siliques_Sub_P Parameter: Tissue Value: Less Than 5mm Siliques vs. Whole Plant
  misc_feature: MA Experiment ID: 20000440 Result: Up-regulated in Transcription
  misc_feature: MA Experiment 20000440 PARAMETER Experiment Name: At_Closed-Flower__Sub_P Parameter: Tissue Value: Closed Flower vs. Whole Plant
atggctttctcttacgcatcattctctacacccttcaatggtttcgctgcaaatccgtctccgattacttccgcttttctcggcccatcattgagattctccaccagaacatcaaaaactcggaatccgagtaatggggtttcagtgaaatcgtcaaatagtcataggtttctagtcaaatctaaaaatttcagtgtctatgcaagggctgcagcagagaagtctgttcacgatttcactgtaaaggacatcgatggtaatgatgtttctctggacaaattcaaaggaaaacctttgttgatcgttaacgttgcgtcaagatgtggtttgacatcatcaaattactcagagctttctcaactgtacgaaaaatacaagaaccaaggatttgagattcttgctttcccttgcaatcaatttggaggtcaagaacccggttcaaaccctgagatcaagcaatttgcttgcacccggttcaaagcagagttccctatattcgacaaggttgatgtgaatggaccaagcacagctccaatctacaagttcttgaaatccaatgctggtggtttccttggtgatatcatcaaatggaactttgagaaattcttggttgataaaaagggcaaagttgtcgagagataccctcccacaacttctcctttccaaatcgagaaggacatccagaagttgcttgcggcttaa

SEQ ID NO: 80960 - protein, 233 aa, Arabidopsis thaliana
  peptide (1)..(233): Ceres Seq. ID no. 12657890
  misc_feature (75)..(184): Pfam Name: Glutathione peroxidase Pfam Description: Glutathione peroxidase
  misc_feature (1)..(233): Homolog of NCBI NO: 22329066 NR Description: glutathione peroxidase, putative; protein id:
  misc_feature (1)..(230): Homolog of NCBI NO: 7433114 NR Description: glutathione peroxidase (EC 1.11.1.9) F11C18.70 -
  misc_feature (4)..(233): Homolog of NCBI NO: 20147455 NR Description: glutathione peroxidase [Brassica napus]
  misc_feature (4)..(233): Homolog of NCBI NO: 40388501 NR Description: GPx [Brassica oleracea var. botrytis]
  misc_feature (4)..(232): Homolog of NCBI NO: 2129599 NR Description: glutathione peroxidase (EC 1.11.1.9) precursor - thaliana >gi|1061036|emb|CAA61965.1| glutathione peroxidase
  misc_feature (4)..(233): Homolog of NCBI NO: 15224678 NR Description: glutathione peroxidase, putative; protein id: supported by cDNA: gi_14334959, supported by cDNA: gi_17104618 thaliana] >gi|20141398|sp|P52032|GSHY_ARATH Phospholipid
  misc_feature (1)..(233): Homolog of NCBI NO: 20138099 NR Description: Phospholipid hydroperoxide glutathione chloroplast precursor (PHGPx) >gi|7433115|pir||T06462 glutathione
  misc_feature (66)..(233): Homolog of NCBI NO: 2982362 NR Description: glutathione peroxidase [Zantedeschia aethiopica]
  misc_feature (68)..(233): Homolog of NCBI NO: 22268405 NR Description: putative glutathione peroxidase [Zea mays]
  misc_feature (68)..(233): Homolog of NCBI NO: 21360380 NR Description: glutathione peroxidase 1 [Oryza sativa]
MAFSYASFSTPFNGFAANPSPITSAFLGPSLRFSTRTSKTRNPSNGVSVKSSNSHRFLVKSKNFSVYARAAAEKSVHDFTVKDIDGNDVSLDKFKGKPLLIVNVASRCGLTSSNYSELSQLYEKYKNQGFEILAFPCNQFGGQEPGSNPEIKQFACTRFKAEFPIFDKVDVNGPSTAPIYKFLKSNAGGFLGDIIKWNFEKFLVDKKGKVVERYPPTTSPFQIEKDIQKLLAA

SEQ ID NO: 80961 - DNA, 1821 bp, Arabidopsis thaliana
  misc_feature (1)..(1821): Ceres Seq. ID no. 12657899
  misc_feature: MA Experiment ID: 20000267 Result: Down-regulated in Transcription
  misc_feature: MA Experiment 20000267 PARAMETER Experiment Name: At_Drought_P Parameter: Age (day) Value: 7
  misc_feature: MA Experiment 20000267 PARAMETER Experiment Name: At_Drought_P Parameter: Organism Value: A. thaliana
  misc_feature: MA Experiment 20000267 PARAMETER Experiment Name: At_Drought_P Parameter: Plant Line Value: WS
  misc_feature: MA Experiment 20000267 PARAMETER Experiment Name: At_Drought_P Parameter: Timepoint (hr) Value: 6
  misc_feature: MA Experiment 20000267 PARAMETER Experiment Name: At_Drought_P Parameter: Tissue Value: Whole Plant
  misc_feature: MA Experiment 20000267 PARAMETER Experiment Name: At_Drought_P Parameter: Treatment Value: Drought vs. No Drought
  misc_feature: MA Experiment ID: 20000437 Result: Down-regulated in Transcription
  misc_feature: MA Experiment 20000437 PARAMETER Experiment Name: At_Drought_P Parameter: Age (day) Value: 8
  misc_feature: MA Experiment 20000437 PARAMETER Experiment Name: At_Drought_P Parameter: Organism Value: A. thaliana
  misc_feature: MA Experiment 20000437 PARAMETER Experiment Name: At_Drought_P Parameter: Plant Line Value: WS
  misc_feature: MA Experiment 20000437 PARAMETER Experiment Name: At_Drought_P Parameter: Timepoint (hr) Value: 24
  misc_feature: MA Experiment 20000437 PARAMETER Experiment Name: At_Drought_P Parameter: Tissue Value: Whole Plant
  misc_feature: MA Experiment 20000437 PARAMETER Experiment Name: At_Drought_P Parameter: Treatment Value: Drought vs. No Drought
  misc_feature: MA Experiment ID: 20000439 Result: Up-regulated in Transcription
  misc_feature: MA Experiment 20000439 PARAMETER Experiment Name: At_Roots__P Parameter: Age (day) Value: 14 vs. 21
  misc_feature: MA Experiment 20000439 PARAMETER Experiment Name: At_Roots__P Parameter: Organism Value: A. thaliana
  misc_feature: MA Experiment 20000439 PARAMETER Experiment Name: At_Roots__P Parameter: Tissue Value: Roots vs. Whole Plant
  misc_feature: MA Experiment ID: 20000460 Result: Down-regulated in Transcription
  misc_feature: MA Experiment 20000460 PARAMETER Experiment Name: At_10percent_PEG_P Parameter: Age (day) Value: 12
  misc_feature: MA Experiment 20000460 PARAMETER Experiment Name: At_10percent_PEG_P Parameter: Organism Value: A. thaliana
  misc_feature: MA Experiment 20000460 PARAMETER Experiment Name: At_10percent_PEG_P Parameter: Plant Line Value: WS
  misc_feature: MA Experiment 20000460 PARAMETER Experiment Name: At_10percent_PEG_P Parameter: Timepoint (day) Value: 12
  misc_feature: MA Experiment 20000460 PARAMETER Experiment Name: At_10percent_PEG_P Parameter: Tissue Value: Whole Plant
  misc_feature: MA Experiment 20000460 PARAMETER Experiment Name: At_10percent_PEG_P Parameter: Treatment Value: 10percent PEG vs. No Treatment
  misc_feature: MA Experiment ID: 20000573 Result: Down-regulated in Transcription
  misc_feature: MA Experiment 20000573 PARAMETER Experiment Name: At_100uM_ABA_Mutants__P Parameter: Organism Value: A. thaliana
  misc_feature: MA Experiment 20000573 PARAMETER Experiment Name: At_100uM_ABA_Mutants__P Parameter: Plant Line Value: CS22 vs. Ler wt
  misc_feature: MA Experiment 20000573 PARAMETER Experiment Name: At_100uM_ABA_Mutants__P Parameter: Timepoint (hr) Value: N/A
  misc_feature: MA Experiment 20000573 PARAMETER Experiment Name: At_100uM_ABA_Mutants__P Parameter: Tissue Value: Whole Plant
  misc_feature: MA Experiment 20000573 PARAMETER Experiment Name: At_100uM_ABA_Mutants__P Parameter: Treatment Value: None
  misc_feature: MA Experiment ID: 20001504 Result: Down-regulated in Transcription
  misc_feature: MA Experiment 20001504 PARAMETER Experiment Name: At_Far-red-enriched_P Parameter: Age (day) Value: 10
  misc_feature: MA Experiment 20001504 PARAMETER Experiment Name: At_Far-red-enriched_P Parameter: Light Value: Far-red enriched vs. White
  misc_feature: MA Experiment 20001504 PARAMETER Experiment Name: At_Far-red-enriched_P Parameter: Organism Value: A. thaliana
  misc_feature: MA Experiment 20001504 PARAMETER Experiment Name: At_Far-red-enriched_P Parameter: Plant Line Value: Columbia
  misc_feature: MA Experiment 20001504 PARAMETER Experiment Name: At_Far-red-enriched_P Parameter: Timepoint (day) Value: 6
  misc_feature: MA Experiment 20001504 PARAMETER Experiment Name: At_Far-red-enriched_P Parameter: Tissue Value: Whole Plant
attcaaacaagaaatcaccaaacacacatctcttctgcactctcaaaacactatggatacttccctcttttctttgtttgttccaatccttgttttcgtttttatcgctcttttcaagaaatcaaagaaaccaaaatatgtaaaagctcctgcaccaagtggtgcatggcccatcatcggccatcttcaccttctcggtggcaaggaacagcttctctaccgaaccttaggaaaaatggctgaccactacggtccagccatgtcgctacaacttgggagcaatgaagcatttgttgtgagcagttttgaggtggctaaagattgttttactgtgaacgacaaggccttggcttcacgtcctatgactgcagctgcaaagcacatgggttacaattttgctgttttcgggtttgccccttatagcgctttctggcgtgagatgcgtaaaatcgcaaccatcgagcttctttctaaccggcggcttcagatgctcaagcacgttcgtgtttctgagatcacaatgggtgtgaaagatttgtattccttgtggttcaagaatggcggtacaaaaccagtaatggttgatctaaagagctggttagaggacatgactctgaacatgatcgtgagaatggtggcaggaaaacgatactttggaggcggaggctcagtatcgtcggaggatactgaagaggcaatgcaatgcaaaaaggccatcgcaaagttctttcacctcatcggtatattcactgtgtcagatgcttttccgacactaagtttttttgatttgcaaggacatgagaaggagatgaagcaaacgggaagcgaattagatgtgatccttgaaagatggattgaaaaccatcgacaacaacgcaaattttcaggaacgaaagagaatgattcagacttcatcgacgttatgatgtcgcttgcggaacaaggaaaactctcgcatctccagtatgatgcaaatactagcatcaaatctacctgcctggcactgattcttggaggaagtgacacttcagcatcaacccttacatgggccatttctcttcttctaaacaataaagaaatgttaaagaaagcacaagatgagatcgacatccacgtcggcagagacaggaacgtcgaggattcagacatagaaaatttggtgtatcttcaagcaattatcaaagaaacattgagattgtatccagctggtcctctcttaggccctcgagaggcgatggaagattgcacggtcgctggttactacgttccgtgcggcacaagactcatagtgaacgtatggaaaatccaaagagatccgaaagtttatatggaaccaaacgagttcagaccagagaggttcattacaggagaagcaaaagagtttgatgtgagaggacaaaactttgagctgatgccatttggttcaggaagaagatcatgcccaggctcttcattggccatgcaagtgcttcatttaggtcttgctcgtttccttcattcatttgacgtgaaaactgttatggatatgcctgttgatatgagtgagaaccctggcttaaccattcctaaagccacgcctcttgaggttctgatcagtccacgtattaaggaagaactttttgtgtgattaactattccagaaacatataacttcaatacggttattgaaggtgcattttgatgtgtgtgtgtttttcttttgttgaataaaacctacgtttgtttgttttctctttaaaataaactagattcaaaccgcacatttgtgcggtattatgttcgtaaacgtatttgtttaatatagtatttatattttgaact

SEQ ID NO: 80962 - protein, 541 aa, Arabidopsis thaliana
  peptide (1)..(541): Ceres Seq. ID no. 12657900
  misc_feature (50)..(529): Pfam Name: Cytochrome P450 Pfam Description: Cytochrome P450
  misc_feature (18)..(541): Homolog of NCBI NO: 15236586 NR Description: cytochrome p450, putative; protein id: At4g31940.1
  misc_feature (18)..(541): Homolog of NCBI NO: 15236615 NR Description: cytochrome p450 family; protein id: At4g31970.1
  misc_feature (18)..(541): Homolog of NCBI NO: 15236613 NR Description: cytochrome p450 family; protein id: At4g31950.1
  misc_feature (143)..(541): Homolog of NCBI NO: 7430660 NR Description: cytochrome P450 F10N7.240 - Arabidopsis thaliana
  misc_feature (18)..(162): Homolog of NCBI NO: 7430660 NR Description: cytochrome P450 F10N7.240 - Arabidopsis thaliana
FKQEITKHTSLLHSQNTMDTSLFSLFVPILVFVFIALFKKSKKPKYVKAPAPSGAWPIIGHLHLLGGKEQLLYRTLGKMADHYGPAMSLQLGSNEAFVVSSFEVAKDCFTVNDKALASRPMTAAAKHMGYNFAVFGFAPYSAFWREMRKIATIELLSNRRLQMLKHVRVSEITMGVKDLYSLWFKNGGTKPVMVDLKSWLEDMTLNMIVRMVAGKRYFGGGGSVSSEDTEEAMQCKKAIAKFFHLIGIFTVSDAFPTLSFFDLQGHEKEMKQTGSELDVILERWIENHRQQRKFSGTKENDSDFIDVMMSLAEQGKLSHLQYDANTSIKSTCLALILGGSDTSASTLTWAISLLLNNKEMLKKAQDEIDIHVGRDRNVEDSDIENLVYLQAIIKETLRLYPAGPLLGPREAMEDCTVAGYYVPCGTRLIVNVWKIQRDPKVYMEPNEFRPERFITGEAKEFDVRGQNFELMPFGSGRRSCPGSSLAMQVLHLGLARFLHSFDVKTVMDMPVDMSENPGLTIPKATPLEVLISPRIKEELFV

SEQ ID NO: 80963 - protein, 524 aa, Arabidopsis thaliana
  peptide (1)..(524): Ceres Seq. ID no. 12657901
  misc_feature (33)..(512): Pfam Name: Cytochrome P450 Pfam Description: Cytochrome P450
  misc_feature (1)..(524): Homolog of NCBI NO: 15236586 NR Description: cytochrome p450, putative; protein id: At4g31940.1
  misc_feature (1)..(524): Homolog of NCBI NO: 15236615 NR Description: cytochrome p450 family; protein id: At4g31970.1
  misc_feature (1)..(524): Homolog of NCBI NO: 15236613 NR Description: cytochrome p450 family; protein id: At4g31950.1
  misc_feature (126)..(524): Homolog of NCBI NO: 7430660 NR Description: cytochrome P450 F10N7.240 - Arabidopsis thaliana
  misc_feature (1)..(145): Homolog of NCBI NO: 7430660 NR Description: cytochrome P450 F10N7.240 - Arabidopsis thaliana
MDTSLFSLFVPILVFVFIALFKKSKKPKYVKAPAPSGAWPIIGHLHLLGGKEQLLYRTLGKMADHYGPAMSLQLGSNEAFVVSSFEVAKDCFTVNDKALASRPMTAAAKHMGYNFAVFGFAPYSAFWREMRKIATIELLSNRRLQMLKHVRVSEITMGVKDLYSLWFKNGGTKPVMVDLKSWLEDMTLNMIVRMVAGKRYFGGGGSVSSEDTEEAMQCKKAIAKFFHLIGIFTVSDAFPTLSFFDLQGHEKEMKQTGSELDVILERWIENHRQQRKFSGTKENDSDFIDVMMSLAEQGKLSHLQYDANTSIKSTCLALILGGSDTSASTLTWAISLLLNNKEMLKKAQDEIDIHVGRDRNVEDSDIENLVYLQAIIKETLRLYPAGPLLGPREAMEDCTVAGYYVPCGTRLIVNVWKIQRDPKVYMEPNEFRPERFITGEAKEFDVRGQNFELMPFGSGRRSCPGSSLAMQVLHLGLARFLHSFDVKTVMDMPVDMSENPGLTIPKATPLEVLISPRIKEELFV

SEQ ID NO: 80964 - protein, 463 aa, Arabidopsis thaliana
  peptide (1)..(463): Ceres Seq. ID no. 12657902
  misc_feature (1)..(451): Pfam Name: Cytochrome P450 Pfam Description: Cytochrome P450
  misc_feature (1)..(463): Homolog of NCBI NO: 15236586 NR Description: cytochrome p450, putative; protein id: At4g31940.1
  misc_feature (1)..(463): Homolog of NCBI NO: 15236615 NR Description: cytochrome p450 family; protein id: At4g31970.1
  misc_feature (1)..(463): Homolog of NCBI NO: 15236613 NR Description: cytochrome p450 family; protein id: At4g31950.1
  misc_feature (65)..(463): Homolog of NCBI NO: 7430660 NR Description: cytochrome P450 F10N7.240 - Arabidopsis thaliana
  misc_feature (1)..(84): Homolog of NCBI NO: 7430660 NR Description: cytochrome P450 F10N7.240 - Arabidopsis thaliana
MADHYGPAMSLQLGSNEAFVVSSFEVAKDCFTVNDKALASRPMTAAAKHMGYNFAVFGFAPYSAFWREMRKIATIELLSNRRLQMLKHVRVSEITMGVKDLYSLWFKNGGTKPVMVDLKSWLEDMTLNMIVRMVAGKRYFGGGGSVSSEDTEEAMQCKKAIAKFFHLIGIFTVSDAFPTLSFFDLQGHEKEMKQTGSELDVILERWIENHRQQRKFSGTKENDSDFIDVMMSLAEQGKLSHLQYDANTSIKSTCLALILGGSDTSASTLTWAISLLLNNKEMLKKAQDEIDIHVGRDRNVEDSDIENLVYLQAIIKETLRLYPAGPLLGPREAMEDCTVAGYYVPCGTRLIVNVWKIQRDPKVYMEPNEFRPERFITGEAKEFDVRGQNFELMPFGSGRRSCPGSSLAMQVLHLGLARFLHSFDVKTVMDMPVDMSENPGLTIPKATPLEVLISPRIKEELFV

SEQ ID NO: 80965 - DNA, 1569 bp, Arabidopsis thaliana
  misc_feature (1)..(1569): Ceres Seq. ID no. 12657903
  misc_feature: MA Experiment ID: 20000227 Result: Down-regulated in Transcription
  misc_feature: MA Experiment 20000227 PARAMETER Experiment Name: At_Root-Tips-vs-Tops_P Parameter: Tissue Value: Root Tips vs. Root Tops
  misc_feature: MA Experiment ID: 20000436 Result: Down-regulated in Transcription
  misc_feature: MA Experiment 20000436 PARAMETER Experiment Name: At_Drought_P Parameter: Age (day) Value: 7
  misc_feature: MA Experiment 20000436 PARAMETER Experiment Name: At_Drought_P Parameter: Organism Value: A. thaliana
  misc_feature: MA Experiment 20000436 PARAMETER Experiment Name: At_Drought_P Parameter: Plant Line Value: WS
  misc_feature: MA Experiment 20000436 PARAMETER Experiment Name: At_Drought_P Parameter: Timepoint (hr) Value: 12
  misc_feature: MA Experiment 20000436 PARAMETER Experiment Name: At_Drought_P Parameter: Tissue Value: Whole Plant
  misc_feature: MA Experiment 20000436 PARAMETER Experiment Name: At_Drought_P Parameter: Treatment Value: Drought vs. No Drought
atggatacttccctcttttctttatttgtttcaatccttgttttcgtttttatcgctcttttcaagaaatcaaagaaaccaaaatatgtaaaagctcctgcaccaagtggtgcatggcccatcattggtcatctccaccttctcggtggcaaggaacagcttctttaccgaaccttaggaaaaatggctgaccactacggtccagccatgtcgctacgacttgggagcagtgaaacatttgttgggagcagttttgaggtggctaaagattgttttactgtgaacgacaaagccttggcttctcttatgactgcagccgcaaagcacatgggttacgttttctggctcgagatgcgtaaaatcgcaatgatcgagctcctttctaaccggcgccttcagatgctcaacaacgttcgtgtttctgagatctcaatgggtgtgaaagatttgtattccttatgggtcaagaaaggtggttcagaaccagtaatggttgatctaaagagctggttagaggacatgattgcgaacatgatcatgagaatggtggccggaaagcgatactttggaggcggcggcgcagaatcctcggaacataccgaagaggcaaggcaatggagaaagggcatcgcgaaattctttcacctcgtcggtatattcaccgtgtctgatgcttttccgaaactagggtggcttgatttgcaaggacatgagaaggagatgaagcagacaagaagagagttagatgtgatccttgaaagatggattgaaaaccatcgacaacaacgcaaagtttcaggaacgaaacacaatgattcagacttcgtcgacgttatgttgtcgcttgcagaacaaggcaaactctcgcatcttcaatacgatgccaatacgtgcatcaaaactacctgcctggcactaattcttggaggaagtgagacttcaccatcaacccttacatgggccatttctcttcttctaaacaataaggacatgttaaagaaagtacaagatgagatagacatccacgtcggcagagacaggaacgttgaggattcagacataaaaaatctggtatatcttcaagcgattatcaaagaaacattgagattgtatccagctgctcctctcttaggccatcgagaggcgatggaagattgcacggtcgcaggttacaacgttccgtgcggcacaagactcatagtgaacgtatggaaaatccaaagagatccgaaagtttatatggaaccaaacgagttcagaccagagaggtttatcacaggagaagcaaaagattttgatgttagaggacaaaactttgagctgatgccatttggttcgggaagaagatcatgcccaggcccttcattggccatgcaaatgcttcatttaggtcttgctcgtttccttcattcatttgaagtgaaaactgtattggataggcctgttgacatgagtgagagccctggcttaaccattactaaagctacgcctcttgaggttctgatcaatccacgtcttaagagagagctttttgtgtgattatctattacagaaacatttgacttcaat

SEQ ID NO: 80966 - protein, 512 aa, Arabidopsis thaliana
  peptide (1)..(512): Ceres Seq. ID no. 12657904
  misc_feature (1)..(512): Homolog of NCBI NO: 15236613 NR Description: cytochrome p450 family; protein id: At4g31950.1
  misc_feature (1)..(512): Homolog of NCBI NO: 7430660 NR Description: cytochrome P450 F10N7.240 - Arabidopsis thaliana
  misc_feature (1)..(512): Homolog of NCBI NO: 15236586 NR Description: cytochrome p450, putative; protein id: At4g31940.1
  misc_feature (1)..(512): Homolog of NCBI NO: 15236615 NR Description: cytochrome p450 family; protein id: At4g31970.1
MDTSLFSLFVSILVFVFIALFKKSKKPKYVKAPAPSGAWPIIGHLHLLGGKEQLLYRTLGKMADHYGPAMSLRLGSSETFVGSSFEVAKDCFTVNDKALASLMTAAAKHMGYVFWLEMRKIAMIELLSNRRLQMLNNVRVSEISMGVKDLYSLWVKKGGSEPVMVDLKSWLEDMIANMIMRMVAGKRYFGGGGAESSEHTEEARQWRKGIAKFFHLVGIFTVSDAFPKLGWLDLQGHEKEMKQTRRELDVILERWIENHRQQRKVSGTKHNDSDFVDVMLSLAEQGKLSHLQYDANTCIKTTCLALILGGSETSPSTLTWAISLLLNNKDMLKKVQDEIDIHVGRDRNVEDSDIKNLVYLQAIIKETLRLYPAAPLLGHREAMEDCTVAGYNVPCGTRLIVNVWKIQRDPKVYMEPNEFRPERFITGEAKDFDVRGQNFELMPFGSGRRSCPGPSLAMQMLHLGLARFLHSFEVKTVLDRPVDMSESPGLTITKATPLEVLINPRLKRELFV

SEQ ID NO: 80967 - protein, 451 aa, Arabidopsis thaliana
  peptide (1)..(451): Ceres Seq. ID no. 12657905
  misc_feature (1)..(451): Homolog of NCBI NO: 15236613 NR Description: cytochrome p450 family; protein id: At4g31950.1
  misc_feature (1)..(451): Homolog of NCBI NO: 7430660 NR Description: cytochrome P450 F10N7.240 - Arabidopsis thaliana
  misc_feature (1)..(451): Homolog of NCBI NO: 15236586 NR Description: cytochrome p450, putative; protein id: At4g31940.1
  misc_feature (1)..(451): Homolog of NCBI NO: 15236615 NR Description: cytochrome p450 family; protein id: At4g31970.1
MADHYGPAMSLRLGSSETFVGSSFEVAKDCFTVNDKALASLMTAAAKHMGYVFWLEMRKIAMIELLSNRRLQMLNNVRVSEISMGVKDLYSLWVKKGGSEPVMVDLKSWLEDMIANMIMRMVAGKRYFGGGGAESSEHTEEARQWRKGIAKFFHLVGIFTVSDAFPKLGWLDLQGHEKEMKQTRRELDVILERWIENHRQQRKVSGTKHNDSDFVDVMLSLAEQGKLSHLQYDANTCIKTTCLALILGGSETSPSTLTWAISLLLNNKDMLKKVQDEIDIHVGRDRNVEDSDIKNLVYLQAIIKETLRLYPAAPLLGHREAMEDCTVAGYNVPCGTRLIVNVWKIQRDPKVYMEPNEFRPERFITGEAKDFDVRGQNFELMPFGSGRRSCPGPSLAMQMLHLGLARFLHSFEVKTVLDRPVDMSESPGLTITKATPLEVLINPRLKRELFV

SEQ ID NO: 80968 - protein, 443 aa, Arabidopsis thaliana
  peptide (1)..(443): Ceres Seq. ID no. 12657906
  misc_feature (1)..(443): Homolog of NCBI NO: 15236613 NR Description: cytochrome p450 family; protein id: At4g31950.1
  misc_feature (1)..(443): Homolog of NCBI NO: 7430660 NR Description: cytochrome P450 F10N7.240 - Arabidopsis thaliana
  misc_feature (1)..(443): Homolog of NCBI NO: 15236586 NR Description: cytochrome p450, putative; protein id: At4g31940.1
  misc_feature (1)..(443): Homolog of NCBI NO: 15236615 NR Description: cytochrome p450 family; protein id: At4g31970.1
MSLRLGSSETFVGSSFEVAKDCFTVNDKALASLMTAAAKHMGYVFWLEMRKIAMIELLSNRRLQMLNNVRVSEISMGVKDLYSLWVKKGGSEPVMVDLKSWLEDMIANMIMRMVAGKRYFGGGGAESSEHTEEARQWRKGIAKFFHLVGIFTVSDAFPKLGWLDLQGHEKEMKQTRRELDVILERWIENHRQQRKVSGTKHNDSDFVDVMLSLAEQGKLSHLQYDANTCIKTTCLALILGGSETSPSTLTWAISLLLNNKDMLKKVQDEIDIHVGRDRNVEDSDIKNLVYLQAIIKETLRLYPAAPLLGHREAMEDCTVAGYNVPCGTRLIVNVWKIQRDPKVYMEPNEFRPERFITGEAKDFDVRGQNFELMPFGSGRRSCPGPSLAMQMLHLGLARFLHSFEVKTVLDRPVDMSESPGLTITKATPLEVLINPRLKRELFV

SEQ ID NO: 80969 - DNA, 1086 bp, Arabidopsis thaliana
  misc_feature (1)..(1086): Ceres Seq. ID no. 12657907
  misc_feature: MA Experiment ID: 20000328 Result: Up-regulated in Transcription
  misc_feature: MA Experiment 20000328 PARAMETER Experiment Name: At_42deg_Heat_Sub_P Parameter: Age (day) Value: 14
  misc_feature: MA Experiment 20000328 PARAMETER Experiment Name: At_42deg_Heat_Sub_P Parameter: Organism Value: A. thaliana
  misc_feature: MA Experiment 20000328 PARAMETER Experiment Name: At_42deg_Heat_Sub_P Parameter: Plant Line Value: WS
  misc_feature: MA Experiment 20000328 PARAMETER Experiment Name: At_42deg_Heat_Sub_P Parameter: Temperature (deg C) Value: 42 vs. 22
  misc_feature: MA Experiment 20000328 PARAMETER Experiment Name: At_42deg_Heat_Sub_P Parameter: Timepoint (hr) Value: 6
  misc_feature: MA Experiment 20000328 PARAMETER Experiment Name: At_42deg_Heat_Sub_P Parameter: Tissue Value: Aerial
  misc_feature: MA Experiment ID: 20000352 Result: Up-regulated in Transcription
  misc_feature: MA Experiment 20000352 PARAMETER Experiment Name: At_Drought_Sub_P Parameter: Age (day) Value: 7
  misc_feature: MA Experiment 20000352 PARAMETER Experiment Name: At_Drought_Sub_P Parameter: Organism Value: A. thaliana
  misc_feature: MA Experiment 20000352 PARAMETER Experiment Name: At_Drought_Sub_P Parameter: Plant Line Value: WS
  misc_feature: MA Experiment 20000352 PARAMETER Experiment Name: At_Drought_Sub_P Parameter: Timepoint (hr) Value: 6
  misc_feature: MA Experiment 20000352 PARAMETER Experiment Name: At_Drought_Sub_P Parameter: Tissue Value: Whole Plant
  misc_feature: MA Experiment 20000352 PARAMETER Experiment Name: At_Drought_Sub_P Parameter: Treatment Value: Drought vs. No Drought
atggctcaaatgtcgatgaccgtcgagaagagtatcaaagctgacgtgacggtgagccatgaccgtgtgaaaagggcttacgtcactttccttgctggaaacaaagactactggatgggtgtagttggtctagccaagggacttcgtaaggtgaaatctgcttatcctcttgtggttgcgattctcccggacgtgcctgaggaacaccgtcaaatcctgttggctcagggatgcatcatccgtgagattgaaccggtttatccaccggaaaacaaaaccggttattcaatggcctattacgttatcaactactccaagcttcgtatttgggaggtaaaaaactttcttactatatgtctatatttgtgtttattcatcatccgatcgcatcgtttattttttgttaattttgtggagtatgaaaagatgatttatctagatggagacattcaagtatttagtaacatcgatcatcttttcgatactcctcgtggctacttgtacgctgtcaaagattgcttttgcgagatttcttggtccaaaactcctcaatttaagataggttactgccaacaatgtcctgaaaaggtgacatggcctgttgaaagtcttggttctccaccgccggtatatttcaacgccggtatgttggtttttgaacctaatctcctcacttacgaggatctccttcgtgttgttcaaatcaccactccgacatattttgccgaacaggattttctgaatgaatactttacagacatttacaagcccatcccttcgacctacaaccttgtaatggctatgctttggcgtcatcctgaacacattgaccttgaccaaatcagtgttattcattattgtgcaaatggttcgaagccttggagattcgatgaaactgaagagcatatggatcgtgaggacataaaaatgttggtgaagaaatggtgggatatttatgaagattcgagtttagattacaagaactttgtcgagactgagtccaaactgagtccgatcaatgcaaccttggcttccaaggaatctgttggcgatgtccttattagtcttgccccttccgctgcataa

SEQ ID NO: 80970 - protein, 361 aa, Arabidopsis thaliana
  peptide (1)..(361): Ceres Seq. ID no. 12657908
  misc_feature (1)..(361): Homolog of NCBI NO: 7487427 NR Description: hypothetical protein T25K17.60 - Arabidopsis >gi|4539421|emb|CAB38954.1| putative protein [Arabidopsis >gi|7269476|emb|CAB79480.1| putative protein [Arabidopsis
  misc_feature (122)..(361): Homolog of NCBI NO: 30687163 NR Description: glycosyltransferase family 8 [Arabidopsis >gi|23296356|gb|AAN13051.1| galactinol synthase [Arabidopsis
  misc_feature (1)..(122): Homolog of NCBI NO: 30687163 NR Description: glycosyltransferase family 8 [Arabidopsis >gi|23296356|gb|AAN13051.1| galactinol synthase [Arabidopsis
  misc_feature (122)..(361): Homolog of NCBI NO: 15237827 NR Description: galactinol synthase; protein id: At5g23790.1 thaliana] >gi|10176846|dbj|BAB10052.1| galactinol synthase
  misc_feature (4)..(122): Homolog of NCBI NO: 15237827 NR Description: galactinol synthase; protein id: At5g23790.1 thaliana] >gi|10176846|dbj|BAB10052.1| galactinol synthase
  misc_feature (122)..(361): Homolog of NCBI NO: 30692339 NR Description: galactinol synthase, putative [Arabidopsis
  misc_feature (1)..(122): Homolog of NCBI NO: 30692339 NR Description: galactinol synthase, putative [Arabidopsis
  misc_feature (122)..(361): Homolog of NCBI NO: 18874402 NR Description: galactinol synthase [Cucumis melo]
  misc_feature (19)..(122): Homolog of NCBI NO: 18874402 NR Description: galactinol synthase [Cucumis melo]
  misc_feature (122)..(361): Homolog of NCBI NO: 29569824 NR Description: galactinol synthase [Cucumis sativus]
MAQMSMTVEKSIKADVTVSHDRVKRAYVTFLAGNKDYWMGVVGLAKGLRKVKSAYPLVVAILPDVPEEHRQILLAQGCIIREIEPVYPPENKTGYSMAYYVINYSKLRIWEVKNFLTICLYLCLFIIRSHRLFFVNFVEYEKMIYLDGDIQVFSNIDHLFDTPRGYLYAVKDCFCEISWSKTPQFKIGYCQQCPEKVTWPVESLGSPPPVYFNAGMLVFEPNLLTYEDLLRVVQITTPTYFAEQDFLNEYFTDIYKPIPSTYNLVMAMLWRHPEHIDLDQISVIHYCANGSKPWRFDETEEHMDREDIKMLVKKWWDIYEDSSLDYKNFVETESKLSPINATLASKESVGDVLISLAPSAA

SEQ ID NO: 80971 - protein, 358 aa, Arabidopsis thaliana
  peptide (1)..(358): Ceres Seq. ID no. 12657909
  misc_feature (1)..(358): Homolog of NCBI NO: 7487427 NR Description: hypothetical protein T25K17.60 - Arabidopsis >gi|4539421|emb|CAB38954.1| putative protein [Arabidopsis >gi|7269476|emb|CAB79480.1| putative protein [Arabidopsis
  misc_feature (119)..(358): Homolog of NCBI NO: 30687163 NR Description: glycosyltransferase family 8 [Arabidopsis >gi|23296356|gb|AAN13051.1| galactinol synthase [Arabidopsis
  misc_feature (1)..(119): Homolog of NCBI NO: 30687163 NR Description: glycosyltransferase family 8 [Arabidopsis >gi|23296356|gb|AAN13051.1| galactinol synthase [Arabidopsis
  misc_feature (119)..(358): Homolog of NCBI NO: 15237827 NR Description: galactinol synthase; protein id: At5g23790.1 thaliana] >gi|10176846|dbj|BAB10052.1| galactinol synthase
  misc_feature (1)..(119): Homolog of NCBI NO: 15237827 NR Description: galactinol synthase; protein id: At5g23790.1 thaliana] >gi|10176846|dbj|BAB10052.1| galactinol synthase
  misc_feature (119)..(358): Homolog of NCBI NO: 30692339 NR Description: galactinol synthase, putative [Arabidopsis
  misc_feature (1)..(119): Homolog of NCBI NO: 30692339 NR Description: galactinol synthase, putative [Arabidopsis
  misc_feature (119)..(358): Homolog of NCBI NO: 18874402 NR Description: galactinol synthase [Cucumis melo]
  misc_feature (16)..(119): Homolog of NCBI NO: 18874402 NR Description: galactinol synthase [Cucumis melo]
  misc_feature (119)..(358): Homolog of NCBI NO: 29569824 NR Description: galactinol synthase [Cucumis sativus]
MSMTVEKSIKADVTVSHDRVKRAYVTFLAGNKDYWMGVVGLAKGLRKVKSAYPLVVAILPDVPEEHRQILLAQGCIIREIEPVYPPENKTGYSMAYYVINYSKLRIWEVKNFLTICLYLCLFIIRSHRLFFVNFVEYEKMIYLDGDIQVFSNIDHLFDTPRGYLYAVKDCFCEISWSKTPQFKIGYCQQCPEKVTWPVESLGSPPPVYFNAGMLVFEPNLLTYEDLLRVVQITTPTYFAEQDFLNEYFTDIYKPIPSTYNLVMAMLWRHPEHIDLDQISVIHYCANGSKPWRFDETEEHMDREDIKMLVKKWWDIYEDSSLDYKNFVETESKLSPINATLASKESVGDVLISLAPSAA

SEQ ID NO: 80972 - protein, 356 aa, Arabidopsis thaliana
  peptide (1)..(356): Ceres Seq. ID no. 12657910
  misc_feature (1)..(356): Homolog of NCBI NO: 7487427 NR Description: hypothetical protein T25K17.60 - Arabidopsis >gi|4539421|emb|CAB38954.1| putative protein [Arabidopsis >gi|7269476|emb|CAB79480.1| putative protein [Arabidopsis
  misc_feature (117)..(356): Homolog of NCBI NO: 30687163 NR Description: glycosyltransferase family 8 [Arabidopsis >gi|23296356|gb|AAN13051.1| galactinol synthase [Arabidopsis
  misc_feature (1)..(117): Homolog of NCBI NO: 30687163 NR Description: glycosyltransferase family 8 [Arabidopsis >gi|23296356|gb|AAN13051.1| galactinol synthase [Arabidopsis
  misc_feature (117)..(356): Homolog of NCBI NO: 15237827 NR Description: galactinol synthase; protein id: At5g23790.1 thaliana] >gi|10176846|dbj|BAB10052.1| galactinol synthase
  misc_feature (1)..(117): Homolog of NCBI NO: 15237827 NR Description: galactinol synthase; protein id: At5g23790.1 thaliana] >gi|10176846|dbj|BAB10052.1| galactinol synthase
  misc_feature (117)..(356): Homolog of NCBI NO: 30692339 NR Description: galactinol synthase, putative [Arabidopsis
  misc_feature (1)..(117): Homolog of NCBI NO: 30692339 NR Description: galactinol synthase, putative [Arabidopsis
  misc_feature (117)..(356): Homolog of NCBI NO: 18874402 NR Description: galactinol synthase [Cucumis melo]
  misc_feature (14)..(117): Homolog of NCBI NO: 18874402 NR Description: galactinol synthase [Cucumis melo]
  misc_feature (117)..(356): Homolog of NCBI NO: 29569824 NR Description: galactinol synthase [Cucumis sativus]
MTVEKSIKADVTVSHDRVKRAYVTFLAGNKDYWMGVVGLAKGLRKVKSAYPLVVAILPDVPEEHRQILLAQGCIIREIEPVYPPENKTGYSMAYYVINYSKLRIWEVKNFLTICLYLCLFIIRSHRLFFVNFVEYEKMIYLDGDIQVFSNIDHLFDTPRGYLYAVKDCFCEISWSKTPQFKIGYCQQCPEKVTWPVESLGSPPPVYFNAGMLVFEPNLLTYEDLLRVVQITTPTYFAEQDFLNEYFTDIYKPIPSTYNLVMAMLWRHPEHIDLDQISVIHYCANGSKPWRFDETEEHMDREDIKMLVKKWWDIYEDSSLDYKNFVETESKLSPINATLASKESVGDVLISLAPSAA

SEQ ID NO: 80973 - DNA, 1058 bp, Arabidopsis thaliana
  misc_feature (1)..(1058): Ceres Seq. ID no. 12657971
  misc_feature: MA Experiment ID: 20000173 Result: Down-regulated in Transcription
  misc_feature: MA Experiment 20000173 PARAMETER Experiment Name: At_42deg_Heat_P Parameter: Age (day) Value: 14
  misc_feature: MA Experiment 20000173 PARAMETER Experiment Name: At_42deg_Heat_P Parameter: Organism Value: A. thaliana
  misc_feature: MA Experiment 20000173 PARAMETER Experiment Name: At_42deg_Heat_P Parameter: Plant Line Value: WS
  misc_feature: MA Experiment 20000173 PARAMETER Experiment Name: At_42deg_Heat_P Parameter: Temperature (deg C) Value: 42 vs. 22
  misc_feature: MA Experiment 20000173 PARAMETER Experiment Name: At_42deg_Heat_P Parameter: Timepoint (hr) Value: 6
  misc_feature: MA Experiment 20000173 PARAMETER Experiment Name: At_42deg_Heat_P Parameter: Tissue Value: Aerial
atagaaaatcgtgtcgaccttttttctctcacttacccaataagagcttttttcgcgttttccaccgcaaccaccgtcaccttcaaccgccggagccgccgcaaggaaggctcatcatccgccgtggcaattttttgaggtgtacaaagcattgcctatttgacgaaccaggaaatggttaaaaggcatggagagttttgatttacaagatatatcatgtcgcagtgcatagacggtttcaagcatgtatgctcctcttttttccggtgttttgatatcgatatttacaaacaatctggaggccttggtgaccctgaacttcttgcgagagagacagtttttagcgtgagtgaaatagaggctctctatgagctgtttaagaaaatcagcagtgctgtgattgatgatgggctaataaacaaggaagaatttcagttagccttgttcaagacaaataaaaaagagagcttgtttgcagaccgggtattcgatttgtttgacacaaagcataatggaatactggggtttgaggagtttgcgcgtgctctctctgtctttcatccaaatgctcccatagaagacaagattgacttttcgtttcagctatatgatcttaagcagcaaggtttcatagagaggcaagaggtgaagcaaatggtggtggctactcttgctgagtccggcatgaacctgtcagacgaaatcatagagagtataatcgacaagacatttgaggaagctgatacaaaacatgacgggaggatcgataaggaagagtggagaacccttgttctcaggcatccttcccttctaaagaatatgactctccagtatcttaaggatataacaactacatttccgagctttgtgttccactcgcaggtggaagatacctgagaaaaacaatagcatattagcagaggagacaatttgggaattgtgtttgttttctgattatgtatcatgtctatttgtttcaatctctctgaacattttcaagattttgttgttacttgtgtgaattaaaagtaaagaaaacaaatctgtatttttgctac

SEQ ID NO: 80974 - protein, 226 aa, Arabidopsis thaliana
  peptide (1)..(226): Ceres Seq. ID no. 12657972
  misc_feature (167)..(195): Pfam Name: EF hand Pfam Description: EF hand
  misc_feature (1)..(226): Homolog of NCBI NO: 15236778 NR Description: calcineurin B-like protein 3; protein id: supported by cDNA: gi_18253012, supported by cDNA: gi_3309085
  misc_feature (1)..(226): Homolog of NCBI NO: 30687272 NR Description: calcineurin B-like protein 3 (CBL3) [Arabidopsis
  misc_feature (1)..(226): Homolog of NCBI NO: 15241101 NR Description: calcineurin B-like protein 2 (gb|AAC26009.1); id: At5g55990.2, supported by cDNA: 37280., supported by cDNA: supported by cDNA: gi_3309083 [Arabidopsis thaliana] protein 2
  misc_feature (1)..(226): Homolog of NCBI NO: 21593228 NR Description: calcineurin B-like protein 2 [Arabidopsis
  misc_feature (1)..(226): Homolog of NCBI NO: 22137326 NR Description: calcineurin B [Pisum sativum]
  misc_feature (1)..(226): Homolog of NCBI NO: 16924116 NR Description: putative calcineurin B-like protein [Oryza sativa]
  misc_feature (32)..(220): Homolog of NCBI NO: 38493047 NR Description: Chain A, The Crystal Structure Of The Calcium
  misc_feature (1)..(226): Homolog of NCBI NO: 18414640 NR Description: expressed protein; protein id: At4g16350.1, by cDNA: gi_11065942, supported by cDNA: gi_13448026 [Arabidopsis
  misc_feature (1)..(226): Homolog of NCBI NO: 13448027 NR Description: SOS3-like calcium binding protein [Arabidopsis
  misc_feature (18)..(225): Homolog of NCBI NO: 18414931 NR Description: calcineurin B-like protein 1; protein id: supported by cDNA: gi_3309081 [Arabidopsis thaliana]
MSQCIDGFKHVCSSFFRCFDIDIYKQSGGLGDPELLARETVFSVSEIEALYELFKKISSAVIDDGLINKEEFQLALFKTNKKESLFADRVFDLFDTKHNGILGFEEFARALSVFHPNAPIEDKIDFSFQLYDLKQQGFIERQEVKQMVVATLAESGMNLSDEIIESIIDKTFEEADTKHDGRIDKEEWRTLVLRHPSLLKNMTLQYLKDITTTFPSFVFHSQVEDT

SEQ ID NO: 80975 - DNA, 2628 bp, Arabidopsis thaliana
  misc_feature (1)..(2628): Ceres Seq. ID no. 12657973
  misc_feature: MA Experiment ID: 20000180 Result: Down-regulated in Transcription
  misc_feature: MA Experiment 20000180 PARAMETER Experiment Name: At_Germinating_Seeds_P Parameter: Age (hr) Value: 24 vs. 0
  misc_feature: MA Experiment 20000180 PARAMETER Experiment Name: At_Germinating_Seeds_P Parameter: Tissue Value: Germinating Seeds
  misc_feature: MA Experiment ID: 20000184 Result: Down-regulated in Transcription
  misc_feature: MA Experiment 20000184 PARAMETER Experiment Name: At_Shoots__P Parameter: Age (day) Value: 7
  misc_feature: MA Experiment 20000184 PARAMETER Experiment Name: At_Shoots__P Parameter: Tissue Value: Shoots vs. Whole Plant
  misc_feature: MA Experiment ID: 20000234 Result: Up-regulated in Transcription
  misc_feature: MA Experiment 20000234 PARAMETER Experiment Name: At_Siliques_P Parameter: Age (day) Value: 21
  misc_feature: MA Experiment 20000234 PARAMETER Experiment Name: At_Siliques_P Parameter: Organism Value: A. thaliana
  misc_feature: MA Experiment 20000234 PARAMETER Experiment Name: At_Siliques_P Parameter: Plant Line Value: WS
  misc_feature: MA Experiment 20000234 PARAMETER Experiment Name: At_Siliques_P Parameter: Tissue Value: Less Than 5mm Siliques vs. Whole Plant
  misc_feature: MA Experiment ID: 20000235 Result: Up-regulated in Transcription
  misc_feature: MA Experiment 20000235 PARAMETER Experiment Name: At_Siliques_P Parameter: Age (day) Value: 21
  misc_feature: MA Experiment 20000235 PARAMETER Experiment Name: At_Siliques_P Parameter: Organism Value: A. thaliana
  misc_feature: MA Experiment 20000235 PARAMETER Experiment Name: At_Siliques_P Parameter: Plant Line Value: WS
  misc_feature: MA Experiment 20000235 PARAMETER Experiment Name: At_Siliques_P Parameter: Tissue Value: 5-10mm Siliques vs. Whole Plant
  misc_feature: MA Experiment ID: 20000264 Result: Up-regulated in Transcription
  misc_feature: MA Experiment 20000264 PARAMETER Experiment Name: At_Open_Flower_P Parameter: Age (day) Value: 21
  misc_feature: MA Experiment 20000264 PARAMETER Experiment Name: At_Open_Flower_P Parameter: Plant Line Value: WS
  misc_feature: MA Experiment 20000264 PARAMETER Experiment Name: At_Open_Flower_P Parameter: Tissue Value: Open Flower vs. Whole Plant
  misc_feature: MA Experiment ID: 20000265 Result: Up-regulated in Transcription
  misc_feature: MA Experiment 20000265 PARAMETER Experiment Name: At_Open_Flower_P Parameter: Age (day) Value: 21
  misc_feature: MA Experiment 20000265 PARAMETER Experiment Name: At_Open_Flower_P Parameter: Plant Line Value: WS
  misc_feature: MA Experiment 20000265 PARAMETER Experiment Name: At_Open_Flower_P Parameter: Tissue Value: Closed Flower vs. Whole Plant
  misc_feature: MA Experiment ID: 20000286 Result: Up-regulated in Transcription
  misc_feature: MA Experiment 20000286 PARAMETER Experiment Name: At_Open_Flower_P Parameter: Age (day) Value: 21
  misc_feature: MA Experiment 20000286 PARAMETER Experiment Name: At_Open_Flower_P Parameter: Plant Line Value: WS
  misc_feature: MA Experiment 20000286 PARAMETER Experiment Name: At_Open_Flower_P Parameter: Tissue Value: Half Open vs. Whole Plant
  misc_feature: MA Experiment ID: 20001911 Result: Up-regulated in Transcription
  misc_feature: MA Experiment 20001911 PARAMETER Experiment Name: At_Drought_Reproduction_P Parameter: Age (day) Value: 40
  misc_feature: MA Experiment 20001911 PARAMETER Experiment Name: At_Drought_Reproduction_P Parameter: Organism Value: A. thaliana
  misc_feature: MA Experiment 20001911 PARAMETER Experiment Name: At_Drought_Reproduction_P Parameter: Plant Line Value: WS
  misc_feature: MA Experiment 20001911 PARAMETER Experiment Name: At_Drought_Reproduction_P Parameter: Timepoint (day) Value: 10
  misc_feature: MA Experiment 20001911 PARAMETER Experiment Name: At_Drought_Reproduction_P Parameter: Tissue Value: Flowers
  misc_feature: MA Experiment 20001911 PARAMETER Experiment Name: At_Drought_Reproduction_P Parameter: Treatment Value: Drought vs. No Drought
aatactagtacatcctctcaaacatcttaactaaaacagaggtctaactttttcctttttcctggaaaaattgcagagaaaatttatttttaatgtcaggtcattaacacaggttgcttacaagaacattacttctacagcaagttattcagaactctggacattatcacccgagtcgatcgacgtcagggccgcctaacagaaaatggtaggctctctcgaagtatccaagcctccagagcacaaggttgagtccaagatcgtcatagccgatgaagaagaagaggatgaaaacgacagtccaatcgaagaggtccgtttaaccgtaccgataaccgacgatccatctctaccagttttgacattccgtacatggttcttaggaatggtttcttgcgtggtactcgcgttcgtgaacaatttcttcggttaccggtcgaacccgctcacggtatcttcagtcgtggctcagatcatcactctccctctaggaaagctcatggccacgactctaccaacaacaaaactccgtttacctggtacaaattggtcgtgttcgttgaaccctggaccattcaacatgaaggaacatgtactgatcactatattcgctaataccggagctggaggagcttatgccaccagcatcctaaccatcgttaaagcattttatcaccggaatctcaatcccgccgccgccatgttgcttgtccaaaccactcagttgttgggatatggatgggcgggtatgttcaggaaatacctagtggactcaccttacatgtggtggcctgcaaatcttgttcaagtctctctctttagagccttacatgagaaggaggagaagcgtgaaggaaaacaaacgaaacttagattcttcttgatagtcttcttcctgagcttcacttactacatagtcccaggctatcttttcccttccatctcatatctctcctttgtctgctggatatggacccgctctgtaaccgctcaacagatcggttcagggctgcacggtctcggcattggctcatttggtcttgattggtccacggttgcaggtttcttaggcagtcctttagctgtaccgttcttcgctatagccaattcctttggcggatttatcatcttcttctacatcatccttcctatcttctactggagcaacgcttacgaggcaaagaagtttcctttctatacctctcacccatttgatcacactggtcagcgttacaacaccactcgtatcctcaaccagaaaacattcaatattgatcttcctgcttacgaaagctatagcaagctttaccttagcattctgtttgctctgatctatgggctcagcttcggtacccttaccgcaaccatttctcatgtcgccctctttgacggaaagtttatctgggagctgtggaagaaggcaacattgacgacaaaggacaagtttggagatgtgcatacaagattgatgaagaagaattataaggaagtacctcaatggtggttcgttgcggttctcgctgcttcctttgtgctagctctttatgcatgtgagggatttggcaaacagcttcagctcccatggtggggacttttactcgcttgtgccatcgcctttaccttcactttgcctattggagttatcctagcgaccacaaaccagcgaatgggtcttaatgttatatcggaactgatcatcgggttcttgtatccgggaaagccacttgccaatgtggcttttaagacttatggttctgtgagtatagctcaagccttgtactttgtcggagacttcaaacttggccactacatgaagattcctccgagatctatgttcatcgttcaactcgttgcgactattgttgcttcaactgtctccttcgggaccacatggtggttgctttcttcagtcgagaacatctgtaacacagatatgctcccaaagagtagtccgtggacttgccctggggatgtagtgttctacaacgcgtcgatcatttggggaatcatcggtcctggaaggatgttcacaagtaaaggtatataccccgggatgaactggttcttcctcattggcttccttgctcctgtcccggtctggttctttgcaaggaaattcccggagaagaagtggatacatcagattcatattcccttgatcttctcaggggctaatgtgatgccaatggccaaggctgtgcattactggtcgtggttcgctgttgggatcgtgttcaactactatatcttcaggaggtacaagggatggtgggcaaggcataactacatcctctctgcagctcttgatgcaggcactgcggttatgggagtgttgatctactttgcgttacagaacaataacataagcttaccagattggtgggggaatgagaacacagaccattgccctttggcaaattgcccaacagagaaagggatcgtcgctaagggctgcccggtgttctaaaaccttgttgcagtttaacattatctctgtagtttctcatacctgcaggtgagggacagttactgcaaagtcgtttggtggccataataataataatgcgtaaagactttgtgagagtttaagtgataaagtaaaaaatggtttgcaaattaagaacaccc

SEQ ID NO: 80976 - protein, 753 aa, Arabidopsis thaliana
  peptide (1)..(753): Ceres Seq. ID no. 12657974
  misc_feature (26)..(751): Homolog of NCBI NO: 35215092 NR Description: putative sexual differentiation process protein
  misc_feature (24)..(753): Homolog of NCBI NO: 34898010 NR Description: EST D25093(R3139) corresponds to a region of the
  misc_feature (8)..(753): Homolog of NCBI NO: 15236912 NR Description: putative oligopeptide transporter; protein id: supported by cDNA: gi_15010733 [Arabidopsis thaliana]
  misc_feature (26)..(753): Homolog of NCBI NO: 15218331 NR Description: unknown protein; protein id: At1g09930.1
  misc_feature (29)..(752): Homolog of NCBI NO: 25553564 NR Description: putative isp4 protein [Oryza sativa (japonica
  misc_feature (24)..(752): Homolog of NCBI NO: 21592665 NR Description: Isp4-like protein [Arabidopsis thaliana]
  misc_feature (24)..(752): Homolog of NCBI NO: 15237689 NR Description: Isp4-like protein; protein id: At5g64410.1, by cDNA: 3109., supported by cDNA: gi_20466753 [Arabidopsis
  misc_feature (20)..(752): Homolog of NCBI NO: 34912940 NR Description: putative sexual differentiation process protein
  misc_feature (9)..(753): Homolog of NCBI NO: 40539006 NR Description: putative oligopeptide transporter protein [Oryza
  misc_feature (89)..(753): Homolog of NCBI NO: 30722286 NR Description: glutathione transporter GT1 [Brassica juncea]
MVGSLEVSKPPEHKVESKIVIADEEEEDENDSPIEEVRLTVPITDDPSLPVLTFRTWFLGMVSCVVLAFVNNFFGYRSNPLTVSSVVAQIITLPLGKLMATTLPTTKLRLPGTNWSCSLNPGPFNMKEHVLITIFANTGAGGAYATSILTIVKAFYHRNLNPAAAMLLVQTTQLLGYGWAGMFRKYLVDSPYMWWPANLVQVSLFRALHEKEEKREGKQTKLRFFLIVFFLSFTYYIVPGYLFPSISYLSFVCWIWTRSVTAQQIGSGLHGLGIGSFGLDWSTVAGFLGSPLAVPFFAIANSFGGFIIFFYIILPIFYWSNAYEAKKFPFYTSHPFDHTGQRYNTTRILNQKTFNIDLPAYESYSKLYLSILFALIYGLSFGTLTATISHVALFDGKFIWELWKKATLTTKDKFGDVHTRLMKKNYKEVPQWWFVAVLAASFVLALYACEGFGKQLQLPWWGLLLACAIAFTFTLPIGVILATTNQRMGLNVISELIIGFLYPGKPLANVAFKTYGSVSIAQALYFVGDFKLGHYMKIPPRSMFIVQLVATIVASTVSFGTTWWLLSSVENICNTDMLPKSSPWTCPGDVVFYNASIIWGIIGPGRMFTSKGIYPGMNWFFLIGFLAPVPVWFFARKFPEKKWIHQIHIPLIFSGANVMPMAKAVHYWSWFAVGIVFNYYIFRRYKGWWARHNYILSAALDAGTAVMGVLIYFALQNNNISLPDWWGNENTDHCPLANCPTEKGIVAKGCPVF

SEQ ID NO: 80977 - protein, 693 aa, Arabidopsis thaliana
  peptide (1)..(693): Ceres Seq. ID no. 12657975
  misc_feature (1)..(691): Homolog of NCBI NO: 35215092 NR Description: putative sexual differentiation process protein
  misc_feature (1)..(693): Homolog of NCBI NO: 34898010 NR Description: EST D25093(R3139) corresponds to a region of the
  misc_feature (1)..(693): Homolog of NCBI NO: 15236912 NR Description: putative oligopeptide transporter; protein id: supported by cDNA: gi_15010733 [Arabidopsis thaliana]
  misc_feature (1)..(693): Homolog of NCBI NO: 15218331 NR Description: unknown protein; protein id: At1g09930.1
  misc_feature (1)..(692): Homolog of NCBI NO: 25553564 NR Description: putative isp4 protein [Oryza sativa (japonica
  misc_feature (1)..(692): Homolog of NCBI NO: 21592665 NR Description: Isp4-like protein [Arabidopsis thaliana]
  misc_feature (1)..(692): Homolog of NCBI NO: 15237689 NR Description: Isp4-like protein; protein id: At5g64410.1, by cDNA: 3109., supported by cDNA: gi_20466753 [Arabidopsis
  misc_feature (1)..(692): Homolog of NCBI NO: 34912940 NR Description: putative sexual differentiation process protein
  misc_feature (1)..(693): Homolog of NCBI NO: 40539006 NR Description: putative oligopeptide transporter protein [Oryza
  misc_feature (29)..(693): Homolog of NCBI NO: 30722286 NR Description: glutathione transporter GT1 [Brassica juncea]
MVSCVVLAFVNNFFGYRSNPLTVSSVVAQIITLPLGKLMATTLPTTKLRLPGTNWSCSLNPGPFNMKEHVLITIFANTGAGGAYATSILTIVKAFYHRNLNPAAAMLLVQTTQLLGYGWAGMFRKYLVDSPYMWWPANLVQVSLFRALHEKEEKREGKQTKLRFFLIVFFLSFTYYIVPGYLFPSISYLSFVCWIWTRSVTAQQIGSGLHGLGIGSFGLDWSTVAGFLGSPLAVPFFAIANSFGGFIIFFYIILPIFYWSNAYEAKKFPFYTSHPFDHTGQRYNTTRILNQKTFNIDLPAYESYSKLYLSILFALIYGLSFGTLTATISHVALFDGKFIWELWKKATLTTKDKFGDVHTRLMKKNYKEVPQWWFVAVLAASFVLALYACEGFGKQLQLPWWGLLLACAIAFTFTLPIGVILATTNQRMGLNVISELIIGFLYPGKPLANVAFKTYGSVSIAQALYFVGDFKLGHYMKIPPRSMFIVQLVATIVASTVSFGTTWWLLSSVENICNTDMLPKSSPWTCPGDVVFYNASIIWGIIGPGRMFTSKGIYPGMNWFFLIGFLAPVPVWFFARKFPEKKWIHQIHIPLIFSGANVMPMAKAVHYWSWFAVGIVFNYYIFRRYKGWWARHNYILSAALDAGTAVMGVLIYFALQNNNISLPDWWGNENTDHCPLANCPTEKGIVAKGCPVF

SEQ ID NO: 80978 - protein, 655 aa, Arabidopsis thaliana
  peptide (1)..(655): Ceres Seq. ID no. 12657976
  misc_feature (1)..(653): Homolog of NCBI NO: 35215092 NR Description: putative sexual differentiation process protein
  misc_feature (1)..(655): Homolog of NCBI NO: 34898010 NR Description: EST D25093(R3139) corresponds to a region of the
  misc_feature (1)..(655): Homolog of NCBI NO: 15236912 NR Description: putative oligopeptide transporter; protein id: supported by cDNA: gi_15010733 [Arabidopsis thaliana]
  misc_feature (1)..(655): Homolog of NCBI NO: 15218331 NR Description: unknown protein; protein id: At1g09930.1
  misc_feature (1)..(654): Homolog of NCBI NO: 25553564 NR Description: putative isp4 protein [Oryza sativa (japonica
  misc_feature (1)..(654): Homolog of NCBI NO: 21592665 NR Description: Isp4-like protein [Arabidopsis thaliana]
  misc_feature (1)..(654): Homolog of NCBI NO: 15237689 NR Description: Isp4-like protein; protein id: At5g64410.1, by cDNA: 3109., supported by cDNA: gi_20466753 [Arabidopsis
  misc_feature (1)..(654): Homolog of NCBI NO: 34912940 NR Description: putative sexual differentiation process protein
  misc_feature (1)..(655): Homolog of NCBI NO: 40539006 NR Description: putative oligopeptide transporter protein [Oryza
  misc_feature (1)..(655): Homolog of NCBI NO: 30722286 NR Description: glutathione transporter GT1 [Brassica juncea]
MATTLPTTKLRLPGTNWSCSLNPGPFNMKEHVLITIFANTGAGGAYATSILTIVKAFYHRNLNPAAAMLLVQTTQLLGYGWAGMFRKYLVDSPYMWWPANLVQVSLFRALHEKEEKREGKQTKLRFFLIVFFLSFTYYIVPGYLFPSISYLSFVCWIWTRSVTAQQIGSGLHGLGIGSFGLDWSTVAGFLGSPLAVPFFAIANSFGGFIIFFYIILPIFYWSNAYEAKKFPFYTSHPFDHTGQRYNTTRILNQKTFNIDLPAYESYSKLYLSILFALIYGLSFGTLTATISHVALFDGKFIWELWKKATLTTKDKFGDVHTRLMKKNYKEVPQWWFVAVLAASFVLALYACEGFGKQLQLPWWGLLLACAIAFTFTLPIGVILATTNQRMGLNVISELIIGFLYPGKPLANVAFKTYGSVSIAQALYFVGDFKLGHYMKIPPRSMFIVQLVATIVASTVSFGTTWWLLSSVENICNTDMLPKSSPWTCPGDVVFYNASIIWGIIGPGRMFTSKGIYPGMNWFFLIGFLAPVPVWFFARKFPEKKWIHQIHIPLIFSGANVMPMAKAVHYWSWFAVGIVFNYYIFRRYKGWWARHNYILSAALDAGTAVMGVLIYFALQNNNISLPDWWGNENTDHCPLANCPTEKGIVAKGCPVF

SEQ ID NO: 80979 - DNA, 1027 bp, Arabidopsis thaliana
  misc_feature (1)..(1027): Ceres Seq. ID no. 12657993
  misc_feature: MA Experiment ID: 20000306 Result: Down-regulated in Transcription
  misc_feature: MA Experiment 20000306 PARAMETER Experiment Name: At_Germinating_Seeds_Sub_P Parameter: Age (hr) Value: 6 vs. 0
  misc_feature: MA Experiment 20000306 PARAMETER Experiment Name: At_Germinating_Seeds_Sub_P Parameter: Organism Value: A. thaliana
  misc_feature: MA Experiment 20000306 PARAMETER Experiment Name: At_Germinating_Seeds_Sub_P Parameter: Plant Line Value: WS
  misc_feature: MA Experiment 20000306 PARAMETER Experiment Name: At_Germinating_Seeds_Sub_P Parameter: Tissue Value: Germinating Seeds
  misc_feature: MA Experiment ID: 20000307 Result: Down-regulated in Transcription
  misc_feature: MA Experiment 20000307 PARAMETER Experiment Name: At_Germinating_Seeds_Sub_P Parameter: Age (hr) Value: 24 vs. 0
  misc_feature: MA Experiment 20000307 PARAMETER Experiment Name: At_Germinating_Seeds_Sub_P Parameter: Organism Value: A. thaliana
  misc_feature: MA Experiment 20000307 PARAMETER Experiment Name: At_Germinating_Seeds_Sub_P Parameter: Plant Line Value: WS
  misc_feature: MA Experiment 20000307 PARAMETER Experiment Name: At_Germinating_Seeds_Sub_P Parameter: Tissue Value: Germinating Seeds
  misc_feature: MA Experiment ID: 20000328 Result: Up-regulated in Transcription
  misc_feature: MA Experiment 20000328 PARAMETER Experiment Name: At_42deg_Heat_Sub_P Parameter: Age (day) Value: 14
  misc_feature: MA Experiment 20000328 PARAMETER Experiment Name: At_42deg_Heat_Sub_P Parameter: Organism Value: A. thaliana
  misc_feature: MA Experiment 20000328 PARAMETER Experiment Name: At_42deg_Heat_Sub_P Parameter: Plant Line Value: WS
  misc_feature: MA Experiment 20000328 PARAMETER Experiment Name: At_42deg_Heat_Sub_P Parameter: Temperature (deg C) Value: 42 vs. 22
  misc_feature: MA Experiment 20000328 PARAMETER Experiment Name: At_42deg_Heat_Sub_P Parameter: Timepoint (hr) Value: 6
  misc_feature: MA Experiment 20000328 PARAMETER Experiment Name: At_42deg_Heat_Sub_P Parameter: Tissue Value: Aerial
aaagtgagagagagatggggtcaaagacggagatgatggagagagacgcaatggctacggtggctccctatgcgccggtcacttaccatcgccgtgctcgtgttgacttggatgatagacttcctaaaccttatatgccaagagcattgcaagcaccagacagagaacacccgtacggaactccaggccataagaattacggacttagtgttcttcaacagcatgtctccttcttcgatatcgatgataatggcatcatttacccttgggagacctactctggactgcgaatgcttggtttcaatatcattgggtcgcttataatagccgctgttatcaacctgacccttagctatgccactcttccggggtggttaccttcacctttcttccctatatacatacacaacatacacaagtcaaagcatggaagtgattcaaaaacatatgacaatgaaggaaggtttatgccggtgaatcttgagttgatatttagcaaatatgcgaaaaccttgccagacaagttgagtcttggagaactatgggagatgacagaaggaaaccgtgacgcttgggacatttttggatggatcgcaggcaaaatagagtggggactgttgtacttgctagcaagggatgaagaagggtttttgtcaaaagaagctattaggcggtgtttcgatggaagcttgttcgagtactgtgccaaaatctacgctggtatcagtgaagacaagacagcatactactaaaagtatcctttatgttaagtaattgatcgagccattttaagctaataatcgatcaatgtgaagcttgtgcctatacggtaaatgaaggttcgggtagtagtatggacttttggtctaagagatctatgtttgtttttgtttttccagttctgtatggttatactataagttgcagctctaaagaaaagcttctgtatgttttgttgccttggtctctctttgtaccaacccctttttctgttatttccaattttacactgttagttattattgct

SEQ ID NO: 80980 - protein, 249 aa, Arabidopsis thaliana
  peptide (1)..(249): Ceres Seq. ID no. 12657994
  misc_feature (63)..(236): Pfam Name: Caleosin related protein Pfam Description: Caleosin related protein
  misc_feature (5)..(249): Homolog of NCBI NO: 15236846 NR Description: embryo-specific protein 1 (ATS1); protein id: supported by cDNA: gi_17380857 [Arabidopsis thaliana]
  misc_feature (5)..(249): Homolog of NCBI NO: 17380858 NR Description: putative embryo-specific protein ATS1
  misc_feature (10)..(248): Homolog of NCBI NO: 15240486 NR Description: embryo-specific protein 1 (ATS1); protein id:
SEREMGSKTEMMERDAMATVAPYAPVTYHRRARVDLDDRLPKPYMPRALQAPDREHPYGTPGHKNYGLSVLQQHVSFFDIDDNGIIYPWETYSGLRMLGFNIIGSLIIAAVINLTLSYATLPGWLPSPFFPIYIHNIHKSKHGSDSKTYDNEGRFMPVNLELIFSKYAKTLPDKLSLGELWEMTEGNRDAWDIFGWIAGKIEWGLLYLLARDEEGFLSKEAIRRCFDGSLFEYCAKIYAGISEDKTAYY

SEQ ID NO: 80981 - protein, 245 aa, Arabidopsis thaliana
  peptide (1)..(245): Ceres Seq. ID no. 12657995
  misc_feature (59)..(232): Pfam Name: Caleosin related protein Pfam Description: Caleosin related protein
  misc_feature (1)..(245): Homolog of NCBI NO: 15236846 NR Description: embryo-specific protein 1 (ATS1); protein id: supported by cDNA: gi_17380857 [Arabidopsis thaliana]
  misc_feature (1)..(245): Homolog of NCBI NO: 17380858 NR Description: putative embryo-specific protein ATS1
  misc_feature (6)..(244): Homolog of NCBI NO: 15240486 NR Description: embryo-specific protein 1 (ATS1); protein id:
MGSKTEMMERDAMATVAPYAPVTYHRRARVDLDDRLPKPYMPRALQAPDREHPYGTPGHKNYGLSVLQQHVSFFDIDDNGIIYPWETYSGLRMLGFNIIGSLIIAAVINLTLSYATLPGWLPSPFFPIYIHNIHKSKHGSDSKTYDNEGRFMPVNLELIFSKYAKTLPDKLSLGELWEMTEGNRDAWDIFGWIAGKIEWGLLYLLARDEEGFLSKEAIRRCFDGSLFEYCAKIYAGISEDKTAYY

SEQ ID NO: 80982 - protein, 239 aa, Arabidopsis thaliana
  peptide (1)..(239): Ceres Seq. ID no. 12657996
  misc_feature (53)..(226): Pfam Name: Caleosin related protein Pfam Description: Caleosin related protein
  misc_feature (1)..(239): Homolog of NCBI NO: 15236846 NR Description: embryo-specific protein 1 (ATS1); protein id: supported by cDNA: gi_17380857 [Arabidopsis thaliana]
  misc_feature (1)..(239): Homolog of NCBI NO: 17380858 NR Description: putative embryo-specific protein ATS1
  misc_feature (1)..(238): Homolog of NCBI NO: 15240486 NR Description: embryo-specific protein 1 (ATS1); protein id:
MMERDAMATVAPYAPVTYHRRARVDLDDRLPKPYMPRALQAPDREHPYGTPGHKNYGLSVLQQHVSFFDIDDNGIIYPWETYSGLRMLGFNIIGSLIIAAVINLTLSYATLPGWLPSPFFPIYIHNIHKSKHGSDSKTYDNEGRFMPVNLELIFSKYAKTLPDKLSLGELWEMTEGNRDAWDIFGWIAGKIEWGLLYLLARDEEGFLSKEAIRRCFDGSLFEYCAKIYAGISEDKTAYY

SEQ ID NO: 80983 - DNA, 1347 bp, Arabidopsis thaliana
  misc_feature (1)..(1347): Ceres Seq. ID no. 12658000
  misc_feature: MA Experiment ID: 20000264 Result: Up-regulated in Transcription
  misc_feature: MA Experiment 20000264 PARAMETER Experiment Name: At_Open_Flower_P Parameter: Age (day) Value: 21
  misc_feature: MA Experiment 20000264 PARAMETER Experiment Name: At_Open_Flower_P Parameter: Plant Line Value: WS
  misc_feature: MA Experiment 20000264 PARAMETER Experiment Name: At_Open_Flower_P Parameter: Tissue Value: Open Flower vs. Whole Plant
  misc_feature: MA Experiment ID: 20000265 Result: Up-regulated in Transcription
  misc_feature: MA Experiment 20000265 PARAMETER Experiment Name: At_Open_Flower_P Parameter: Age (day) Value: 21
  misc_feature: MA Experiment 20000265 PARAMETER Experiment Name: At_Open_Flower_P Parameter: Plant Line Value: WS
  misc_feature: MA Experiment 20000265 PARAMETER Experiment Name: At_Open_Flower_P Parameter: Tissue Value: Closed Flower vs. Whole Plant
  misc_feature: MA Experiment ID: 20000286 Result: Up-regulated in Transcription
  misc_feature: MA Experiment 20000286 PARAMETER Experiment Name: At_Open_Flower_P Parameter: Age (day) Value: 21
  misc_feature: MA Experiment 20000286 PARAMETER Experiment Name: At_Open_Flower_P Parameter: Plant Line Value: WS
  misc_feature: MA Experiment 20000286 PARAMETER Experiment Name: At_Open_Flower_P Parameter: Tissue Value: Half Open vs. Whole Plant
  misc_feature: MA Experiment ID: 20000573 Result: Up-regulated in Transcription
  misc_feature: MA Experiment 20000573 PARAMETER Experiment Name: At_100uM_ABA_Mutants__P Parameter: Organism Value: A. thaliana
  misc_feature: MA Experiment 20000573 PARAMETER Experiment Name: At_100uM_ABA_Mutants__P Parameter: Plant Line Value: CS22 vs. Ler wt
  misc_feature: MA Experiment 20000573 PARAMETER Experiment Name: At_100uM_ABA_Mutants__P Parameter: Timepoint (hr) Value: N/A
  misc_feature: MA Experiment 20000573 PARAMETER Experiment Name: At_100uM_ABA_Mutants__P Parameter: Tissue Value: Whole Plant
  misc_feature: MA Experiment 20000573 PARAMETER Experiment Name: At_100uM_ABA_Mutants__P Parameter: Treatment Value: None
  misc_feature: MA Experiment ID: 20000574 Result: Up-regulated in Transcription
  misc_feature: MA Experiment 20000574 PARAMETER Experiment Name: At_100uM_ABA_Mutants__P Parameter: Organism Value: A. thaliana
  misc_feature: MA Experiment 20000574 PARAMETER Experiment Name: At_100uM_ABA_Mutants__P Parameter: Plant Line Value: CS23 vs. Ler wt
  misc_feature: MA Experiment 20000574 PARAMETER Experiment Name: At_100uM_ABA_Mutants__P Parameter: Timepoint (hr) Value: N/A
  misc_feature: MA Experiment 20000574 PARAMETER Experiment Name: At_100uM_ABA_Mutants__P Parameter: Tissue Value: Whole Plant
  misc_feature: MA Experiment 20000574 PARAMETER Experiment Name: At_100uM_ABA_Mutants__P Parameter: Treatment Value: None
atggccgtttctttcttaccttattttctgattctttccttcctctcagccattgacgcacattctggaatggtcggagtcaattatggtcggatagctaacaatctcccgtcgccggagaaagtagtgaacctcctgaaatctcaaggaatcaaccgtatcaaaatcttcgacaccgataagaatgtactaaccgcacttgcaaattccaaaatcaaagtaatcgtcgctctccctaacgagcttctctcctccgccgcctcccaccaatcattcgccgacaactggattaaaacccacataatgccatacttcccagcgacggagatcgaagctatcgccgtcggtaacgaagtattcgtcgatccgacgatcacgccgtatcttgtcaatgcgatgaagaacattcacacctctctggttaagtataaactcgacaaagccatcaagatctcgtctcctattgctcttagcgcgcttgctaattcgtacccgccttcctctggttcttttaaaccggaattaatcgaaccggttgttaaaccaatgcttgctctgcttcaacaaacgtcgtcgtatcttatggtaaatgcttatccgtttttcgcttacgcagcaaacgccgataaaatctctttagactacgctctgtttaaagaaaacgccgggaatatagattccggtaccggattgaagtacaacagtctctttgacgctcaaatagacgccgtttacgcggcattgtccgccgtcggatttaaaggcgttaaggtgatggtgacggaaacagggtggccttccgttggagatgagaatgagattggtgcaagcgaatctaacgcggcggcgtataacgccggacttgtgaagagagtgttaacgggtaaaggaacaccgttaagaccgacggagccacttaacgtctatttattcgctttattcaacgaaaaccagaaaccggggccaacgtctgagagaaactacggtttgttttacccaaacgaagggaaagtgtacaacgttccgttcactaaaaagtcaacgacgccggtcaacggtaacagaggtaaagttccggtgacgcacgagggacatacatggtgcgtttcgaacggagaggtagcgaaggagaaacttcaggaggctcttgattacgcttgcggagaaggaggagctgattgccgcccgattcagccaggtgccacgtgttatcatcctgagtcgttagaagctcacgcttcgtacgccttcaatagttactaccagaagaactcacgtcgtgttggtacgtgcttctttggtggagctgctcacgtcgtcacgcaacctcctcgtacgttaatctaa

SEQ ID NO: 80984 - protein, 448 aa, Arabidopsis thaliana
  peptide (1)..(448): Ceres Seq. ID no. 12658001
  misc_feature (25)..(343): Pfam Name: Glycosyl hydrolases family 17 Pfam Description: Glycosyl hydrolases family 17
  misc_feature (1)..(448): Homolog of NCBI NO: 15236882 NR Description: glycosyl hydrolase family 17; protein id:
  misc_feature (1)..(445): Homolog of NCBI NO: 18423719 NR Description: glycosyl hydrolase family 17; protein id: supported by cDNA: 7119., supported by cDNA: gi_18700154
  misc_feature (1)..(444): Homolog of NCBI NO: 9758115 NR Description: beta-1,3-glucanase-like protein [Arabidopsis
  misc_feature (1)..(445): Homolog of NCBI NO: 18700155 NR Description: AT5g55180/MCO15_13 [Arabidopsis thaliana]
  misc_feature (1)..(445): Homolog of NCBI NO: 21594590 NR Description: beta-1,3-glucanase-like protein [Arabidopsis
  misc_feature (1)..(445): Homolog of NCBI NO: 11071974 NR Description: elicitor inducible beta-1,3-glucanase Nt-SubE76
  misc_feature (10)..(445): Homolog of NCBI NO: 30678225 NR Description: glycosyl hydrolase family 17 [Arabidopsis
  misc_feature (10)..(444): Homolog of NCBI NO: 25316444 NR Description: probable beta-1,3-glucanase [imported] -
  misc_feature (4)..(346): Homolog of NCBI NO: 27529826 NR Description: beta-1,3-glucanase-like protein [Nicotiana
  misc_feature (10)..(343): Homolog of NCBI NO: 11279331 NR Description: beta-1,3-glucanase (EC 3.2.1.-) precursor
MAVSFLPYFLILSFLSAIDAHSGMVGVNYGRIANNLPSPEKVVNLLKSQGINRIKIFDTDKNVLTALANSKIKVIVALPNELLSSAASHQSFADNWIKTHIMPYFPATEIEAIAVGNEVFVDPTITPYLVNAMKNIHTSLVKYKLDKAIKISSPIALSALANSYPPSSGSFKPELIEPVVKPMLALLQQTSSYLMVNAYPFFAYAANADKISLDYALFKENAGNIDSGTGLKYNSLFDAQIDAVYAALSAVGFKGVKVMVTETGWPSVGDENEIGASESNAAAYNAGLVKRVLTGKGTPLRPTEPLNVYLFALFNENQKPGPTSERNYGLFYPNEGKVYNVPFTKKSTTPVNGNRGKVPVTHEGHTWCVSNGEVAKEKLQEALDYACGEGGADCRPIQPGATCYHPESLEAHASYAFNSYYQKNSRRVGTCFFGGAAHVVTQPPRTLI

SEQ ID NO: 80985 - protein, 425 aa, Arabidopsis thaliana
  peptide (1)..(425): Ceres Seq. ID no. 12658002
  misc_feature (2)..(320): Pfam Name: Glycosyl hydrolases family 17 Pfam Description: Glycosyl hydrolases family 17
  misc_feature (1)..(425): Homolog of NCBI NO: 15236882 NR Description: glycosyl hydrolase family 17; protein id:
  misc_feature (1)..(422): Homolog of NCBI NO: 18423719 NR Description: glycosyl hydrolase family 17; protein id: supported by cDNA: 7119., supported by cDNA: gi_18700154
  misc_feature (1)..(421): Homolog of NCBI NO: 9758115 NR Description: beta-1,3-glucanase-like protein [Arabidopsis
  misc_feature (1)..(422): Homolog of NCBI NO: 18700155 NR Description: AT5g55180/MCO15_13 [Arabidopsis thaliana]
  misc_feature (1)..(422): Homolog of NCBI NO: 21594590 NR Description: beta-1,3-glucanase-like protein [Arabidopsis
  misc_feature (1)..(422): Homolog of NCBI NO: 11071974 NR Description: elicitor inducible beta-1,3-glucanase Nt-SubE76
  misc_feature (1)..(422): Homolog of NCBI NO: 30678225 NR Description: glycosyl hydrolase family 17 [Arabidopsis
  misc_feature (1)..(421): Homolog of NCBI NO: 25316444 NR Description: probable beta-1,3-glucanase [imported] -
  misc_feature (1)..(323): Homolog of NCBI NO: 27529826 NR Description: beta-1,3-glucanase-like protein [Nicotiana
  misc_feature (1)..(320): Homolog of NCBI NO: 11279331 NR Description: beta-1,3-glucanase (EC 3.2.1.-) precursor
MVGVNYGRIANNLPSPEKVVNLLKSQGINRIKIFDTDKNVLTALANSKIKVIVALPNELLSSAASHQSFADNWIKTHIMPYFPATEIEAIAVGNEVFVDPTITPYLVNAMKNIHTSLVKYKLDKAIKISSPIALSALANSYPPSSGSFKPELIEPVVKPMLALLQQTSSYLMVNAYPFFAYAANADKISLDYALFKENAGNIDSGTGLKYNSLFDAQIDAVYAALSAVGFKGVKVMVTETGWPSVGDENEIGASESNAAAYNAGLVKRVLTGKGTPLRPTEPLNVYLFALFNENQKPGPTSERNYGLFYPNEGKVYNVPFTKKSTTPVNGNRGKVPVTHEGHTWCVSNGEVAKEKLQEALDYACGEGGADCRPIQPGATCYHPESLEAHASYAFNSYYQKNSRRVGTCFFGGAAHVVTQPPRTLI

SEQ ID NO: 80986 - protein, 347 aa, Arabidopsis thaliana
  peptide (1)..(347): Ceres Seq. ID no. 12658003
  misc_feature (1)..(242): Pfam Name: Glycosyl hydrolases family 17 Pfam Description: Glycosyl hydrolases family 17
  misc_feature (1)..(347): Homolog of NCBI NO: 15236882 NR Description: glycosyl hydrolase family 17; protein id:
  misc_feature (1)..(344): Homolog of NCBI NO: 18423719 NR Description: glycosyl hydrolase family 17; protein id: supported by cDNA: 7119., supported by cDNA: gi_18700154
  misc_feature (1)..(343): Homolog of NCBI NO: 9758115 NR Description: beta-1,3-glucanase-like protein [Arabidopsis
  misc_feature (1)..(344): Homolog of NCBI NO: 18700155 NR Description: AT5g55180/MCO15_13 [Arabidopsis thaliana]
  misc_feature (1)..(344): Homolog of NCBI NO: 21594590 NR Description: beta-1,3-glucanase-like protein [Arabidopsis
  misc_feature (1)..(344): Homolog of NCBI NO: 11071974 NR Description: elicitor inducible beta-1,3-glucanase Nt-SubE76
  misc_feature (1)..(344): Homolog of NCBI NO: 30678225 NR Description: glycosyl hydrolase family 17 [Arabidopsis
  misc_feature (1)..(343): Homolog of NCBI NO: 25316444 NR Description: probable beta-1,3-glucanase [imported] -
  misc_feature (1)..(245): Homolog of NCBI NO: 27529826 NR Description: beta-1,3-glucanase-like protein [Nicotiana
  misc_feature (1)..(242): Homolog of NCBI NO: 11279331 NR Description: beta-1,3-glucanase (EC 3.2.1.-) precursor
MPYFPATEIEAIAVGNEVFVDPTITPYLVNAMKNIHTSLVKYKLDKAIKISSPIALSALANSYPPSSGSFKPELIEPVVKPMLALLQQTSSYLMVNAYPFFAYAANADKISLDYALFKENAGNIDSGTGLKYNSLFDAQIDAVYAALSAVGFKGVKVMVTETGWPSVGDENEIGASESNAAAYNAGLVKRVLTGKGTPLRPTEPLNVYLFALFNENQKPGPTSERNYGLFYPNEGKVYNVPFTKKSTTPVNGNRGKVPVTHEGHTWCVSNGEVAKEKLQEALDYACGEGGADCRPIQPGATCYHPESLEAHASYAFNSYYQKNSRRVGTCFFGGAAHVVTQPPRTLI

SEQ ID NO: 80987 - DNA, 1568 bp, Arabidopsis thaliana
  misc_feature (1)..(1568): Ceres Seq. ID no. 12658006
  misc_feature: MA Experiment ID: 20000307 Result: Up-regulated in Transcription
  misc_feature: MA Experiment 20000307 PARAMETER Experiment Name: At_Germinating_Seeds_Sub_P Parameter: Age (hr) Value: 24 vs. 0
  misc_feature: MA Experiment 20000307 PARAMETER Experiment Name: At_Germinating_Seeds_Sub_P Parameter: Organism Value: A. thaliana
  misc_feature: MA Experiment 20000307 PARAMETER Experiment Name: At_Germinating_Seeds_Sub_P Parameter: Plant Line Value: WS
  misc_feature: MA Experiment 20000307 PARAMETER Experiment Name: At_Germinating_Seeds_Sub_P Parameter: Tissue Value: Germinating Seeds
  misc_feature: MA Experiment ID: 20000314 Result: Up-regulated in Transcription
  misc_feature: MA Experiment 20000314 PARAMETER Experiment Name: At_14day_Shoots-Roots_Sub_P Parameter: Age (day) Value: 14
  misc_feature: MA Experiment 20000314 PARAMETER Experiment Name: At_14day_Shoots-Roots_Sub_P Parameter: Organism Value: A. thaliana
  misc_feature: MA Experiment 20000314 PARAMETER Experiment Name: At_14day_Shoots-Roots_Sub_P Parameter: Plant Line Value: WS
  misc_feature: MA Experiment 20000314 PARAMETER Experiment Name: At_14day_Shoots-Roots_Sub_P Parameter: Tissue Value: Roots vs. Whole Plant
  misc_feature: MA Experiment ID: 20000347 Result: Up-regulated in Transcription
  misc_feature: MA Experiment 20000347 PARAMETER Experiment Name: At_2mM_SA_Sub_P Parameter: Age (day) Value: 14
  misc_feature: MA Experiment 20000347 PARAMETER Experiment Name: At_2mM_SA_Sub_P Parameter: Organism Value: A. thaliana
  misc_feature: MA Experiment 20000347 PARAMETER Experiment Name: At_2mM_SA_Sub_P Parameter: Plant Line Value: WS
  misc_feature: MA Experiment 20000347 PARAMETER Experiment Name: At_2mM_SA_Sub_P Parameter: Timepoint (hr) Value: 6
  misc_feature: MA Experiment 20000347 PARAMETER Experiment Name: At_2mM_SA_Sub_P Parameter: Tissue Value: Aerial
  misc_feature: MA Experiment 20000347 PARAMETER Experiment Name: At_2mM_SA_Sub_P Parameter: Treatment Value: 2mM SA vs. No Treatment
  misc_feature: MA Experiment ID: 20000348 Result: Up-regulated in Transcription
  misc_feature: MA Experiment 20000348 PARAMETER Experiment Name: At_100uM_ABA_Sub_P Parameter: Age (day) Value: 14
  misc_feature: MA Experiment 20000348 PARAMETER Experiment Name: At_100uM_ABA_Sub_P Parameter: Organism Value: A. thaliana
  misc_feature: MA Experiment 20000348 PARAMETER Experiment Name: At_100uM_ABA_Sub_P Parameter: Plant Line Value: WS
  misc_feature: MA Experiment 20000348 PARAMETER Experiment Name: At_100uM_ABA_Sub_P Parameter: Timepoint (hr) Value: 1
  misc_feature: MA Experiment 20000348 PARAMETER Experiment Name: At_100uM_ABA_Sub_P Parameter: Tissue Value: Aerial
  misc_feature: MA Experiment 20000348 PARAMETER Experiment Name: At_100uM_ABA_Sub_P Parameter: Treatment Value: 100uM ABA vs. No Treatment
  misc_feature: MA Experiment ID: 20000634 Result: Up-regulated in Transcription
  misc_feature: MA Experiment 20000634 PARAMETER Experiment Name: At_10percent_PEG_Sub_P Parameter: Age (day) Value: 12
  misc_feature: MA Experiment 20000634 PARAMETER Experiment Name: At_10percent_PEG_Sub_P Parameter: Organism Value: A. thaliana
  misc_feature: MA Experiment 20000634 PARAMETER Experiment Name: At_10percent_PEG_Sub_P Parameter: Plant Line Value: WS
  misc_feature: MA Experiment 20000634 PARAMETER Experiment Name: At_10percent_PEG_Sub_P Parameter: Timepoint (day) Value: 12
  misc_feature: MA Experiment 20000634 PARAMETER Experiment Name: At_10percent_PEG_Sub_P Parameter: Tissue Value: Whole Plant
  misc_feature: MA Experiment 20000634 PARAMETER Experiment Name: At_10percent_PEG_Sub_P Parameter: Treatment Value: 10% PEG vs. No Treatment
ggaggagaagaaatcaacaacttaagaataaagaatgtcgtatccgacttcgaaccaaagccccatgccaaagtcacatacacacacttctacataccctaaacacacacactcgaatacataaactcttttctatatataaacttcttataagccatttgcttaaacaactctcaagtaaaaaaaaaaaatcaacaatctctaaactcttctctgttttctgatctgttccaatggagattaattggacaagaggaccaatcatcggtcgaggctctaccgccactgtctctatagcaatctcaagctccggtgagctcttcgccgtcaaatctgccgacttatcttcttcgtccttgttgcagaaagagcaatcaatcttgtctacattgagctctcctcacatggtcaaatacataggcactggtttaacgcgcgagagcaacggattggtgtacaatatactgatggaatacgtttctggtggaaatcttcacgatttaatcaaaaattccggcggtaagttgccggagccggagataagatcatacactcgtcagattcttaacggtttggtgtatcttcacgagagagggattgttcactgcgacttgaagagccataacgttctggttgaggaaaatggcgttttgaaaatcgccgacatgggttgtgctaaatcggttgacaagtcggaattttccggtacaccggcgtttatggccccagaagttgctcgtggtgaagaacagaggtttccggctgatgtgtgggctttgggatgtacgatgatcgagatgatgactggatcaagcccttggccggagttaaacgacgtcgttgctgcaatgtataagattggattttcaggcgagtcgccggcgattcccgcgtggatatcggataaagctaaagactttctgaagaattgtttaaaggaagatcaaaaacagagatggactgtggaagaattacttaaacatccatttcttgatgacgacgaagaatctcagacaagtgattgtttgaagaacaagacttcttctccaagcactgtgttggatcaacgattttgggattcatgcgaaagctccaaaagtcacttagtttcgattgatcatgaagacccttttgctgaatactcggaatctttggattcaccggctgatcggatcgagaaactcgccggagatgagttttcaagcttacttgattgggatacggaagacgatggcggatggattcaagtgagaggcgagaaacataaagaaaccgagaaacgcgacggcgacgaagacgtgatttgcgttgaagcaacgtcatcgtcgcaaacgattgaagaagttgaagattggatttcgaatcaagacagcttgttctcggaatattcctctgacgacatcattaataatttctactctaatgttgctattcaaggaaatttaattgcatttcattattgtactgatgaaggtgaaaatgtatccataaagaatatgtttcgtactaataacaaacatttgtttttcaaattgcaagctcatgttaaattcactaaccaagtctga

SEQ ID NO: 80988 - protein, 444 aa, Arabidopsis thaliana
  peptide (1)..(444): Ceres Seq. ID no. 12658007
  misc_feature (5)..(253): Pfam Name: Protein kinase domain Pfam Description: Protein kinase domain
  misc_feature (1)..(444): Homolog of NCBI NO: 15236903 NR Description: putative NPK1-related protein kinase; protein id:
  misc_feature (1)..(394): Homolog of NCBI NO: 19423926 NR Description: unknown protein [Arabidopsis thaliana]
  misc_feature (2)..(432): Homolog of NCBI NO: 15240456 NR Description: putative protein; protein id: At5g55090.1
  misc_feature (3)..(288): Homolog of NCBI NO: 15225692 NR Description: putative protein kinase; protein id: At2g32510.1
  misc_feature (3)..(340): Homolog of NCBI NO: 15220416 NR Description: putative NPK1-related MAP kinase; protein id: supported by cDNA: gi_17381165, supported by cDNA: gi_20259424
  misc_feature (5)..(372): Homolog of NCBI NO: 34911466 NR Description: NPK1-related protein kinase-like protein [Oryza
  misc_feature (5)..(390): Homolog of NCBI NO: 37530786 NR Description: putative NPK1-related protein kinase [Oryza
  misc_feature (5)..(341): Homolog of NCBI NO: 37530788 NR Description: putative NPK1-related protein kinase [Oryza
  misc_feature (5)..(334): Homolog of NCBI NO: 34911472 NR Description: NPK1-related protein kinase-like protein [Oryza
  misc_feature (11)..(342): Homolog of NCBI NO: 34911474 NR Description: NPK1-related protein kinase-like protein [Oryza
MEINWTRGPIIGRGSTATVSIAISSSGELFAVKSADLSSSSLLQKEQSILSTLSSPHMVKYIGTGLTRESNGLVYNILMEYVSGGNLHDLIKNSGGKLPEPEIRSYTRQILNGLVYLHERGIVHCDLKSHNVLVEENGVLKIADMGCAKSVDKSEFSGTPAFMAPEVARGEEQRFPADVWALGCTMIEMMTGSSPWPELNDVVAAMYKIGFSGESPAIPAWISDKAKDFLKNCLKEDQKQRWTVEELLKHPFLDDDEESQTSDCLKNKTSSPSTVLDQRFWDSCESSKSHLVSIDHEDPFAEYSESLDSPADRIEKLAGDEFSSLLDWDTEDDGGWIQVRGEKHKETEKRDGDEDVICVEATSSSQTIEEVEDWISNQDSLFSEYSSDDIINNFYSNVAIQGNLIAFHYCTDEGENVSIKNMFRTNNKHLFFKLQAHVKFTNQV

SEQ ID NO: 80989 - protein, 387 aa, Arabidopsis thaliana
  peptide (1)..(387): Ceres Seq. ID no. 12658008
  misc_feature (1)..(196): Pfam Name: Protein kinase domain Pfam Description: Protein kinase domain
  misc_feature (1)..(387): Homolog of NCBI NO: 15236903 NR Description: putative NPK1-related protein kinase; protein id:
  misc_feature (1)..(337): Homolog of NCBI NO: 19423926 NR Description: unknown protein [Arabidopsis thaliana]
  misc_feature (1)..(375): Homolog of NCBI NO: 15240456 NR Description: putative protein; protein id: At5g55090.1
  misc_feature (1)..(231): Homolog of NCBI NO: 15225692 NR Description: putative protein kinase; protein id: At2g32510.1
  misc_feature (1)..(283): Homolog of NCBI NO: 15220416 NR Description: putative NPK1-related MAP kinase; protein id: supported by cDNA: gi_17381165, supported by cDNA: gi_20259424
  misc_feature (1)..(315): Homolog of NCBI NO: 34911466 NR Description: NPK1-related protein kinase-like protein [Oryza
  misc_feature (1)..(333): Homolog of NCBI NO: 37530786 NR Description: putative NPK1-related protein kinase [Oryza
  misc_feature (1)..(284): Homolog of NCBI NO: 37530788 NR Description: putative NPK1-related protein kinase [Oryza
  misc_feature (1)..(277): Homolog of NCBI NO: 34911472 NR Description: NPK1-related protein kinase-like protein [Oryza
  misc_feature (1)..(285): Homolog of NCBI NO: 34911474 NR Description: NPK1-related protein kinase-like protein [Oryza
MVKYIGTGLTRESNGLVYNILMEYVSGGNLHDLIKNSGGKLPEPEIRSYTRQILNGLVYLHERGIVHCDLKSHNVLVEENGVLKIADMGCAKSVDKSEFSGTPAFMAPEVARGEEQRFPADVWALGCTMIEMMTGSSPWPELNDVVAAMYKIGFSGESPAIPAWISDKAKDFLKNCLKEDQKQRWTVEELLKHPFLDDDEESQTSDCLKNKTSSPSTVLDQRFWDSCESSKSHLVSIDHEDPFAEYSESLDSPADRIEKLAGDEFSSLLDWDTEDDGGWIQVRGEKHKETEKRDGDEDVICVEATSSSQTIEEVEDWISNQDSLFSEYSSDDIINNFYSNVAIQGNLIAFHYCTDEGENVSIKNMFRTNNKHLFFKLQAHVKFTNQV

SEQ ID NO: 80990 - protein, 366 aa, Arabidopsis thaliana
  peptide (1)..(366): Ceres Seq. ID no. 12658009
  misc_feature (1)..(175): Pfam Name: Protein kinase domain Pfam Description: Protein kinase domain
  misc_feature (1)..(366): Homolog of NCBI NO: 15236903 NR Description: putative NPK1-related protein kinase; protein id:
  misc_feature (1)..(316): Homolog of NCBI NO: 19423926 NR Description: unknown protein [Arabidopsis thaliana]
  misc_feature (1)..(354): Homolog of NCBI NO: 15240456 NR Description: putative protein; protein id: At5g55090.1
  misc_feature (1)..(210): Homolog of NCBI NO: 15225692 NR Description: putative protein kinase; protein id: At2g32510.1
  misc_feature (1)..(262): Homolog of NCBI NO: 15220416 NR Description: putative NPK1-related MAP kinase; protein id: supported by cDNA: gi_17381165, supported by cDNA: gi_20259424
  misc_feature (1)..(294): Homolog of NCBI NO: 34911466 NR Description: NPK1-related protein kinase-like protein [Oryza
  misc_feature (1)..(312): Homolog of NCBI NO: 37530786 NR Description: putative NPK1-related protein kinase [Oryza
  misc_feature (1)..(263): Homolog of NCBI NO: 37530788 NR Description: putative NPK1-related protein kinase [Oryza
  misc_feature (1)..(256): Homolog of NCBI NO: 34911472 NR Description: NPK1-related protein kinase-like protein [Oryza
  misc_feature (1)..(264): Homolog of NCBI NO: 34911474 NR Description: NPK1-related protein kinase-like protein [Oryza
MEYVSGGNLHDLIKNSGGKLPEPEIRSYTRQILNGLVYLHERGIVHCDLKSHNVLVEENGVLKIADMGCAKSVDKSEFSGTPAFMAPEVARGEEQRFPADVWALGCTMIEMMTGSSPWPELNDVVAAMYKIGFSGESPAIPAWISDKAKDFLKNCLKEDQKQRWTVEELLKHPFLDDDEESQTSDCLKNKTSSPSTVLDQRFWDSCESSKSHLVSIDHEDPFAEYSESLDSPADRIEKLAGDEFSSLLDWDTEDDGGWIQVRGEKHKETEKRDGDEDVICVEATSSSQTIEEVEDWISNQDSLFSEYSSDDIINNFYSNVAIQGNLIAFHYCTDEGENVSIKNMFRTNNKHLFFKLQAHVKFTNQV

SEQ ID NO: 80991 - DNA, 1119 bp, Arabidopsis thaliana
  misc_feature (1)..(1119): Ceres Seq. ID no. 12658018
  misc_feature: MA Experiment ID: 20000173 Result: Up-regulated in Transcription
  misc_feature: MA Experiment 20000173 PARAMETER Experiment Name: At_42deg_Heat_P Parameter: Age (day) Value: 14
  misc_feature: MA Experiment 20000173 PARAMETER Experiment Name: At_42deg_Heat_P Parameter: Organism Value: A. thaliana
  misc_feature: MA Experiment 20000173 PARAMETER Experiment Name: At_42deg_Heat_P Parameter: Plant Line Value: WS
  misc_feature: MA Experiment 20000173 PARAMETER Experiment Name: At_42deg_Heat_P Parameter: Temperature (deg C) Value: 42 vs. 22
  misc_feature: MA Experiment 20000173 PARAMETER Experiment Name: At_42deg_Heat_P Parameter: Timepoint (hr) Value: 6
  misc_feature: MA Experiment 20000173 PARAMETER Experiment Name: At_42deg_Heat_P Parameter: Tissue Value: Aerial
  misc_feature: MA Experiment ID: 20000180 Result: Up-regulated in Transcription
  misc_feature: MA Experiment 20000180 PARAMETER Experiment Name: At_Germinating_Seeds_P Parameter: Age (hr) Value: 24 vs. 0
  misc_feature: MA Experiment 20000180 PARAMETER Experiment Name: At_Germinating_Seeds_P Parameter: Tissue Value: Germinating Seeds
  misc_feature: MA Experiment ID: 20000184 Result: Up-regulated in Transcription
  misc_feature: MA Experiment 20000184 PARAMETER Experiment Name: At_Shoots__P Parameter: Age (day) Value: 7
  misc_feature: MA Experiment 20000184 PARAMETER Experiment Name: At_Shoots__P Parameter: Tissue Value: Shoots vs. Whole Plant
  misc_feature: MA Experiment ID: 20000185 Result: Up-regulated in Transcription
  misc_feature: MA Experiment 20000185 PARAMETER Experiment Name: At_Roots__P Parameter: Age (day) Value: 7 vs. 21
  misc_feature: MA Experiment 20000185 PARAMETER Experiment Name: At_Roots__P Parameter: Organism Value: A. thaliana
  misc_feature: MA Experiment 20000185 PARAMETER Experiment Name: At_Roots__P Parameter: Tissue Value: Roots vs. Whole Plant
  misc_feature: MA Experiment ID: 20000438 Result: Up-regulated in Transcription
  misc_feature: MA Experiment 20000438 PARAMETER Experiment Name: At_Shoots__P Parameter: Age (day) Value: 14
  misc_feature: MA Experiment 20000438 PARAMETER Experiment Name: At_Shoots__P Parameter: Tissue Value: Shoots vs. Whole Plant
  misc_feature: MA Experiment ID: 20000439 Result: Up-regulated in Transcription
  misc_feature: MA Experiment 20000439 PARAMETER Experiment Name: At_Roots__P Parameter: Age (day) Value: 14 vs. 21
  misc_feature: MA Experiment 20000439 PARAMETER Experiment Name: At_Roots__P Parameter: Organism Value: A. thaliana
  misc_feature: MA Experiment 20000439 PARAMETER Experiment Name: At_Roots__P Parameter: Tissue Value: Roots vs. Whole Plant
  misc_feature: MA Experiment ID: 20000527 Result: Up-regulated in Transcription
  misc_feature: MA Experiment 20000527 PARAMETER Experiment Name: At_10percent_PEG_P Parameter: Age (day) Value: 20
  misc_feature: MA Experiment 20000527 PARAMETER Experiment Name: At_10percent_PEG_P Parameter: Organism Value: A. thaliana
  misc_feature: MA Experiment 20000527 PARAMETER Experiment Name: At_10percent_PEG_P Parameter: Plant Line Value: WS
  misc_feature: MA Experiment 20000527 PARAMETER Experiment Name: At_10percent_PEG_P Parameter: Timepoint (day) Value: 20
  misc_feature: MA Experiment 20000527 PARAMETER Experiment Name: At_10percent_PEG_P Parameter: Tissue Value: Whole Plant
  misc_feature: MA Experiment 20000527 PARAMETER Experiment Name: At_10percent_PEG_P Parameter: Treatment Value: 10percent PEG vs. No Treatment
  misc_feature: MA Experiment ID: 20000794 Result: Up-regulated in Transcription
  misc_feature: MA Experiment 20000794 PARAMETER Experiment Name: At_Petals_P Parameter: Age (day) Value: 23-25 days
  misc_feature: MA Experiment 20000794 PARAMETER Experiment Name: At_Petals_P Parameter: Plant Line Value: WS
  misc_feature: MA Experiment 20000794 PARAMETER Experiment Name: At_Petals_P Parameter: Tissue Value: Petals vs. Whole plant
  misc_feature: MA Experiment ID: 20001248 Result: Down-regulated in Transcription
  misc_feature: MA Experiment 20001248 PARAMETER Experiment Name: At_Far-red-induction_P Parameter: Age (day) Value: 7
  misc_feature: MA Experiment 20001248 PARAMETER Experiment Name: At_Far-red-induction_P Parameter: Light Value: Far-red vs. White
  misc_feature: MA Experiment 20001248 PARAMETER Experiment Name: At_Far-red-induction_P Parameter: Organism Value: A. thaliana
  misc_feature: MA Experiment 20001248 PARAMETER Experiment Name: At_Far-red-induction_P Parameter: Plant Line Value: Columbia
  misc_feature: MA Experiment 20001248 PARAMETER Experiment Name: At_Far-red-induction_P Parameter: Timepoint (hr) Value: 4
  misc_feature: MA Experiment 20001248 PARAMETER Experiment Name: At_Far-red-induction_P Parameter: Tissue Value: Whole Plant
atggctgtatcacttccaaccaagtaccctctacgacctatcaccaacatcccaaaaagccaccgtccctcgcttctccgtgtacgtgtcacctgctctgttactaccaccaagcctcagcctaatcgtgagaagcttctggtagagcaacgcactgtgaatcttcctctgtccaacgaccaatctctgcaatcgaccaagcctcgccctaaccgtgagaagcttgtggttgagcaacgccttgccagccctcctctgtccaatgacccaactttgaaatcgacatggactcaccggttatgggttgcagcgggctgcaccactttgtttgtctctttagctaaatctgtcattggagggtttgattctcatctctgcctcgaaccagctttagccggttatgcagggtacatcttagctgatctaggttccggtgtctaccactgggccattgataactacggtgatgagtcaacacctgtagtaggaacccaaatcgaagcatttcagggtcaccacaagtggccttggacaatcaccagacggcaatttgccaacaatctacacgctctggctcaagtcataaccttcacagttcttccactagaccttgcatttaacgaccctgtgtttcacggctttgtgtgcacatttgcattttgcatattgtttagccagcaattccatgcttgggcacatggaaccaagagcaagcttccacctctcgtggtcgcgttgcaggacatggggttacttgtttcacggagacagcatgcggaacatcatcgagcaccgtataacaacaattactgcatcgtgagtggagcatggaacaatgttctggatgagagtaaggtctttgaggcattggagatggtgttttatttccagcttggggtgagacctaggtcatggagtgagccaaactctgactggatagaagaaaccgaaatctccaacaaccaagcataaatattttttttacagagtgatacatgtacaagaaaatttcagtaatatactgaaaagatttcttcgtaatttatatgtaacgagtgtgactgtatttaatactgtataaaacaagcaaaacaactgagcatgtaccatttaagtatc

SEQ ID NO: 80992 - protein, 323 aa, Arabidopsis thaliana
  peptide (1)..(323): Ceres Seq. ID no. 12658019
  misc_feature (1)..(323): Homolog of NCBI NO: 15236949 NR Description: putative protein; protein id: At4g27030.1
  misc_feature (62)..(317): Homolog of NCBI NO: 15220724 NR Description: hypothetical protein; protein id: At1g62190.1
  misc_feature (52)..(309): Homolog of NCBI NO: 15227763 NR Description: unknown protein; protein id: At2g22890.1
  misc_feature (81)..(315): Homolog of NCBI NO: 38637069 NR Description: hypothetical protein [Oryza sativa (japonica
  misc_feature (249)..(323): Homolog of NCBI NO: 14488086 NR Description: AT4g27030/F10M23_370 [Arabidopsis thaliana]
  misc_feature (135)..(304): Homolog of NCBI NO: 34860742 NR Description: similar to CG10723-PA [Rattus norvegicus]
  misc_feature (135)..(304): Homolog of NCBI NO: 7208823 NR Description: dJ1185N5.1.1 (ubiquitin-conjugating enzyme E2
  misc_feature (135)..(304): Homolog of NCBI NO: 40806193 NR Description: ubiquitin-conjugating enzyme variant Kua [Homo >gi|10434753|dbj|BAB14364.1| unnamed protein product [Homo
  misc_feature (135)..(304): Homolog of NCBI NO: 12805581 NR Description: Ubiquitin-conjugating enzyme E2 [Mus musculus]
  misc_feature (136)..(303): Homolog of NCBI NO: 13397952 NR Description: hypothetical protein [Myxococcus xanthus]
MAVSLPTKYPLRPITNIPKSHRPSLLRVRVTCSVTTTKPQPNREKLLVEQRTVNLPLSNDQSLQSTKPRPNREKLVVEQRLASPPLSNDPTLKSTWTHRLWVAAGCTTLFVSLAKSVIGGFDSHLCLEPALAGYAGYILADLGSGVYHWAIDNYGDESTPVVGTQIEAFQGHHKWPWTITRRQFANNLHALAQVITFTVLPLDLAFNDPVFHGFVCTFAFCILFSQQFHAWAHGTKSKLPPLVVALQDMGLLVSRRQHAEHHRAPYNNNYCIVSGAWNNVLDESKVFEALEMVFYFQLGVRPRSWSEPNSDWIEETEISNNQA

SEQ ID NO: 80993 - DNA, 2608 bp, Arabidopsis thaliana
  misc_feature (1)..(2608): Ceres Seq. ID no. 12658046
  misc_feature: MA Experiment ID: 20000182 Result: Down-regulated in Transcription
  misc_feature: MA Experiment 20000182 PARAMETER Experiment Name: At_2mM_SA_P Parameter: Age (day) Value: 14
  misc_feature: MA Experiment 20000182 PARAMETER Experiment Name: At_2mM_SA_P Parameter: Organism Value: A. thaliana
  misc_feature: MA Experiment 20000182 PARAMETER Experiment Name: At_2mM_SA_P Parameter: Plant Line Value: WS
  misc_feature: MA Experiment 20000182 PARAMETER Experiment Name: At_2mM_SA_P Parameter: Timepoint (hr) Value: 6
  misc_feature: MA Experiment 20000182 PARAMETER Experiment Name: At_2mM_SA_P Parameter: Tissue Value: Aerial
  misc_feature: MA Experiment 20000182 PARAMETER Experiment Name: At_2mM_SA_P Parameter: Treatment Value: 2mM SA vs. No Treatment
  misc_feature: MA Experiment ID: 20000265 Result: Up-regulated in Transcription
  misc_feature: MA Experiment 20000265 PARAMETER Experiment Name: At_Open_Flower_P Parameter: Age (day) Value: 21
  misc_feature: MA Experiment 20000265 PARAMETER Experiment Name: At_Open_Flower_P Parameter: Plant Line Value: WS
  misc_feature: MA Experiment 20000265 PARAMETER Experiment Name: At_Open_Flower_P Parameter: Tissue Value: Closed Flower vs. Whole Plant
  misc_feature: MA Experiment ID: 20000286 Result: Up-regulated in Transcription
  misc_feature: MA Experiment 20000286 PARAMETER Experiment Name: At_Open_Flower_P Parameter: Age (day) Value: 21
  misc_feature: MA Experiment 20000286 PARAMETER Experiment Name: At_Open_Flower_P Parameter: Plant Line Value: WS
  misc_feature: MA Experiment 20000286 PARAMETER Experiment Name: At_Open_Flower_P Parameter: Tissue Value: Half Open vs. Whole Plant
  misc_feature: MA Experiment ID: 20001451 Result: Down-regulated in Transcription
  misc_feature: MA Experiment 20001451 PARAMETER Experiment Name: At_Far-red-induction_P Parameter: Age (day) Value: 7
  misc_feature: MA Experiment 20001451 PARAMETER Experiment Name: At_Far-red-induction_P Parameter: Light Value: Far-red vs. White
  misc_feature: MA Experiment 20001451 PARAMETER Experiment Name: At_Far-red-induction_P Parameter: Organism Value: A. thaliana
  misc_feature: MA Experiment 20001451 PARAMETER Experiment Name: At_Far-red-induction_P Parameter: Plant Line Value: Columbia
  misc_feature: MA Experiment 20001451 PARAMETER Experiment Name: At_Far-red-induction_P Parameter: Timepoint (hr) Value: 24
  misc_feature: MA Experiment 20001451 PARAMETER Experiment Name: At_Far-red-induction_P Parameter: Tissue Value: Whole Plant
cgggagagcccaacggagagacatatcgccatttcaaagctaaacaaccagataataatactgaggtttttatgcttataattggggtgaaagagacaaatccagagtgtgtgtaaattaggtacgagaagaatttcagctaactcttttgagagaggagaaaaaagtaatagatggttggggaaatgacgaacaatggaagaatccggccatcttttccggtgaaagatctgaccagtaatgaaggatctgaatatggtggccctgttgagtttaccagagaagatgttgaaactcttcttcatgagcgaatcaagtacaagagcaagtacaattacaaggagagatgtgagaatacgatggactatgtaaaaaggcttaggctttgcattagatggtttcaagaactcgagttagattatgcatttgagcaagagaagttgaagaacgctatggagatgaatgagaagcattgcgccgatttggaggttaatttgaaagtaaaggaagaggagctaaatatggtaattgatgaactgaggaagaactttgcatctgttcaggtgcaacttgccaaagaacaaacagagaaattggctgcaaatgaatctcttggaaaagagagagaagcaagaattgctgttgaaagtttgcaagctgccattacagaagagctagcaaagacgcaaggagagcttcaaacagctaaccagaggattcaagctgtcaatgacatgtacaaactcttgcaagagtataactcgagcttacagttgtacaatagcaaacttcaaggtgatctcgacgaagctcatgaaaatataaagcgaggagagaaagaacggactggcattgtagaaagcattggcaacttaaagggtcagtttaaagcactacaggatcagcttgctgcctcgaaggtgtcacaagatgatgtcatgaagcaaaaagatgaattggtgaatgaaattgtaagtctcaaggttgagattcaacaggtcaaagatgaccgtgaccgccatataacggaaattgaaactctgcaagcagaagcaaccaagcaaaatgacttcaaagacaccataaatgagcttgagagtaagtgttctgttcaaaataaggagatagaagagttgcaggatcaattagtagcttctgagagaaaactgcaggtggctgatttatctacttttgagaaaatgaacgagtttgaagagcaaaaggaaagcattatggagctgaaaggtcgcttagaagaagcggaacttaaactcatcgaaggagaaaaactacggaagaagttgcacaataccatacaggaactgaagggaaacatccgtgtattctgtagggtgagacctctattatcaggagagaattctagtgaggaggccaaaactatatcctaccctacatctctagaagcacttggtcggggcattgacttgttgcaaaatggacaatcgcattgtttcacatttgataaggtttttgtgccaagtgcatcacaagaagatgtttttgtagagatttctcaacttgtccagagcgctcttgatggttacaaggtttgcattttcgcatatggacaaacaggatctggaaaaacttatacaatgatgggtaggccaggaaacccggatgaaaaaggactgattcctcgatgtttggagcaaatatttcaaacaaggcagtctcttcgatcacagggttggaagtatgagttgcaggtgtctatgttagaaatatacaacgaaacgattagggatctcttgtcaacaaacaaggaagctgtgagagcagacaatggcgtttctccgcagaaatatgcaatcaaacatgatgctagtgggaatacacatgttgtggaacttactgttgtagatgttcgaagctcgaaacaggtttcgttcctcttagaccacgcagctcgaaacaggtcagtagggaagaccgcaatgaacgagcaatcttctagaagccatttcgttttcacattgaagatctctggattcaacgagagcacagagcaacaagtacaaggtgtcttgaacctgattgatcttgcgggtagtgagcgtttgtcaaagagcggatcaactggcgatagactgaaagaaactcaagcaatcaacaaaagcttatcgtctctaggcgatgtcatatttgccttagcgaagaaagaagatcacgttcctttcagaaactcaaagctcacttatcttcttcagccctgtttaggtggtgactcgaagacgctaatgtttgtgaacatcacaccagaaccttcctcaaccggtgagtctctgtgctccctcaggtttgcagcaagagtgaatgcttgtgagattggaactgcacaccgtcatgttaacgccaggccgttagattatcgcttgagccttggatgagaattttctccactgaagccaaagaaataaagttatgtttatacccgaatgtgggcactacttgatgttggtactaaatctgtatatagcttgtaatagtttcaaggttctgttatcttctactcttgtcttggatcagaagatttgtgtgctggaaaatcataatgttctgagaccattaaccgcatcatttcatt

SEQ ID NO: 80994 - protein, 745 aa, Arabidopsis thaliana
  peptide (1)..(745): Ceres Seq. ID no. 12658047
  misc_feature (61)..(384): Pfam Name: Myosin tail Pfam Description: Myosin tail
  misc_feature (18)..(745): Homolog of NCBI NO: 25295723 NR Description: kinesin-like protein [imported] - Arabidopsis
  misc_feature (18)..(745): Homolog of NCBI NO: 30680014 NR Description: kinesin-like protein A, putative [Arabidopsis
  misc_feature (18)..(745): Homolog of NCBI NO: 34849893 NR Description: At4g05190 [Arabidopsis thaliana]
  misc_feature (20)..(745): Homolog of NCBI NO: 15233583 NR Description: kinesin-like protein A (katA); protein id:
  misc_feature (143)..(738): Homolog of NCBI NO: 34915504 NR Description: putative kinesin-related protein katA [Oryza
  misc_feature (341)..(738): Homolog of NCBI NO: 33354214 NR Description: kinesin-related protein KLPA-like protein [Oryza
  misc_feature (383)..(732): Homolog of NCBI NO: 15208457 NR Description: kinesin heavy chain [Zea mays]
  misc_feature (457)..(728): Homolog of NCBI NO: 15208463 NR Description: kinesin heavy chain [Zea mays]
  misc_feature (196)..(731): Homolog of NCBI NO: 3133267 NR Description: kinesin-related protein K2 [Dictyostelium
  misc_feature (196)..(731): Homolog of NCBI NO: 12381863 NR Description: Dd kinesin-related protein K2 [Dictyostelium
MVGEMTNNGRIRPSFPVKDLTSNEGSEYGGPVEFTREDVETLLHERIKYKSKYNYKERCENTMDYVKRLRLCIRWFQELELDYAFEQEKLKNAMEMNEKHCADLEVNLKVKEEELNMVIDELRKNFASVQVQLAKEQTEKLAANESLGKEREARIAVESLQAAITEELAKTQGELQTANQRIQAVNDMYKLLQEYNSSLQLYNSKLQGDLDEAHENIKRGEKERTGIVESIGNLKGQFKALQDQLAASKVSQDDVMKQKDELVNEIVSLKVEIQQVKDDRDRHITEIETLQAEATKQNDFKDTINELESKCSVQNKEIEELQDQLVASERKLQVADLSTFEKMNEFEEQKESIMELKGRLEEAELKLIEGEKLRKKLHNTIQELKGNIRVFCRVRPLLSGENSSEEAKTISYPTSLEALGRGIDLLQNGQSHCFTFDKVFVPSASQEDVFVEISQLVQSALDGYKVCIFAYGQTGSGKTYTMMGRPGNPDEKGLIPRCLEQIFQTRQSLRSQGWKYELQVSMLEIYNETIRDLLSTNKEAVRADNGVSPQKYAIKHDASGNTHVVELTVVDVRSSKQVSFLLDHAARNRSVGKTAMNEQSSRSHFVFTLKISGFNESTEQQVQGVLNLIDLAGSERLSKSGSTGDRLKETQAINKSLSSLGDVIFALAKKEDHVPFRNSKLTYLLQPCLGGDSKTLMFVNITPEPSSTGESLCSLRFAARVNACEIGTAHRHVNARPLDYRLSLG

SEQ ID NO: 80995 - protein, 741 aa, Arabidopsis thaliana
  peptide (1)..(741): Ceres Seq. ID no. 12658048
  misc_feature (57)..(380): Pfam Name: Myosin tail Pfam Description: Myosin tail
  misc_feature (14)..(741): Homolog of NCBI NO: 25295723 NR Description: kinesin-like protein [imported] - Arabidopsis
  misc_feature (14)..(741): Homolog of NCBI NO: 30680014 NR Description: kinesin-like protein A, putative [Arabidopsis
  misc_feature (14)..(741): Homolog of NCBI NO: 34849893 NR Description: At4g05190 [Arabidopsis thaliana]
  misc_feature (16)..(741): Homolog of NCBI NO: 15233583 NR Description: kinesin-like protein A (katA); protein id:
  misc_feature (139)..(734): Homolog of NCBI NO: 34915504 NR Description: putative kinesin-related protein katA [Oryza
  misc_feature (337)..(734): Homolog of NCBI NO: 33354214 NR Description: kinesin-related protein KLPA-like protein [Oryza
  misc_feature (379)..(728): Homolog of NCBI NO: 15208457 NR Description: kinesin heavy chain [Zea mays]
  misc_feature (453)..(724): Homolog of NCBI NO: 15208463 NR Description: kinesin heavy chain [Zea mays]
  misc_feature (192)..(727): Homolog of NCBI NO: 3133267 NR Description: kinesin-related protein K2 [Dictyostelium
  misc_feature (192)..(727): Homolog of NCBI NO: 12381863 NR Description: Dd kinesin-related protein K2 [Dictyostelium
MTNNGRIRPSFPVKDLTSNEGSEYGGPVEFTREDVETLLHERIKYKSKYNYKERCENTMDYVKRLRLCIRWFQELELDYAFEQEKLKNAMEMNEKHCADLEVNLKVKEEELNMVIDELRKNFASVQVQLAKEQTEKLAANESLGKEREARIAVESLQAAITEELAKTQGELQTANQRIQAVNDMYKLLQEYNSSLQLYNSKLQGDLDEAHENIKRGEKERTGIVESIGNLKGQFKALQDQLAASKVSQDDVMKQKDELVNEIVSLKVEIQQVKDDRDRHITEIETLQAEATKQNDFKDTINELESKCSVQNKEIEELQDQLVASERKLQVADLSTFEKMNEFEEQKESIMELKGRLEEAELKLIEGEKLRKKLHNTIQELKGNIRVFCRVRPLLSGENSSEEAKTISYPTSLEALGRGIDLLQNGQSHCFTFDKVFVPSASQEDVFVEISQLVQSALDGYKVCIFAYGQTGSGKTYTMMGRPGNPDEKGLIPRCLEQIFQTRQSLRSQGWKYELQVSMLEIYNETIRDLLSTNKEAVRADNGVSPQKYAIKHDASGNTHVVELTVVDVRSSKQVSFLLDHAARNRSVGKTAMNEQSSRSHFVFTLKISGFNESTEQQVQGVLNLIDLAGSERLSKSGSTGDRLKETQAINKSLSSLGDVIFALAKKEDHVPFRNSKLTYLLQPCLGGDSKTLMFVNITPEPSSTGESLCSLRFAARVNACEIGTAHRHVNARPLDYRLSLG

SEQ ID NO: 80996 - protein, 683 aa, Arabidopsis thaliana
  peptide (1)..(683): Ceres Seq. ID no. 12658049
  misc_feature (1)..(322): Pfam Name: Myosin tail Pfam Description: Myosin tail
  misc_feature (1)..(683): Homolog of NCBI NO: 25295723 NR Description: kinesin-like protein [imported] - Arabidopsis
  misc_feature (1)..(683): Homolog of NCBI NO: 30680014 NR Description: kinesin-like protein A, putative [Arabidopsis
  misc_feature (1)..(683): Homolog of NCBI NO: 34849893 NR Description: At4g05190 [Arabidopsis thaliana]
  misc_feature (1)..(683): Homolog of NCBI NO: 15233583 NR Description: kinesin-like protein A (katA); protein id:
  misc_feature (81)..(676): Homolog of NCBI NO: 34915504 NR Description: putative kinesin-related protein katA [Oryza
  misc_feature (279)..(676): Homolog of NCBI NO: 33354214 NR Description: kinesin-related protein KLPA-like protein [Oryza
  misc_feature (321)..(670): Homolog of NCBI NO: 15208457 NR Description: kinesin heavy chain [Zea mays]
  misc_feature (395)..(666): Homolog of NCBI NO: 15208463 NR Description: kinesin heavy chain [Zea mays]
  misc_feature (134)..(669): Homolog of NCBI NO: 3133267 NR Description: kinesin-related protein K2 [Dictyostelium
  misc_feature (134)..(669): Homolog of NCBI NO: 12381863 NR Description: Dd kinesin-related protein K2 [Dictyostelium
MDYVKRLRLCIRWFQELELDYAFEQEKLKNAMEMNEKHCADLEVNLKVKEEELNMVIDELRKNFASVQVQLAKEQTEKLAANESLGKEREARIAVESLQAAITEELAKTQGELQTANQRIQAVNDMYKLLQEYNSSLQLYNSKLQGDLDEAHENIKRGEKERTGIVESIGNLKGQFKALQDQLAASKVSQDDVMKQKDELVNEIVSLKVEIQQVKDDRDRHITEIETLQAEATKQNDFKDTINELESKCSVQNKEIEELQDQLVASERKLQVADLSTFEKMNEFEEQKESIMELKGRLEEAELKLIEGEKLRKKLHNTIQELKGNIRVFCRVRPLLSGENSSEEAKTISYPTSLEALGRGIDLLQNGQSHCFTFDKVFVPSASQEDVFVEISQLVQSALDGYKVCIFAYGQTGSGKTYTMMGRPGNPDEKGLIPRCLEQIFQTRQSLRSQGWKYELQVSMLEIYNETIRDLLSTNKEAVRADNGVSPQKYAIKHDASGNTHVVELTVVDVRSSKQVSFLLDHAARNRSVGKTAMNEQSSRSHFVFTLKISGFNESTEQQVQGVLNLIDLAGSERLSKSGSTGDRLKETQAINKSLSSLGDVIFALAKKEDHVPFRNSKLTYLLQPCLGGDSKTLMFVNITPEPSSTGESLCSLRFAARVNACEIGTAHRHVNARPLDYRLSLG

SEQ ID NO: 80997 - DNA, 1218 bp, Arabidopsis thaliana
  misc_feature (1)..(1218): Ceres Seq. ID no. 12658054
  misc_feature: MA Experiment ID: 20000438 Result: Down-regulated in Transcription
  misc_feature: MA Experiment 20000438 PARAMETER Experiment Name: At_Shoots__P Parameter: Age (day) Value: 14
  misc_feature: MA Experiment 20000438 PARAMETER Experiment Name: At_Shoots__P Parameter: Tissue Value: Shoots vs. Whole Plant
atggaattgcaaggagaggaaagcaaaacggcgacgtattgcgtgacgggtgcaagtggatacatcggttcttggttggttaagtctcttctccaaagaggttacacagtccatgccactctcagagatcttggtattttcttgttttcaaactttgtttatatcgaatcttttaggtactttacacaatcctttgaaataaaaatgatcttcataattaacgacaagcttcttccctcgacagcaaaatctgaatactttcaatctaaatggaaggaaaatgaacggctcagattattccgagcggatcttcgagatgacggcagctttgacgacgccgttaagggttgtgacggcgtcttccatgtcgccgcttccatggagtttgatatctcatcagatcacgttaatctcgagagttatgtccagagcaaagtcatagaaccggcgctaaaaggcgtacggaatgtacttagttcttgtctaaagtcaaagtcagtcaaaagagttgtcttcacatcatccatcagcactctcactgctaaagatgagaatgaacggatgagatctttcgtggatgaaacatgcaaggctcatgttgatcatgtccttaaaacacaagcaagtggatggatttatgtattatcgaagctcgtatcagaggaagaagcatttcggtatgcgaaagagagaggaatggatcttgtttcagtcattacaacaactgtttcaggtccattccttactccatttgtcccatcaagcgttcaagttctcttgtctccaattacaggtgtgtatataattttttccattatcatacataagtttaaatgtgactcaaagttgtttgcgatattatcagctgtgaacaaaagaatgggttcgattgctttagtacacattgaagatatttgcagggctcatctgtttttgatggaacaaccaaaggctaaaggtcaatatatatgttgtgttgacaatattgatatgcatgagttgatgcttcatcacttctctaaggactatctttgtaaagttcaaaaggtaaatgaagacgaggaagagagagaatgtatgaagcctataatttcttcaaagaagttaagagaattggggtttgagtacaaatatggtattgaagaaattgttgatcaaaccattgatgcttctatcaagattaagttccctaccttgaaccacaaactcaggcagtga

SEQ ID NO: 80998 - protein, 405 aa, Arabidopsis thaliana
  peptide (1)..(405): Ceres Seq. ID no. 12658055
  misc_feature (89)..(179): Pfam Name: NAD dependent epimerase/dehydratase family Pfam Description: NAD dependent epimerase/dehydratase family
  misc_feature (1)..(405): Homolog of NCBI NO: 7486807 NR Description: hypothetical protein M4I22.60 - Arabidopsis >gi|3269286|emb|CAA19719.1| putative protein [Arabidopsis >gi|7269578|emb|CAB79580.1| putative protein [Arabidopsis
  misc_feature (78)..(405): Homolog of NCBI NO: 30687527 NR Description: dihydroflavonol 4-reductase (dihydrokaempferol family [Arabidopsis thaliana] >gi|23296465|gb|AAN13064.1| unknown
  misc_feature (1)..(44): Homolog of NCBI NO: 30687527 NR Description: dihydroflavonol 4-reductase (dihydrokaempferol family [Arabidopsis thaliana] >gi|23296465|gb|AAN13064.1| unknown
MELQGEESKTATYCVTGASGYIGSWLVKSLLQRGYTVHATLRDLGIFLFSNFVYIESFRYFTQSFEIKMIFIINDKLLPSTAKSEYFQSKWKENERLRLFRADLRDDGSFDDAVKGCDGVFHVAASMEFDISSDHVNLESYVQSKVIEPALKGVRNVLSSCLKSKSVKRVVFTSSISTLTAKDENERMRSFVDETCKAHVDHVLKTQASGWIYVLSKLVSEEEAFRYAKERGMDLVSVITTTVSGPFLTPFVPSSVQVLLSPITGVYIIFSIIIHKFKCDSKLFAILSAVNKRMGSIALVHIEDICRAHLFLMEQPKAKGQYICCVDNIDMHELMLHHFSKDYLCKVQKVNEDEEERECMKPIISSKKLRELGFEYKYGIEEIVDQTIDASIKIKFPTLNHKLRQ

SEQ ID NO: 80999 - protein, 337 aa, Arabidopsis thaliana
  peptide (1)..(337): Ceres Seq. ID no. 12658056
  misc_feature (21)..(111): Pfam Name: NAD dependent epimerase/dehydratase family Pfam Description: NAD dependent epimerase/dehydratase family
  misc_feature (1)..(337): Homolog of NCBI NO: 7486807 NR Description: hypothetical protein M4I22.60 - Arabidopsis >gi|3269286|emb|CAA19719.1| putative protein [Arabidopsis >gi|7269578|emb|CAB79580.1| putative protein [Arabidopsis
  misc_feature (10)..(337): Homolog of NCBI NO: 30687527 NR Description: dihydroflavonol 4-reductase (dihydrokaempferol family [Arabidopsis thaliana] >gi|23296465|gb|AAN13064.1| unknown
MIFIINDKLLPSTAKSEYFQSKWKENERLRLFRADLRDDGSFDDAVKGCDGVFHVAASMEFDISSDHVNLESYVQSKVIEPALKGVRNVLSSCLKSKSVKRVVFTSSISTLTAKDENERMRSFVDETCKAHVDHVLKTQASGWIYVLSKLVSEEEAFRYAKERGMDLVSVITTTVSGPFLTPFVPSSVQVLLSPITGVYIIFSIIIHKFKCDSKLFAILSAVNKRMGSIALVHIEDICRAHLFLMEQPKAKGQYICCVDNIDMHELMLHHFSKDYLCKVQKVNEDEEERECMKPIISSKKLRELGFEYKYGIEEIVDQTIDASIKIKFPTLNHKLRQ

SEQ ID NO: 81000 - protein, 279 aa, Arabidopsis thaliana
  peptide (1)..(279): Ceres Seq. ID no. 12658057
  misc_feature (1)..(53): Pfam Name: NAD dependent epimerase/dehydratase family Pfam Description: NAD dependent epimerase/dehydratase family
  misc_feature (1)..(279): Homolog of NCBI NO: 7486807 NR Description: hypothetical protein M4I22.60 - Arabidopsis >gi|3269286|emb|CAA19719.1| putative protein [Arabidopsis >gi|7269578|emb|CAB79580.1| putative protein [Arabidopsis
  misc_feature (1)..(279): Homolog of NCBI NO: 30687527 NR Description: dihydroflavonol 4-reductase (dihydrokaempferol family [Arabidopsis thaliana] >gi|23296465|gb|AAN13064.1| unknown
MEFDISSDHVNLESYVQSKVIEPALKGVRNVLSSCLKSKSVKRVVFTSSISTLTAKDENERMRSFVDETCKAHVDHVLKTQASGWIYVLSKLVSEEEAFRYAKERGMDLVSVITTTVSGPFLTPFVPSSVQVLLSPITGVYIIFSIIIHKFKCDSKLFAILSAVNKRMGSIALVHIEDICRAHLFLMEQPKAKGQYICCVDNIDMHELMLHHFSKDYLCKVQKVNEDEEERECMKPIISSKKLRELGFEYKYGIEEIVDQTIDASIKIKFPTLNHKLRQ

SEQ ID NO: 81001 - DNA, 2448 bp, Arabidopsis thaliana
  misc_feature (1)..(2448): Ceres Seq. ID no. 12658062
  misc_feature: MA Experiment ID: 20000184 Result: Down-regulated in Transcription
  misc_feature: MA Experiment 20000184 PARAMETER Experiment Name: At_Shoots__P Parameter: Age (day) Value: 7
  misc_feature: MA Experiment 20000184 PARAMETER Experiment Name: At_Shoots__P Parameter: Tissue Value: Shoots vs. Whole Plant
  misc_feature: MA Experiment ID: 20000185 Result: Down-regulated in Transcription
  misc_feature: MA Experiment 20000185 PARAMETER Experiment Name: At_Roots__P Parameter: Age (day) Value: 7 vs. 21
  misc_feature: MA Experiment 20000185 PARAMETER Experiment Name: At_Roots__P Parameter: Organism Value: A. thaliana
  misc_feature: MA Experiment 20000185 PARAMETER Experiment Name: At_Roots__P Parameter: Tissue Value: Roots vs. Whole Plant
  misc_feature: MA Experiment ID: 20000234 Result: Down-regulated in Transcription
  misc_feature: MA Experiment 20000234 PARAMETER Experiment Name: At_Siliques_P Parameter: Age (day) Value: 21
  misc_feature: MA Experiment 20000234 PARAMETER Experiment Name: At_Siliques_P Parameter: Organism Value: A. thaliana
  misc_feature: MA Experiment 20000234 PARAMETER Experiment Name: At_Siliques_P Parameter: Plant Line Value: WS
  misc_feature: MA Experiment 20000234 PARAMETER Experiment Name: At_Siliques_P Parameter: Tissue Value: Less Than 5mm Siliques vs. Whole Plant
  misc_feature: MA Experiment ID: 20000235 Result: Down-regulated in Transcription
  misc_feature: MA Experiment 20000235 PARAMETER Experiment Name: At_Siliques_P Parameter: Age (day) Value: 21
  misc_feature: MA Experiment 20000235 PARAMETER Experiment Name: At_Siliques_P Parameter: Organism Value: A. thaliana
  misc_feature: MA Experiment 20000235 PARAMETER Experiment Name: At_Siliques_P Parameter: Plant Line Value: WS
  misc_feature: MA Experiment 20000235 PARAMETER Experiment Name: At_Siliques_P Parameter: Tissue Value: 5-10mm Siliques vs. Whole Plant
  misc_feature: MA Experiment ID: 20000264 Result: Down-regulated in Transcription
  misc_feature: MA Experiment 20000264 PARAMETER Experiment Name: At_Open_Flower_P Parameter: Age (day) Value: 21
  misc_feature: MA Experiment 20000264 PARAMETER Experiment Name: At_Open_Flower_P Parameter: Plant Line Value: WS
  misc_feature: MA Experiment 20000264 PARAMETER Experiment Name: At_Open_Flower_P Parameter: Tissue Value: Open Flower vs. Whole Plant
  misc_feature: MA Experiment ID: 20000265 Result: Down-regulated in Transcription
  misc_feature: MA Experiment 20000265 PARAMETER Experiment Name: At_Open_Flower_P Parameter: Age (day) Value: 21
  misc_feature: MA Experiment 20000265 PARAMETER Experiment Name: At_Open_Flower_P Parameter: Plant Line Value: WS
  misc_feature: MA Experiment 20000265 PARAMETER Experiment Name: At_Open_Flower_P Parameter: Tissue Value: Closed Flower vs. Whole Plant
  misc_feature: MA Experiment ID: 20000286 Result: Down-regulated in Transcription
  misc_feature: MA Experiment 20000286 PARAMETER Experiment Name: At_Open_Flower_P Parameter: Age (day) Value: 21
  misc_feature: MA Experiment 20000286 PARAMETER Experiment Name: At_Open_Flower_P Parameter: Plant Line Value: WS
  misc_feature: MA Experiment 20000286 PARAMETER Experiment Name: At_Open_Flower_P Parameter: Tissue Value: Half Open vs. Whole Plant
  misc_feature: MA Experiment ID: 20000437 Result: Down-regulated in Transcription
  misc_feature: MA Experiment 20000437 PARAMETER Experiment Name: At_Drought_P Parameter: Age (day) Value: 8
  misc_feature: MA Experiment 20000437 PARAMETER Experiment Name: At_Drought_P Parameter: Organism Value: A. thaliana
  misc_feature: MA Experiment 20000437 PARAMETER Experiment Name: At_Drought_P Parameter: Plant Line Value: WS
  misc_feature: MA Experiment 20000437 PARAMETER Experiment Name: At_Drought_P Parameter: Timepoint (hr) Value: 24
  misc_feature: MA Experiment 20000437 PARAMETER Experiment Name: At_Drought_P Parameter: Tissue Value: Whole Plant
  misc_feature: MA Experiment 20000437 PARAMETER Experiment Name: At_Drought_P Parameter: Treatment Value: Drought vs. No Drought
  misc_feature: MA Experiment ID: 20000439 Result: Down-regulated in Transcription
  misc_feature: MA Experiment 20000439 PARAMETER Experiment Name: At_Roots__P Parameter: Age (day) Value: 14 vs. 21
  misc_feature: MA Experiment 20000439 PARAMETER Experiment Name: At_Roots__P Parameter: Organism Value: A. thaliana
  misc_feature: MA Experiment 20000439 PARAMETER Experiment Name: At_Roots__P Parameter: Tissue Value: Roots vs. Whole Plant
  misc_feature: MA Experiment ID: 20000441 Result: Up-regulated in Transcription
  misc_feature: MA Experiment 20000441 PARAMETER Experiment Name: At_1uM_BR-BRZ__P Parameter: Tissue Value: Shoot Apices
  misc_feature: MA Experiment 20000441 PARAMETER Experiment Name: At_1uM_BR-BRZ__P Parameter: Treatment Value: 1uM BR vs. No Treatment
  misc_feature: MA Experiment ID: 20000443 Result: Up-regulated in Transcription
  misc_feature: MA Experiment 20000443 PARAMETER Experiment Name: At_1uM_BR-BRZ__P Parameter: Tissue Value: Shoot Apices
  misc_feature: MA Experiment 20000443 PARAMETER Experiment Name: At_1uM_BR-BRZ__P Parameter: Treatment Value: 1uM BRZ vs. No Treatment
  misc_feature: MA Experiment ID: 20000452 Result: Up-regulated in Transcription
  misc_feature: MA Experiment 20000452 PARAMETER Experiment Name: At_CS6879_Shoots-Roots_P Parameter: Age (day) Value: 14
  misc_feature: MA Experiment 20000452 PARAMETER Experiment Name: At_CS6879_Shoots-Roots_P Parameter: Organism Value: A. thaliana
  misc_feature: MA Experiment 20000452 PARAMETER Experiment Name: At_CS6879_Shoots-Roots_P Parameter: Plant Line Value: CS6879 vs. WS
  misc_feature: MA Experiment 20000452 PARAMETER Experiment Name: At_CS6879_Shoots-Roots_P Parameter: Tissue Value: Shoots
  misc_feature: MA Experiment ID: 20001554 Result: Down-regulated in Transcription
  misc_feature: MA Experiment 20001554 PARAMETER Experiment Name: At_Drought_Soil_Dry_P Parameter: Age (day) Value: 21
  misc_feature: MA Experiment 20001554 PARAMETER Experiment Name: At_Drought_Soil_Dry_P Parameter: Organism Value: A. thaliana
  misc_feature: MA Experiment 20001554 PARAMETER Experiment Name: At_Drought_Soil_Dry_P Parameter: Plant Line Value: WS
  misc_feature: MA Experiment 20001554 PARAMETER Experiment Name: At_Drought_Soil_Dry_P Parameter: Post Timepoint (hr) Value: None
  misc_feature: MA Experiment 20001554 PARAMETER Experiment Name: At_Drought_Soil_Dry_P Parameter: Post-Treatment Value: None
  misc_feature: MA Experiment 20001554 PARAMETER Experiment Name: At_Drought_Soil_Dry_P Parameter: Timepoint (day) Value: 7
  misc_feature: MA Experiment 20001554 PARAMETER Experiment Name: At_Drought_Soil_Dry_P Parameter: Treatment Value: Drought vs. No Drought
  misc_feature: MA Experiment ID: 20001555 Result: Down-regulated in Transcription
  misc_feature: MA Experiment 20001555 PARAMETER Experiment Name: At_Drought_Soil_Dry_P Parameter: Age (day) Value: 24
  misc_feature: MA Experiment 20001555 PARAMETER Experiment Name: At_Drought_Soil_Dry_P Parameter: Organism Value: A. thaliana
  misc_feature: MA Experiment 20001555 PARAMETER Experiment Name: At_Drought_Soil_Dry_P Parameter: Plant Line Value: WS
  misc_feature: MA Experiment 20001555 PARAMETER Experiment Name: At_Drought_Soil_Dry_P Parameter: Post Timepoint (hr) Value: None
  misc_feature: MA Experiment 20001555 PARAMETER Experiment Name: At_Drought_Soil_Dry_P Parameter: Post-Treatment Value: None
  misc_feature: MA Experiment 20001555 PARAMETER Experiment Name: At_Drought_Soil_Dry_P Parameter: Timepoint (day) Value: 10
  misc_feature: MA Experiment 20001555 PARAMETER Experiment Name: At_Drought_Soil_Dry_P Parameter: Treatment Value: Drought vs. No Drought
  misc_feature: MA Experiment ID: 20001556 Result: Down-regulated in Transcription
  misc_feature: MA Experiment 20001556 PARAMETER Experiment Name: At_Drought_Soil_Dry_P Parameter: Age (day) Value: 26
  misc_feature: MA Experiment 20001556 PARAMETER Experiment Name: At_Drought_Soil_Dry_P Parameter: Organism Value: A. thaliana
  misc_feature: MA Experiment 20001556 PARAMETER Experiment Name: At_Drought_Soil_Dry_P Parameter: Plant Line Value: WS
  misc_feature: MA Experiment 20001556 PARAMETER Experiment Name: At_Drought_Soil_Dry_P Parameter: Post Timepoint (hr) Value: None
  misc_feature: MA Experiment 20001556 PARAMETER Experiment Name: At_Drought_Soil_Dry_P Parameter: Post-Treatment Value: None
  misc_feature: MA Experiment 20001556 PARAMETER Experiment Name: At_Drought_Soil_Dry_P Parameter: Timepoint (day) Value: 12
  misc_feature: MA Experiment 20001556 PARAMETER Experiment Name: At_Drought_Soil_Dry_P Parameter: Treatment Value: Drought vs. No Drought
  misc_feature: MA Experiment ID: 20001558 Result: Down-regulated in Transcription
  misc_feature: MA Experiment 20001558 PARAMETER Experiment Name: At_Drought_Soil_Dry_P Parameter: Age (day) Value: 27
  misc_feature: MA Experiment 20001558 PARAMETER Experiment Name: At_Drought_Soil_Dry_P Parameter: Organism Value: A. thaliana
  misc_feature: MA Experiment 20001558 PARAMETER Experiment Name: At_Drought_Soil_Dry_P Parameter: Plant Line Value: WS
  misc_feature: MA Experiment 20001558 PARAMETER Experiment Name: At_Drought_Soil_Dry_P Parameter: Post Timepoint (hr) Value: 6
  misc_feature: MA Experiment 20001558 PARAMETER Experiment Name: At_Drought_Soil_Dry_P Parameter: Post-Treatment Value: Re-Water vs. No Drought
  misc_feature: MA Experiment 20001558 PARAMETER Experiment Name: At_Drought_Soil_Dry_P Parameter: Timepoint (day) Value: 13
  misc_feature: MA Experiment 20001558 PARAMETER Experiment Name: At_Drought_Soil_Dry_P Parameter: Treatment Value: Drought vs. No Drought
  misc_feature: MA Experiment ID: 20001559 Result: Down-regulated in Transcription
  misc_feature: MA Experiment 20001559 PARAMETER Experiment Name: At_Drought_Soil_Dry_P Parameter: Age (day) Value: 28
  misc_feature: MA Experiment 20001559 PARAMETER Experiment Name: At_Drought_Soil_Dry_P Parameter: Organism Value: A. thaliana
  misc_feature: MA Experiment 20001559 PARAMETER Experiment Name: At_Drought_Soil_Dry_P Parameter: Plant Line Value: WS
  misc_feature: MA Experiment 20001559 PARAMETER Experiment Name: At_Drought_Soil_Dry_P Parameter: Post Timepoint (hr) Value: 29
  misc_feature: MA Experiment 20001559 PARAMETER Experiment Name: At_Drought_Soil_Dry_P Parameter: Post-Treatment Value: Re-Water vs. No Drought
  misc_feature: MA Experiment 20001559 PARAMETER Experiment Name: At_Drought_Soil_Dry_P Parameter: Timepoint (day) Value: 14
  misc_feature: MA Experiment 20001559 PARAMETER Experiment Name: At_Drought_Soil_Dry_P Parameter: Treatment Value: Drought vs. No Drought
  misc_feature: MA Experiment ID: 20001560 Result: Down-regulated in Transcription
  misc_feature: MA Experiment 20001560 PARAMETER Experiment Name: At_Drought_Soil_Dry_P Parameter: Age (day) Value: 28
  misc_feature: MA Experiment 20001560 PARAMETER Experiment Name: At_Drought_Soil_Dry_P Parameter: Organism Value: A. thaliana
  misc_feature: MA Experiment 20001560 PARAMETER Experiment Name: At_Drought_Soil_Dry_P Parameter: Plant Line Value: WS
  misc_feature: MA Experiment 20001560 PARAMETER Experiment Name: At_Drought_Soil_Dry_P Parameter: Post Timepoint (hr) Value: None
  misc_feature: MA Experiment 20001560 PARAMETER Experiment Name: At_Drought_Soil_Dry_P Parameter: Post-Treatment Value: None
  misc_feature: MA Experiment 20001560 PARAMETER Experiment Name: At_Drought_Soil_Dry_P Parameter: Timepoint (day) Value: 14
  misc_feature: MA Experiment 20001560 PARAMETER Experiment Name: At_Drought_Soil_Dry_P Parameter: Treatment Value: Drought vs. No Drought
  misc_feature: MA Experiment ID: 20001904 Result: Down-regulated in Transcription
  misc_feature: MA Experiment 20001904 PARAMETER Experiment Name: At_Drought_Reproduction_P Parameter: Age (day) Value: 37
  misc_feature: MA Experiment 20001904 PARAMETER Experiment Name: At_Drought_Reproduction_P Parameter: Organism Value: A. thaliana
  misc_feature: MA Experiment 20001904 PARAMETER Experiment Name: At_Drought_Reproduction_P Parameter: Plant Line Value: WS
  misc_feature: MA Experiment 20001904 PARAMETER Experiment Name: At_Drought_Reproduction_P Parameter: Timepoint (day) Value: 7
  misc_feature: MA Experiment 20001904 PARAMETER Experiment Name: At_Drought_Reproduction_P Parameter: Tissue Value: Rosettes
  misc_feature: MA Experiment 20001904 PARAMETER Experiment Name: At_Drought_Reproduction_P Parameter: Treatment Value: Drought vs. No Drought
  misc_feature: MA Experiment ID: 20001905 Result: Down-regulated in Transcription
  misc_feature: MA Experiment 20001905 PARAMETER Experiment Name: At_Drought_Reproduction_P Parameter: Age (day) Value: 40
  misc_feature: MA Experiment 20001905 PARAMETER Experiment Name: At_Drought_Reproduction_P Parameter: Organism Value: A. thaliana
  misc_feature: MA Experiment 20001905 PARAMETER Experiment Name: At_Drought_Reproduction_P Parameter: Plant Line Value: WS
  misc_feature: MA Experiment 20001905 PARAMETER Experiment Name: At_Drought_Reproduction_P Parameter: Timepoint (day) Value: 10
  misc_feature: MA Experiment 20001905 PARAMETER Experiment Name: At_Drought_Reproduction_P Parameter: Tissue Value: Rosettes
  misc_feature: MA Experiment 20001905 PARAMETER Experiment Name: At_Drought_Reproduction_P Parameter: Treatment Value: Drought vs. No Drought
atgagagaaattcattctctgttttcgttatctctgttcttaatttcatcttctctctctgttgctttggattataatgtcatcactccaaaagaattccttaaggatggagatacccttagttctccagaccaggttttccaacttgggttctttagtcttgaccaagaagagcaacctcaacatcggtttcttggcttgtggtacatggaaccatttgcagtcgtttgggtggccaaccgaaacaaccctctctacggcacatctggattcttaaacttgagttcccttggcgatcttcagctattcgacggtgaacacaaagccttgtggtcatcatcatcatcatcaacaaaagcttctaaaacagcaaataatcctctcttgaagatatcatgttcagggaatctcatatctagtgacggagaagaagctgtgttgtggcagagttttgattatcccatgaatacaatactcgcgggtatgaagcttgggaaaaacttcaagacacaaatggaatggtctctatcatcttggaaaaccctaaaagatccatcaccaggtgatttcacgttgtctctagacactcgaggtttaccacaattgatcttaaggaagaatggagattcgagttattcctatcgcttaggatcttggaacggcttatccttcaccggcgctccagctatgggacgtgagaatagcttattcgactacaaattcacgtcgagtgcgcaagaagtaaactactcgtggactccacggcacagaattgtctcaagattggtattaaacaacacagggaaactccataggtttatccagtcgaagcaaaaccagtggatcttagcaaacactgcaccagaagatgagtgtgactactactctatatgtggagcttacgcagtttgtgggattaatagcaaaaacacaccttcttgttcatgtttacaagggttcaagcctaaatcaggtcgaaagtggaatatttcaagaggagcatacgggtgtgtccatgagattccaaccaactgtgaaaagaaagatgcatttgtgaagtttccaggtctgaaattaccagatacttcatggtcttggtatgatgcaaaaaatgaaatgacacttgaggattgtaagatcaagtgttcaagtaactgctcttgcacggcttatgcgaataccgatattcgcgagggaggaaaaggttgtttgctttggtttggtgacttggttgatatgagagagtattctagctttggacaagatgtttacataagaatgggttttgctaaaatagagtttaaaggaagagaagtggtgggaatggtcgttggatcggtggtggcaattgcagttgttttggttgtagtgtttgcatgtttcagaaagaagataatgaagagatatcgaggtgaaaatttcagaaaagggattgaggaagaggacttggacttgcctatttttgacagaaaaacgatttctatagccactgatgatttttcatacgtgaacttcctaggaagaggaggttttggaccagtttataagggtaagttagaagatggacaagagattgcggtgaagaggttatccgcgaactcaggacaaggagtggaagaattcaagaacgaagtaaaactaatcgcaaaacttcaacatcgtaacctcgtgaggcttttaggttgttgtattcaaggtgaagaatgtatgttgatctatgagtatatgcctaacaaaagtttagacttctttatatttgatgaaaggagaagtacagaattggattggaagaagagaatgaacattatcaatggagtagctcgtgggattctctatcttcatcaagattcaagattgagaatcatacatagagatttaaaagctggaaatgttttactagataatgatatgaaccctaagatctcagattttggattggctaaatcttttgggggagatcagagtgaatcaagcacaaacagagtcgtgggtacttatggttacatgcctccggagtatgcaattgatggacatttctctgtgaaatctgatgtgttcagtttcggtgtattagtacttgagatcataactggcaagacgaatcgagggtttcgtcatgcagatcatgatcttaatcttcttggacacgtgtggaaaatgtgggttgaagacagagaaatagaagtaccagaggaagagtggttggaagagacaagtgttatcccagaggtactaagatgtattcatgttgctttgctttgtgttcaacaaaaaccagaagacagaccaaccatggcttctgttgtcttgatgtttgggagtgatagttctcttcctcaccctacacagcccggttttttcaccaaccggaacgttcctgatatctcttcatctttaagcttacgttcacaaaacgaagtttccatcacaatgttgcagggacggtag

SEQ ID NO: 81002 - protein, 815 aa, Arabidopsis thaliana
  peptide (1)..(815): Ceres Seq. ID no. 12658063
  misc_feature (500)..(700): Pfam Name: Protein kinase domain Pfam Description: Protein kinase domain
  misc_feature (10)..(438): Homolog of NCBI NO: 15237045 NR Description: putative receptor like kinase; protein id:
  misc_feature (479)..(815): Homolog of NCBI NO: 15237045 NR Description: putative receptor like kinase; protein id:
  misc_feature (7)..(468): Homolog of NCBI NO: 7434413 NR Description: receptor-like kinase (EC 2.7.1.-) SFR2 - wild
  misc_feature (481)..(806): Homolog of NCBI NO: 7434413 NR Description: receptor-like kinase (EC 2.7.1.-) SFR2 - wild
  misc_feature (7)..(468): Homolog of NCBI NO: 2181188 NR Description: serine /threonine kinase [Brassica oleracea]
  misc_feature (481)..(806): Homolog of NCBI NO: 2181188 NR Description: serine /threonine kinase [Brassica oleracea]
  misc_feature (7)..(500): Homolog of NCBI NO: 16040952 NR Description: receptor kinase 5 [Brassica rapa]
  misc_feature (481)..(806): Homolog of NCBI NO: 16040952 NR Description: receptor kinase 5 [Brassica rapa]
  misc_feature (8)..(485): Homolog of NCBI NO: 836954 NR Description: receptor protein kinase [Ipomoea trifida]
  misc_feature (467)..(815): Homolog of NCBI NO: 836954 NR Description: receptor protein kinase [Ipomoea trifida]
MREIHSLFSLSLFLISSSLSVALDYNVITPKEFLKDGDTLSSPDQVFQLGFFSLDQEEQPQHRFLGLWYMEPFAVVWVANRNNPLYGTSGFLNLSSLGDLQLFDGEHKALWSSSSSSTKASKTANNPLLKISCSGNLISSDGEEAVLWQSFDYPMNTILAGMKLGKNFKTQMEWSLSSWKTLKDPSPGDFTLSLDTRGLPQLILRKNGDSSYSYRLGSWNGLSFTGAPAMGRENSLFDYKFTSSAQEVNYSWTPRHRIVSRLVLNNTGKLHRFIQSKQNQWILANTAPEDECDYYSICGAYAVCGINSKNTPSCSCLQGFKPKSGRKWNISRGAYGCVHEIPTNCEKKDAFVKFPGLKLPDTSWSWYDAKNEMTLEDCKIKCSSNCSCTAYANTDIREGGKGCLLWFGDLVDMREYSSFGQDVYIRMGFAKIEFKGREVVGMVVGSVVAIAVVLVVVFACFRKKIMKRYRGENFRKGIEEEDLDLPIFDRKTISIATDDFSYVNFLGRGGFGPVYKGKLEDGQEIAVKRLSANSGQGVEEFKNEVKLIAKLQHRNLVRLLGCCIQGEECMLIYEYMPNKSLDFFIFDERRSTELDWKKRMNIINGVARGILYLHQDSRLRIIHRDLKAGNVLLDNDMNPKISDFGLAKSFGGDQSESSTNRVVGTYGYMPPEYAIDGHFSVKSDVFSFGVLVLEIITGKTNRGFRHADHDLNLLGHVWKMWVEDREIEVPEEEWLEETSVIPEVLRCIHVALLCVQQKPEDRPTMASVVLMFGSDSSLPHPTQPGFFTNRNVPDISSSLSLRSQNEVSITMLQGR

SEQ ID NO: 81003 - protein, 746 aa, Arabidopsis thaliana
  peptide (1)..(746): Ceres Seq. ID no. 12658064
  misc_feature (431)..(631): Pfam Name: Protein kinase domain Pfam Description: Protein kinase domain
  misc_feature (1)..(369): Homolog of NCBI NO: 15237045 NR Description: putative receptor like kinase; protein id:
  misc_feature (410)..(746): Homolog of NCBI NO: 15237045 NR Description: putative receptor like kinase; protein id:
  misc_feature (1)..(399): Homolog of NCBI NO: 7434413 NR Description: receptor-like kinase (EC 2.7.1.-) SFR2 - wild
  misc_feature (412)..(737): Homolog of NCBI NO: 7434413 NR Description: receptor-like kinase (EC 2.7.1.-) SFR2 - wild
  misc_feature (1)..(399): Homolog of NCBI NO: 2181188 NR Description: serine /threonine kinase [Brassica oleracea]
  misc_feature (412)..(737): Homolog of NCBI NO: 2181188 NR Description: serine /threonine kinase [Brassica oleracea]
  misc_feature (1)..(431): Homolog of NCBI NO: 16040952 NR Description: receptor kinase 5 [Brassica rapa]
  misc_feature (412)..(737): Homolog of NCBI NO: 16040952 NR Description: receptor kinase 5 [Brassica rapa]
  misc_feature (1)..(416): Homolog of NCBI NO: 836954 NR Description: receptor protein kinase [Ipomoea trifida]
  misc_feature (398)..(746): Homolog of NCBI NO: 836954 NR Description: receptor protein kinase [Ipomoea trifida]
MEPFAVVWVANRNNPLYGTSGFLNLSSLGDLQLFDGEHKALWSSSSSSTKASKTANNPLLKISCSGNLISSDGEEAVLWQSFDYPMNTILAGMKLGKNFKTQMEWSLSSWKTLKDPSPGDFTLSLDTRGLPQLILRKNGDSSYSYRLGSWNGLSFTGAPAMGRENSLFDYKFTSSAQEVNYSWTPRHRIVSRLVLNNTGKLHRFIQSKQNQWILANTAPEDECDYYSICGAYAVCGINSKNTPSCSCLQGFKPKSGRKWNISRGAYGCVHEIPTNCEKKDAFVKFPGLKLPDTSWSWYDAKNEMTLEDCKIKCSSNCSCTAYANTDIREGGKGCLLWFGDLVDMREYSSFGQDVYIRMGFAKIEFKGREVVGMVVGSVVAIAVVLVVVFACFRKKIMKRYRGENFRKGIEEEDLDLPIFDRKTISIATDDFSYVNFLGRGGFGPVYKGKLEDGQEIAVKRLSANSGQGVEEFKNEVKLIAKLQHRNLVRLLGCCIQGEECMLIYEYMPNKSLDFFIFDERRSTELDWKKRMNIINGVARGILYLHQDSRLRIIHRDLKAGNVLLDNDMNPKISDFGLAKSFGGDQSESSTNRVVGTYGYMPPEYAIDGHFSVKSDVFSFGVLVLEIITGKTNRGFRHADHDLNLLGHVWKMWVEDREIEVPEEEWLEETSVIPEVLRCIHVALLCVQQKPEDRPTMASVVLMFGSDSSLPHPTQPGFFTNRNVPDISSSLSLRSQNEVSITMLQGR

SEQ ID NO: 81004 - protein, 661 aa, Arabidopsis thaliana
  peptide (1)..(661): Ceres Seq. ID no. 12658065
  misc_feature (346)..(546): Pfam Name: Protein kinase domain Pfam Description: Protein kinase domain
  misc_feature (1)..(284): Homolog of NCBI NO: 15237045 NR Description: putative receptor like kinase; protein id:
  misc_feature (325)..(661): Homolog of NCBI NO: 15237045 NR Description: putative receptor like kinase; protein id:
  misc_feature (1)..(314): Homolog of NCBI NO: 7434413 NR Description: receptor-like kinase (EC 2.7.1.-) SFR2 - wild
  misc_feature (327)..(652): Homolog of NCBI NO: 7434413 NR Description: receptor-like kinase (EC 2.7.1.-) SFR2 - wild
  misc_feature (1)..(314): Homolog of NCBI NO: 2181188 NR Description: serine /threonine kinase [Brassica oleracea]
  misc_feature (327)..(652): Homolog of NCBI NO: 2181188 NR Description: serine /threonine kinase [Brassica oleracea]
  misc_feature (1)..(346): Homolog of NCBI NO: 16040952 NR Description: receptor kinase 5 [Brassica rapa]
  misc_feature (327)..(652): Homolog of NCBI NO: 16040952 NR Description: receptor kinase 5 [Brassica rapa]
  misc_feature (1)..(331): Homolog of NCBI NO: 836954 NR Description: receptor protein kinase [Ipomoea trifida]
  misc_feature (313)..(661): Homolog of NCBI NO: 836954 NR Description: receptor protein kinase [Ipomoea trifida]
MNTILAGMKLGKNFKTQMEWSLSSWKTLKDPSPGDFTLSLDTRGLPQLILRKNGDSSYSYRLGSWNGLSFTGAPAMGRENSLFDYKFTSSAQEVNYSWTPRHRIVSRLVLNNTGKLHRFIQSKQNQWILANTAPEDECDYYSICGAYAVCGINSKNTPSCSCLQGFKPKSGRKWNISRGAYGCVHEIPTNCEKKDAFVKFPGLKLPDTSWSWYDAKNEMTLEDCKIKCSSNCSCTAYANTDIREGGKGCLLWFGDLVDMREYSSFGQDVYIRMGFAKIEFKGREVVGMVVGSVVAIAVVLVVVFACFRKKIMKRYRGENFRKGIEEEDLDLPIFDRKTISIATDDFSYVNFLGRGGFGPVYKGKLEDGQEIAVKRLSANSGQGVEEFKNEVKLIAKLQHRNLVRLLGCCIQGEECMLIYEYMPNKSLDFFIFDERRSTELDWKKRMNIINGVARGILYLHQDSRLRIIHRDLKAGNVLLDNDMNPKISDFGLAKSFGGDQSESSTNRVVGTYGYMPPEYAIDGHFSVKSDVFSFGVLVLEIITGKTNRGFRHADHDLNLLGHVWKMWVEDREIEVPEEEWLEETSVIPEVLRCIHVALLCVQQKPEDRPTMASVVLMFGSDSSLPHPTQPGFFTNRNVPDISSSLSLRSQNEVSITMLQGR

SEQ ID NO: 81005 - DNA, 528 bp, Arabidopsis thaliana
  misc_feature (1)..(528): Ceres Seq. ID no. 12658074
  misc_feature: MA Experiment ID: 20000327 Result: Up-regulated in Transcription
  misc_feature: MA Experiment 20000327 PARAMETER Experiment Name: At_42deg_Heat_Sub_P Parameter: Age (day) Value: 14
  misc_feature: MA Experiment 20000327 PARAMETER Experiment Name: At_42deg_Heat_Sub_P Parameter: Organism Value: A. thaliana
  misc_feature: MA Experiment 20000327 PARAMETER Experiment Name: At_42deg_Heat_Sub_P Parameter: Plant Line Value: WS
  misc_feature: MA Experiment 20000327 PARAMETER Experiment Name: At_42deg_Heat_Sub_P Parameter: Temperature (deg C) Value: 42 vs. 22
  misc_feature: MA Experiment 20000327 PARAMETER Experiment Name: At_42deg_Heat_Sub_P Parameter: Timepoint (hr) Value: 1
  misc_feature: MA Experiment 20000327 PARAMETER Experiment Name: At_42deg_Heat_Sub_P Parameter: Tissue Value: Aerial
acttgcataaactaacttggttctcttagatatttctttagagttaaataatcatattcaatttttttaaaaaggatgttagaagggaaagcagtaatgggtgatacagatatgaagcaaacaatgaaggaagatgctcttagtttggcctccaaagcccttgattgctttgatgtcaccgaacctactcaaattgcccgtttcatcaagaaggaatttgatagaagttacggatcggggtggcagtgcatcgtggggacgcatttcggatctttcgtgactcattgcagtggctgcttcatccatttctcagttggcagccttaccattttgctttttaagggatcagtcggtgaaccggcccccccggaccgatgctctagctaatttagacagtattgtaaaataatcaagtccttttcgattgatgtagtgttaaagttaaagagtattcaagttctttcactgtaatatcaatcatgattcgtcgttatggatgtcttcaataacaagaaaacactgctttct

SEQ ID NO: 81006 - protein, 103 aa, Arabidopsis thaliana
  peptide (1)..(103): Ceres Seq. ID no. 12658075
  misc_feature (1)..(91): Pfam Name: Dynein light chain type 1 Pfam Description: Dynein light chain type 1
  misc_feature (1)..(103): Homolog of NCBI NO: 22328970 NR Description: putative protein; protein id: At4g27360.1, by cDNA: gi_17380807, supported by cDNA: gi_20465744 [Arabidopsis >gi|17380808|gb|AAL36091.1| unknown protein [Arabidopsis
  misc_feature (8)..(103): Homolog of NCBI NO: 7486801 NR Description: hypothetical protein M4I22.170 - Arabidopsis >gi|3269297|emb|CAA19730.1| putative protein [Arabidopsis >gi|7269589|emb|CAB79591.1| putative protein [Arabidopsis
  misc_feature (1)..(91): Homolog of NCBI NO: 15233288 NR Description: putative dynein light chain protein; protein id: supported by cDNA: 254721. [Arabidopsis thaliana] gb|AAF29412.1~gene_id:MSL1.16~similar to unknown protein
  misc_feature (1)..(91): Homolog of NCBI NO: 15218189 NR Description: dynein light chain, putative; protein id:
  misc_feature (1)..(91): Homolog of NCBI NO: 34909728 NR Description: putative dynein light chain [Oryza sativa
  misc_feature (1)..(89): Homolog of NCBI NO: 34785679 NR Description: Unknown (protein for MGC:68763) [Xenopus laevis]
  misc_feature (1)..(89): Homolog of NCBI NO: 2811014 NR Description: DYNEIN LIGHT CHAIN LC6, FLAGELLAR OUTER ARM
  misc_feature (1)..(89): Homolog of NCBI NO: 30961847 NR Description: neuronal nitric oxidse synthase protein inhibitor
  misc_feature (1)..(89): Homolog of NCBI NO: 17137630 NR Description: Cytoplasmic dynein light chain 2 CG5450-PA melanogaster] >gi|24580844|ref|NP_722698.1| Cytoplasmic dynein
  misc_feature (1)..(89): Homolog of NCBI NO: 17552836 NR Description: Dynein light chain DLC-1 (10.3 kD) (dlc-1) elegans] >gi|2494222|sp|Q22799|DYL1_CAEEL PROBABLE DYNEIN LIGHT
MLEGKAVMGDTDMKQTMKEDALSLASKALDCFDVTEPTQIARFIKKEFDRSYGSGWQCIVGTHFGSFVTHCSGCFIHFSVGSLTILLFKGSVGEPAPPDRCSS

SEQ ID NO: 81007 - protein, 96 aa, Arabidopsis thaliana
  peptide (1)..(96): Ceres Seq. ID no. 12658076
  misc_feature (1)..(84): Pfam Name: Dynein light chain type 1 Pfam Description: Dynein light chain type 1
  misc_feature (1)..(96): Homolog of NCBI NO: 22328970 NR Description: putative protein; protein id: At4g27360.1, by cDNA: gi_17380807, supported by cDNA: gi_20465744 [Arabidopsis >gi|17380808|gb|AAL36091.1| unknown protein [Arabidopsis
  misc_feature (1)..(96): Homolog of NCBI NO: 7486801 NR Description: hypothetical protein M4I22.170 - Arabidopsis >gi|3269297|emb|CAA19730.1| putative protein [Arabidopsis >gi|7269589|emb|CAB79591.1| putative protein [Arabidopsis
  misc_feature (1)..(84): Homolog of NCBI NO: 15233288 NR Description: putative dynein light chain protein; protein id: supported by cDNA: 254721. [Arabidopsis thaliana] gb|AAF29412.1~gene_id:MSL1.16~similar to unknown protein
  misc_feature (1)..(84): Homolog of NCBI NO: 15218189 NR Description: dynein light chain, putative; protein id:
  misc_feature (1)..(84): Homolog of NCBI NO: 34909728 NR Description: putative dynein light chain [Oryza sativa
  misc_feature (1)..(82): Homolog of NCBI NO: 34785679 NR Description: Unknown (protein for MGC:68763) [Xenopus laevis]
  misc_feature (1)..(82): Homolog of NCBI NO: 2811014 NR Description: DYNEIN LIGHT CHAIN LC6, FLAGELLAR OUTER ARM
  misc_feature (1)..(82): Homolog of NCBI NO: 30961847 NR Description: neuronal nitric oxidse synthase protein inhibitor
  misc_feature (1)..(82): Homolog of NCBI NO: 17137630 NR Description: Cytoplasmic dynein light chain 2 CG5450-PA melanogaster] >gi|24580844|ref|NP_722698.1| Cytoplasmic dynein
  misc_feature (1)..(82): Homolog of NCBI NO: 17552836 NR Description: Dynein light chain DLC-1 (10.3 kD) (dlc-1) elegans] >gi|2494222|sp|Q22799|DYL1_CAEEL PROBABLE DYNEIN LIGHT
MGDTDMKQTMKEDALSLASKALDCFDVTEPTQIARFIKKEFDRSYGSGWQCIVGTHFGSFVTHCSGCFIHFSVGSLTILLFKGSVGEPAPPDRCSS

SEQ ID NO: 81008 - protein, 91 aa, Arabidopsis thaliana
  peptide (1)..(91): Ceres Seq. ID no. 12658077
  misc_feature (1)..(79): Pfam Name: Dynein light chain type 1 Pfam Description: Dynein light chain type 1
  misc_feature (1)..(91): Homolog of NCBI NO: 22328970 NR Description: putative protein; protein id: At4g27360.1, by cDNA: gi_17380807, supported by cDNA: gi_20465744 [Arabidopsis >gi|17380808|gb|AAL36091.1| unknown protein [Arabidopsis
  misc_feature (1)..(91): Homolog of NCBI NO: 7486801 NR Description: hypothetical protein M4I22.170 - Arabidopsis >gi|3269297|emb|CAA19730.1| putative protein [Arabidopsis >gi|7269589|emb|CAB79591.1| putative protein [Arabidopsis
  misc_feature (1)..(79): Homolog of NCBI NO: 15233288 NR Description: putative dynein light chain protein; protein id: supported by cDNA: 254721. [Arabidopsis thaliana] gb|AAF29412.1~gene_id:MSL1.16~similar to unknown protein
  misc_feature (1)..(79): Homolog of NCBI NO: 15218189 NR Description: dynein light chain, putative; protein id:
  misc_feature (1)..(79): Homolog of NCBI NO: 34909728 NR Description: putative dynein light chain [Oryza sativa
  misc_feature (1)..(77): Homolog of NCBI NO: 34785679 NR Description: Unknown (protein for MGC:68763) [Xenopus laevis]
  misc_feature (1)..(77): Homolog of NCBI NO: 2811014 NR Description: DYNEIN LIGHT CHAIN LC6, FLAGELLAR OUTER ARM
  misc_feature (1)..(77): Homolog of NCBI NO: 30961847 NR Description: neuronal nitric oxidse synthase protein inhibitor
  misc_feature (1)..(77): Homolog of NCBI NO: 17137630 NR Description: Cytoplasmic dynein light chain 2 CG5450-PA melanogaster] >gi|24580844|ref|NP_722698.1| Cytoplasmic dynein
  misc_feature (1)..(77): Homolog of NCBI NO: 17552836 NR Description: Dynein light chain DLC-1 (10.3 kD) (dlc-1) elegans] >gi|2494222|sp|Q22799|DYL1_CAEEL PROBABLE DYNEIN LIGHT
MKQTMKEDALSLASKALDCFDVTEPTQIARFIKKEFDRSYGSGWQCIVGTHFGSFVTHCSGCFIHFSVGSLTILLFKGSVGEPAPPDRCSS

SEQ ID NO: 81009 - DNA, 1155 bp, Arabidopsis thaliana
  misc_feature (1)..(1155): Ceres Seq. ID no. 12658093
  misc_feature: MA Experiment ID: 20000173 Result: Up-regulated in Transcription
  misc_feature: MA Experiment 20000173 PARAMETER Experiment Name: At_42deg_Heat_P Parameter: Age (day) Value: 14
  misc_feature: MA Experiment 20000173 PARAMETER Experiment Name: At_42deg_Heat_P Parameter: Organism Value: A. thaliana
  misc_feature: MA Experiment 20000173 PARAMETER Experiment Name: At_42deg_Heat_P Parameter: Plant Line Value: WS
  misc_feature: MA Experiment 20000173 PARAMETER Experiment Name: At_42deg_Heat_P Parameter: Temperature (deg C) Value: 42 vs. 22
  misc_feature: MA Experiment 20000173 PARAMETER Experiment Name: At_42deg_Heat_P Parameter: Timepoint (hr) Value: 6
  misc_feature: MA Experiment 20000173 PARAMETER Experiment Name: At_42deg_Heat_P Parameter: Tissue Value: Aerial
  misc_feature: MA Experiment ID: 20000182 Result: Up-regulated in Transcription
  misc_feature: MA Experiment 20000182 PARAMETER Experiment Name: At_2mM_SA_P Parameter: Age (day) Value: 14
  misc_feature: MA Experiment 20000182 PARAMETER Experiment Name: At_2mM_SA_P Parameter: Organism Value: A. thaliana
  misc_feature: MA Experiment 20000182 PARAMETER Experiment Name: At_2mM_SA_P Parameter: Plant Line Value: WS
  misc_feature: MA Experiment 20000182 PARAMETER Experiment Name: At_2mM_SA_P Parameter: Timepoint (hr) Value: 6
  misc_feature: MA Experiment 20000182 PARAMETER Experiment Name: At_2mM_SA_P Parameter: Tissue Value: Aerial
  misc_feature: MA Experiment 20000182 PARAMETER Experiment Name: At_2mM_SA_P Parameter: Treatment Value: 2mM SA vs. No Treatment
  misc_feature: MA Experiment ID: 20000184 Result: Down-regulated in Transcription
  misc_feature: MA Experiment 20000184 PARAMETER Experiment Name: At_Shoots__P Parameter: Age (day) Value: 7
  misc_feature: MA Experiment 20000184 PARAMETER Experiment Name: At_Shoots__P Parameter: Tissue Value: Shoots vs. Whole Plant
  misc_feature: MA Experiment ID: 20000438 Result: Down-regulated in Transcription
  misc_feature: MA Experiment 20000438 PARAMETER Experiment Name: At_Shoots__P Parameter: Age (day) Value: 14
  misc_feature: MA Experiment 20000438 PARAMETER Experiment Name: At_Shoots__P Parameter: Tissue Value: Shoots vs. Whole Plant
  misc_feature: MA Experiment ID: 20001556 Result: Down-regulated in Transcription
  misc_feature: MA Experiment 20001556 PARAMETER Experiment Name: At_Drought_Soil_Dry_P Parameter: Age (day) Value: 26
  misc_feature: MA Experiment 20001556 PARAMETER Experiment Name: At_Drought_Soil_Dry_P Parameter: Organism Value: A. thaliana
  misc_feature: MA Experiment 20001556 PARAMETER Experiment Name: At_Drought_Soil_Dry_P Parameter: Plant Line Value: WS
  misc_feature: MA Experiment 20001556 PARAMETER Experiment Name: At_Drought_Soil_Dry_P Parameter: Post Timepoint (hr) Value: None
  misc_feature: MA Experiment 20001556 PARAMETER Experiment Name: At_Drought_Soil_Dry_P Parameter: Post-Treatment Value: None
  misc_feature: MA Experiment 20001556 PARAMETER Experiment Name: At_Drought_Soil_Dry_P Parameter: Timepoint (day) Value: 12
  misc_feature: MA Experiment 20001556 PARAMETER Experiment Name: At_Drought_Soil_Dry_P Parameter: Treatment Value: Drought vs. No Drought
  misc_feature: MA Experiment ID: 20001558 Result: Down-regulated in Transcription
  misc_feature: MA Experiment 20001558 PARAMETER Experiment Name: At_Drought_Soil_Dry_P Parameter: Age (day) Value: 27
  misc_feature: MA Experiment 20001558 PARAMETER Experiment Name: At_Drought_Soil_Dry_P Parameter: Organism Value: A. thaliana
  misc_feature: MA Experiment 20001558 PARAMETER Experiment Name: At_Drought_Soil_Dry_P Parameter: Plant Line Value: WS
  misc_feature: MA Experiment 20001558 PARAMETER Experiment Name: At_Drought_Soil_Dry_P Parameter: Post Timepoint (hr) Value: 6
  misc_feature: MA Experiment 20001558 PARAMETER Experiment Name: At_Drought_Soil_Dry_P Parameter: Post-Treatment Value: Re-Water vs. No Drought
  misc_feature: MA Experiment 20001558 PARAMETER Experiment Name: At_Drought_Soil_Dry_P Parameter: Timepoint (day) Value: 13
  misc_feature: MA Experiment 20001558 PARAMETER Experiment Name: At_Drought_Soil_Dry_P Parameter: Treatment Value: Drought vs. No Drought
atgggtctcctctcttctgtccgttctattaactcactcatcttctcctacaatctatcgaccaccaacgagacacgagtcgaatttgcagagtcaaagatcaatcagtcctcgcatcctcctccagtacagcctagtcttcctcgctttggttatctagtttcagggtcaagaggtgacttagagagtctgtggagagtgttacgaacattataccatcctaggaatcagtacgttgttcatcttgatctcgagtctcctgctgaagagaggcttgagctggctaaacgtgtgagccaagatcctgtttttagcgatgttggaaatgttcacatgatcacaaaggctaaccttgttacgtatcgaggacccacaatggtggctaacacgctccacgcttgcgctattctcttgaagcagagtaaagaatgggattggttcatcaatctcagtgcctcggattatcctctagtcactcaagatgatctgattgatacattctcgggactggaccggaacctcaactttatcgaccacagtagcaaactaggctggaaagaagaaaaacgagcaaagccgctgatcatagacccggggctttactccacaaagaagtcagatgtcttctgggttacacctcgcagaacaatgccaactgcattcaaactatttaccggtaattcagtgattaaatattgcatttggggatgggacaatcttccacggactcttctaatgtattacaccaatttcctctctacaccggaaggatatttccatactgtcatctgcaacgctccagagtactcttccactgtgctgaaccacgacctgcatttcatctcatgggaccgccctcctaaacagcatcctcgggcgctcaccatcaacgatacagagaggatgattgcaagtggaagtgcgttttcccgcaagttcagacacaatgatcctgccttggataagatcgataaagagctgctcggtagaggtaacggaaacttcacgcctggtggttggtgtgcaggggaaccaaaatgctcgagggttggtgatccgtcgaagatcaagcccggtcctggagctaacaggcttcgtgtgcttgttagcagacttgttttgacatctaaattgactcaaaggcaatgtagatag

SEQ ID NO: 81010 - protein, 384 aa, Arabidopsis thaliana
  peptide (1)..(384): Ceres Seq. ID no. 12658094
  misc_feature (50)..(268): Pfam Name: Core-2/I-Branching enzyme Pfam Description: Core-2/I-Branching enzyme
  misc_feature (1)..(384): Homolog of NCBI NO: 7486258 NR Description: hypothetical protein F27G19.80 - Arabidopsis >gi|4972073|emb|CAB43880.1| putative protein [Arabidopsis >gi|7269602|emb|CAB81398.1| putative protein [Arabidopsis
  misc_feature (1)..(384): Homolog of NCBI NO: 30687610 NR Description: N-acetylglucosaminyltransferase family
  misc_feature (1)..(384): Homolog of NCBI NO: 18400725 NR Description: N-acetylglucosaminyltransferase family enzyme family); protein id: At3g15350.1, supported by cDNA:
  misc_feature (1)..(384): Homolog of NCBI NO: 15146308 NR Description: AT3g15350/K7L4_15 [Arabidopsis thaliana]
  misc_feature (23)..(383): Homolog of NCBI NO: 15219202 NR Description: N-acetylglucosaminyltransferase family
  misc_feature (3)..(384): Homolog of NCBI NO: 15242532 NR Description: N-acetylglucosaminyltransferase family
  misc_feature (8)..(384): Homolog of NCBI NO: 15242199 NR Description: N-acetylglucosaminyltransferase family enzyme family); protein id: At5g15050.1, supported by cDNA: supported by cDNA: gi_16209673 [Arabidopsis thaliana]
  misc_feature (19)..(383): Homolog of NCBI NO: 15218824 NR Description: N-acetylglucosaminyltransferase family enzyme family); protein id: At1g03520.1, supported by cDNA: supported by cDNA: gi_20465790 [Arabidopsis thaliana] thaliana
  misc_feature (18)..(383): Homolog of NCBI NO: 15236287 NR Description: N-acetylglucosaminyltransferase family
  misc_feature (40)..(338): Homolog of NCBI NO: 34903664 NR Description: B1015E06.17 [Oryza sativa (japonica
MGLLSSVRSINSLIFSYNLSTTNETRVEFAESKINQSSHPPPVQPSLPRFGYLVSGSRGDLESLWRVLRTLYHPRNQYVVHLDLESPAEERLELAKRVSQDPVFSDVGNVHMITKANLVTYRGPTMVANTLHACAILLKQSKEWDWFINLSASDYPLVTQDDLIDTFSGLDRNLNFIDHSSKLGWKEEKRAKPLIIDPGLYSTKKSDVFWVTPRRTMPTAFKLFTGNSVIKYCIWGWDNLPRTLLMYYTNFLSTPEGYFHTVICNAPEYSSTVLNHDLHFISWDRPPKQHPRALTINDTERMIASGSAFSRKFRHNDPALDKIDKELLGRGNGNFTPGGWCAGEPKCSRVGDPSKIKPGPGANRLRVLVSRLVLTSKLTQRQCR

SEQ ID NO: 81011 - protein, 273 aa, Arabidopsis thaliana
  peptide (1)..(273): Ceres Seq. ID no. 12658095
  misc_feature (1)..(157): Pfam Name: Core-2/I-Branching enzyme Pfam Description: Core-2/I-Branching enzyme
  misc_feature (1)..(273): Homolog of NCBI NO: 7486258 NR Description: hypothetical protein F27G19.80 - Arabidopsis >gi|4972073|emb|CAB43880.1| putative protein [Arabidopsis >gi|7269602|emb|CAB81398.1| putative protein [Arabidopsis
  misc_feature (1)..(273): Homolog of NCBI NO: 30687610 NR Description: N-acetylglucosaminyltransferase family
  misc_feature (1)..(273): Homolog of NCBI NO: 18400725 NR Description: N-acetylglucosaminyltransferase family enzyme family); protein id: At3g15350.1, supported by cDNA:
  misc_feature (1)..(273): Homolog of NCBI NO: 15146308 NR Description: AT3g15350/K7L4_15 [Arabidopsis thaliana]
  misc_feature (1)..(272): Homolog of NCBI NO: 15219202 NR Description: N-acetylglucosaminyltransferase family
  misc_feature (1)..(273): Homolog of NCBI NO: 15242532 NR Description: N-acetylglucosaminyltransferase family
  misc_feature (1)..(273): Homolog of NCBI NO: 15242199 NR Description: N-acetylglucosaminyltransferase family enzyme family); protein id: At5g15050.1, supported by cDNA: supported by cDNA: gi_16209673 [Arabidopsis thaliana]
  misc_feature (1)..(272): Homolog of NCBI NO: 15218824 NR Description: N-acetylglucosaminyltransferase family enzyme family); protein id: At1g03520.1, supported by cDNA: supported by cDNA: gi_20465790 [Arabidopsis thaliana] thaliana
  misc_feature (1)..(272): Homolog of NCBI NO: 15236287 NR Description: N-acetylglucosaminyltransferase family
  misc_feature (1)..(227): Homolog of NCBI NO: 34903664 NR Description: B1015E06.17 [Oryza sativa (japonica
MITKANLVTYRGPTMVANTLHACAILLKQSKEWDWFINLSASDYPLVTQDDLIDTFSGLDRNLNFIDHSSKLGWKEEKRAKPLIIDPGLYSTKKSDVFWVTPRRTMPTAFKLFTGNSVIKYCIWGWDNLPRTLLMYYTNFLSTPEGYFHTVICNAPEYSSTVLNHDLHFISWDRPPKQHPRALTINDTERMIASGSAFSRKFRHNDPALDKIDKELLGRGNGNFTPGGWCAGEPKCSRVGDPSKIKPGPGANRLRVLVSRLVLTSKLTQRQCR

SEQ ID NO: 81012 - protein, 259 aa, Arabidopsis thaliana
  peptide (1)..(259): Ceres Seq. ID no. 12658096
  misc_feature (1)..(143): Pfam Name: Core-2/I-Branching enzyme Pfam Description: Core-2/I-Branching enzyme
  misc_feature (1)..(259): Homolog of NCBI NO: 7486258 NR Description: hypothetical protein F27G19.80 - Arabidopsis >gi|4972073|emb|CAB43880.1| putative protein [Arabidopsis >gi|7269602|emb|CAB81398.1| putative protein [Arabidopsis
  misc_feature (1)..(259): Homolog of NCBI NO: 30687610 NR Description: N-acetylglucosaminyltransferase family
  misc_feature (1)..(259): Homolog of NCBI NO: 18400725 NR Description: N-acetylglucosaminyltransferase family enzyme family); protein id: At3g15350.1, supported by cDNA:
  misc_feature (1)..(259): Homolog of NCBI NO: 15146308 NR Description: AT3g15350/K7L4_15 [Arabidopsis thaliana]
  misc_feature (1)..(258): Homolog of NCBI NO: 15219202 NR Description: N-acetylglucosaminyltransferase family
  misc_feature (1)..(259): Homolog of NCBI NO: 15242532 NR Description: N-acetylglucosaminyltransferase family
  misc_feature (1)..(259): Homolog of NCBI NO: 15242199 NR Description: N-acetylglucosaminyltransferase family enzyme family); protein id: At5g15050.1, supported by cDNA: supported by cDNA: gi_16209673 [Arabidopsis thaliana]
  misc_feature (1)..(258): Homolog of NCBI NO: 15218824 NR Description: N-acetylglucosaminyltransferase family enzyme family); protein id: At1g03520.1, supported by cDNA: supported by cDNA: gi_20465790 [Arabidopsis thaliana] thaliana
  misc_feature (1)..(258): Homolog of NCBI NO: 15236287 NR Description: N-acetylglucosaminyltransferase family
  misc_feature (1)..(213): Homolog of NCBI NO: 34903664 NR Description: B1015E06.17 [Oryza sativa (japonica
MVANTLHACAILLKQSKEWDWFINLSASDYPLVTQDDLIDTFSGLDRNLNFIDHSSKLGWKEEKRAKPLIIDPGLYSTKKSDVFWVTPRRTMPTAFKLFTGNSVIKYCIWGWDNLPRTLLMYYTNFLSTPEGYFHTVICNAPEYSSTVLNHDLHFISWDRPPKQHPRALTINDTERMIASGSAFSRKFRHNDPALDKIDKELLGRGNGNFTPGGWCAGEPKCSRVGDPSKIKPGPGANRLRVLVSRLVLTSKLTQRQCR

SEQ ID NO: 81013 - DNA, 1436 bp, Arabidopsis thaliana
  misc_feature (1)..(1436): Ceres Seq. ID no. 12658105
  misc_feature: MA Experiment ID: 20000184 Result: Down-regulated in Transcription
  misc_feature: MA Experiment 20000184 PARAMETER Experiment Name: At_Shoots__P Parameter: Age (day) Value: 7
  misc_feature: MA Experiment 20000184 PARAMETER Experiment Name: At_Shoots__P Parameter: Tissue Value: Shoots vs. Whole Plant
tctctgtccttgtgtgtctctggactctgttagtggacataccttgagagatgaagatcgttcgcagggattttgttcgtaatggacccggaagcgttaagatggtggcagaggactctgatgatctctggtatgcttataacttgattgctgtgggcgatagtgtaatggctgtcactttcagaaaagttcagagagagatacctggtgggggaagagactctgaacgtgttaaactgaagctggaagtacaagttgaggaggtggactatgacaaagacggatctgttttgcgcatacgtggcaaaaatatcctggagaatgagcacgtaaagattggtgcattccatactttggaacttgagctgaaacgaccttttgtgttgagaaaggaaatgtgggactcaatggctcttgatacactcaaacaggcctcagatcccgctgctagtgctgatctagctgtagttctaatgcaagaaggactggcacaaatcttccttgtgggcagaagtgtgacaagtagccgtgcacgaatagaaacatccattcctaggaagcatggacctgcaattgctggttacgagtctgctttgaagaaattttttgagaatgttctgcaggcctttgtgaaacatgttgacttcagtgtcgttcgctgtgcagtagttgcaagtcccggcttcacaaaggttttttttttggtcactcaaagactttctaaatttacgtggtttattatttttcaaattgcagctggaccaggcttacaaatttcccatacatatatgacacagaccgtttgattgtttcatgtctccaggatcagtttcatcgccacttattgttggaagcagaaagaagacaactgagacctattattgagaataaatcacgtataatattggtgcacacaaactctggatatagacatagcctgggtgaggttctccatgcccccaacgtgatgaatatgataaaagatacaaaagcagcaaaagaggtcaaagctctcaatgattttcacaacatgctttcaactgaaccagatcgggcatgctatggaccaaaacacgtggaagttgcaaatgaacgaatggcaattcaaacgcttctcataacggacgagcttttcaggaattctgacgtgaaaacaaggaagaagtatgtgaatttggtggagtcggtaaaagattcgggaggagatgcttttatattttcggcgatgcatgtgtcaggagaacaattggcacagctgactggaatagcagctcttctcaggttccctttaccagaactcgaagacattgagatgtaaaaaaatcttcggcttatagaaaacaatacaacaaatcatacacatctctcataatttatagtttatttgtactcagtgtcataaaaagagatttgtaactcattacaaattataagat

SEQ ID NO: 81014 - protein, 251 aa, Arabidopsis thaliana
  peptide (1)..(251): Ceres Seq. ID no. 12658106
  misc_feature (1)..(131): Pfam Name: eRF1 domain 1 Pfam Description: eRF1 domain 1
  misc_feature (1)..(214): Homolog of NCBI NO: 30687676 NR Description: pelota (PEL1) [Arabidopsis thaliana]
  misc_feature (58)..(214): Homolog of NCBI NO: 15231020 NR Description: pelota-like protein; protein id: At3g58390.1
  misc_feature (1)..(58): Homolog of NCBI NO: 15231020 NR Description: pelota-like protein; protein id: At3g58390.1
  misc_feature (1)..(214): Homolog of NCBI NO: 38345200 NR Description: OSJNBa0015K02.10 [Oryza sativa (japonica
  misc_feature (1)..(251): Homolog of NCBI NO: 11762247 NR Description: AT4g27650 [Arabidopsis thaliana]
  misc_feature (1)..(214): Homolog of NCBI NO: 1352736 NR Description: PELOTA PROTEIN >gi|11279544|pir||T47122 cell
  misc_feature (1)..(214): Homolog of NCBI NO: 17136914 NR Description: pelota CG3959-PA [Drosophila melanogaster]
  misc_feature (1)..(153): Homolog of NCBI NO: 19387279 NR Description: putative pelota [Oryza sativa (japonica
  misc_feature (110)..(214): Homolog of NCBI NO: 19387279 NR Description: putative pelota [Oryza sativa (japonica
  misc_feature (1)..(217): Homolog of NCBI NO: 34854171 NR Description: similar to Pelo protein [Rattus norvegicus]
MKIVRRDFVRNGPGSVKMVAEDSDDLWYAYNLIAVGDSVMAVTFRKVQREIPGGGRDSERVKLKLEVQVEEVDYDKDGSVLRIRGKNILENEHVKIGAFHTLELELKRPFVLRKEMWDSMALDTLKQASDPAASADLAVVLMQEGLAQIFLVGRSVTSSRARIETSIPRKHGPAIAGYESALKKFFENVLQAFVKHVDFSVVRCAVVASPGFTKVFFLVTQRLSKFTWFIIFQIAAGPGLQISHTYMTQTV

SEQ ID NO: 81015 - protein, 234 aa, Arabidopsis thaliana
  peptide (1)..(234): Ceres Seq. ID no. 12658107
  misc_feature (1)..(114): Pfam Name: eRF1 domain 1 Pfam Description: eRF1 domain 1
  misc_feature (1)..(197): Homolog of NCBI NO: 30687676 NR Description: pelota (PEL1) [Arabidopsis thaliana]
  misc_feature (41)..(197): Homolog of NCBI NO: 15231020 NR Description: pelota-like protein; protein id: At3g58390.1
  misc_feature (1)..(41): Homolog of NCBI NO: 15231020 NR Description: pelota-like protein; protein id: At3g58390.1
  misc_feature (1)..(197): Homolog of NCBI NO: 38345200 NR Description: OSJNBa0015K02.10 [Oryza sativa (japonica
  misc_feature (1)..(234): Homolog of NCBI NO: 11762247 NR Description: AT4g27650 [Arabidopsis thaliana]
  misc_feature (1)..(197): Homolog of NCBI NO: 1352736 NR Description: PELOTA PROTEIN >gi|11279544|pir||T47122 cell
  misc_feature (1)..(197): Homolog of NCBI NO: 17136914 NR Description: pelota CG3959-PA [Drosophila melanogaster]
  misc_feature (1)..(136): Homolog of NCBI NO: 19387279 NR Description: putative pelota [Oryza sativa (japonica
  misc_feature (93)..(197): Homolog of NCBI NO: 19387279 NR Description: putative pelota [Oryza sativa (japonica
  misc_feature (1)..(200): Homolog of NCBI NO: 34854171 NR Description: similar to Pelo protein [Rattus norvegicus]
MVAEDSDDLWYAYNLIAVGDSVMAVTFRKVQREIPGGGRDSERVKLKLEVQVEEVDYDKDGSVLRIRGKNILENEHVKIGAFHTLELELKRPFVLRKEMWDSMALDTLKQASDPAASADLAVVLMQEGLAQIFLVGRSVTSSRARIETSIPRKHGPAIAGYESALKKFFENVLQAFVKHVDFSVVRCAVVASPGFTKVFFLVTQRLSKFTWFIIFQIAAGPGLQISHTYMTQTV

SEQ ID NO: 81016 - protein, 212 aa, Arabidopsis thaliana
  peptide (1)..(212): Ceres Seq. ID no. 12658108
  misc_feature (1)..(92): Pfam Name: eRF1 domain 1 Pfam Description: eRF1 domain 1
  misc_feature (1)..(175): Homolog of NCBI NO: 30687676 NR Description: pelota (PEL1) [Arabidopsis thaliana]
  misc_feature (19)..(175): Homolog of NCBI NO: 15231020 NR Description: pelota-like protein; protein id: At3g58390.1
  misc_feature (1)..(19): Homolog of NCBI NO: 15231020 NR Description: pelota-like protein; protein id: At3g58390.1
  misc_feature (1)..(175): Homolog of NCBI NO: 38345200 NR Description: OSJNBa0015K02.10 [Oryza sativa (japonica
  misc_feature (1)..(212): Homolog of NCBI NO: 11762247 NR Description: AT4g27650 [Arabidopsis thaliana]
  misc_feature (1)..(175): Homolog of NCBI NO: 1352736 NR Description: PELOTA PROTEIN >gi|11279544|pir||T47122 cell
  misc_feature (1)..(175): Homolog of NCBI NO: 17136914 NR Description: pelota CG3959-PA [Drosophila melanogaster]
  misc_feature (1)..(114): Homolog of NCBI NO: 19387279 NR Description: putative pelota [Oryza sativa (japonica
  misc_feature (71)..(175): Homolog of NCBI NO: 19387279 NR Description: putative pelota [Oryza sativa (japonica
  misc_feature (1)..(178): Homolog of NCBI NO: 34854171 NR Description: similar to Pelo protein [Rattus norvegicus]
MAVTFRKVQREIPGGGRDSERVKLKLEVQVEEVDYDKDGSVLRIRGKNILENEHVKIGAFHTLELELKRPFVLRKEMWDSMALDTLKQASDPAASADLAVVLMQEGLAQIFLVGRSVTSSRARIETSIPRKHGPAIAGYESALKKFFENVLQAFVKHVDFSVVRCAVVASPGFTKVFFLVTQRLSKFTWFIIFQIAAGPGLQISHTYMTQTV

SEQ ID NO: 81017 - DNA, 1038 bp, Arabidopsis thaliana
  misc_feature (1)..(1038): Ceres Seq. ID no. 12658113
  misc_feature: MA Experiment ID: 20000264 Result: Up-regulated in Transcription
  misc_feature: MA Experiment 20000264 PARAMETER Experiment Name: At_Open_Flower_P Parameter: Age (day) Value: 21
  misc_feature: MA Experiment 20000264 PARAMETER Experiment Name: At_Open_Flower_P Parameter: Plant Line Value: WS
  misc_feature: MA Experiment 20000264 PARAMETER Experiment Name: At_Open_Flower_P Parameter: Tissue Value: Open Flower vs. Whole Plant
  misc_feature: MA Experiment ID: 20000265 Result: Up-regulated in Transcription
  misc_feature: MA Experiment 20000265 PARAMETER Experiment Name: At_Open_Flower_P Parameter: Age (day) Value: 21
  misc_feature: MA Experiment 20000265 PARAMETER Experiment Name: At_Open_Flower_P Parameter: Plant Line Value: WS
  misc_feature: MA Experiment 20000265 PARAMETER Experiment Name: At_Open_Flower_P Parameter: Tissue Value: Closed Flower vs. Whole Plant
  misc_feature: MA Experiment ID: 20000286 Result: Up-regulated in Transcription
  misc_feature: MA Experiment 20000286 PARAMETER Experiment Name: At_Open_Flower_P Parameter: Age (day) Value: 21
  misc_feature: MA Experiment 20000286 PARAMETER Experiment Name: At_Open_Flower_P Parameter: Plant Line Value: WS
  misc_feature: MA Experiment 20000286 PARAMETER Experiment Name: At_Open_Flower_P Parameter: Tissue Value: Half Open vs. Whole Plant
  misc_feature: MA Experiment ID: 20000794 Result: Up-regulated in Transcription
  misc_feature: MA Experiment 20000794 PARAMETER Experiment Name: At_Petals_P Parameter: Age (day) Value: 23-25 days
  misc_feature: MA Experiment 20000794 PARAMETER Experiment Name: At_Petals_P Parameter: Plant Line Value: WS
  misc_feature: MA Experiment 20000794 PARAMETER Experiment Name: At_Petals_P Parameter: Tissue Value: Petals vs. Whole plant
  misc_feature: MA Experiment ID: 20001757 Result: Down-regulated in Transcription
  misc_feature: MA Experiment 20001757 PARAMETER Experiment Name: At_50mM_NH4NO3_L-to-H_P Parameter: Timepoint (hr) Value: 6
  misc_feature: MA Experiment 20001757 PARAMETER Experiment Name: At_50mM_NH4NO3_L-to-H_P Parameter: Tissue Value: Leaf
  misc_feature: MA Experiment 20001757 PARAMETER Experiment Name: At_50mM_NH4NO3_L-to-H_P Parameter: Treatment Value: 50mM NH4NO3 vs 100mM Mannitol
  misc_feature: MA Experiment ID: 20001904 Result: Up-regulated in Transcription
  misc_feature: MA Experiment 20001904 PARAMETER Experiment Name: At_Drought_Reproduction_P Parameter: Age (day) Value: 37
  misc_feature: MA Experiment 20001904 PARAMETER Experiment Name: At_Drought_Reproduction_P Parameter: Organism Value: A. thaliana
  misc_feature: MA Experiment 20001904 PARAMETER Experiment Name: At_Drought_Reproduction_P Parameter: Plant Line Value: WS
  misc_feature: MA Experiment 20001904 PARAMETER Experiment Name: At_Drought_Reproduction_P Parameter: Timepoint (day) Value: 7
  misc_feature: MA Experiment 20001904 PARAMETER Experiment Name: At_Drought_Reproduction_P Parameter: Tissue Value: Rosettes
  misc_feature: MA Experiment 20001904 PARAMETER Experiment Name: At_Drought_Reproduction_P Parameter: Treatment Value: Drought vs. No Drought
  misc_feature: MA Experiment ID: 20001910 Result: Up-regulated in Transcription
  misc_feature: MA Experiment 20001910 PARAMETER Experiment Name: At_Drought_Reproduction_P Parameter: Age (day) Value: 37
  misc_feature: MA Experiment 20001910 PARAMETER Experiment Name: At_Drought_Reproduction_P Parameter: Organism Value: A. thaliana
  misc_feature: MA Experiment 20001910 PARAMETER Experiment Name: At_Drought_Reproduction_P Parameter: Plant Line Value: WS
  misc_feature: MA Experiment 20001910 PARAMETER Experiment Name: At_Drought_Reproduction_P Parameter: Timepoint (day) Value: 7
  misc_feature: MA Experiment 20001910 PARAMETER Experiment Name: At_Drought_Reproduction_P Parameter: Tissue Value: Flowers
  misc_feature: MA Experiment 20001910 PARAMETER Experiment Name: At_Drought_Reproduction_P Parameter: Treatment Value: Drought vs. No Drought
atggccaaggtggtggtttacacgatactaaccgccaccatcatcttcctcatcctcctcgctcataagaaacaaaaccagactcaatccattgagggtctcataacccgccgcatcggacggaggcttgaaatgccggtgtttgaccctttggtgacccggattgagaggttgtctcatgagaaagaagctggtacgaagaccgtggaggctgcgaaagaggagaaagatgatatgtttgaggagtattttgcacaagagagaaggcttaacacgacaatgaggatcaagttcttgtttcctctgcttgacgcgtctccaagagatggctttgtgagcttgaaagagcttcagacatggatgatgcaacagacagaagacaacatggtttacagaaccgccaaagagcttgagctacaagataaggacaaggacggtgtcataactttcgaagagtacttgcctcaattctctaaacaagacattgagaaaaacgagaagggtcacggtgaagccggttggtggatggagcaattcaagaattctgattttgatcataatggctctctcgacattgaggagttcaacaatttcttgcaccctgaagacagcagaaacggagatacacaaagatgggttctaaaggagcgaatgacgggcatggacacgaacggtgatgggaagctagagtacaaagagtttgtaaaaaatgcatatgaaatgtataaagaattcgcaaagttcgagaaagaggaggatgagaatgtgccaacacctcagcttctgttcgcagagatggacagagacaaagacagattcctcgtggccgatgagcttcgacccattttgcaatatcttcaacctggtgagatgagttatgccaaattctattctactttcctttgccacgaggcggatgaggataaagatggtaaactatctcttgaagagatgttgcaccacgaagatgtcttttacaaggcagttcatcacgaagacttggacgacgaagactattttgatcatgatgaactctaa

SEQ ID NO: 81018 - protein, 345 aa, Arabidopsis thaliana
  peptide (1)..(345): Ceres Seq. ID no. 12658114
  misc_feature (174)..(202): Pfam Name: EF hand Pfam Description: EF hand
  misc_feature (1)..(345): Homolog of NCBI NO: 15234272 NR Description: putative calcium binding protein; protein id:
  misc_feature (9)..(345): Homolog of NCBI NO: 38345557 NR Description: OSJNBa0032F06.6 [Oryza sativa (japonica
  misc_feature (60)..(344): Homolog of NCBI NO: 18415883 NR Description: expressed protein; protein id: At5g08580.1, by cDNA: gi_16648868 [Arabidopsis thaliana]
  misc_feature (57)..(344): Homolog of NCBI NO: 34914276 NR Description: B1151A10.4 [Oryza sativa (japonica
  misc_feature (99)..(325): Homolog of NCBI NO: 39597980 NR Description: Hypothetical protein CBG14576 [Caenorhabditis
  misc_feature (99)..(325): Homolog of NCBI NO: 17568995 NR Description: Calumenin-like protein precursor (36.1 kD)
  misc_feature (56)..(344): Homolog of NCBI NO: 37904884 NR Description: skeletal muscle calumenin [Oryctolagus cuniculus]
  misc_feature (60)..(345): Homolog of NCBI NO: 7446006 NR Description: vitamin D receptor associated factor 1 - mouse
  misc_feature (60)..(345): Homolog of NCBI NO: 26346348 NR Description: unnamed protein product [Mus musculus]
  misc_feature (56)..(344): Homolog of NCBI NO: 8515718 NR Description: crocalbin-like protein [Homo sapiens]
MAKVVVYTILTATIIFLILLAHKKQNQTQSIEGLITRRIGRRLEMPVFDPLVTRIERLSHEKEAGTKTVEAAKEEKDDMFEEYFAQERRLNTTMRIKFLFPLLDASPRDGFVSLKELQTWMMQQTEDNMVYRTAKELELQDKDKDGVITFEEYLPQFSKQDIEKNEKGHGEAGWWMEQFKNSDFDHNGSLDIEEFNNFLHPEDSRNGDTQRWVLKERMTGMDTNGDGKLEYKEFVKNAYEMYKEFAKFEKEEDENVPTPQLLFAEMDRDKDRFLVADELRPILQYLQPGEMSYAKFYSTFLCHEADEDKDGKLSLEEMLHHEDVFYKAVHHEDLDDEDYFDHDEL

SEQ ID NO: 81019 - protein, 301 aa, Arabidopsis thaliana
  peptide (1)..(301): Ceres Seq. ID no. 12658115
  misc_feature (130)..(158): Pfam Name: EF hand Pfam Description: EF hand
  misc_feature (1)..(301): Homolog of NCBI NO: 15234272 NR Description: putative calcium binding protein; protein id:
  misc_feature (1)..(301): Homolog of NCBI NO: 38345557 NR Description: OSJNBa0032F06.6 [Oryza sativa (japonica
  misc_feature (16)..(300): Homolog of NCBI NO: 18415883 NR Description: expressed protein; protein id: At5g08580.1, by cDNA: gi_16648868 [Arabidopsis thaliana]
  misc_feature (13)..(300): Homolog of NCBI NO: 34914276 NR Description: B1151A10.4 [Oryza sativa (japonica
  misc_feature (55)..(281): Homolog of NCBI NO: 39597980 NR Description: Hypothetical protein CBG14576 [Caenorhabditis
  misc_feature (55)..(281): Homolog of NCBI NO: 17568995 NR Description: Calumenin-like protein precursor (36.1 kD)
  misc_feature (12)..(300): Homolog of NCBI NO: 37904884 NR Description: skeletal muscle calumenin [Oryctolagus cuniculus]
  misc_feature (16)..(301): Homolog of NCBI NO: 7446006 NR Description: vitamin D receptor associated factor 1 - mouse
  misc_feature (16)..(301): Homolog of NCBI NO: 26346348 NR Description: unnamed protein product [Mus musculus]
  misc_feature (12)..(300): Homolog of NCBI NO: 8515718 NR Description: crocalbin-like protein [Homo sapiens]
MPVFDPLVTRIERLSHEKEAGTKTVEAAKEEKDDMFEEYFAQERRLNTTMRIKFLFPLLDASPRDGFVSLKELQTWMMQQTEDNMVYRTAKELELQDKDKDGVITFEEYLPQFSKQDIEKNEKGHGEAGWWMEQFKNSDFDHNGSLDIEEFNNFLHPEDSRNGDTQRWVLKERMTGMDTNGDGKLEYKEFVKNAYEMYKEFAKFEKEEDENVPTPQLLFAEMDRDKDRFLVADELRPILQYLQPGEMSYAKFYSTFLCHEADEDKDGKLSLEEMLHHEDVFYKAVHHEDLDDEDYFDHDEL

SEQ ID NO: 81020 - protein, 267 aa, Arabidopsis thaliana
  peptide (1)..(267): Ceres Seq. ID no. 12658116
  misc_feature (96)..(124): Pfam Name: EF hand Pfam Description: EF hand
  misc_feature (1)..(267): Homolog of NCBI NO: 15234272 NR Description: putative calcium binding protein; protein id:
  misc_feature (1)..(267): Homolog of NCBI NO: 38345557 NR Description: OSJNBa0032F06.6 [Oryza sativa (japonica
  misc_feature (1)..(266): Homolog of NCBI NO: 18415883 NR Description: expressed protein; protein id: At5g08580.1, by cDNA: gi_16648868 [Arabidopsis thaliana]
  misc_feature (1)..(266): Homolog of NCBI NO: 34914276 NR Description: B1151A10.4 [Oryza sativa (japonica
  misc_feature (21)..(247): Homolog of NCBI NO: 39597980 NR Description: Hypothetical protein CBG14576 [Caenorhabditis
  misc_feature (21)..(247): Homolog of NCBI NO: 17568995 NR Description: Calumenin-like protein precursor (36.1 kD)
  misc_feature (1)..(266): Homolog of NCBI NO: 37904884 NR Description: skeletal muscle calumenin [Oryctolagus cuniculus]
  misc_feature (1)..(267): Homolog of NCBI NO: 7446006 NR Description: vitamin D receptor associated factor 1 - mouse
  misc_feature (1)..(267): Homolog of NCBI NO: 26346348 NR Description: unnamed protein product [Mus musculus]
  misc_feature (1)..(266): Homolog of NCBI NO: 8515718 NR Description: crocalbin-like protein [Homo sapiens]
MFEEYFAQERRLNTTMRIKFLFPLLDASPRDGFVSLKELQTWMMQQTEDNMVYRTAKELELQDKDKDGVITFEEYLPQFSKQDIEKNEKGHGEAGWWMEQFKNSDFDHNGSLDIEEFNNFLHPEDSRNGDTQRWVLKERMTGMDTNGDGKLEYKEFVKNAYEMYKEFAKFEKEEDENVPTPQLLFAEMDRDKDRFLVADELRPILQYLQPGEMSYAKFYSTFLCHEADEDKDGKLSLEEMLHHEDVFYKAVHHEDLDDEDYFDHDEL

SEQ ID NO: 81021 - DNA, 1527 bp, Arabidopsis thaliana
  misc_feature (1)..(1527): Ceres Seq. ID no. 12658117
  misc_feature: MA Experiment ID: 20000265 Result: Up-regulated in Transcription
  misc_feature: MA Experiment 20000265 PARAMETER Experiment Name: At_Open_Flower_P Parameter: Age (day) Value: 21
  misc_feature: MA Experiment 20000265 PARAMETER Experiment Name: At_Open_Flower_P Parameter: Plant Line Value: WS
  misc_feature: MA Experiment 20000265 PARAMETER Experiment Name: At_Open_Flower_P Parameter: Tissue Value: Closed Flower vs. Whole Plant
  misc_feature: MA Experiment ID: 20000286 Result: Up-regulated in Transcription
  misc_feature: MA Experiment 20000286 PARAMETER Experiment Name: At_Open_Flower_P Parameter: Age (day) Value: 21
  misc_feature: MA Experiment 20000286 PARAMETER Experiment Name: At_Open_Flower_P Parameter: Plant Line Value: WS
  misc_feature: MA Experiment 20000286 PARAMETER Experiment Name: At_Open_Flower_P Parameter: Tissue Value: Half Open vs. Whole Plant
  misc_feature: MA Experiment ID: 20000438 Result: Up-regulated in Transcription
  misc_feature: MA Experiment 20000438 PARAMETER Experiment Name: At_Shoots__P Parameter: Age (day) Value: 14
  misc_feature: MA Experiment 20000438 PARAMETER Experiment Name: At_Shoots__P Parameter: Tissue Value: Shoots vs. Whole Plant
  misc_feature: MA Experiment ID: 20001247 Result: Down-regulated in Transcription
  misc_feature: MA Experiment 20001247 PARAMETER Experiment Name: At_Far-red-induction_P Parameter: Age (day) Value: 7
  misc_feature: MA Experiment 20001247 PARAMETER Experiment Name: At_Far-red-induction_P Parameter: Light Value: Far-red vs. White
  misc_feature: MA Experiment 20001247 PARAMETER Experiment Name: At_Far-red-induction_P Parameter: Organism Value: A. thaliana
  misc_feature: MA Experiment 20001247 PARAMETER Experiment Name: At_Far-red-induction_P Parameter: Plant Line Value: Columbia
  misc_feature: MA Experiment 20001247 PARAMETER Experiment Name: At_Far-red-induction_P Parameter: Timepoint (hr) Value: 1
  misc_feature: MA Experiment 20001247 PARAMETER Experiment Name: At_Far-red-induction_P Parameter: Tissue Value: Whole Plant
  misc_feature: MA Experiment ID: 20001248 Result: Down-regulated in Transcription
  misc_feature: MA Experiment 20001248 PARAMETER Experiment Name: At_Far-red-induction_P Parameter: Age (day) Value: 7
  misc_feature: MA Experiment 20001248 PARAMETER Experiment Name: At_Far-red-induction_P Parameter: Light Value: Far-red vs. White
  misc_feature: MA Experiment 20001248 PARAMETER Experiment Name: At_Far-red-induction_P Parameter: Organism Value: A. thaliana
  misc_feature: MA Experiment 20001248 PARAMETER Experiment Name: At_Far-red-induction_P Parameter: Plant Line Value: Columbia
  misc_feature: MA Experiment 20001248 PARAMETER Experiment Name: At_Far-red-induction_P Parameter: Timepoint (hr) Value: 4
  misc_feature: MA Experiment 20001248 PARAMETER Experiment Name: At_Far-red-induction_P Parameter: Tissue Value: Whole Plant
  misc_feature: MA Experiment ID: 20001451 Result: Down-regulated in Transcription
  misc_feature: MA Experiment 20001451 PARAMETER Experiment Name: At_Far-red-induction_P Parameter: Age (day) Value: 7
  misc_feature: MA Experiment 20001451 PARAMETER Experiment Name: At_Far-red-induction_P Parameter: Light Value: Far-red vs. White
  misc_feature: MA Experiment 20001451 PARAMETER Experiment Name: At_Far-red-induction_P Parameter: Organism Value: A. thaliana
  misc_feature: MA Experiment 20001451 PARAMETER Experiment Name: At_Far-red-induction_P Parameter: Plant Line Value: Columbia
  misc_feature: MA Experiment 20001451 PARAMETER Experiment Name: At_Far-red-induction_P Parameter: Timepoint (hr) Value: 24
  misc_feature: MA Experiment 20001451 PARAMETER Experiment Name: At_Far-red-induction_P Parameter: Tissue Value: Whole Plant
atgaaacatttctctctacttttcatttttctggtcatcctcttggcaacaagctacagtgatgcctttaccagaaacagttttccaaaggatttcctcttcggagccgccacttctgcttatcagtgggaaggagctgttgctgaagatggaagaactcctagtgtctgggatactttctccaactcttacgatacaggtaatggagatgtaacatctgatgggtatcacaaatacaaggaagatgttaagctgatggcaacaatgggcttagaatcattcagattctctatctcctggtcaagacttatacctaatggaagaggactcattaatccaaaaggactattgttttacaacaatctcatcaaagacctaaaaagccatggaatcgaaccacatgttacactttaccactatgatcttcctcagtctcttgaagatgagtacggcggatggatcaaccgcaaaatcatagaagacttcactgcttatgcagatgtatgcttcagagagtttggggaggatgtgaagttatggactacaataaacgaagctacaattttcgccattggttcttatgaccaaggaaccgcgccgcctggacattgttctcctaataaattcgtcaattgttctactggaaattcttctacagaaccatatattgcaggccataacatattgctagctcatgcctctgcttcaaagttgtataaactaaagtacaagagtaagcagaaaggatccatagggcttagtatatttgcattcgggttatctccatatacaaactccaaggatgatgaaatcgcaactcaaagagctaaaactttcttatatggctggatgttgaagcctttggtatttggagactatccggatgaaatgaagaaaactgtgggatcgagattaccagttttctcagaggaagagtcagagcaagttaaaggatcatctgactttataggaattattcattacacaacattctatgtcacaaaccaccaaccttcagcttctctctttcccagcatgggtgaaggcttctttaaagacatgggaaattcttcttctttggatagccactgggaattcttcatttcttgtggtaaggctactccatggggtcttgaaggtattcttgagtatataaagcagagctataacaatcctccagtctatattcttgaaaatggtatgccgatggtacgcgattcgacactacaagacacacaaagaattgaatacattcaagcttacattgacgctgtactcaacgcaatgaagaatggatcggacacgagaggttactttgtatggtcgatggttgatgtgtatgagatattgagtggatatacgaccagcttcggaatgtaccatgtgaatttcagcgatcctggtcgcaagaggactccaaagctctctgcttcttggtacactggtttccttaatggtacaattgatgttgcttctcaagatactattcagttgtggagcaacttctctgtctcttcttcattgtaa

SEQ ID NO: 81022 - protein, 508 aa, Arabidopsis thaliana
  peptide (1)..(508): Ceres Seq. ID no. 12658118
  misc_feature (1)..(508): Homolog of NCBI NO: 30687750 NR Description: glycosyl hydrolase family 1 [Arabidopsis thaliana]
  misc_feature (1)..(508): Homolog of NCBI NO: 7435451 NR Description: beta-glucosidase homolog T27E11.60 - Arabidopsis
  misc_feature (1)..(508): Homolog of NCBI NO: 18417073 NR Description: glycosyl hydrolase family 1; protein id: supported by cDNA: gi_15982821 [Arabidopsis thaliana] AT4g27830/T27E11_70 [Arabidopsis thaliana]
  misc_feature (1)..(508): Homolog of NCBI NO: 7435452 NR Description: beta-glucosidase homolog T27E11.70 - Arabidopsis
  misc_feature (253)..(508): Homolog of NCBI NO: 11264268 NR Description: beta-glucosidase-like protein - Arabidopsis
  misc_feature (1)..(194): Homolog of NCBI NO: 11264268 NR Description: beta-glucosidase-like protein - Arabidopsis
  misc_feature (1)..(432): Homolog of NCBI NO: 22331910 NR Description: glycosyl hydrolase family 1; protein id:
  misc_feature (5)..(507): Homolog of NCBI NO: 22328869 NR Description: glycosyl hydrolase family 1; protein id:
  misc_feature (1)..(505): Homolog of NCBI NO: 22330338 NR Description: glycosyl hydrolase family 1; protein id:
  misc_feature (1)..(505): Homolog of NCBI NO: 25289447 NR Description: hypothetical protein T2K10.15 [imported] - thaliana >gi|4249391|gb|AAD14488.1|AAD14488 Similar to gi|3249076
MKHFSLLFIFLVILLATSYSDAFTRNSFPKDFLFGAATSAYQWEGAVAEDGRTPSVWDTFSNSYDTGNGDVTSDGYHKYKEDVKLMATMGLESFRFSISWSRLIPNGRGLINPKGLLFYNNLIKDLKSHGIEPHVTLYHYDLPQSLEDEYGGWINRKIIEDFTAYADVCFREFGEDVKLWTTINEATIFAIGSYDQGTAPPGHCSPNKFVNCSTGNSSTEPYIAGHNILLAHASASKLYKLKYKSKQKGSIGLSIFAFGLSPYTNSKDDEIATQRAKTFLYGWMLKPLVFGDYPDEMKKTVGSRLPVFSEEESEQVKGSSDFIGIIHYTTFYVTNHQPSASLFPSMGEGFFKDMGNSSSLDSHWEFFISCGKATPWGLEGILEYIKQSYNNPPVYILENGMPMVRDSTLQDTQRIEYIQAYIDAVLNAMKNGSDTRGYFVWSMVDVYEILSGYTTSFGMYHVNFSDPGRKRTPKLSASWYTGFLNGTIDVASQDTIQLWSNFSVSSSL

SEQ ID NO: 81023 - protein, 423 aa, Arabidopsis thaliana
  peptide (1)..(423): Ceres Seq. ID no. 12658119
  misc_feature (1)..(423): Homolog of NCBI NO: 30687750 NR Description: glycosyl hydrolase family 1 [Arabidopsis thaliana]
  misc_feature (1)..(423): Homolog of NCBI NO: 7435451 NR Description: beta-glucosidase homolog T27E11.60 - Arabidopsis
  misc_feature (1)..(423): Homolog of NCBI NO: 18417073 NR Description: glycosyl hydrolase family 1; protein id: supported by cDNA: gi_15982821 [Arabidopsis thaliana] AT4g27830/T27E11_70 [Arabidopsis thaliana]
  misc_feature (1)..(423): Homolog of NCBI NO: 7435452 NR Description: beta-glucosidase homolog T27E11.70 - Arabidopsis
  misc_feature (168)..(423): Homolog of NCBI NO: 11264268 NR Description: beta-glucosidase-like protein - Arabidopsis
  misc_feature (1)..(109): Homolog of NCBI NO: 11264268 NR Description: beta-glucosidase-like protein - Arabidopsis
  misc_feature (1)..(347): Homolog of NCBI NO: 22331910 NR Description: glycosyl hydrolase family 1; protein id:
  misc_feature (1)..(422): Homolog of NCBI NO: 22328869 NR Description: glycosyl hydrolase family 1; protein id:
  misc_feature (1)..(420): Homolog of NCBI NO: 22330338 NR Description: glycosyl hydrolase family 1; protein id:
  misc_feature (1)..(420): Homolog of NCBI NO: 25289447 NR Description: hypothetical protein T2K10.15 [imported] - thaliana >gi|4249391|gb|AAD14488.1|AAD14488 Similar to gi|3249076
MATMGLESFRFSISWSRLIPNGRGLINPKGLLFYNNLIKDLKSHGIEPHVTLYHYDLPQSLEDEYGGWINRKIIEDFTAYADVCFREFGEDVKLWTTINEATIFAIGSYDQGTAPPGHCSPNKFVNCSTGNSSTEPYIAGHNILLAHASASKLYKLKYKSKQKGSIGLSIFAFGLSPYTNSKDDEIATQRAKTFLYGWMLKPLVFGDYPDEMKKTVGSRLPVFSEEESEQVKGSSDFIGIIHYTTFYVTNHQPSASLFPSMGEGFFKDMGNSSSLDSHWEFFISCGKATPWGLEGILEYIKQSYNNPPVYILENGMPMVRDSTLQDTQRIEYIQAYIDAVLNAMKNGSDTRGYFVWSMVDVYEILSGYTTSFGMYHVNFSDPGRKRTPKLSASWYTGFLNGTIDVASQDTIQLWSNFSVSSSL

SEQ ID NO: 81024 - protein, 420 aa, Arabidopsis thaliana
  peptide (1)..(420): Ceres Seq. ID no. 12658120
  misc_feature (1)..(420): Homolog of NCBI NO: 30687750 NR Description: glycosyl hydrolase family 1 [Arabidopsis thaliana]
  misc_feature (1)..(420): Homolog of NCBI NO: 7435451 NR Description: beta-glucosidase homolog T27E11.60 - Arabidopsis
  misc_feature (1)..(420): Homolog of NCBI NO: 18417073 NR Description: glycosyl hydrolase family 1; protein id: supported by cDNA: gi_15982821 [Arabidopsis thaliana] AT4g27830/T27E11_70 [Arabidopsis thaliana]
  misc_feature (1)..(420): Homolog of NCBI NO: 7435452 NR Description: beta-glucosidase homolog T27E11.70 - Arabidopsis
  misc_feature (165)..(420): Homolog of NCBI NO: 11264268 NR Description: beta-glucosidase-like protein - Arabidopsis
  misc_feature (1)..(106): Homolog of NCBI NO: 11264268 NR Description: beta-glucosidase-like protein - Arabidopsis
  misc_feature (1)..(344): Homolog of NCBI NO: 22331910 NR Description: glycosyl hydrolase family 1; protein id:
  misc_feature (1)..(419): Homolog of NCBI NO: 22328869 NR Description: glycosyl hydrolase family 1; protein id:
  misc_feature (1)..(417): Homolog of NCBI NO: 22330338 NR Description: glycosyl hydrolase family 1; protein id:
  misc_feature (1)..(417): Homolog of NCBI NO: 25289447 NR Description: hypothetical protein T2K10.15 [imported] - thaliana >gi|4249391|gb|AAD14488.1|AAD14488 Similar to gi|3249076
MGLESFRFSISWSRLIPNGRGLINPKGLLFYNNLIKDLKSHGIEPHVTLYHYDLPQSLEDEYGGWINRKIIEDFTAYADVCFREFGEDVKLWTTINEATIFAIGSYDQGTAPPGHCSPNKFVNCSTGNSSTEPYIAGHNILLAHASASKLYKLKYKSKQKGSIGLSIFAFGLSPYTNSKDDEIATQRAKTFLYGWMLKPLVFGDYPDEMKKTVGSRLPVFSEEESEQVKGSSDFIGIIHYTTFYVTNHQPSASLFPSMGEGFFKDMGNSSSLDSHWEFFISCGKATPWGLEGILEYIKQSYNNPPVYILENGMPMVRDSTLQDTQRIEYIQAYIDAVLNAMKNGSDTRGYFVWSMVDVYEILSGYTTSFGMYHVNFSDPGRKRTPKLSASWYTGFLNGTIDVASQDTIQLWSNFSVSSSL

SEQ ID NO: 81025 - DNA, 1981 bp, Arabidopsis thaliana
  misc_feature (1)..(1981): Ceres Seq. ID no. 12658125
  misc_feature: MA Experiment ID: 20000179 Result: Up-regulated in Transcription
  misc_feature: MA Experiment 20000179 PARAMETER Experiment Name: At_Germinating_Seeds_P Parameter: Age (hr) Value: 6 vs. 0
  misc_feature: MA Experiment 20000179 PARAMETER Experiment Name: At_Germinating_Seeds_P Parameter: Tissue Value: Germinating Seeds
  misc_feature: MA Experiment ID: 20000180 Result: Up-regulated in Transcription
  misc_feature: MA Experiment 20000180 PARAMETER Experiment Name: At_Germinating_Seeds_P Parameter: Age (hr) Value: 24 vs. 0
  misc_feature: MA Experiment 20000180 PARAMETER Experiment Name: At_Germinating_Seeds_P Parameter: Tissue Value: Germinating Seeds
  misc_feature: MA Experiment ID: 20000185 Result: Up-regulated in Transcription
  misc_feature: MA Experiment 20000185 PARAMETER Experiment Name: At_Roots__P Parameter: Age (day) Value: 7 vs. 21
  misc_feature: MA Experiment 20000185 PARAMETER Experiment Name: At_Roots__P Parameter: Organism Value: A. thaliana
  misc_feature: MA Experiment 20000185 PARAMETER Experiment Name: At_Roots__P Parameter: Tissue Value: Roots vs. Whole Plant
  misc_feature: MA Experiment ID: 20000211 Result: Up-regulated in Transcription
  misc_feature: MA Experiment 20000211 PARAMETER Experiment Name: At_0.001percent_MeJA__P Parameter: Age (day) Value: 14
  misc_feature: MA Experiment 20000211 PARAMETER Experiment Name: At_0.001percent_MeJA__P Parameter: Organism Value: A. thaliana
  misc_feature: MA Experiment 20000211 PARAMETER Experiment Name: At_0.001percent_MeJA__P Parameter: Plant Line Value: WS
  misc_feature: MA Experiment 20000211 PARAMETER Experiment Name: At_0.001percent_MeJA__P Parameter: Timepoint (hr) Value: 1
  misc_feature: MA Experiment 20000211 PARAMETER Experiment Name: At_0.001percent_MeJA__P Parameter: Tissue Value: Aerial
  misc_feature: MA Experiment 20000211 PARAMETER Experiment Name: At_0.001percent_MeJA__P Parameter: Treatment Value: 0.001percent MeJA vs. No Treatment
  misc_feature: MA Experiment ID: 20000227 Result: Down-regulated in Transcription
  misc_feature: MA Experiment 20000227 PARAMETER Experiment Name: At_Root-Tips-vs-Tops_P Parameter: Tissue Value: Root Tips vs. Root Tops
  misc_feature: MA Experiment ID: 20000437 Result: Down-regulated in Transcription
  misc_feature: MA Experiment 20000437 PARAMETER Experiment Name: At_Drought_P Parameter: Age (day) Value: 8
  misc_feature: MA Experiment 20000437 PARAMETER Experiment Name: At_Drought_P Parameter: Organism Value: A. thaliana
  misc_feature: MA Experiment 20000437 PARAMETER Experiment Name: At_Drought_P Parameter: Plant Line Value: WS
  misc_feature: MA Experiment 20000437 PARAMETER Experiment Name: At_Drought_P Parameter: Timepoint (hr) Value: 24
  misc_feature: MA Experiment 20000437 PARAMETER Experiment Name: At_Drought_P Parameter: Tissue Value: Whole Plant
  misc_feature: MA Experiment 20000437 PARAMETER Experiment Name: At_Drought_P Parameter: Treatment Value: Drought vs. No Drought
  misc_feature: MA Experiment ID: 20000439 Result: Up-regulated in Transcription
  misc_feature: MA Experiment 20000439 PARAMETER Experiment Name: At_Roots__P Parameter: Age (day) Value: 14 vs. 21
  misc_feature: MA Experiment 20000439 PARAMETER Experiment Name: At_Roots__P Parameter: Organism Value: A. thaliana
  misc_feature: MA Experiment 20000439 PARAMETER Experiment Name: At_Roots__P Parameter: Tissue Value: Roots vs. Whole Plant
  misc_feature: MA Experiment ID: 20000452 Result: Up-regulated in Transcription
  misc_feature: MA Experiment 20000452 PARAMETER Experiment Name: At_CS6879_Shoots-Roots_P Parameter: Age (day) Value: 14
  misc_feature: MA Experiment 20000452 PARAMETER Experiment Name: At_CS6879_Shoots-Roots_P Parameter: Organism Value: A. thaliana
  misc_feature: MA Experiment 20000452 PARAMETER Experiment Name: At_CS6879_Shoots-Roots_P Parameter: Plant Line Value: CS6879 vs. WS
  misc_feature: MA Experiment 20000452 PARAMETER Experiment Name: At_CS6879_Shoots-Roots_P Parameter: Tissue Value: Shoots
  misc_feature: MA Experiment ID: 20001248 Result: Down-regulated in Transcription
  misc_feature: MA Experiment 20001248 PARAMETER Experiment Name: At_Far-red-induction_P Parameter: Age (day) Value: 7
  misc_feature: MA Experiment 20001248 PARAMETER Experiment Name: At_Far-red-induction_P Parameter: Light Value: Far-red vs. White
  misc_feature: MA Experiment 20001248 PARAMETER Experiment Name: At_Far-red-induction_P Parameter: Organism Value: A. thaliana
  misc_feature: MA Experiment 20001248 PARAMETER Experiment Name: At_Far-red-induction_P Parameter: Plant Line Value: Columbia
  misc_feature: MA Experiment 20001248 PARAMETER Experiment Name: At_Far-red-induction_P Parameter: Timepoint (hr) Value: 4
  misc_feature: MA Experiment 20001248 PARAMETER Experiment Name: At_Far-red-induction_P Parameter: Tissue Value: Whole Plant
  misc_feature: MA Experiment ID: 20001450 Result: Down-regulated in Transcription
  misc_feature: MA Experiment 20001450 PARAMETER Experiment Name: At_Far-red-induction_P Parameter: Age (day) Value: 7
  misc_feature: MA Experiment 20001450 PARAMETER Experiment Name: At_Far-red-induction_P Parameter: Light Value: Far-red vs. White
  misc_feature: MA Experiment 20001450 PARAMETER Experiment Name: At_Far-red-induction_P Parameter: Organism Value: A. thaliana
  misc_feature: MA Experiment 20001450 PARAMETER Experiment Name: At_Far-red-induction_P Parameter: Plant Line Value: Columbia
  misc_feature: MA Experiment 20001450 PARAMETER Experiment Name: At_Far-red-induction_P Parameter: Timepoint (hr) Value: 8
  misc_feature: MA Experiment 20001450 PARAMETER Experiment Name: At_Far-red-induction_P Parameter: Tissue Value: Whole Plant
  misc_feature: MA Experiment ID: 20001556 Result: Down-regulated in Transcription
  misc_feature: MA Experiment 20001556 PARAMETER Experiment Name: At_Drought_Soil_Dry_P Parameter: Age (day) Value: 26
  misc_feature: MA Experiment 20001556 PARAMETER Experiment Name: At_Drought_Soil_Dry_P Parameter: Organism Value: A. thaliana
  misc_feature: MA Experiment 20001556 PARAMETER Experiment Name: At_Drought_Soil_Dry_P Parameter: Plant Line Value: WS
  misc_feature: MA Experiment 20001556 PARAMETER Experiment Name: At_Drought_Soil_Dry_P Parameter: Post Timepoint (hr) Value: None
  misc_feature: MA Experiment 20001556 PARAMETER Experiment Name: At_Drought_Soil_Dry_P Parameter: Post-Treatment Value: None
  misc_feature: MA Experiment 20001556 PARAMETER Experiment Name: At_Drought_Soil_Dry_P Parameter: Timepoint (day) Value: 12
  misc_feature: MA Experiment 20001556 PARAMETER Experiment Name: At_Drought_Soil_Dry_P Parameter: Treatment Value: Drought vs. No Drought
gcttgtctccgatggatcccaccatgaatccaactccaactccaagctccgccggcaacagtgtctgcacagatgaattgaccaaccttcccccggaggactcgccactcgacagcgagaaggatgatagcgttgacttcagccaggagcaaggatcggagtcaaatgaagctattgacactgagaatggttcaagatccgtagacaagaaccaatactctgaaactgaagttgtagttagagcaaaagatttacagacagaacctgattcactggatgatgatgtggagattgtgatcaaaaaccaacataagtattacatatactgcccttgctgtggtgaagatatcaccaaaacagtcaagctcgtgaagatatcagatcccaaacacacaaaagaccatgacaaagctgttgacagtgacactgagaatggttcaaaatccaaagacaagaacacaaaggttccatcatggttctctgattttattcagccgctgttttcttctgaagacagaggaaagaaaggggttgttgattcagagttactaggaacttacgaagatctcggtatcattggtgaggaaccgagcatagatgtcagtaacgagaaagacagaccgagttttccaaagtggtacctcgatgtttttgcttggttattcctctgtattattattgctctttctgtcctttcgacttctccaccgcctttcattcaaccacatctgcaattaccatctatgcctacattgaggatgccttctgcttctgtacttttgttacttcccacatctgcggtgttgcttctcttcattatttcaatgaggtcccgtttcactccgagatatcacaaggagaaaggcgaggtcgttcccaagtctactgattccaagtctcacgatgaccaagctgcaaatactgatcaagattttgacaagaaaacagacaacaaaagaaatcgcctaactcctatatacccttcatcactagagaaaccttccaagcaaactgtcaataaggaaactcaaaatcacgataaagaagctgcagatcctgaccaagatgtagacaaggaaacagagaaccaaaaaagtcacctaactccgatatatccttcaccactggagcaaccttccaagcaaattatcaataaggaaactcaaacagaacctatgttgccacctaatgctcaatcagagatcccaaatagtgttgaaccacgcaaaggcggtaataaagtagaaattctgaaaagtattgtgtatggaggtcttacagaatccatcacaagcctatgcacggtaacatctgcggcagcttctggtgcttcaactctgaacgttttagccttgggagttgccaatttgtcaagcggtcttcttctgactgttcacagcctccaagaactaataaacgagaaacccagaaaacaaaccaacactgatgattctccagaagaaggagaaggagaagaagatcgatacgaggaagtactcgggagaagagagtattcgaggattcacagagtgatcgcaatctcttctttcgtcatcttcggattgatcccacctttagtatacggtttctcgtttcgaaaaaagatggaaaagagacaagagtacaaggttttagctgtttacgcagtgtctctactctgcatcgtcttgctctcaatagcgaaagcttacgtgtcgaagaaacgcgattatgtcaagactctgtttcggtacacgacgacggcgacgacggcgtcgggattctctcaatttgtgggatacttggtgagtcaatggcttgagaaaagcgggttttatgatgattctccagaaactcaacgagtttgaaacgagttcttgttcgtcttctcttcacttcccctgttcttttcgtactctttacgtggcccaatttattttccttaaaagtggtagaattgtttgattttgaccccaagaaaaaaaactttttttgtgtgcta

SEQ ID NO: 81026 - protein, 614 aa, Arabidopsis thaliana
  peptide (1)..(614): Ceres Seq. ID no. 12658126
  misc_feature (290)..(611): Homolog of NCBI NO: 15912253 NR Description: AT4g27870/T27E11_110 [Arabidopsis thaliana]
  misc_feature (290)..(611): Homolog of NCBI NO: 30687764 NR Description: expressed protein [Arabidopsis thaliana] AT4g27870/T27E11_110 [Arabidopsis thaliana]
  misc_feature (290)..(611): Homolog of NCBI NO: 7487471 NR Description: hypothetical protein T27E11.110 - Arabidopsis >gi|4972118|emb|CAB43975.1| putative protein [Arabidopsis >gi|7269640|emb|CAB81436.1| putative protein [Arabidopsis
  misc_feature (399)..(601): Homolog of NCBI NO: 30689371 NR Description: expressed protein [Arabidopsis thaliana] gene_id:MOP9.11~pir||T09026~similar to unknown protein thaliana] >gi|30725326|gb|AAP37685.1| At5g24290 [Arabidopsis
  misc_feature (399)..(601): Homolog of NCBI NO: 21592516 NR Description: unknown [Arabidopsis thaliana]
  misc_feature (399)..(601): Homolog of NCBI NO: 30689367 NR Description: expressed protein [Arabidopsis thaliana]
  misc_feature (330)..(594): Homolog of NCBI NO: 24413974 NR Description: contains ESTs to Arabidopsis thaliana protein T27E11.110~unknown protein [Oryza
LSPMDPTMNPTPTPSSAGNSVCTDELTNLPPEDSPLDSEKDDSVDFSQEQGSESNEAIDTENGSRSVDKNQYSETEVVVRAKDLQTEPDSLDDDVEIVIKNQHKYYIYCPCCGEDITKTVKLVKISDPKHTKDHDKAVDSDTENGSKSKDKNTKVPSWFSDFIQPLFSSEDRGKKGVVDSELLGTYEDLGIIGEEPSIDVSNEKDRPSFPKWYLDVFAWLFLCIIIALSVLSTSPPPFIQPHLQLPSMPTLRMPSASVLLLLPTSAVLLLFIISMRSRFTPRYHKEKGEVVPKSTDSKSHDDQAANTDQDFDKKTDNKRNRLTPIYPSSLEKPSKQTVNKETQNHDKEAADPDQDVDKETENQKSHLTPIYPSPLEQPSKQIINKETQTEPMLPPNAQSEIPNSVEPRKGGNKVEILKSIVYGGLTESITSLCTVTSAAASGASTLNVLALGVANLSSGLLLTVHSLQELINEKPRKQTNTDDSPEEGEGEEDRYEEVLGRREYSRIHRVIAISSFVIFGLIPPLVYGFSFRKKMEKRQEYKVLAVYAVSLLCIVLLSIAKAYVSKKRDYVKTLFRYTTTATTASGFSQFVGYLVSQWLEKSGFYDDSPETQRV

SEQ ID NO: 81027 - protein, 611 aa, Arabidopsis thaliana
  peptide (1)..(611): Ceres Seq. ID no. 12658127
  misc_feature (287)..(608): Homolog of NCBI NO: 15912253 NR Description: AT4g27870/T27E11_110 [Arabidopsis thaliana]
  misc_feature (287)..(608): Homolog of NCBI NO: 30687764 NR Description: expressed protein [Arabidopsis thaliana] AT4g27870/T27E11_110 [Arabidopsis thaliana]
  misc_feature (287)..(608): Homolog of NCBI NO: 7487471 NR Description: hypothetical protein T27E11.110 - Arabidopsis >gi|4972118|emb|CAB43975.1| putative protein [Arabidopsis >gi|7269640|emb|CAB81436.1| putative protein [Arabidopsis
  misc_feature (396)..(598): Homolog of NCBI NO: 30689371 NR Description: expressed protein [Arabidopsis thaliana] gene_id:MOP9.11~pir||T09026~similar to unknown protein thaliana] >gi|30725326|gb|AAP37685.1| At5g24290 [Arabidopsis
  misc_feature (396)..(598): Homolog of NCBI NO: 21592516 NR Description: unknown [Arabidopsis thaliana]
  misc_feature (396)..(598): Homolog of NCBI NO: 30689367 NR Description: expressed protein [Arabidopsis thaliana]
  misc_feature (327)..(591): Homolog of NCBI NO: 24413974 NR Description: contains ESTs to Arabidopsis thaliana protein T27E11.110~unknown protein [Oryza
MDPTMNPTPTPSSAGNSVCTDELTNLPPEDSPLDSEKDDSVDFSQEQGSESNEAIDTENGSRSVDKNQYSETEVVVRAKDLQTEPDSLDDDVEIVIKNQHKYYIYCPCCGEDITKTVKLVKISDPKHTKDHDKAVDSDTENGSKSKDKNTKVPSWFSDFIQPLFSSEDRGKKGVVDSELLGTYEDLGIIGEEPSIDVSNEKDRPSFPKWYLDVFAWLFLCIIIALSVLSTSPPPFIQPHLQLPSMPTLRMPSASVLLLLPTSAVLLLFIISMRSRFTPRYHKEKGEVVPKSTDSKSHDDQAANTDQDFDKKTDNKRNRLTPIYPSSLEKPSKQTVNKETQNHDKEAADPDQDVDKETENQKSHLTPIYPSPLEQPSKQIINKETQTEPMLPPNAQSEIPNSVEPRKGGNKVEILKSIVYGGLTESITSLCTVTSAAASGASTLNVLALGVANLSSGLLLTVHSLQELINEKPRKQTNTDDSPEEGEGEEDRYEEVLGRREYSRIHRVIAISSFVIFGLIPPLVYGFSFRKKMEKRQEYKVLAVYAVSLLCIVLLSIAKAYVSKKRDYVKTLFRYTTTATTASGFSQFVGYLVSQWLEKSGFYDDSPETQRV

SEQ ID NO: 81028 - protein, 607 aa, Arabidopsis thaliana
  peptide (1)..(607): Ceres Seq. ID no. 12658128
  misc_feature (283)..(604): Homolog of NCBI NO: 15912253 NR Description: AT4g27870/T27E11_110 [Arabidopsis thaliana]
  misc_feature (283)..(604): Homolog of NCBI NO: 30687764 NR Description: expressed protein [Arabidopsis thaliana] AT4g27870/T27E11_110 [Arabidopsis thaliana]
  misc_feature (283)..(604): Homolog of NCBI NO: 7487471 NR Description: hypothetical protein T27E11.110 - Arabidopsis >gi|4972118|emb|CAB43975.1| putative protein [Arabidopsis >gi|7269640|emb|CAB81436.1| putative protein [Arabidopsis
  misc_feature (392)..(594): Homolog of NCBI NO: 30689371 NR Description: expressed protein [Arabidopsis thaliana] gene_id:MOP9.11~pir||T09026~similar to unknown protein thaliana] >gi|30725326|gb|AAP37685.1| At5g24290 [Arabidopsis
  misc_feature (392)..(594): Homolog of NCBI NO: 21592516 NR Description: unknown [Arabidopsis thaliana]
  misc_feature (392)..(594): Homolog of NCBI NO: 30689367 NR Description: expressed protein [Arabidopsis thaliana]
  misc_feature (323)..(587): Homolog of NCBI NO: 24413974 NR Description: contains ESTs to Arabidopsis thaliana protein T27E11.110~unknown protein [Oryza
MNPTPTPSSAGNSVCTDELTNLPPEDSPLDSEKDDSVDFSQEQGSESNEAIDTENGSRSVDKNQYSETEVVVRAKDLQTEPDSLDDDVEIVIKNQHKYYIYCPCCGEDITKTVKLVKISDPKHTKDHDKAVDSDTENGSKSKDKNTKVPSWFSDFIQPLFSSEDRGKKGVVDSELLGTYEDLGIIGEEPSIDVSNEKDRPSFPKWYLDVFAWLFLCIIIALSVLSTSPPPFIQPHLQLPSMPTLRMPSASVLLLLPTSAVLLLFIISMRSRFTPRYHKEKGEVVPKSTDSKSHDDQAANTDQDFDKKTDNKRNRLTPIYPSSLEKPSKQTVNKETQNHDKEAADPDQDVDKETENQKSHLTPIYPSPLEQPSKQIINKETQTEPMLPPNAQSEIPNSVEPRKGGNKVEILKSIVYGGLTESITSLCTVTSAAASGASTLNVLALGVANLSSGLLLTVHSLQELINEKPRKQTNTDDSPEEGEGEEDRYEEVLGRREYSRIHRVIAISSFVIFGLIPPLVYGFSFRKKMEKRQEYKVLAVYAVSLLCIVLLSIAKAYVSKKRDYVKTLFRYTTTATTASGFSQFVGYLVSQWLEKSGFYDDSPETQRV

SEQ ID NO: 81029 - DNA, 2179 bp, Arabidopsis thaliana
  misc_feature (1)..(2179): Ceres Seq. ID no. 12658133
  misc_feature: MA Experiment ID: 20000180 Result: Down-regulated in Transcription
  misc_feature: MA Experiment 20000180 PARAMETER Experiment Name: At_Germinating_Seeds_P Parameter: Age (hr) Value: 24 vs. 0
  misc_feature: MA Experiment 20000180 PARAMETER Experiment Name: At_Germinating_Seeds_P Parameter: Tissue Value: Germinating Seeds
  misc_feature: MA Experiment ID: 20000184 Result: Down-regulated in Transcription
  misc_feature: MA Experiment 20000184 PARAMETER Experiment Name: At_Shoots__P Parameter: Age (day) Value: 7
  misc_feature: MA Experiment 20000184 PARAMETER Experiment Name: At_Shoots__P Parameter: Tissue Value: Shoots vs. Whole Plant
  misc_feature: MA Experiment ID: 20001905 Result: Up-regulated in Transcription
  misc_feature: MA Experiment 20001905 PARAMETER Experiment Name: At_Drought_Reproduction_P Parameter: Age (day) Value: 40
  misc_feature: MA Experiment 20001905 PARAMETER Experiment Name: At_Drought_Reproduction_P Parameter: Organism Value: A. thaliana
  misc_feature: MA Experiment 20001905 PARAMETER Experiment Name: At_Drought_Reproduction_P Parameter: Plant Line Value: WS
  misc_feature: MA Experiment 20001905 PARAMETER Experiment Name: At_Drought_Reproduction_P Parameter: Timepoint (day) Value: 10
  misc_feature: MA Experiment 20001905 PARAMETER Experiment Name: At_Drought_Reproduction_P Parameter: Tissue Value: Rosettes
  misc_feature: MA Experiment 20001905 PARAMETER Experiment Name: At_Drought_Reproduction_P Parameter: Treatment Value: Drought vs. No Drought
  misc_feature: MA Experiment ID: 20001911 Result: Up-regulated in Transcription
  misc_feature: MA Experiment 20001911 PARAMETER Experiment Name: At_Drought_Reproduction_P Parameter: Age (day) Value: 40
  misc_feature: MA Experiment 20001911 PARAMETER Experiment Name: At_Drought_Reproduction_P Parameter: Organism Value: A. thaliana
  misc_feature: MA Experiment 20001911 PARAMETER Experiment Name: At_Drought_Reproduction_P Parameter: Plant Line Value: WS
  misc_feature: MA Experiment 20001911 PARAMETER Experiment Name: At_Drought_Reproduction_P Parameter: Timepoint (day) Value: 10
  misc_feature: MA Experiment 20001911 PARAMETER Experiment Name: At_Drought_Reproduction_P Parameter: Tissue Value: Flowers
  misc_feature: MA Experiment 20001911 PARAMETER Experiment Name: At_Drought_Reproduction_P Parameter: Treatment Value: Drought vs. No Drought
gaagagacatcagatcttatcaaaaccctagctttcggtgtctctctcgatcctttagctcaatcgaaaactgaatttaggagctgcgatgggttccagatctcgtaatgataatttccagtccggcgatggcgctagtcctgggaaaatattcattggaggattgcacaaagacacgactaatactgtgttcaataagcactttggcaagtacggggagattacagattctgtcattatgcgagatcgacatactggacaacctaggggtttcggtttcatcaccttcgctgacccttctgttgttgacaaagttatcgaagatactcatgtcatcaatggcaaacaggttgagatcaaaaggactattccgaaaggtgctggtggcaatcagtcaaaggacatcaaaacaaagaagattttcgttggtggtataccctcaacggttacagaagatgaacttaaggacttctttgccaagtatgggaacgtggtggagcaccaggttattcgagaccatgaaacaaacaggtccagaggttttggttttgtaatttttgatagcgaagaagtcgtagatgaattattgtccaaaggaaacatgatcgatatggcagacactcaggtaagcttgtacaaatggggattagaattttggttcatgatgacatatttatcttggtttcaatttgatattttctccttgttcctttcattatacacgtttaacttagttagaattctacccactagcttaccaaatgtaaggagcttgtcacagtaagataggaaatccctgctatagtttgggtccttagcatagctaggttaattaagttgctttgttgtaggtggagatcaagaaagctgaaccaaagaaatctctaaaccgttcacctccttcttacggtagtcaccctagaggtcgttcttctaacgatagttatgcaagttatggtggaccttacggaggttttgatggagggtatggtcatcctccaggtcccattaggtcacatggaggtcctgctagtagatatgctgggggatatgggtatggtcgtggcagtgtaggccctgaatttggaggaggttataataattatgggggtggtagtttaggaggttaccggaatgaaccaccccttggctattctagtcgttttggaccctatgggagtgggtttggtggtgagggatatggccgtggaggagaaggagcctatttgggatatcctcgtggaggaggggaaggctatgggggatatggtgggcctggttacggcggtgcatatgaatctggtggcccaggtggcagttatgaaggagcaggtggtccatatgggaggggttatagtagcagtagtcgataccatccgtatgcaaggtagggtcgaggtaatagcaatcagttggagctatagaagcttctctcacaggttcctctagattgttccaattgctctaggtgcattctagagttatcatgtagcgccaacatcaggaagggttgctaaggacaggaagagcatcaaaaagcttttattagtcatcttttagttgtgtgtttacctaatttaagtgttgtcttatctctataacttagattgtgttatgtagactttagcatatttgggcttggagtttgtttctcactggcacaagaatgatttatcatttggtagtcttgttagatgatcaattactcgcttagcttagttttcacaatcatacgaattagcttaagaagctctgcaaaatgtgcactcatctattctttagagctcaagttgaatgctttatgtggtctcttgtatctctgtacattttgttgtgctgaacaaaggtttgacggcagttagtgcatgtgtaagtaggcatatttttgtcagctgcatacgtaggttctagctacaaattggaattgtatgtgtttgaaaacgtaaaatcaattataaatgtttttgaaaatcatctatacaagcatggttatttggttcttgtttccttattttttcgggtaagggccacggataattggttagacattggttctaataatgtgggttttgttatctgtaatttctcgtcaaaatgatgtactgtatcattaaatgaatatcacttattgtacatgcttttataagttaattgaaatccaaactcttttacgttttaa

SEQ ID NO: 81030 - protein, 231 aa, Arabidopsis thaliana
  peptide (1)..(231): Ceres Seq. ID no. 12658134
  misc_feature (21)..(90): Pfam Name: RNA recognition motif. (a.k.a. RRM, RBD, or RNP domain) Pfam Description: RNA recognition motif. (a.k.a. RRM, RBD, or RNP
  misc_feature (1)..(184): Homolog of NCBI NO: 30682553 NR Description: RNA recognition motif (RRM)-containing protein thaliana] >gi|11994764|dbj|BAB03120.1| contains similarity to RNA
  misc_feature (1)..(231): Homolog of NCBI NO: 30682550 NR Description: RNA recognition motif (RRM)-containing protein thaliana] >gi|17065240|gb|AAL32774.1| Unknown protein thaliana] >gi|20260060|gb|AAM13377.1| unknown protein
  misc_feature (14)..(184): Homolog of NCBI NO: 35215091 NR Description: putative heterogeneous nuclear ribonucleoprotein
  misc_feature (12)..(184): Homolog of NCBI NO: 15242719 NR Description: RRM-containing RNA-binding protein, putative; id: At5g40490.1 [Arabidopsis thaliana] contains similarity to RNA binding protein~gene_id:MNF13.1
  misc_feature (1)..(182): Homolog of NCBI NO: 15220810 NR Description: RRM-containing RNA-binding protein, putative;
  misc_feature (20)..(182): Homolog of NCBI NO: 8778468 NR Description: F1L3.34 [Arabidopsis thaliana]
  misc_feature (19)..(182): Homolog of NCBI NO: 15226106 NR Description: heterogeneous nuclear ribonucleoprotein(hnRNP), protein id: At2g33410.1 [Arabidopsis thaliana]
  misc_feature (2)..(167): Homolog of NCBI NO: 34740329 NR Description: heterogeneous nuclear ribonucleoprotein A3 [Homo >gi|34327775|gb|AAQ63629.1| heterogeneous nuclear
  misc_feature (20)..(180): Homolog of NCBI NO: 1710626 NR Description: Heterogeneous nuclear ribonucleoprotein A3
  misc_feature (19)..(182): Homolog of NCBI NO: 22328624 NR Description: heterogeneous nuclear ribonucleoprotein(hnRNP), protein id: At4g14300.1 [Arabidopsis thaliana]
MGSRSRNDNFQSGDGASPGKIFIGGLHKDTTNTVFNKHFGKYGEITDSVIMRDRHTGQPRGFGFITFADPSVVDKVIEDTHVINGKQVEIKRTIPKGAGGNQSKDIKTKKIFVGGIPSTVTEDELKDFFAKYGNVVEHQVIRDHETNRSRGFGFVIFDSEEVVDELLSKGNMIDMADTQVSLYKWGLEFWFMMTYLSWFQFDIFSLFLSLYTFNLVRILPTSLPNVRSLSQ

SEQ ID NO: 81031 - protein, 181 aa, Arabidopsis thaliana
  peptide (1)..(181): Ceres Seq. ID no. 12658135
  misc_feature (61)..(130): Pfam Name: RNA recognition motif. (a.k.a. RRM, RBD, or RNP domain) Pfam Description: RNA recognition motif. (a.k.a. RRM, RBD, or RNP
  misc_feature (1)..(134): Homolog of NCBI NO: 30682553 NR Description: RNA recognition motif (RRM)-containing protein thaliana] >gi|11994764|dbj|BAB03120.1| contains similarity to RNA
  misc_feature (1)..(181): Homolog of NCBI NO: 30682550 NR Description: RNA recognition motif (RRM)-containing protein thaliana] >gi|17065240|gb|AAL32774.1| Unknown protein thaliana] >gi|20260060|gb|AAM13377.1| unknown protein
  misc_feature (1)..(134): Homolog of NCBI NO: 35215091 NR Description: putative heterogeneous nuclear ribonucleoprotein
  misc_feature (1)..(134): Homolog of NCBI NO: 15242719 NR Description: RRM-containing RNA-binding protein, putative; id: At5g40490.1 [Arabidopsis thaliana] contains similarity to RNA binding protein~gene_id:MNF13.1
  misc_feature (1)..(132): Homolog of NCBI NO: 15220810 NR Description: RRM-containing RNA-binding protein, putative;
  misc_feature (1)..(132): Homolog of NCBI NO: 8778468 NR Description: F1L3.34 [Arabidopsis thaliana]
  misc_feature (1)..(132): Homolog of NCBI NO: 15226106 NR Description: heterogeneous nuclear ribonucleoprotein(hnRNP), protein id: At2g33410.1 [Arabidopsis thaliana]
  misc_feature (1)..(117): Homolog of NCBI NO: 34740329 NR Description: heterogeneous nuclear ribonucleoprotein A3 [Homo >gi|34327775|gb|AAQ63629.1| heterogeneous nuclear
  misc_feature (1)..(130): Homolog of NCBI NO: 1710626 NR Description: Heterogeneous nuclear ribonucleoprotein A3
  misc_feature (1)..(132): Homolog of NCBI NO: 22328624 NR Description: heterogeneous nuclear ribonucleoprotein(hnRNP), protein id: At4g14300.1 [Arabidopsis thaliana]
MRDRHTGQPRGFGFITFADPSVVDKVIEDTHVINGKQVEIKRTIPKGAGGNQSKDIKTKKIFVGGIPSTVTEDELKDFFAKYGNVVEHQVIRDHETNRSRGFGFVIFDSEEVVDELLSKGNMIDMADTQVSLYKWGLEFWFMMTYLSWFQFDIFSLFLSLYTFNLVRILPTSLPNVRSLSQ

SEQ ID NO: 81032 - protein, 148 aa, Arabidopsis thaliana
  peptide (1)..(148): Ceres Seq. ID no. 12658136
MIISSPAMALVLGKYSLEDCTKTRLILCSISTLASTGRLQILSLCEIDILDNLGVSVSSPSLTLLLLTKLSKILMSSMANRLRSKGLFRKVLVAISQRTSKQRRFSLVVYPQRLQKMNLRTSLPSMGTWWSTRLFETMKQTGPEVLVL

SEQ ID NO: 81033 - DNA, 870 bp, Arabidopsis thaliana
  misc_feature (1)..(870): Ceres Seq. ID no. 12658137
  misc_feature: MA Experiment ID: 20000315 Result: Down-regulated in Transcription
  misc_feature: MA Experiment 20000315 PARAMETER Experiment Name: At_14day_Shoots-Roots_Sub_P Parameter: Age (day) Value: 14
  misc_feature: MA Experiment 20000315 PARAMETER Experiment Name: At_14day_Shoots-Roots_Sub_P Parameter: Organism Value: A. thaliana
  misc_feature: MA Experiment 20000315 PARAMETER Experiment Name: At_14day_Shoots-Roots_Sub_P Parameter: Plant Line Value: WS
  misc_feature: MA Experiment 20000315 PARAMETER Experiment Name: At_14day_Shoots-Roots_Sub_P Parameter: Tissue Value: Shoots vs. Whole Plant
  misc_feature: MA Experiment ID: 20000355 Result: Down-regulated in Transcription
  misc_feature: MA Experiment 20000355 PARAMETER Experiment Name: At_Siliques_Sub_P Parameter: Age (day) Value: 21
  misc_feature: MA Experiment 20000355 PARAMETER Experiment Name: At_Siliques_Sub_P Parameter: Organism Value: A. thaliana
  misc_feature: MA Experiment 20000355 PARAMETER Experiment Name: At_Siliques_Sub_P Parameter: Plant Line Value: WS
  misc_feature: MA Experiment 20000355 PARAMETER Experiment Name: At_Siliques_Sub_P Parameter: Tissue Value: Less Than 5mm Siliques vs. Whole Plant
  misc_feature: MA Experiment ID: 20001807 Result: Down-regulated in Transcription
  misc_feature: MA Experiment 20001807 PARAMETER Experiment Name: At_50mM_NH4NO3_L-to-H_Sub_P Parameter: Timepoint (hr) Value: 6
  misc_feature: MA Experiment 20001807 PARAMETER Experiment Name: At_50mM_NH4NO3_L-to-H_Sub_P Parameter: Tissue Value: Leaf
  misc_feature: MA Experiment 20001807 PARAMETER Experiment Name: At_50mM_NH4NO3_L-to-H_Sub_P Parameter: Treatment Value: 50mM NH4NO3 vs 100mM Mannitol
atgtttaatcaatccagctctgtctcgttaatctacgtagttgaaatcgccaaaacaccacaaaacgtagacgtcacttggtctaaaaccacctcctcacattctttaaccatcaaaatcgagaacgtcaaagacgagcaacagaatcatcatcaaccggtgaagatagatctttcaggttcttcgttttgggccaaaaagggtctcaagagcttagaagctaacggaactagagtcgacgtatactgggattttcgtcaagccaaattctcgaacttccctgaaccttcctctggcttctacgtctctctcgtatcccaaaacgcaaccgttttaacgatcggggatttaaggaacgaagctttaaagaggacgaagaagaacccttcagctacagaagctgccttggtctccaagcaagaacacgtccacgggaaacgcgttttctacacgcggacggcgtttggcggtggggagtcgaggcgggagaatgaggtggtgatcgaaacatctctgtcgggtcctagcgatccagagatgtggatcacggtggacggtgtgccggcgattaggatcatgaatttgaattggagatttagagggaatgaggttgtgactgtgagtgatggtgtttctttggagatcttttgggacgttcatgattggctgtttgaaccctctggttcgtctagtgggttgtttgttttcaagcctaaagctggatttgaatctaaatgtcttagttttaatggtggctatggtgatggtgaaggtgaggatcatgatgtggaagatgacgattcgtcgcccaagtattgtcatgtcctatatgccgtcaaagaactagaatttccatgtcaaaaaaattag

SEQ ID NO: 81034 - protein, 289 aa, Arabidopsis thaliana
  peptide (1)..(289): Ceres Seq. ID no. 12658138
  misc_feature (1)..(281): Pfam Name: Plant protein of unknown function (DUF868) Pfam Description: Plant protein of unknown function (DUF868)
  misc_feature (1)..(289): Homolog of NCBI NO: 22331055 NR Description: hypothetical protein; protein id: At3g13229.1 thaliana] >gi|9294527|dbj|BAB02790.1|
  misc_feature (6)..(280): Homolog of NCBI NO: 15228105 NR Description: hypothetical protein; protein id: At2g04220.1 thaliana] >gi|20198211|gb|AAD27916.2| hypothetical protein thaliana] >gi|20198251|gb|AAM15482.1| hypothetical protein
  misc_feature (6)..(280): Homolog of NCBI NO: 15235452 NR Description: putative protein; protein id: At4g12690.1, by cDNA: 12923. [Arabidopsis thaliana] >gi|7459232|pir||T06627
  misc_feature (55)..(280): Homolog of NCBI NO: 25334990 NR Description: hypothetical protein At2g04220 [imported] -
  misc_feature (6)..(238): Homolog of NCBI NO: 15238927 NR Description: putative protein; protein id: At5g48270.1 thaliana] >gi|8777417|dbj|BAA97007.1|
  misc_feature (3)..(249): Homolog of NCBI NO: 18397034 NR Description: expressed protein; protein id: At3g04860.1, by cDNA: 5170., supported by cDNA: gi_16612260 [Arabidopsis
  misc_feature (3)..(250): Homolog of NCBI NO: 15241702 NR Description: putative protein; protein id: At5g28150.1, by cDNA: gi_19699076 [Arabidopsis thaliana] AT5g28150/T24G3_80 [Arabidopsis thaliana]
  misc_feature (3)..(249): Homolog of NCBI NO: 21593854 NR Description: unknown [Arabidopsis thaliana]
  misc_feature (11)..(238): Homolog of NCBI NO: 14719318 NR Description: hypothetical protein [Oryza sativa]
  misc_feature (55)..(239): Homolog of NCBI NO: 20804936 NR Description: P0456E05.14 [Oryza sativa (japonica
MFNQSSSVSLIYVVEIAKTPQNVDVTWSKTTSSHSLTIKIENVKDEQQNHHQPVKIDLSGSSFWAKKGLKSLEANGTRVDVYWDFRQAKFSNFPEPSSGFYVSLVSQNATVLTIGDLRNEALKRTKKNPSATEAALVSKQEHVHGKRVFYTRTAFGGGESRRENEVVIETSLSGPSDPEMWITVDGVPAIRIMNLNWRFRGNEVVTVSDGVSLEIFWDVHDWLFEPSGSSSGLFVFKPKAGFESKCLSFNGGYGDGEGEDHDVEDDDSSPKYCHVLYAVKELEFPCQKN

SEQ ID NO: 81035 - DNA, 1791 bp, Arabidopsis thaliana
  misc_feature (1)..(1791): Ceres Seq. ID no. 12658161
  misc_feature: MA Experiment ID: 20000327 Result: Up-regulated in Transcription
  misc_feature: MA Experiment 20000327 PARAMETER Experiment Name: At_42deg_Heat_Sub_P Parameter: Age (day) Value: 14
  misc_feature: MA Experiment 20000327 PARAMETER Experiment Name: At_42deg_Heat_Sub_P Parameter: Organism Value: A. thaliana
  misc_feature: MA Experiment 20000327 PARAMETER Experiment Name: At_42deg_Heat_Sub_P Parameter: Plant Line Value: WS
  misc_feature: MA Experiment 20000327 PARAMETER Experiment Name: At_42deg_Heat_Sub_P Parameter: Temperature (deg C) Value: 42 vs. 22
  misc_feature: MA Experiment 20000327 PARAMETER Experiment Name: At_42deg_Heat_Sub_P Parameter: Timepoint (hr) Value: 1
  misc_feature: MA Experiment 20000327 PARAMETER Experiment Name: At_42deg_Heat_Sub_P Parameter: Tissue Value: Aerial
  misc_feature: MA Experiment ID: 20000328 Result: Up-regulated in Transcription
  misc_feature: MA Experiment 20000328 PARAMETER Experiment Name: At_42deg_Heat_Sub_P Parameter: Age (day) Value: 14
  misc_feature: MA Experiment 20000328 PARAMETER Experiment Name: At_42deg_Heat_Sub_P Parameter: Organism Value: A. thaliana
  misc_feature: MA Experiment 20000328 PARAMETER Experiment Name: At_42deg_Heat_Sub_P Parameter: Plant Line Value: WS
  misc_feature: MA Experiment 20000328 PARAMETER Experiment Name: At_42deg_Heat_Sub_P Parameter: Temperature (deg C) Value: 42 vs. 22
  misc_feature: MA Experiment 20000328 PARAMETER Experiment Name: At_42deg_Heat_Sub_P Parameter: Timepoint (hr) Value: 6
  misc_feature: MA Experiment 20000328 PARAMETER Experiment Name: At_42deg_Heat_Sub_P Parameter: Tissue Value: Aerial
  misc_feature: MA Experiment ID: 20000347 Result: Down-regulated in Transcription
  misc_feature: MA Experiment 20000347 PARAMETER Experiment Name: At_2mM_SA_Sub_P Parameter: Age (day) Value: 14
  misc_feature: MA Experiment 20000347 PARAMETER Experiment Name: At_2mM_SA_Sub_P Parameter: Organism Value: A. thaliana
  misc_feature: MA Experiment 20000347 PARAMETER Experiment Name: At_2mM_SA_Sub_P Parameter: Plant Line Value: WS
  misc_feature: MA Experiment 20000347 PARAMETER Experiment Name: At_2mM_SA_Sub_P Parameter: Timepoint (hr) Value: 6
  misc_feature: MA Experiment 20000347 PARAMETER Experiment Name: At_2mM_SA_Sub_P Parameter: Tissue Value: Aerial
  misc_feature: MA Experiment 20000347 PARAMETER Experiment Name: At_2mM_SA_Sub_P Parameter: Treatment Value: 2mM SA vs. No Treatment
  misc_feature: MA Experiment ID: 20000349 Result: Down-regulated in Transcription
  misc_feature: MA Experiment 20000349 PARAMETER Experiment Name: At_100uM_ABA_Sub_P Parameter: Age (day) Value: 14
  misc_feature: MA Experiment 20000349 PARAMETER Experiment Name: At_100uM_ABA_Sub_P Parameter: Organism Value: A. thaliana
  misc_feature: MA Experiment 20000349 PARAMETER Experiment Name: At_100uM_ABA_Sub_P Parameter: Plant Line Value: WS
  misc_feature: MA Experiment 20000349 PARAMETER Experiment Name: At_100uM_ABA_Sub_P Parameter: Timepoint (hr) Value: 6
  misc_feature: MA Experiment 20000349 PARAMETER Experiment Name: At_100uM_ABA_Sub_P Parameter: Tissue Value: Aerial
  misc_feature: MA Experiment 20000349 PARAMETER Experiment Name: At_100uM_ABA_Sub_P Parameter: Treatment Value: 100uM ABA vs. No Treatment
  misc_feature: MA Experiment ID: 20001807 Result: Up-regulated in Transcription
  misc_feature: MA Experiment 20001807 PARAMETER Experiment Name: At_50mM_NH4NO3_L-to-H_Sub_P Parameter: Timepoint (hr) Value: 6
  misc_feature: MA Experiment 20001807 PARAMETER Experiment Name: At_50mM_NH4NO3_L-to-H_Sub_P Parameter: Tissue Value: Leaf
  misc_feature: MA Experiment 20001807 PARAMETER Experiment Name: At_50mM_NH4NO3_L-to-H_Sub_P Parameter: Treatment Value: 50mM NH4NO3 vs 100mM Mannitol
atggcatcgacattcactgccacgtcttcccttggttcgttgcttgctcccaatgctatcaagttgtcttctgcgactagcatctcttcaagctcgtttggaaggagacataacgtgtgcgtcagaagatcccgtcctgccatagtatgtgcagccaaggagttgcatttcaataaggatgggactaccataaggaaacttcagactggtgttaacaagctcgcggaccttgttggtgtcacacttggaccaaaagggagaaatgttgttcttgagagcaagtatggatccccaagaattgttaatgatggtgtcactgttgcgagggaggtcgagttggaggacccggttgagaacattggtgcaaagcttgtaaggcaagcagctgcaaagaccaatgacttggctggtgacggtacaacaacatctgttgttcttgcacaaggttttattgctgagggtgtcaaggtggtggctgcaggtgcgaaccctgtattgatcactagggggattgagaagactgcaaaggctttggttaacgagctgaaacttatgtctaaggaggttgaagacagtgaacttgctgatgtggcagctgttagtgcgggtaataaccacgaagttggaagtatgattgctgaagcaatgagcaaagtgggcaggaagggtgtggtgaccctggaggagggaaaaagcgctgagaacaacctttatgttgtggaaggaatgcaatttgaccgtggttatatctccccatactttgtgacagacagtgagaaaatgtctgttgagtatgacaattgcaagttgcttcttgttgacaagaaagtaaccaatgcaagggatcttgttggggttctagaggatgcgattagaggcggatacccaatcctcataattgcagaagatattgaacaagaagccttagctactcttgttgttaacaagcttagaggcacactgaagattgcagctctcaaagctcctggatttggagagcgcaagagccaataccttgacgatattgccattctaactggagcaactgtgatcagagaggaagttggtctttctcttgacaaagctggaaaagaggttctgggtaacgcttccaaggttgtcctgacaaaggaaatgacaacaattgtgggtgatgggaccacacaagaagcagtgaacaagcgtgttgtacagattaggaatcttattgagcaagcggagcaagactacgagaaggaaaaattaaatgagagaattgcgaagctctctggtggagttgctgtaattcaggttggagctcaaactgagacagagctcaaagaaaagaagctgagagtggaagatgctcttaatgctacaaaggctgctgttgaggaaggtattgtcgttggtggtggttgcactctgctccggcttgcatcaaaggtcgatgccatcaaggatacccttgaaaatgatgaagaaaaggttggagcggaaattgttaaaagagcactgagttaccctctgaaattgatagctaagaatgctggtgttaatggaagtgttgtcagcgagaaggtgctggctaacgataatgtgaaatttggatacaatgctgcaaccggcaagtatgaagacctgatggctgcaggcatcatcgacccgacaaaggttgtgagatgttgcttagaacatgccgcctcagttgcaaagacgttcttgatgtctgactgtgtggttgttgagatcccagagccagagccagttcctgctggtaacccaatggacaactcaggttatggatactaa

SEQ ID NO: 81036 - protein, 596 aa, Arabidopsis thaliana
  peptide (1)..(596): Ceres Seq. ID no. 12658162
  misc_feature (74)..(578): Pfam Name: TCP-1/cpn60 chaperonin family Pfam Description: TCP-1/cpn60 chaperonin family
  misc_feature (1)..(596): Homolog of NCBI NO: 15231255 NR Description: chaperonin 60 beta, putative; protein id: [Arabidopsis thaliana] >gi|9280299|dbj|BAB01754.1| GloEL protein;
  misc_feature (1)..(596): Homolog of NCBI NO: 15222729 NR Description: Rubisco subunit binding-protein beta subunit; id: At1g55490.1, supported by cDNA: gi_14423415, supported by gi_20148344 [Arabidopsis thaliana]
  misc_feature (1)..(596): Homolog of NCBI NO: 81601 NR Description: chaperonin 60 beta precursor - Arabidopsis
  misc_feature (1)..(584): Homolog of NCBI NO: 134104 NR Description: RuBisCO subunit binding-protein beta subunit,
  misc_feature (1)..(596): Homolog of NCBI NO: 7443855 NR Description: probable chaperonin 60 beta chain precursor,
  misc_feature (1)..(596): Homolog of NCBI NO: 30696748 NR Description: chaperonin, putative [Arabidopsis thaliana]
  misc_feature (1)..(596): Homolog of NCBI NO: 34897924 NR Description: ESTs C99033(E4350),C99032(E4350),D46006(S10372), correspond to a region of the predicted gene.~Similar to thaliana chromosome I BAC T5A14 genomic sequence; 60 KD
  misc_feature (1)..(595): Homolog of NCBI NO: 2506277 NR Description: RuBisCO subunit binding-protein beta subunit,
  misc_feature (98)..(596): Homolog of NCBI NO: 2493650 NR Description: RUBISCO SUBUNIT BINDING-PROTEIN BETA SUBUNIT (60
  misc_feature (13)..(588): Homolog of NCBI NO: 15222666 NR Description: chaperonin precursor, putative; protein id: [Arabidopsis thaliana] >gi|25300350|pir||E86388 probable
MASTFTATSSLGSLLAPNAIKLSSATSISSSSFGRRHNVCVRRSRPAIVCAAKELHFNKDGTTIRKLQTGVNKLADLVGVTLGPKGRNVVLESKYGSPRIVNDGVTVAREVELEDPVENIGAKLVRQAAAKTNDLAGDGTTTSVVLAQGFIAEGVKVVAAGANPVLITRGIEKTAKALVNELKLMSKEVEDSELADVAAVSAGNNHEVGSMIAEAMSKVGRKGVVTLEEGKSAENNLYVVEGMQFDRGYISPYFVTDSEKMSVEYDNCKLLLVDKKVTNARDLVGVLEDAIRGGYPILIIAEDIEQEALATLVVNKLRGTLKIAALKAPGFGERKSQYLDDIAILTGATVIREEVGLSLDKAGKEVLGNASKVVLTKEMTTIVGDGTTQEAVNKRVVQIRNLIEQAEQDYEKEKLNERIAKLSGGVAVIQVGAQTETELKEKKLRVEDALNATKAAVEEGIVVGGGCTLLRLASKVDAIKDTLENDEEKVGAEIVKRALSYPLKLIAKNAGVNGSVVSEKVLANDNVKFGYNAATGKYEDLMAAGIIDPTKVVRCCLEHAASVAKTFLMSDCVVVEIPEPEPVPAGNPMDNSGYGY

SEQ ID NO: 81037 - protein, 412 aa, Arabidopsis thaliana
  peptide (1)..(412): Ceres Seq. ID no. 12658163
  misc_feature (1)..(394): Pfam Name: TCP-1/cpn60 chaperonin family Pfam Description: TCP-1/cpn60 chaperonin family
  misc_feature (1)..(412): Homolog of NCBI NO: 15231255 NR Description: chaperonin 60 beta, putative; protein id: [Arabidopsis thaliana] >gi|9280299|dbj|BAB01754.1| GloEL protein;
  misc_feature (1)..(412): Homolog of NCBI NO: 15222729 NR Description: Rubisco subunit binding-protein beta subunit; id: At1g55490.1, supported by cDNA: gi_14423415, supported by gi_20148344 [Arabidopsis thaliana]
  misc_feature (1)..(412): Homolog of NCBI NO: 81601 NR Description: chaperonin 60 beta precursor - Arabidopsis
  misc_feature (1)..(400): Homolog of NCBI NO: 134104 NR Description: RuBisCO subunit binding-protein beta subunit,
  misc_feature (1)..(412): Homolog of NCBI NO: 7443855 NR Description: probable chaperonin 60 beta chain precursor,
  misc_feature (1)..(412): Homolog of NCBI NO: 30696748 NR Description: chaperonin, putative [Arabidopsis thaliana]
  misc_feature (1)..(412): Homolog of NCBI NO: 34897924 NR Description: ESTs C99033(E4350),C99032(E4350),D46006(S10372), correspond to a region of the predicted gene.~Similar to thaliana chromosome I BAC T5A14 genomic sequence; 60 KD
  misc_feature (1)..(411): Homolog of NCBI NO: 2506277 NR Description: RuBisCO subunit binding-protein beta subunit,
  misc_feature (1)..(412): Homolog of NCBI NO: 2493650 NR Description: RUBISCO SUBUNIT BINDING-PROTEIN BETA SUBUNIT (60
  misc_feature (1)..(404): Homolog of NCBI NO: 15222666 NR Description: chaperonin precursor, putative; protein id: [Arabidopsis thaliana] >gi|25300350|pir||E86388 probable
MSKEVEDSELADVAAVSAGNNHEVGSMIAEAMSKVGRKGVVTLEEGKSAENNLYVVEGMQFDRGYISPYFVTDSEKMSVEYDNCKLLLVDKKVTNARDLVGVLEDAIRGGYPILIIAEDIEQEALATLVVNKLRGTLKIAALKAPGFGERKSQYLDDIAILTGATVIREEVGLSLDKAGKEVLGNASKVVLTKEMTTIVGDGTTQEAVNKRVVQIRNLIEQAEQDYEKEKLNERIAKLSGGVAVIQVGAQTETELKEKKLRVEDALNATKAAVEEGIVVGGGCTLLRLASKVDAIKDTLENDEEKVGAEIVKRALSYPLKLIAKNAGVNGSVVSEKVLANDNVKFGYNAATGKYEDLMAAGIIDPTKVVRCCLEHAASVAKTFLMSDCVVVEIPEPEPVPAGNPMDNSGYGY

SEQ ID NO: 81038 - protein, 386 aa, Arabidopsis thaliana
  peptide (1)..(386): Ceres Seq. ID no. 12658164
  misc_feature (1)..(368): Pfam Name: TCP-1/cpn60 chaperonin family Pfam Description: TCP-1/cpn60 chaperonin family
  misc_feature (1)..(386): Homolog of NCBI NO: 15231255 NR Description: chaperonin 60 beta, putative; protein id: [Arabidopsis thaliana] >gi|9280299|dbj|BAB01754.1| GloEL protein;
  misc_feature (1)..(386): Homolog of NCBI NO: 15222729 NR Description: Rubisco subunit binding-protein beta subunit; id: At1g55490.1, supported by cDNA: gi_14423415, supported by gi_20148344 [Arabidopsis thaliana]
  misc_feature (1)..(386): Homolog of NCBI NO: 81601 NR Description: chaperonin 60 beta precursor - Arabidopsis
  misc_feature (1)..(374): Homolog of NCBI NO: 134104 NR Description: RuBisCO subunit binding-protein beta subunit,
  misc_feature (1)..(386): Homolog of NCBI NO: 7443855 NR Description: probable chaperonin 60 beta chain precursor,
  misc_feature (1)..(386): Homolog of NCBI NO: 30696748 NR Description: chaperonin, putative [Arabidopsis thaliana]
  misc_feature (1)..(386): Homolog of NCBI NO: 34897924 NR Description: ESTs C99033(E4350),C99032(E4350),D46006(S10372), correspond to a region of the predicted gene.~Similar to thaliana chromosome I BAC T5A14 genomic sequence; 60 KD
  misc_feature (1)..(385): Homolog of NCBI NO: 2506277 NR Description: RuBisCO subunit binding-protein beta subunit,
  misc_feature (1)..(386): Homolog of NCBI NO: 2493650 NR Description: RUBISCO SUBUNIT BINDING-PROTEIN BETA SUBUNIT (60
  misc_feature (1)..(378): Homolog of NCBI NO: 15222666 NR Description: chaperonin precursor, putative; protein id: [Arabidopsis thaliana] >gi|25300350|pir||E86388 probable
MIAEAMSKVGRKGVVTLEEGKSAENNLYVVEGMQFDRGYISPYFVTDSEKMSVEYDNCKLLLVDKKVTNARDLVGVLEDAIRGGYPILIIAEDIEQEALATLVVNKLRGTLKIAALKAPGFGERKSQYLDDIAILTGATVIREEVGLSLDKAGKEVLGNASKVVLTKEMTTIVGDGTTQEAVNKRVVQIRNLIEQAEQDYEKEKLNERIAKLSGGVAVIQVGAQTETELKEKKLRVEDALNATKAAVEEGIVVGGGCTLLRLASKVDAIKDTLENDEEKVGAEIVKRALSYPLKLIAKNAGVNGSVVSEKVLANDNVKFGYNAATGKYEDLMAAGIIDPTKVVRCCLEHAASVAKTFLMSDCVVVEIPEPEPVPAGNPMDNSGYGY

SEQ ID NO: 81039 - DNA, 800 bp, Arabidopsis thaliana
  misc_feature (1)..(800): Ceres Seq. ID no. 12658177
  misc_feature: MA Experiment ID: 20001451 Result: Down-regulated in Transcription
  misc_feature: MA Experiment 20001451 PARAMETER Experiment Name: At_Far-red-induction_P Parameter: Age (day) Value: 7
  misc_feature: MA Experiment 20001451 PARAMETER Experiment Name: At_Far-red-induction_P Parameter: Light Value: Far-red vs. White
  misc_feature: MA Experiment 20001451 PARAMETER Experiment Name: At_Far-red-induction_P Parameter: Organism Value: A. thaliana
  misc_feature: MA Experiment 20001451 PARAMETER Experiment Name: At_Far-red-induction_P Parameter: Plant Line Value: Columbia
  misc_feature: MA Experiment 20001451 PARAMETER Experiment Name: At_Far-red-induction_P Parameter: Timepoint (hr) Value: 24
  misc_feature: MA Experiment 20001451 PARAMETER Experiment Name: At_Far-red-induction_P Parameter: Tissue Value: Whole Plant
gatggagtgcgagcgaaacgatcaagtggtggattggataagcagagagtatcggaagacgacgacgacgggagatgatgacacctggcggaagcgggaggttgagaccgttaccgacggcgatgtacgccggatattcaggaacggcgtcgtcttgggtagcgaagacttcagtttctgcgtcagggaagaggatacagagggagatggctgagcttaacattgatccacctcctgattgctcagctggtccaaaaggagataatctctaccattggatcgccaccatcattggtccttcgggaactccctatgaaggagggatctttttcctggatataattttcccatctgattatccattcaagccacctaagttggtgttcaagactcggatttaccattgcaatgttgatactgcgggagatttaagtgtgaacattctaagagatagttggagtccagcccttacaatcactaaagtcttacaagccatcagatctatcttcttaaaacctgaaccctatagtccagctttaccggtgattgcacggctctacttgacagatagagaaaagcatgacgaggtagccaaagaatggacattgcgatttgccaagtgagatcttcaatacgaggaaaagacaactgatgtattataaatacacctagttctttggttagttaatggtcatcaatgtacattcataaaagtggaaccacaatgttagatggccaagaaaattgtttgctcagataataggcaacaatgtgaggtaggaccaatcctcaacaactcc

SEQ ID NO: 81040 - protein, 182 aa, Arabidopsis thaliana
  peptide (1)..(182): Ceres Seq. ID no. 12658178
  misc_feature (1)..(182): Homolog of NCBI NO: 22331064 NR Description: E2, ubiquitin-conjugating enzyme, putative; id: At3g13550.1, supported by cDNA: gi_20065778 [Arabidopsis >gi|9280307|dbj|BAB01762.1|
  misc_feature (32)..(182): Homolog of NCBI NO: 34393509 NR Description: putative elicitor inducible beta-1,3-glucanase
  misc_feature (9)..(181): Homolog of NCBI NO: 27503950 NR Description: Similar to ubiquitin-conjugating enzyme E2E 3,
  misc_feature (25)..(181): Homolog of NCBI NO: 1717850 NR Description: Ubiquitin-conjugating enzyme E2-23 kDa
  misc_feature (25)..(181): Homolog of NCBI NO: 5454146 NR Description: ubiquitin-conjugating enzyme E2E 3 (UBC4/5
  misc_feature (25)..(181): Homolog of NCBI NO: 39794483 NR Description: Unknown (protein for MGC:76120) [Silurana
  misc_feature (25)..(181): Homolog of NCBI NO: 40363453 NR Description: ubiquitin conjugating enzyme E2 [Xenopus laevis]
  misc_feature (23)..(181): Homolog of NCBI NO: 21450233 NR Description: hypothetical protein MGC28917 [Mus musculus]
  misc_feature (23)..(181): Homolog of NCBI NO: 22749327 NR Description: hypothetical protein FLJ25157 [Homo sapiens] unnamed protein product [Homo sapiens]
  misc_feature (23)..(181): Homolog of NCBI NO: 34869227 NR Description: similar to cDNA sequence BC016265 [Rattus
MMTPGGSGRLRPLPTAMYAGYSGTASSWVAKTSVSASGKRIQREMAELNIDPPPDCSAGPKGDNLYHWIATIIGPSGTPYEGGIFFLDIIFPSDYPFKPPKLVFKTRIYHCNVDTAGDLSVNILRDSWSPALTITKVLQAIRSIFLKPEPYSPALPVIARLYLTDREKHDEVAKEWTLRFAK

SEQ ID NO: 81041 - protein, 181 aa, Arabidopsis thaliana
  peptide (1)..(181): Ceres Seq. ID no. 12658179
  misc_feature (1)..(181): Homolog of NCBI NO: 22331064 NR Description: E2, ubiquitin-conjugating enzyme, putative; id: At3g13550.1, supported by cDNA: gi_20065778 [Arabidopsis >gi|9280307|dbj|BAB01762.1|
  misc_feature (31)..(181): Homolog of NCBI NO: 34393509 NR Description: putative elicitor inducible beta-1,3-glucanase
  misc_feature (8)..(180): Homolog of NCBI NO: 27503950 NR Description: Similar to ubiquitin-conjugating enzyme E2E 3,
  misc_feature (24)..(180): Homolog of NCBI NO: 1717850 NR Description: Ubiquitin-conjugating enzyme E2-23 kDa
  misc_feature (24)..(180): Homolog of NCBI NO: 5454146 NR Description: ubiquitin-conjugating enzyme E2E 3 (UBC4/5
  misc_feature (24)..(180): Homolog of NCBI NO: 39794483 NR Description: Unknown (protein for MGC:76120) [Silurana
  misc_feature (24)..(180): Homolog of NCBI NO: 40363453 NR Description: ubiquitin conjugating enzyme E2 [Xenopus laevis]
  misc_feature (22)..(180): Homolog of NCBI NO: 21450233 NR Description: hypothetical protein MGC28917 [Mus musculus]
  misc_feature (22)..(180): Homolog of NCBI NO: 22749327 NR Description: hypothetical protein FLJ25157 [Homo sapiens] unnamed protein product [Homo sapiens]
  misc_feature (22)..(180): Homolog of NCBI NO: 34869227 NR Description: similar to cDNA sequence BC016265 [Rattus
MTPGGSGRLRPLPTAMYAGYSGTASSWVAKTSVSASGKRIQREMAELNIDPPPDCSAGPKGDNLYHWIATIIGPSGTPYEGGIFFLDIIFPSDYPFKPPKLVFKTRIYHCNVDTAGDLSVNILRDSWSPALTITKVLQAIRSIFLKPEPYSPALPVIARLYLTDREKHDEVAKEWTLRFAK

SEQ ID NO: 81042 - protein, 166 aa, Arabidopsis thaliana; identical to SEQ ID NO: 78212
  peptide (1)..(166): Ceres Seq. ID no. 12658180
  misc_feature (1)..(166): Homolog of NCBI NO: 22331064 NR Description: E2, ubiquitin-conjugating enzyme, putative; id: At3g13550.1, supported by cDNA: gi_20065778 [Arabidopsis >gi|9280307|dbj|BAB01762.1|
  misc_feature (16)..(166): Homolog of NCBI NO: 34393509 NR Description: putative elicitor inducible beta-1,3-glucanase
  misc_feature (1)..(165): Homolog of NCBI NO: 27503950 NR Description: Similar to ubiquitin-conjugating enzyme E2E 3,
  misc_feature (9)..(165): Homolog of NCBI NO: 1717850 NR Description: Ubiquitin-conjugating enzyme E2-23 kDa
  misc_feature (9)..(165): Homolog of NCBI NO: 5454146 NR Description: ubiquitin-conjugating enzyme E2E 3 (UBC4/5
  misc_feature (9)..(165): Homolog of NCBI NO: 39794483 NR Description: Unknown (protein for MGC:76120) [Silurana
  misc_feature (9)..(165): Homolog of NCBI NO: 40363453 NR Description: ubiquitin conjugating enzyme E2 [Xenopus laevis]
  misc_feature (7)..(165): Homolog of NCBI NO: 21450233 NR Description: hypothetical protein MGC28917 [Mus musculus]
  misc_feature (7)..(165): Homolog of NCBI NO: 22749327 NR Description: hypothetical protein FLJ25157 [Homo sapiens] unnamed protein product [Homo sapiens]
  misc_feature (7)..(165): Homolog of NCBI NO: 34869227 NR Description: similar to cDNA sequence BC016265 [Rattus

SEQ ID NO: 81043 - DNA, 1086 bp, Arabidopsis thaliana
  misc_feature (1)..(1086): Ceres Seq. ID no. 12658181
  misc_feature: MA Experiment ID: 20000182 Result: Up-regulated in Transcription
  misc_feature: MA Experiment 20000182 PARAMETER Experiment Name: At_2mM_SA_P Parameter: Age (day) Value: 14
  misc_feature: MA Experiment 20000182 PARAMETER Experiment Name: At_2mM_SA_P Parameter: Organism Value: A. thaliana
  misc_feature: MA Experiment 20000182 PARAMETER Experiment Name: At_2mM_SA_P Parameter: Plant Line Value: WS
  misc_feature: MA Experiment 20000182 PARAMETER Experiment Name: At_2mM_SA_P Parameter: Timepoint (hr) Value: 6
  misc_feature: MA Experiment 20000182 PARAMETER Experiment Name: At_2mM_SA_P Parameter: Tissue Value: Aerial
  misc_feature: MA Experiment 20000182 PARAMETER Experiment Name: At_2mM_SA_P Parameter: Treatment Value: 2mM SA vs. No Treatment
  misc_feature: MA Experiment ID: 20000185 Result: Up-regulated in Transcription
  misc_feature: MA Experiment 20000185 PARAMETER Experiment Name: At_Roots__P Parameter: Age (day) Value: 7 vs. 21
  misc_feature: MA Experiment 20000185 PARAMETER Experiment Name: At_Roots__P Parameter: Organism Value: A. thaliana
  misc_feature: MA Experiment 20000185 PARAMETER Experiment Name: At_Roots__P Parameter: Tissue Value: Roots vs. Whole Plant
  misc_feature: MA Experiment ID: 20000227 Result: Down-regulated in Transcription
  misc_feature: MA Experiment 20000227 PARAMETER Experiment Name: At_Root-Tips-vs-Tops_P Parameter: Tissue Value: Root Tips vs. Root Tops
  misc_feature: MA Experiment ID: 20000267 Result: Down-regulated in Transcription
  misc_feature: MA Experiment 20000267 PARAMETER Experiment Name: At_Drought_P Parameter: Age (day) Value: 7
  misc_feature: MA Experiment 20000267 PARAMETER Experiment Name: At_Drought_P Parameter: Organism Value: A. thaliana
  misc_feature: MA Experiment 20000267 PARAMETER Experiment Name: At_Drought_P Parameter: Plant Line Value: WS
  misc_feature: MA Experiment 20000267 PARAMETER Experiment Name: At_Drought_P Parameter: Timepoint (hr) Value: 6
  misc_feature: MA Experiment 20000267 PARAMETER Experiment Name: At_Drought_P Parameter: Tissue Value: Whole Plant
  misc_feature: MA Experiment 20000267 PARAMETER Experiment Name: At_Drought_P Parameter: Treatment Value: Drought vs. No Drought
  misc_feature: MA Experiment ID: 20000269 Result: Up-regulated in Transcription
  misc_feature: MA Experiment 20000269 PARAMETER Experiment Name: At_1mM_KNO3_L-vs-H_Roots_P Parameter: Age (day) Value: 7,10,12
  misc_feature: MA Experiment 20000269 PARAMETER Experiment Name: At_1mM_KNO3_L-vs-H_Roots_P Parameter: Organism Value: A. thaliana
  misc_feature: MA Experiment 20000269 PARAMETER Experiment Name: At_1mM_KNO3_L-vs-H_Roots_P Parameter: Plant Line Value: WS
  misc_feature: MA Experiment 20000269 PARAMETER Experiment Name: At_1mM_KNO3_L-vs-H_Roots_P Parameter: Timepoint (day) Value: 7,10,12
  misc_feature: MA Experiment 20000269 PARAMETER Experiment Name: At_1mM_KNO3_L-vs-H_Roots_P Parameter: Tissue Value: Roots
  misc_feature: MA Experiment 20000269 PARAMETER Experiment Name: At_1mM_KNO3_L-vs-H_Roots_P Parameter: Treatment Value: 1mM KNO3 vs. 50mM KNO3
  misc_feature: MA Experiment ID: 20000436 Result: Down-regulated in Transcription
  misc_feature: MA Experiment 20000436 PARAMETER Experiment Name: At_Drought_P Parameter: Age (day) Value: 7
  misc_feature: MA Experiment 20000436 PARAMETER Experiment Name: At_Drought_P Parameter: Organism Value: A. thaliana
  misc_feature: MA Experiment 20000436 PARAMETER Experiment Name: At_Drought_P Parameter: Plant Line Value: WS
  misc_feature: MA Experiment 20000436 PARAMETER Experiment Name: At_Drought_P Parameter: Timepoint (hr) Value: 12
  misc_feature: MA Experiment 20000436 PARAMETER Experiment Name: At_Drought_P Parameter: Tissue Value: Whole Plant
  misc_feature: MA Experiment 20000436 PARAMETER Experiment Name: At_Drought_P Parameter: Treatment Value: Drought vs. No Drought
  misc_feature: MA Experiment ID: 20000437 Result: Down-regulated in Transcription
  misc_feature: MA Experiment 20000437 PARAMETER Experiment Name: At_Drought_P Parameter: Age (day) Value: 8
  misc_feature: MA Experiment 20000437 PARAMETER Experiment Name: At_Drought_P Parameter: Organism Value: A. thaliana
  misc_feature: MA Experiment 20000437 PARAMETER Experiment Name: At_Drought_P Parameter: Plant Line Value: WS
  misc_feature: MA Experiment 20000437 PARAMETER Experiment Name: At_Drought_P Parameter: Timepoint (hr) Value: 24
  misc_feature: MA Experiment 20000437 PARAMETER Experiment Name: At_Drought_P Parameter: Tissue Value: Whole Plant
  misc_feature: MA Experiment 20000437 PARAMETER Experiment Name: At_Drought_P Parameter: Treatment Value: Drought vs. No Drought
  misc_feature: MA Experiment ID: 20000439 Result: Up-regulated in Transcription
  misc_feature: MA Experiment 20000439 PARAMETER Experiment Name: At_Roots__P Parameter: Age (day) Value: 14 vs. 21
  misc_feature: MA Experiment 20000439 PARAMETER Experiment Name: At_Roots__P Parameter: Organism Value: A. thaliana
  misc_feature: MA Experiment 20000439 PARAMETER Experiment Name: At_Roots__P Parameter: Tissue Value: Roots vs. Whole Plant
  misc_feature: MA Experiment ID: 20000460 Result: Down-regulated in Transcription
  misc_feature: MA Experiment 20000460 PARAMETER Experiment Name: At_10percent_PEG_P Parameter: Age (day) Value: 12
  misc_feature: MA Experiment 20000460 PARAMETER Experiment Name: At_10percent_PEG_P Parameter: Organism Value: A. thaliana
  misc_feature: MA Experiment 20000460 PARAMETER Experiment Name: At_10percent_PEG_P Parameter: Plant Line Value: WS
  misc_feature: MA Experiment 20000460 PARAMETER Experiment Name: At_10percent_PEG_P Parameter: Timepoint (day) Value: 12
  misc_feature: MA Experiment 20000460 PARAMETER Experiment Name: At_10percent_PEG_P Parameter: Tissue Value: Whole Plant
  misc_feature: MA Experiment 20000460 PARAMETER Experiment Name: At_10percent_PEG_P Parameter: Treatment Value: 10percent PEG vs. No Treatment
  misc_feature: MA Experiment ID: 20000527 Result: Down-regulated in Transcription
  misc_feature: MA Experiment 20000527 PARAMETER Experiment Name: At_10percent_PEG_P Parameter: Age (day) Value: 20
  misc_feature: MA Experiment 20000527 PARAMETER Experiment Name: At_10percent_PEG_P Parameter: Organism Value: A. thaliana
  misc_feature: MA Experiment 20000527 PARAMETER Experiment Name: At_10percent_PEG_P Parameter: Plant Line Value: WS
  misc_feature: MA Experiment 20000527 PARAMETER Experiment Name: At_10percent_PEG_P Parameter: Timepoint (day) Value: 20
  misc_feature: MA Experiment 20000527 PARAMETER Experiment Name: At_10percent_PEG_P Parameter: Tissue Value: Whole Plant
  misc_feature: MA Experiment 20000527 PARAMETER Experiment Name: At_10percent_PEG_P Parameter: Treatment Value: 10percent PEG vs. No Treatment
  misc_feature: MA Experiment ID: 20000709 Result: Down-regulated in Transcription
  misc_feature: MA Experiment 20000709 PARAMETER Experiment Name: At_15mM_NH4NO3_L-to-H_P Parameter: Age (hr) Value: 14
  misc_feature: MA Experiment 20000709 PARAMETER Experiment Name: At_15mM_NH4NO3_L-to-H_P Parameter: Organism Value: A. thaliana
  misc_feature: MA Experiment 20000709 PARAMETER Experiment Name: At_15mM_NH4NO3_L-to-H_P Parameter: Plant Line Value: WS
  misc_feature: MA Experiment 20000709 PARAMETER Experiment Name: At_15mM_NH4NO3_L-to-H_P Parameter: Timepoint (hr) Value: 4
  misc_feature: MA Experiment 20000709 PARAMETER Experiment Name: At_15mM_NH4NO3_L-to-H_P Parameter: Tissue Value: Aerial
  misc_feature: MA Experiment 20000709 PARAMETER Experiment Name: At_15mM_NH4NO3_L-to-H_P Parameter: Treatment Value: 15mM NH4NO3 vs. 30mM Mannitol
  misc_feature: MA Experiment ID: 20001557 Result: Down-regulated in Transcription
  misc_feature: MA Experiment 20001557 PARAMETER Experiment Name: At_Drought_Soil_Dry_P Parameter: Age (day) Value: 27
  misc_feature: MA Experiment 20001557 PARAMETER Experiment Name: At_Drought_Soil_Dry_P Parameter: Organism Value: A. thaliana
  misc_feature: MA Experiment 20001557 PARAMETER Experiment Name: At_Drought_Soil_Dry_P Parameter: Plant Line Value: WS
  misc_feature: MA Experiment 20001557 PARAMETER Experiment Name: At_Drought_Soil_Dry_P Parameter: Post Timepoint (hr) Value: 3
  misc_feature: MA Experiment 20001557 PARAMETER Experiment Name: At_Drought_Soil_Dry_P Parameter: Post-Treatment Value: Re-Water vs. No Drought
  misc_feature: MA Experiment 20001557 PARAMETER Experiment Name: At_Drought_Soil_Dry_P Parameter: Timepoint (day) Value: 13
  misc_feature: MA Experiment 20001557 PARAMETER Experiment Name: At_Drought_Soil_Dry_P Parameter: Treatment Value: Drought vs. No Drought
atggctccaacactcttgacaacccaattctcaaatccagctgaagtaaccgactttgtagtctacaaaggaaatggtgttaagggtttatcagaaacaggaatcaaagctcttccagaacaatacattcagccacttgaagaacgactcatcaacaaattcgtcaacgaaacagatgaagccattccagttatcgatatgtcgaaccctgatgaggacagagtcgctgaagctgtttgtgatgctgctgagaaatgggggttctttcaagtgatcaatcatggagttcctttggaagttcttgatgacgtcaaggctgcgactcacaagttcttcaatctccctgttgaagagaagcgcaagttcactaaagagaattcgctgtcgacgactgttaggtttgggacgagttttagtcctcttgcagagcaagcgcttgagtggaaagattatctcagcctcttctttgtctctgaagctgaagctgaacagttctggcctgatatctgcaggaatgaaacgttagagtacattaacaagtcaaagaagatggtgaggaggcttctagagtatttgggaaagaatctcaatgttaaagagcttgacgagacgaaagaatcactctttatgggctcgattcgagtcaaccttaactactaccccatctgccctaatccggacctaacagttggtgttggtcgccactcagacgtctcttctctcaccattctcttacaagaccagatcggtggtctacacgtgcgttctctggcttcagggaactgggttcacgtgcctccggttgctggatcttttgtgatcaacatcggagatgcgatgcagatcatgagcaatggtctgtacaagagcgtggagcatcgtgtcttagccaatggttacaataatagaatctctgttcctatctttgtgaacccaaaaccagagtcagttattggtcctctacctgaggtgattgcaaacggagaggaaccgatttacagagacgtcctgtactctgattacgtcaagtatttcttcaggaaggcacacgatggaaagaaaaccgtcgattacgccaagatctga

SEQ ID NO: 81044 - protein, 361 aa, Arabidopsis thaliana
  peptide (1)..(361): Ceres Seq. ID no. 12658182
  misc_feature (211)..(312): Pfam Name: 2OG-Fe(II) oxygenase superfamily Pfam Description: 2OG-Fe(II) oxygenase superfamily
  misc_feature (1)..(361): Homolog of NCBI NO: 15231296 NR Description: unknown protein; protein id: At3g13610.1
  misc_feature (6)..(361): Homolog of NCBI NO: 15222690 NR Description: leucoanthocyanidin dioxygenase 2, putative; id: At1g55290.1 [Arabidopsis thaliana] >gi|25285688|pir||H96594
  misc_feature (10)..(360): Homolog of NCBI NO: 15230628 NR Description: hypothetical protein; protein id: At3g12900.1 thaliana] >gi|6997165|gb|AAF34829.1| hypothetical protein thaliana] >gi|9279774|dbj|BAB01419.1| gene_id:MJM20.4~similar to
  misc_feature (15)..(361): Homolog of NCBI NO: 18416826 NR Description: 1-AMINOCYCLOPROPANE-1-CARBOXYLATE OXIDASE-like
  misc_feature (79)..(361): Homolog of NCBI NO: 11022649 NR Description: 1-aminocyclopropane-1-carboxylate oxidase-like
  misc_feature (26)..(361): Homolog of NCBI NO: 30679748 NR Description: 2-oxoglutarate-dependent dioxygenase, putative thaliana] >gi|30102640|gb|AAP21238.1| At1g06620 [Arabidopsis
  misc_feature (27)..(357): Homolog of NCBI NO: 15224472 NR Description: putative anthocyanidin synthase; protein id: supported by cDNA: 256433., supported by cDNA: gi_17065133, by cDNA: gi_20259907 [Arabidopsis thaliana]
  misc_feature (27)..(357): Homolog of NCBI NO: 21554535 NR Description: putative anthocyanidin synthase [Arabidopsis
  misc_feature (26)..(361): Homolog of NCBI NO: 119640 NR Description: 1-AMINOCYCLOPROPANE-1-CARBOXYLATE OXIDASE HOMOLOG
  misc_feature (10)..(356): Homolog of NCBI NO: 15224576 NR Description: putative dioxygenase; protein id: At2g30840.1
MAPTLLTTQFSNPAEVTDFVVYKGNGVKGLSETGIKALPEQYIQPLEERLINKFVNETDEAIPVIDMSNPDEDRVAEAVCDAAEKWGFFQVINHGVPLEVLDDVKAATHKFFNLPVEEKRKFTKENSLSTTVRFGTSFSPLAEQALEWKDYLSLFFVSEAEAEQFWPDICRNETLEYINKSKKMVRRLLEYLGKNLNVKELDETKESLFMGSIRVNLNYYPICPNPDLTVGVGRHSDVSSLTILLQDQIGGLHVRSLASGNWVHVPPVAGSFVINIGDAMQIMSNGLYKSVEHRVLANGYNNRISVPIFVNPKPESVIGPLPEVIANGEEPIYRDVLYSDYVKYFFRKAHDGKKTVDYAKI

SEQ ID NO: 81045 - protein, 295 aa, Arabidopsis thaliana
  peptide (1)..(295): Ceres Seq. ID no. 12658183
  misc_feature (145)..(246): Pfam Name: 2OG-Fe(II) oxygenase superfamily Pfam Description: 2OG-Fe(II) oxygenase superfamily
  misc_feature (1)..(295): Homolog of NCBI NO: 15231296 NR Description: unknown protein; protein id: At3g13610.1
  misc_feature (1)..(295): Homolog of NCBI NO: 15222690 NR Description: leucoanthocyanidin dioxygenase 2, putative; id: At1g55290.1 [Arabidopsis thaliana] >gi|25285688|pir||H96594
  misc_feature (1)..(294): Homolog of NCBI NO: 15230628 NR Description: hypothetical protein; protein id: At3g12900.1 thaliana] >gi|6997165|gb|AAF34829.1| hypothetical protein thaliana] >gi|9279774|dbj|BAB01419.1| gene_id:MJM20.4~similar to
  misc_feature (1)..(295): Homolog of NCBI NO: 18416826 NR Description: 1-AMINOCYCLOPROPANE-1-CARBOXYLATE OXIDASE-like
  misc_feature (13)..(295): Homolog of NCBI NO: 11022649 NR Description: 1-aminocyclopropane-1-carboxylate oxidase-like
  misc_feature (1)..(295): Homolog of NCBI NO: 30679748 NR Description: 2-oxoglutarate-dependent dioxygenase, putative thaliana] >gi|30102640|gb|AAP21238.1| At1g06620 [Arabidopsis
  misc_feature (1)..(291): Homolog of NCBI NO: 15224472 NR Description: putative anthocyanidin synthase; protein id: supported by cDNA: 256433., supported by cDNA: gi_17065133, by cDNA: gi_20259907 [Arabidopsis thaliana]
  misc_feature (1)..(291): Homolog of NCBI NO: 21554535 NR Description: putative anthocyanidin synthase [Arabidopsis
  misc_feature (1)..(295): Homolog of NCBI NO: 119640 NR Description: 1-AMINOCYCLOPROPANE-1-CARBOXYLATE OXIDASE HOMOLOG
  misc_feature (1)..(290): Homolog of NCBI NO: 15224576 NR Description: putative dioxygenase; protein id: At2g30840.1
MSNPDEDRVAEAVCDAAEKWGFFQVINHGVPLEVLDDVKAATHKFFNLPVEEKRKFTKENSLSTTVRFGTSFSPLAEQALEWKDYLSLFFVSEAEAEQFWPDICRNETLEYINKSKKMVRRLLEYLGKNLNVKELDETKESLFMGSIRVNLNYYPICPNPDLTVGVGRHSDVSSLTILLQDQIGGLHVRSLASGNWVHVPPVAGSFVINIGDAMQIMSNGLYKSVEHRVLANGYNNRISVPIFVNPKPESVIGPLPEVIANGEEPIYRDVLYSDYVKYFFRKAHDGKKTVDYAKI

SEQ ID NO: 81046 - DNA, 498 bp, Arabidopsis thaliana
  misc_feature (1)..(498): Ceres Seq. ID no. 12658196
  misc_feature: MA Experiment ID: 20000264 Result: Up-regulated in Transcription
  misc_feature: MA Experiment 20000264 PARAMETER Experiment Name: At_Open_Flower_P Parameter: Age (day) Value: 21
  misc_feature: MA Experiment 20000264 PARAMETER Experiment Name: At_Open_Flower_P Parameter: Plant Line Value: WS
  misc_feature: MA Experiment 20000264 PARAMETER Experiment Name: At_Open_Flower_P Parameter: Tissue Value: Open Flower vs. Whole Plant
  misc_feature: MA Experiment ID: 20000265 Result: Up-regulated in Transcription
  misc_feature: MA Experiment 20000265 PARAMETER Experiment Name: At_Open_Flower_P Parameter: Age (day) Value: 21
  misc_feature: MA Experiment 20000265 PARAMETER Experiment Name: At_Open_Flower_P Parameter: Plant Line Value: WS
  misc_feature: MA Experiment 20000265 PARAMETER Experiment Name: At_Open_Flower_P Parameter: Tissue Value: Closed Flower vs. Whole Plant
  misc_feature: MA Experiment ID: 20000794 Result: Up-regulated in Transcription
  misc_feature: MA Experiment 20000794 PARAMETER Experiment Name: At_Petals_P Parameter: Age (day) Value: 23-25 days
  misc_feature: MA Experiment 20000794 PARAMETER Experiment Name: At_Petals_P Parameter: Plant Line Value: WS
  misc_feature: MA Experiment 20000794 PARAMETER Experiment Name: At_Petals_P Parameter: Tissue Value: Petals vs. Whole plant
  misc_feature: MA Experiment ID: 20001910 Result: Up-regulated in Transcription
  misc_feature: MA Experiment 20001910 PARAMETER Experiment Name: At_Drought_Reproduction_P Parameter: Age (day) Value: 37
  misc_feature: MA Experiment 20001910 PARAMETER Experiment Name: At_Drought_Reproduction_P Parameter: Organism Value: A. thaliana
  misc_feature: MA Experiment 20001910 PARAMETER Experiment Name: At_Drought_Reproduction_P Parameter: Plant Line Value: WS
  misc_feature: MA Experiment 20001910 PARAMETER Experiment Name: At_Drought_Reproduction_P Parameter: Timepoint (day) Value: 7
  misc_feature: MA Experiment 20001910 PARAMETER Experiment Name: At_Drought_Reproduction_P Parameter: Tissue Value: Flowers
  misc_feature: MA Experiment 20001910 PARAMETER Experiment Name: At_Drought_Reproduction_P Parameter: Treatment Value: Drought vs. No Drought
atgccaaacctcatcctcatcctcgccgctcaaatcctcctctttaccaccgttgcctccgttggagattttgctaaagaaatgaacccgaaaaggttccacaagaaggagaaactcacccatctccgaaaggcggtttcaaactcctcaacctccttcggatcaatcacaatgacggacaacgcactaacatctgatgtgcccgttaactcgactgtggtaggccagtcccaaggtttttacgctggagcggcccaacgtgagctaggcttcttgatggcgatgaatttcgctttcaaaacagggaagtacaatgggagtacgatcacaattcttggccggaacacggtgttctcgaaggttagggaaatgacggtggtcggaggaagtggaatcttccggttagctagaggttatgtcgaggctaggactaagtggttcgatcctaagacaggagacgccactgttgaatacaattgttatgtcttgcattactga

SEQ ID NO: 81047 - protein, 165 aa, Arabidopsis thaliana
  peptide (1)..(165): Ceres Seq. ID no. 12658197
  misc_feature (42)..(164): Pfam Name: Dirigent-like protein Pfam Description: Dirigent-like protein
  misc_feature (1)..(165): Homolog of NCBI NO: 15231315 NR Description: disease resistance response protein-related/
  misc_feature (42)..(165): Homolog of NCBI NO: 15231318 NR Description: disease resistance response protein-related/
  misc_feature (1)..(49): Homolog of NCBI NO: 15231318 NR Description: disease resistance response protein-related/
  misc_feature (42)..(165): Homolog of NCBI NO: 15222673 NR Description: disease resistance response protein-related/
  misc_feature (48)..(165): Homolog of NCBI NO: 15239779 NR Description: disease resistance response protein-related/
  misc_feature (49)..(165): Homolog of NCBI NO: 22135914 NR Description: unknown protein [Arabidopsis thaliana]
  misc_feature (46)..(165): Homolog of NCBI NO: 15231302 NR Description: disease resistance response protein-related/
  misc_feature (50)..(165): Homolog of NCBI NO: 15217886 NR Description: disease resistance response protein-related/
  misc_feature (49)..(164): Homolog of NCBI NO: 30681257 NR Description: disease resistance response protein-related/
  misc_feature (49)..(159): Homolog of NCBI NO: 25412014 NR Description: probable disease resistance response protein - Arabidopsis thaliana >gi|4803933|gb|AAD29806.1| putative
MPNLILILAAQILLFTTVASVGDFAKEMNPKRFHKKEKLTHLRKAVSNSSTSFGSITMTDNALTSDVPVNSTVVGQSQGFYAGAAQRELGFLMAMNFAFKTGKYNGSTITILGRNTVFSKVREMTVVGGSGIFRLARGYVEARTKWFDPKTGDATVEYNCYVLHY

SEQ ID NO: 81048 - protein, 138 aa, Arabidopsis thaliana
  peptide (1)..(138): Ceres Seq. ID no. 12658198
  misc_feature (15)..(137): Pfam Name: Dirigent-like protein Pfam Description: Dirigent-like protein
  misc_feature (1)..(138): Homolog of NCBI NO: 15231315 NR Description: disease resistance response protein-related/
  misc_feature (15)..(138): Homolog of NCBI NO: 15231318 NR Description: disease resistance response protein-related/
  misc_feature (1)..(22): Homolog of NCBI NO: 15231318 NR Description: disease resistance response protein-related/
  misc_feature (15)..(138): Homolog of NCBI NO: 15222673 NR Description: disease resistance response protein-related/
  misc_feature (21)..(138): Homolog of NCBI NO: 15239779 NR Description: disease resistance response protein-related/
  misc_feature (22)..(138): Homolog of NCBI NO: 22135914 NR Description: unknown protein [Arabidopsis thaliana]
  misc_feature (19)..(138): Homolog of NCBI NO: 15231302 NR Description: disease resistance response protein-related/
  misc_feature (23)..(138): Homolog of NCBI NO: 15217886 NR Description: disease resistance response protein-related/
  misc_feature (22)..(137): Homolog of NCBI NO: 30681257 NR Description: disease resistance response protein-related/
  misc_feature (22)..(132): Homolog of NCBI NO: 25412014 NR Description: probable disease resistance response protein - Arabidopsis thaliana >gi|4803933|gb|AAD29806.1| putative
MNPKRFHKKEKLTHLRKAVSNSSTSFGSITMTDNALTSDVPVNSTVVGQSQGFYAGAAQRELGFLMAMNFAFKTGKYNGSTITILGRNTVFSKVREMTVVGGSGIFRLARGYVEARTKWFDPKTGDATVEYNCYVLHY

SEQ ID NO: 81049 - protein, 108 aa, Arabidopsis thaliana
  peptide (1)..(108): Ceres Seq. ID no. 12658199
  misc_feature (1)..(107): Pfam Name: Dirigent-like protein Pfam Description: Dirigent-like protein
  misc_feature (1)..(108): Homolog of NCBI NO: 15231315 NR Description: disease resistance response protein-related/
  misc_feature (1)..(108): Homolog of NCBI NO: 15231318 NR Description: disease resistance response protein-related/
  misc_feature (1)..(108): Homolog of NCBI NO: 15222673 NR Description: disease resistance response protein-related/
  misc_feature (1)..(108): Homolog of NCBI NO: 15239779 NR Description: disease resistance response protein-related/
  misc_feature (1)..(108): Homolog of NCBI NO: 22135914 NR Description: unknown protein [Arabidopsis thaliana]
  misc_feature (1)..(108): Homolog of NCBI NO: 15231302 NR Description: disease resistance response protein-related/
  misc_feature (1)..(108): Homolog of NCBI NO: 15217886 NR Description: disease resistance response protein-related/
  misc_feature (1)..(107): Homolog of NCBI NO: 30681257 NR Description: disease resistance response protein-related/
  misc_feature (1)..(102): Homolog of NCBI NO: 25412014 NR Description: probable disease resistance response protein - Arabidopsis thaliana >gi|4803933|gb|AAD29806.1| putative
  misc_feature (1)..(107): Homolog of NCBI NO: 15218836 NR Description: disease resistance response protein-related/
MTDNALTSDVPVNSTVVGQSQGFYAGAAQRELGFLMAMNFAFKTGKYNGSTITILGRNTVFSKVREMTVVGGSGIFRLARGYVEARTKWFDPKTGDATVEYNCYVLHY

SEQ ID NO: 81050 - DNA, 567 bp, Arabidopsis thaliana
  misc_feature (1)..(567): Ceres Seq. ID no. 12658215
  misc_feature: MA Experiment ID: 20000315 Result: Up-regulated in Transcription
  misc_feature: MA Experiment 20000315 PARAMETER Experiment Name: At_14day_Shoots-Roots_Sub_P Parameter: Age (day) Value: 14
  misc_feature: MA Experiment 20000315 PARAMETER Experiment Name: At_14day_Shoots-Roots_Sub_P Parameter: Organism Value: A. thaliana
  misc_feature: MA Experiment 20000315 PARAMETER Experiment Name: At_14day_Shoots-Roots_Sub_P Parameter: Plant Line Value: WS
  misc_feature: MA Experiment 20000315 PARAMETER Experiment Name: At_14day_Shoots-Roots_Sub_P Parameter: Tissue Value: Shoots vs. Whole Plant
  misc_feature: MA Experiment ID: 20000355 Result: Down-regulated in Transcription
  misc_feature: MA Experiment 20000355 PARAMETER Experiment Name: At_Siliques_Sub_P Parameter: Age (day) Value: 21
  misc_feature: MA Experiment 20000355 PARAMETER Experiment Name: At_Siliques_Sub_P Parameter: Organism Value: A. thaliana
  misc_feature: MA Experiment 20000355 PARAMETER Experiment Name: At_Siliques_Sub_P Parameter: Plant Line Value: WS
  misc_feature: MA Experiment 20000355 PARAMETER Experiment Name: At_Siliques_Sub_P Parameter: Tissue Value: Less Than 5mm Siliques vs. Whole Plant
atggcgaacaacgacgagattaccacgtcgtctcatgcatctccggcagtgaatcacgagtctatctcacgcgctaagcaacgtatcaaagacggactagccacgcgccgctcctggagggtgatgttcgatttacactccacgggactacctcacggcgtctccgatgttttctcaagaatcaagacaaatcttgcttacttccgtagtaattacgcaatcgtaatcttgaacgtcatattcttcagcttgatttggcatccgacctcgctcatcgtctttaccggtttggttttcctatggatcttcctttattttctccgtgatgtgcctctcaaggtgttcaggtttcaaatcgacgatcgtgcggtcttgattggtctatcggtgattaccatcgttctacttctattgaccaacgcgacgtttaatattgttgcggcgttgatggccggagctgtgttggttctgatccatgcggtgattaggaagacggatgatctttttttggatgaagaagcggcgacgactgagacttcaggactgacgtcacacccttcgtcttaa

SEQ ID NO: 81051 - protein, 188 aa, Arabidopsis thaliana
  peptide (1)..(188): Ceres Seq. ID no. 12658216
  misc_feature (1)..(188): Homolog of NCBI NO: 15231332 NR Description: unknown protein; protein id: At3g13710.1 thaliana] >gi|9294017|dbj|BAB01920.1|
  misc_feature (1)..(188): Homolog of NCBI NO: 21617895 NR Description: unknown [Arabidopsis thaliana]
  misc_feature (1)..(188): Homolog of NCBI NO: 18400140 NR Description: expressed protein; protein id: At3g13720.1, by cDNA: 8544. [Arabidopsis thaliana] >gi|9294018|dbj|BAB01921.1|
  misc_feature (1)..(188): Homolog of NCBI NO: 18405248 NR Description: expressed protein; protein id: At1g55190.1, by cDNA: 21940. [Arabidopsis thaliana] >gi|25347725|pir||F96593
  misc_feature (9)..(175): Homolog of NCBI NO: 15220814 NR Description: hypothetical protein; protein id: At1g17700.1
  misc_feature (13)..(172): Homolog of NCBI NO: 34903576 NR Description: P0419B01.1 [Oryza sativa (japonica
  misc_feature (2)..(184): Homolog of NCBI NO: 18390939 NR Description: expressed protein; protein id: At1g08770.1, by cDNA: 7188. [Arabidopsis thaliana] >gi|7485990|pir||T00733
  misc_feature (23)..(175): Homolog of NCBI NO: 21594668 NR Description: unknown [Arabidopsis thaliana]
  misc_feature (23)..(184): Homolog of NCBI NO: 15228824 NR Description: putative protein; protein id: At3g56110.1, by cDNA: 11163., supported by cDNA: gi_15450977, supported by
  misc_feature (23)..(184): Homolog of NCBI NO: 15450978 NR Description: putative protein [Arabidopsis thaliana]
MANNDEITTSSHASPAVNHESISRAKQRIKDGLATRRSWRVMFDLHSTGLPHGVSDVFSRIKTNLAYFRSNYAIVILNVIFFSLIWHPTSLIVFTGLVFLWIFLYFLRDVPLKVFRFQIDDRAVLIGLSVITIVLLLLTNATFNIVAALMAGAVLVLIHAVIRKTDDLFLDEEAATTETSGLTSHPSS

SEQ ID NO: 81052 - protein, 147 aa, Arabidopsis thaliana
  peptide (1)..(147): Ceres Seq. ID no. 12658217
  misc_feature (1)..(147): Homolog of NCBI NO: 15231332 NR Description: unknown protein; protein id: At3g13710.1 thaliana] >gi|9294017|dbj|BAB01920.1|
  misc_feature (1)..(147): Homolog of NCBI NO: 21617895 NR Description: unknown [Arabidopsis thaliana]
  misc_feature (1)..(147): Homolog of NCBI NO: 18400140 NR Description: expressed protein; protein id: At3g13720.1, by cDNA: 8544. [Arabidopsis thaliana] >gi|9294018|dbj|BAB01921.1|
  misc_feature (1)..(147): Homolog of NCBI NO: 18405248 NR Description: expressed protein; protein id: At1g55190.1, by cDNA: 21940. [Arabidopsis thaliana] >gi|25347725|pir||F96593
  misc_feature (1)..(134): Homolog of NCBI NO: 15220814 NR Description: hypothetical protein; protein id: At1g17700.1
  misc_feature (1)..(131): Homolog of NCBI NO: 34903576 NR Description: P0419B01.1 [Oryza sativa (japonica
  misc_feature (1)..(143): Homolog of NCBI NO: 18390939 NR Description: expressed protein; protein id: At1g08770.1, by cDNA: 7188. [Arabidopsis thaliana] >gi|7485990|pir||T00733
  misc_feature (1)..(134): Homolog of NCBI NO: 21594668 NR Description: unknown [Arabidopsis thaliana]
  misc_feature (1)..(143): Homolog of NCBI NO: 15228824 NR Description: putative protein; protein id: At3g56110.1, by cDNA: 11163., supported by cDNA: gi_15450977, supported by
  misc_feature (1)..(143): Homolog of NCBI NO: 15450978 NR Description: putative protein [Arabidopsis thaliana]
MFDLHSTGLPHGVSDVFSRIKTNLAYFRSNYAIVILNVIFFSLIWHPTSLIVFTGLVFLWIFLYFLRDVPLKVFRFQIDDRAVLIGLSVITIVLLLLTNATFNIVAALMAGAVLVLIHAVIRKTDDLFLDEEAATTETSGLTSHPSS

SEQ ID NO: 81053 - DNA, 1710 bp, Arabidopsis thaliana
  misc_feature (1)..(1710): Ceres Seq. ID no. 12658234
  misc_feature: MA Experiment ID: 20000328 Result: Up-regulated in Transcription
  misc_feature: MA Experiment 20000328 PARAMETER Experiment Name: At_42deg_Heat_Sub_P Parameter: Age (day) Value: 14
  misc_feature: MA Experiment 20000328 PARAMETER Experiment Name: At_42deg_Heat_Sub_P Parameter: Organism Value: A. thaliana
  misc_feature: MA Experiment 20000328 PARAMETER Experiment Name: At_42deg_Heat_Sub_P Parameter: Plant Line Value: WS
  misc_feature: MA Experiment 20000328 PARAMETER Experiment Name: At_42deg_Heat_Sub_P Parameter: Temperature (deg C) Value: 42 vs. 22
  misc_feature: MA Experiment 20000328 PARAMETER Experiment Name: At_42deg_Heat_Sub_P Parameter: Timepoint (hr) Value: 6
  misc_feature: MA Experiment 20000328 PARAMETER Experiment Name: At_42deg_Heat_Sub_P Parameter: Tissue Value: Aerial
  misc_feature: MA Experiment ID: 20000347 Result: Down-regulated in Transcription
  misc_feature: MA Experiment 20000347 PARAMETER Experiment Name: At_2mM_SA_Sub_P Parameter: Age (day) Value: 14
  misc_feature: MA Experiment 20000347 PARAMETER Experiment Name: At_2mM_SA_Sub_P Parameter: Organism Value: A. thaliana
  misc_feature: MA Experiment 20000347 PARAMETER Experiment Name: At_2mM_SA_Sub_P Parameter: Plant Line Value: WS
  misc_feature: MA Experiment 20000347 PARAMETER Experiment Name: At_2mM_SA_Sub_P Parameter: Timepoint (hr) Value: 6
  misc_feature: MA Experiment 20000347 PARAMETER Experiment Name: At_2mM_SA_Sub_P Parameter: Tissue Value: Aerial
  misc_feature: MA Experiment 20000347 PARAMETER Experiment Name: At_2mM_SA_Sub_P Parameter: Treatment Value: 2mM SA vs. No Treatment
  misc_feature: MA Experiment ID: 20000352 Result: Up-regulated in Transcription
  misc_feature: MA Experiment 20000352 PARAMETER Experiment Name: At_Drought_Sub_P Parameter: Age (day) Value: 7
  misc_feature: MA Experiment 20000352 PARAMETER Experiment Name: At_Drought_Sub_P Parameter: Organism Value: A. thaliana
  misc_feature: MA Experiment 20000352 PARAMETER Experiment Name: At_Drought_Sub_P Parameter: Plant Line Value: WS
  misc_feature: MA Experiment 20000352 PARAMETER Experiment Name: At_Drought_Sub_P Parameter: Timepoint (hr) Value: 6
  misc_feature: MA Experiment 20000352 PARAMETER Experiment Name: At_Drought_Sub_P Parameter: Tissue Value: Whole Plant
  misc_feature: MA Experiment 20000352 PARAMETER Experiment Name: At_Drought_Sub_P Parameter: Treatment Value: Drought vs. No Drought
atggctaatatagtttggtgtaacattgccatgttcttgttggtctcgttgtttctcactgacgatgctgttgttgttcttgatgccttggacaacgttcccaataatatcaagaaccaaccttaccgaaccggttatcatttccagcctcccaaaaattggatgaacgggcctatgatatacaaaggaatctatcatctattctatcaatggaaccaaaacggcgccgtcatggacgttaacaaaaccgtatggggccatgcaacatcaacggatctaatcaactggatcacactttctccagcaatcagaccatctcgaccgtccgatattaacggatgctggtccggctccgtcacgattctccctaatggcaaacctgtaattctttacaccggcaacgaccgttataaccgccaggtccaaaacttagttaaacctaaaaacctcaccgatccatatctacggcactggaccaaatcgccggaaaatcccctcgtgacacctagccccgtcaaccacatcaactccagcgcgtttcgtgatccaaccaccgcgtggtttggccgtgacgggcgttggcgcataaccaccggaagccaagaaggtcgacgtggattagcgattctacacacgagcaaagatttcgtaatatggaagcaatctccaaagcctcttcattaccacgacggtaccggaatgtgggagtgccctgattttttcccggtggctagaactgattcacggggcctagatacgtctttttcaagtgggccgatggttaaacacgtccttaaagtgagcttaacagatacgtttaatgattactacacgattggtacgtacgatgaagtgagagatgtctacgtaccggacaagggttttgttcaggacgaaacggctccgagatatgattacggcaaattttatgcgtcgaaaacattttacgactctgttaatcagcgcaggattttgtggggttgggttaacgagtcgtcaccggagaaagataacatcaagaagggttgggccggtttacaggctattcctaggaaagtatggcttgatgaatcaggaaagagattggtgcaatggccggttaaggaaatagagaggttacgtacaacgcaagtcaagtggggaaacaaactattgaaaggagggtcggtaatggaggttcatggagtcacagctccacaagcagatgtggaagttttcttcaaagtgagtggttttgacttagagaaagcagatgtgattgaaccgggctggaccgatccgcaattgatctgcagtcagaggaatgcgtcatcaggtttaggtccattcggtttaatggttctagcttccaagaacatggaagagtatacatcggtcaatatcagaatcttcagagctggtgagaatagtaaggagcacgtagtggtcatgtgcagtgaccaaagcacatcaagtttagagaaagggaatgataaaacaacttatggtgcttttttagatatctctccttatcaaccaatctctctcaggactttgattgataaatcaatagtggagagctttggtgggaaagggaaaacatgtattacctcgagagtttatccaaaattggcaataggagaaagaacacatctctttgcttttaacaagggatctcaaaatgttaatgttttaagcctaagtgcttggagcatgaagtcttctctttaa

SEQ ID NO: 81054 - protein, 569 aa, Arabidopsis thaliana
  peptide (1)..(569): Ceres Seq. ID no. 12658235
  misc_feature (47)..(525): Pfam Name: Glycosyl hydrolases family 32 Pfam Description: Glycosyl hydrolases family 32
  misc_feature (1)..(568): Homolog of NCBI NO: 9294027 NR Description: beta-fructofuranosidase (EC 3.2.1.26)
  misc_feature (1)..(568): Homolog of NCBI NO: 18400170 NR Description: glycosyl hydrolase family 32; protein id: supported by cDNA: gi_15027838, supported by cDNA: gi_19310844
  misc_feature (1)..(568): Homolog of NCBI NO: 25289547 NR Description: probable beta-fructofuranosidase, [imported] -
  misc_feature (1)..(568): Homolog of NCBI NO: 18405222 NR Description: glycosyl hydrolase family 32; protein id:
  misc_feature (1)..(568): Homolog of NCBI NO: 6683112 NR Description: beta-fructofuranosidase [Arabidopsis thaliana]
  misc_feature (12)..(568): Homolog of NCBI NO: 4205115 NR Description: cell wall invertase precursor [Fragaria x
  misc_feature (39)..(568): Homolog of NCBI NO: 7435477 NR Description: beta-fructofuranosidase (EC 3.2.1.26), cell wall
  misc_feature (10)..(568): Homolog of NCBI NO: 7435485 NR Description: beta-fructofuranosidase (EC 3.2.1.26) - garden pea
  misc_feature (11)..(568): Homolog of NCBI NO: 2597853 NR Description: beta-fructofuranosidase [Chenopodium rubrum]
  misc_feature (9)..(567): Homolog of NCBI NO: 33694264 NR Description: cell wall invertase 3 [Oryza sativa (indica
MANIVWCNIAMFLLVSLFLTDDAVVVLDALDNVPNNIKNQPYRTGYHFQPPKNWMNGPMIYKGIYHLFYQWNQNGAVMDVNKTVWGHATSTDLINWITLSPAIRPSRPSDINGCWSGSVTILPNGKPVILYTGNDRYNRQVQNLVKPKNLTDPYLRHWTKSPENPLVTPSPVNHINSSAFRDPTTAWFGRDGRWRITTGSQEGRRGLAILHTSKDFVIWKQSPKPLHYHDGTGMWECPDFFPVARTDSRGLDTSFSSGPMVKHVLKVSLTDTFNDYYTIGTYDEVRDVYVPDKGFVQDETAPRYDYGKFYASKTFYDSVNQRRILWGWVNESSPEKDNIKKGWAGLQAIPRKVWLDESGKRLVQWPVKEIERLRTTQVKWGNKLLKGGSVMEVHGVTAPQADVEVFFKVSGFDLEKADVIEPGWTDPQLICSQRNASSGLGPFGLMVLASKNMEEYTSVNIRIFRAGENSKEHVVVMCSDQSTSSLEKGNDKTTYGAFLDISPYQPISLRTLIDKSIVESFGGKGKTCITSRVYPKLAIGERTHLFAFNKGSQNVNVLSLSAWSMKSSL

SEQ ID NO: 81055 - protein, 559 aa, Arabidopsis thaliana
  peptide (1)..(559): Ceres Seq. ID no. 12658236
  misc_feature (37)..(515): Pfam Name: Glycosyl hydrolases family 32 Pfam Description: Glycosyl hydrolases family 32
  misc_feature (1)..(558): Homolog of NCBI NO: 9294027 NR Description: beta-fructofuranosidase (EC 3.2.1.26)
  misc_feature (1)..(558): Homolog of NCBI NO: 18400170 NR Description: glycosyl hydrolase family 32; protein id: supported by cDNA: gi_15027838, supported by cDNA: gi_19310844
  misc_feature (1)..(558): Homolog of NCBI NO: 25289547 NR Description: probable beta-fructofuranosidase, [imported] -
  misc_feature (1)..(558): Homolog of NCBI NO: 18405222 NR Description: glycosyl hydrolase family 32; protein id:
  misc_feature (1)..(558): Homolog of NCBI NO: 6683112 NR Description: beta-fructofuranosidase [Arabidopsis thaliana]
  misc_feature (2)..(558): Homolog of NCBI NO: 4205115 NR Description: cell wall invertase precursor [Fragaria x
  misc_feature (29)..(558): Homolog of NCBI NO: 7435477 NR Description: beta-fructofuranosidase (EC 3.2.1.26), cell wall
  misc_feature (1)..(558): Homolog of NCBI NO: 7435485 NR Description: beta-fructofuranosidase (EC 3.2.1.26) - garden pea
  misc_feature (1)..(558): Homolog of NCBI NO: 2597853 NR Description: beta-fructofuranosidase [Chenopodium rubrum]
  misc_feature (1)..(557): Homolog of NCBI NO: 33694264 NR Description: cell wall invertase 3 [Oryza sativa (indica
MFLLVSLFLTDDAVVVLDALDNVPNNIKNQPYRTGYHFQPPKNWMNGPMIYKGIYHLFYQWNQNGAVMDVNKTVWGHATSTDLINWITLSPAIRPSRPSDINGCWSGSVTILPNGKPVILYTGNDRYNRQVQNLVKPKNLTDPYLRHWTKSPENPLVTPSPVNHINSSAFRDPTTAWFGRDGRWRITTGSQEGRRGLAILHTSKDFVIWKQSPKPLHYHDGTGMWECPDFFPVARTDSRGLDTSFSSGPMVKHVLKVSLTDTFNDYYTIGTYDEVRDVYVPDKGFVQDETAPRYDYGKFYASKTFYDSVNQRRILWGWVNESSPEKDNIKKGWAGLQAIPRKVWLDESGKRLVQWPVKEIERLRTTQVKWGNKLLKGGSVMEVHGVTAPQADVEVFFKVSGFDLEKADVIEPGWTDPQLICSQRNASSGLGPFGLMVLASKNMEEYTSVNIRIFRAGENSKEHVVVMCSDQSTSSLEKGNDKTTYGAFLDISPYQPISLRTLIDKSIVESFGGKGKTCITSRVYPKLAIGERTHLFAFNKGSQNVNVLSLSAWSMKSSL

SEQ ID NO: 81056 - protein, 515 aa, Arabidopsis thaliana
  peptide (1)..(515): Ceres Seq. ID no. 12658237
  misc_feature (1)..(471): Pfam Name: Glycosyl hydrolases family 32 Pfam Description: Glycosyl hydrolases family 32
  misc_feature (1)..(514): Homolog of NCBI NO: 9294027 NR Description: beta-fructofuranosidase (EC 3.2.1.26)
  misc_feature (1)..(514): Homolog of NCBI NO: 18400170 NR Description: glycosyl hydrolase family 32; protein id: supported by cDNA: gi_15027838, supported by cDNA: gi_19310844
  misc_feature (1)..(514): Homolog of NCBI NO: 25289547 NR Description: probable beta-fructofuranosidase, [imported] -
  misc_feature (1)..(514): Homolog of NCBI NO: 18405222 NR Description: glycosyl hydrolase family 32; protein id:
  misc_feature (1)..(514): Homolog of NCBI NO: 6683112 NR Description: beta-fructofuranosidase [Arabidopsis thaliana]
  misc_feature (1)..(514): Homolog of NCBI NO: 4205115 NR Description: cell wall invertase precursor [Fragaria x
  misc_feature (1)..(514): Homolog of NCBI NO: 7435477 NR Description: beta-fructofuranosidase (EC 3.2.1.26), cell wall
  misc_feature (1)..(514): Homolog of NCBI NO: 7435485 NR Description: beta-fructofuranosidase (EC 3.2.1.26) - garden pea
  misc_feature (1)..(514): Homolog of NCBI NO: 2597853 NR Description: beta-fructofuranosidase [Chenopodium rubrum]
  misc_feature (1)..(513): Homolog of NCBI NO: 33694264 NR Description: cell wall invertase 3 [Oryza sativa (indica
MNGPMIYKGIYHLFYQWNQNGAVMDVNKTVWGHATSTDLINWITLSPAIRPSRPSDINGCWSGSVTILPNGKPVILYTGNDRYNRQVQNLVKPKNLTDPYLRHWTKSPENPLVTPSPVNHINSSAFRDPTTAWFGRDGRWRITTGSQEGRRGLAILHTSKDFVIWKQSPKPLHYHDGTGMWECPDFFPVARTDSRGLDTSFSSGPMVKHVLKVSLTDTFNDYYTIGTYDEVRDVYVPDKGFVQDETAPRYDYGKFYASKTFYDSVNQRRILWGWVNESSPEKDNIKKGWAGLQAIPRKVWLDESGKRLVQWPVKEIERLRTTQVKWGNKLLKGGSVMEVHGVTAPQADVEVFFKVSGFDLEKADVIEPGWTDPQLICSQRNASSGLGPFGLMVLASKNMEEYTSVNIRIFRAGENSKEHVVVMCSDQSTSSLEKGNDKTTYGAFLDISPYQPISLRTLIDKSIVESFGGKGKTCITSRVYPKLAIGERTHLFAFNKGSQNVNVLSLSAWSMKSSL

SEQ ID NO: 81057 - DNA, 1955 bp, Arabidopsis thaliana
  misc_feature (1)..(1955): Ceres Seq. ID no. 12658238
  misc_feature: MA Experiment ID: 20000182 Result: Up-regulated in Transcription
  misc_feature: MA Experiment 20000182 PARAMETER Experiment Name: At_2mM_SA_P Parameter: Age (day) Value: 14
  misc_feature: MA Experiment 20000182 PARAMETER Experiment Name: At_2mM_SA_P Parameter: Organism Value: A. thaliana
  misc_feature: MA Experiment 20000182 PARAMETER Experiment Name: At_2mM_SA_P Parameter: Plant Line Value: WS
  misc_feature: MA Experiment 20000182 PARAMETER Experiment Name: At_2mM_SA_P Parameter: Timepoint (hr) Value: 6
  misc_feature: MA Experiment 20000182 PARAMETER Experiment Name: At_2mM_SA_P Parameter: Tissue Value: Aerial
  misc_feature: MA Experiment 20000182 PARAMETER Experiment Name: At_2mM_SA_P Parameter: Treatment Value: 2mM SA vs. No Treatment
  misc_feature: MA Experiment ID: 20000185 Result: Up-regulated in Transcription
  misc_feature: MA Experiment 20000185 PARAMETER Experiment Name: At_Roots__P Parameter: Age (day) Value: 7 vs. 21
  misc_feature: MA Experiment 20000185 PARAMETER Experiment Name: At_Roots__P Parameter: Organism Value: A. thaliana
  misc_feature: MA Experiment 20000185 PARAMETER Experiment Name: At_Roots__P Parameter: Tissue Value: Roots vs. Whole Plant
  misc_feature: MA Experiment ID: 20000234 Result: Down-regulated in Transcription
  misc_feature: MA Experiment 20000234 PARAMETER Experiment Name: At_Siliques_P Parameter: Age (day) Value: 21
  misc_feature: MA Experiment 20000234 PARAMETER Experiment Name: At_Siliques_P Parameter: Organism Value: A. thaliana
  misc_feature: MA Experiment 20000234 PARAMETER Experiment Name: At_Siliques_P Parameter: Plant Line Value: WS
  misc_feature: MA Experiment 20000234 PARAMETER Experiment Name: At_Siliques_P Parameter: Tissue Value: Less Than 5mm Siliques vs. Whole Plant
  misc_feature: MA Experiment ID: 20000235 Result: Down-regulated in Transcription
  misc_feature: MA Experiment 20000235 PARAMETER Experiment Name: At_Siliques_P Parameter: Age (day) Value: 21
  misc_feature: MA Experiment 20000235 PARAMETER Experiment Name: At_Siliques_P Parameter: Organism Value: A. thaliana
  misc_feature: MA Experiment 20000235 PARAMETER Experiment Name: At_Siliques_P Parameter: Plant Line Value: WS
  misc_feature: MA Experiment 20000235 PARAMETER Experiment Name: At_Siliques_P Parameter: Tissue Value: 5-10mm Siliques vs. Whole Plant
  misc_feature: MA Experiment ID: 20000264 Result: Down-regulated in Transcription
  misc_feature: MA Experiment 20000264 PARAMETER Experiment Name: At_Open_Flower_P Parameter: Age (day) Value: 21
  misc_feature: MA Experiment 20000264 PARAMETER Experiment Name: At_Open_Flower_P Parameter: Plant Line Value: WS
  misc_feature: MA Experiment 20000264 PARAMETER Experiment Name: At_Open_Flower_P Parameter: Tissue Value: Open Flower vs. Whole Plant
  misc_feature: MA Experiment ID: 20000265 Result: Down-regulated in Transcription
  misc_feature: MA Experiment 20000265 PARAMETER Experiment Name: At_Open_Flower_P Parameter: Age (day) Value: 21
  misc_feature: MA Experiment 20000265 PARAMETER Experiment Name: At_Open_Flower_P Parameter: Plant Line Value: WS
  misc_feature: MA Experiment 20000265 PARAMETER Experiment Name: At_Open_Flower_P Parameter: Tissue Value: Closed Flower vs. Whole Plant
  misc_feature: MA Experiment ID: 20000437 Result: Down-regulated in Transcription
  misc_feature: MA Experiment 20000437 PARAMETER Experiment Name: At_Drought_P Parameter: Age (day) Value: 8
  misc_feature: MA Experiment 20000437 PARAMETER Experiment Name: At_Drought_P Parameter: Organism Value: A. thaliana
  misc_feature: MA Experiment 20000437 PARAMETER Experiment Name: At_Drought_P Parameter: Plant Line Value: WS
  misc_feature: MA Experiment 20000437 PARAMETER Experiment Name: At_Drought_P Parameter: Timepoint (hr) Value: 24
  misc_feature: MA Experiment 20000437 PARAMETER Experiment Name: At_Drought_P Parameter: Tissue Value: Whole Plant
  misc_feature: MA Experiment 20000437 PARAMETER Experiment Name: At_Drought_P Parameter: Treatment Value: Drought vs. No Drought
  misc_feature: MA Experiment ID: 20000438 Result: Down-regulated in Transcription
  misc_feature: MA Experiment 20000438 PARAMETER Experiment Name: At_Shoots__P Parameter: Age (day) Value: 14
  misc_feature: MA Experiment 20000438 PARAMETER Experiment Name: At_Shoots__P Parameter: Tissue Value: Shoots vs. Whole Plant
  misc_feature: MA Experiment ID: 20000439 Result: Up-regulated in Transcription
  misc_feature: MA Experiment 20000439 PARAMETER Experiment Name: At_Roots__P Parameter: Age (day) Value: 14 vs. 21
  misc_feature: MA Experiment 20000439 PARAMETER Experiment Name: At_Roots__P Parameter: Organism Value: A. thaliana
  misc_feature: MA Experiment 20000439 PARAMETER Experiment Name: At_Roots__P Parameter: Tissue Value: Roots vs. Whole Plant
  misc_feature: MA Experiment ID: 20000441 Result: Up-regulated in Transcription
  misc_feature: MA Experiment 20000441 PARAMETER Experiment Name: At_1uM_BR-BRZ__P Parameter: Tissue Value: Shoot Apices
  misc_feature: MA Experiment 20000441 PARAMETER Experiment Name: At_1uM_BR-BRZ__P Parameter: Treatment Value: 1uM BR vs. No Treatment
  misc_feature: MA Experiment ID: 20000453 Result: Down-regulated in Transcription
  misc_feature: MA Experiment 20000453 PARAMETER Experiment Name: At_100uM_ABA_P Parameter: Age (day) Value: 15
  misc_feature: MA Experiment 20000453 PARAMETER Experiment Name: At_100uM_ABA_P Parameter: Organism Value: A. thaliana
  misc_feature: MA Experiment 20000453 PARAMETER Experiment Name: At_100uM_ABA_P Parameter: Plant Line Value: WS
  misc_feature: MA Experiment 20000453 PARAMETER Experiment Name: At_100uM_ABA_P Parameter: Timepoint (hr) Value: 24
  misc_feature: MA Experiment 20000453 PARAMETER Experiment Name: At_100uM_ABA_P Parameter: Tissue Value: Aerial
  misc_feature: MA Experiment 20000453 PARAMETER Experiment Name: At_100uM_ABA_P Parameter: Treatment Value: 100uM ABA vs. No Treatment
  misc_feature: MA Experiment ID: 20000527 Result: Down-regulated in Transcription
  misc_feature: MA Experiment 20000527 PARAMETER Experiment Name: At_10percent_PEG_P Parameter: Age (day) Value: 20
  misc_feature: MA Experiment 20000527 PARAMETER Experiment Name: At_10percent_PEG_P Parameter: Organism Value: A. thaliana
  misc_feature: MA Experiment 20000527 PARAMETER Experiment Name: At_10percent_PEG_P Parameter: Plant Line Value: WS
  misc_feature: MA Experiment 20000527 PARAMETER Experiment Name: At_10percent_PEG_P Parameter: Timepoint (day) Value: 20
  misc_feature: MA Experiment 20000527 PARAMETER Experiment Name: At_10percent_PEG_P Parameter: Tissue Value: Whole Plant
  misc_feature: MA Experiment 20000527 PARAMETER Experiment Name: At_10percent_PEG_P Parameter: Treatment Value: 10percent PEG vs. No Treatment
  misc_feature: MA Experiment ID: 20000794 Result: Down-regulated in Transcription
  misc_feature: MA Experiment 20000794 PARAMETER Experiment Name: At_Petals_P Parameter: Age (day) Value: 23-25 days
  misc_feature: MA Experiment 20000794 PARAMETER Experiment Name: At_Petals_P Parameter: Plant Line Value: WS
  misc_feature: MA Experiment 20000794 PARAMETER Experiment Name: At_Petals_P Parameter: Tissue Value: Petals vs. Whole plant
  misc_feature: MA Experiment ID: 20001554 Result: Down-regulated in Transcription
  misc_feature: MA Experiment 20001554 PARAMETER Experiment Name: At_Drought_Soil_Dry_P Parameter: Age (day) Value: 21
  misc_feature: MA Experiment 20001554 PARAMETER Experiment Name: At_Drought_Soil_Dry_P Parameter: Organism Value: A. thaliana
  misc_feature: MA Experiment 20001554 PARAMETER Experiment Name: At_Drought_Soil_Dry_P Parameter: Plant Line Value: WS
  misc_feature: MA Experiment 20001554 PARAMETER Experiment Name: At_Drought_Soil_Dry_P Parameter: Post Timepoint (hr) Value: None
  misc_feature: MA Experiment 20001554 PARAMETER Experiment Name: At_Drought_Soil_Dry_P Parameter: Post-Treatment Value: None
  misc_feature: MA Experiment 20001554 PARAMETER Experiment Name: At_Drought_Soil_Dry_P Parameter: Timepoint (day) Value: 7
  misc_feature: MA Experiment 20001554 PARAMETER Experiment Name: At_Drought_Soil_Dry_P Parameter: Treatment Value: Drought vs. No Drought
  misc_feature: MA Experiment ID: 20001556 Result: Down-regulated in Transcription
  misc_feature: MA Experiment 20001556 PARAMETER Experiment Name: At_Drought_Soil_Dry_P Parameter: Age (day) Value: 26
  misc_feature: MA Experiment 20001556 PARAMETER Experiment Name: At_Drought_Soil_Dry_P Parameter: Organism Value: A. thaliana
  misc_feature: MA Experiment 20001556 PARAMETER Experiment Name: At_Drought_Soil_Dry_P Parameter: Plant Line Value: WS
  misc_feature: MA Experiment 20001556 PARAMETER Experiment Name: At_Drought_Soil_Dry_P Parameter: Post Timepoint (hr) Value: None
  misc_feature: MA Experiment 20001556 PARAMETER Experiment Name: At_Drought_Soil_Dry_P Parameter: Post-Treatment Value: None
  misc_feature: MA Experiment 20001556 PARAMETER Experiment Name: At_Drought_Soil_Dry_P Parameter: Timepoint (day) Value: 12
  misc_feature: MA Experiment 20001556 PARAMETER Experiment Name: At_Drought_Soil_Dry_P Parameter: Treatment Value: Drought vs. No Drought
  misc_feature: MA Experiment ID: 20001558 Result: Down-regulated in Transcription
  misc_feature: MA Experiment 20001558 PARAMETER Experiment Name: At_Drought_Soil_Dry_P Parameter: Age (day) Value: 27
  misc_feature: MA Experiment 20001558 PARAMETER Experiment Name: At_Drought_Soil_Dry_P Parameter: Organism Value: A. thaliana
  misc_feature: MA Experiment 20001558 PARAMETER Experiment Name: At_Drought_Soil_Dry_P Parameter: Plant Line Value: WS
  misc_feature: MA Experiment 20001558 PARAMETER Experiment Name: At_Drought_Soil_Dry_P Parameter: Post Timepoint (hr) Value: 6
  misc_feature: MA Experiment 20001558 PARAMETER Experiment Name: At_Drought_Soil_Dry_P Parameter: Post-Treatment Value: Re-Water vs. No Drought
  misc_feature: MA Experiment 20001558 PARAMETER Experiment Name: At_Drought_Soil_Dry_P Parameter: Timepoint (day) Value: 13
  misc_feature: MA Experiment 20001558 PARAMETER Experiment Name: At_Drought_Soil_Dry_P Parameter: Treatment Value: Drought vs. No Drought
  misc_feature: MA Experiment ID: 20001771 Result: Down-regulated in Transcription
  misc_feature: MA Experiment 20001771 PARAMETER Experiment Name: At_Far-red-enriched-adult_P Parameter: Age (day) Value: 28
  misc_feature: MA Experiment 20001771 PARAMETER Experiment Name: At_Far-red-enriched-adult_P Parameter: Light Value: Far-red enriched vs. White
  misc_feature: MA Experiment 20001771 PARAMETER Experiment Name: At_Far-red-enriched-adult_P Parameter: Organism Value: A. thaliana
  misc_feature: MA Experiment 20001771 PARAMETER Experiment Name: At_Far-red-enriched-adult_P Parameter: Plant Line Value: Columbia
  misc_feature: MA Experiment 20001771 PARAMETER Experiment Name: At_Far-red-enriched-adult_P Parameter: Timepoint (hr) Value: 16
  misc_feature: MA Experiment 20001771 PARAMETER Experiment Name: At_Far-red-enriched-adult_P Parameter: Tissue Value: Aerial
  misc_feature: MA Experiment ID: 20001773 Result: Down-regulated in Transcription
  misc_feature: MA Experiment 20001773 PARAMETER Experiment Name: At_Far-red-enriched-adult_P Parameter: Age (day) Value: 30
  misc_feature: MA Experiment 20001773 PARAMETER Experiment Name: At_Far-red-enriched-adult_P Parameter: Light Value: Far-red enriched vs. White
  misc_feature: MA Experiment 20001773 PARAMETER Experiment Name: At_Far-red-enriched-adult_P Parameter: Organism Value: A. thaliana
  misc_feature: MA Experiment 20001773 PARAMETER Experiment Name: At_Far-red-enriched-adult_P Parameter: Plant Line Value: Columbia
  misc_feature: MA Experiment 20001773 PARAMETER Experiment Name: At_Far-red-enriched-adult_P Parameter: Timepoint (hr) Value: 48
  misc_feature: MA Experiment 20001773 PARAMETER Experiment Name: At_Far-red-enriched-adult_P Parameter: Tissue Value: Aerial
  misc_feature: MA Experiment ID: 20001774 Result: Down-regulated in Transcription
  misc_feature: MA Experiment 20001774 PARAMETER Experiment Name: At_Far-red-enriched-adult_P Parameter: Age (day) Value: 31
  misc_feature: MA Experiment 20001774 PARAMETER Experiment Name: At_Far-red-enriched-adult_P Parameter: Light Value: Far-red enriched vs. White
  misc_feature: MA Experiment 20001774 PARAMETER Experiment Name: At_Far-red-enriched-adult_P Parameter: Organism Value: A. thaliana
  misc_feature: MA Experiment 20001774 PARAMETER Experiment Name: At_Far-red-enriched-adult_P Parameter: Plant Line Value: Columbia
  misc_feature: MA Experiment 20001774 PARAMETER Experiment Name: At_Far-red-enriched-adult_P Parameter: Timepoint (hr) Value: 72
  misc_feature: MA Experiment 20001774 PARAMETER Experiment Name: At_Far-red-enriched-adult_P Parameter: Tissue Value: Aerial
  misc_feature: MA Experiment ID: 20001904 Result: Down-regulated in Transcription
  misc_feature: MA Experiment 20001904 PARAMETER Experiment Name: At_Drought_Reproduction_P Parameter: Age (day) Value: 37
  misc_feature: MA Experiment 20001904 PARAMETER Experiment Name: At_Drought_Reproduction_P Parameter: Organism Value: A. thaliana
  misc_feature: MA Experiment 20001904 PARAMETER Experiment Name: At_Drought_Reproduction_P Parameter: Plant Line Value: WS
  misc_feature: MA Experiment 20001904 PARAMETER Experiment Name: At_Drought_Reproduction_P Parameter: Timepoint (day) Value: 7
  misc_feature: MA Experiment 20001904 PARAMETER Experiment Name: At_Drought_Reproduction_P Parameter: Tissue Value: Rosettes
  misc_feature: MA Experiment 20001904 PARAMETER Experiment Name: At_Drought_Reproduction_P Parameter: Treatment Value: Drought vs. No Drought
aagccacaaagaaattaaatacacacaatgaccaaagaagtttgctccaacattggactttggttattgctcacgttacttattggtaactatgtcgtcaatcttgaagcctcgcaccatgtctacaagagacttacccaaagcactaacaccaaatctccttccgtaaaccagccctaccggaccggtttccatttccaaccccccaaaaattggatgaacgatcctaatgggcctatgatatacaaaggaatatatcatcttttctaccaatggaacccgaaaggagccgtgtggggtaacatcgtgtgggctcattccacgtcaacagacttaatcaattgggatccacatcctccagctatcttcccatctgcacccttcgatatcaacggatgctggtccggttcagctactattctccctaatggaaaaccggttatcctctataccggaatcgaccctaagaaccaacaggtccaaaacatagccgagcctaagaatctctccgatccttatctccgagaatggaaaaagtcgccgttaaatcctctcatggctcctgacgccgttaacggaatcaacgccagctcgttccgtgacccaaccaccgcgtggctaggccaagacaagaaatggagagtgatcatcggaagcaagattcaccgtcgtggactagccattacttacacgagtaaagactttctaaaatgggaaaaatctccagagccgttgcattacgacgacggaagtggaatgtgggaatgtcctgattttttcccggtcacgaggtttggttctaacggcgtggaaacgtcttcgtttggtgaacctaatgagattttgaagcacgtgttgaaaataagtttggacgacacgaaacatgattattacacgattggtacgtacgatcgggttaaagataaattcgtaccggacaatggtttcaagatggacggtacggctccgagatacgattacggaaagtattacgcgtctaaaacgttttttgactcggctaagaaccggagaatcttgtggggttggactaacgagtcatcgtcggttgaggatgatgttgagaaaggctggtccggtattcagacgattccaaggaaaatatggcttgatagatcagggaaacaattaattcagtggccggttagggaagttgaaagattacgtacaaaacaagtcaaaaacttacgcaacaaagttctaaagtcaggatctaggcttgaagtctatggtgtgacagctgcacaggcggatgtagaagtattgttcaaagtgagagacttggagaaagcggatgtgatagaaccaagttggactgatccgcagttgatttgtagcaagatgaatgtatcggttaagtctggtttaggtccattcggtttaatggttttggcatctaagaatttggaagagtacacatctgtttattttagaatcttcaaagcccgtcaaaacagcaataagtacgttgtgctcatgtgcagtgaccaaagcagatcttcgctgaaggaagataatgacaaaacgacatacggagcttttgtggatattaatcctcaccaaccactatccctcagagccttgattgatcattcagtagtggagagtttcggtggaaagggaagagcatgcattacctcaagagtgtatccaaaattggcaataggaaaaagttcacatctctttgcttttaattatggatatcaaagtgttgatgtcttaaacttaaatgcttggagcatgaactctgcccaaatcagttgatcacgtaaagatacacacatgtaaacacattacatctccattgatttagcatttatatgagttgattttggagagatcttatatggtccactttgtttggttgtcaataaaattgtccaatttgtttgtttgaaataattctaaaaggctaatatatatgacattttatttga

SEQ ID NO: 81058 - protein, 584 aa, Arabidopsis thaliana
  peptide (1)..(584): Ceres Seq. ID no. 12658239
  misc_feature (56)..(538): Pfam Name: Glycosyl hydrolases family 32 Pfam Description: Glycosyl hydrolases family 32
  misc_feature (1)..(584): Homolog of NCBI NO: 18405222 NR Description: glycosyl hydrolase family 32; protein id:
  misc_feature (1)..(584): Homolog of NCBI NO: 25289547 NR Description: probable beta-fructofuranosidase, [imported] -
  misc_feature (1)..(584): Homolog of NCBI NO: 6683112 NR Description: beta-fructofuranosidase [Arabidopsis thaliana]
  misc_feature (1)..(581): Homolog of NCBI NO: 15231374 NR Description: glycosyl hydrolase family 32; protein id:
  misc_feature (11)..(584): Homolog of NCBI NO: 4205115 NR Description: cell wall invertase precursor [Fragaria x
  misc_feature (14)..(582): Homolog of NCBI NO: 7435485 NR Description: beta-fructofuranosidase (EC 3.2.1.26) - garden pea
  misc_feature (5)..(584): Homolog of NCBI NO: 7435477 NR Description: beta-fructofuranosidase (EC 3.2.1.26), cell wall
  misc_feature (14)..(552): Homolog of NCBI NO: 2500930 NR Description: BETA-FRUCTOFURANOSIDASE, CELL WALL ISOZYME
  misc_feature (1)..(583): Homolog of NCBI NO: 21322516 NR Description: exocellular acid invertase 2 [Beta vulgaris]
  misc_feature (28)..(584): Homolog of NCBI NO: 5052007 NR Description: apoplastic invertase [Oryza sativa subsp. indica]
MTKEVCSNIGLWLLLTLLIGNYVVNLEASHHVYKRLTQSTNTKSPSVNQPYRTGFHFQPPKNWMNDPNGPMIYKGIYHLFYQWNPKGAVWGNIVWAHSTSTDLINWDPHPPAIFPSAPFDINGCWSGSATILPNGKPVILYTGIDPKNQQVQNIAEPKNLSDPYLREWKKSPLNPLMAPDAVNGINASSFRDPTTAWLGQDKKWRVIIGSKIHRRGLAITYTSKDFLKWEKSPEPLHYDDGSGMWECPDFFPVTRFGSNGVETSSFGEPNEILKHVLKISLDDTKHDYYTIGTYDRVKDKFVPDNGFKMDGTAPRYDYGKYYASKTFFDSAKNRRILWGWTNESSSVEDDVEKGWSGIQTIPRKIWLDRSGKQLIQWPVREVERLRTKQVKNLRNKVLKSGSRLEVYGVTAAQADVEVLFKVRDLEKADVIEPSWTDPQLICSKMNVSVKSGLGPFGLMVLASKNLEEYTSVYFRIFKARQNSNKYVVLMCSDQSRSSLKEDNDKTTYGAFVDINPHQPLSLRALIDHSVVESFGGKGRACITSRVYPKLAIGKSSHLFAFNYGYQSVDVLNLNAWSMNSAQIS

SEQ ID NO: 81059 - protein, 521 aa, Arabidopsis thaliana
  peptide (1)..(521): Ceres Seq. ID no. 12658240
  misc_feature (1)..(475): Pfam Name: Glycosyl hydrolases family 32 Pfam Description: Glycosyl hydrolases family 32
  misc_feature (1)..(521): Homolog of NCBI NO: 18405222 NR Description: glycosyl hydrolase family 32; protein id:
  misc_feature (1)..(521): Homolog of NCBI NO: 25289547 NR Description: probable beta-fructofuranosidase, [imported] -
  misc_feature (1)..(521): Homolog of NCBI NO: 6683112 NR Description: beta-fructofuranosidase [Arabidopsis thaliana]
  misc_feature (1)..(518): Homolog of NCBI NO: 15231374 NR Description: glycosyl hydrolase family 32; protein id:
  misc_feature (1)..(521): Homolog of NCBI NO: 4205115 NR Description: cell wall invertase precursor [Fragaria x
  misc_feature (1)..(519): Homolog of NCBI NO: 7435485 NR Description: beta-fructofuranosidase (EC 3.2.1.26) - garden pea
  misc_feature (1)..(521): Homolog of NCBI NO: 7435477 NR Description: beta-fructofuranosidase (EC 3.2.1.26), cell wall
  misc_feature (1)..(489): Homolog of NCBI NO: 2500930 NR Description: BETA-FRUCTOFURANOSIDASE, CELL WALL ISOZYME
  misc_feature (1)..(520): Homolog of NCBI NO: 21322516 NR Description: exocellular acid invertase 2 [Beta vulgaris]
  misc_feature (1)..(521): Homolog of NCBI NO: 5052007 NR Description: apoplastic invertase [Oryza sativa subsp. indica]
MNDPNGPMIYKGIYHLFYQWNPKGAVWGNIVWAHSTSTDLINWDPHPPAIFPSAPFDINGCWSGSATILPNGKPVILYTGIDPKNQQVQNIAEPKNLSDPYLREWKKSPLNPLMAPDAVNGINASSFRDPTTAWLGQDKKWRVIIGSKIHRRGLAITYTSKDFLKWEKSPEPLHYDDGSGMWECPDFFPVTRFGSNGVETSSFGEPNEILKHVLKISLDDTKHDYYTIGTYDRVKDKFVPDNGFKMDGTAPRYDYGKYYASKTFFDSAKNRRILWGWTNESSSVEDDVEKGWSGIQTIPRKIWLDRSGKQLIQWPVREVERLRTKQVKNLRNKVLKSGSRLEVYGVTAAQADVEVLFKVRDLEKADVIEPSWTDPQLICSKMNVSVKSGLGPFGLMVLASKNLEEYTSVYFRIFKARQNSNKYVVLMCSDQSRSSLKEDNDKTTYGAFVDINPHQPLSLRALIDHSVVESFGGKGRACITSRVYPKLAIGKSSHLFAFNYGYQSVDVLNLNAWSMNSAQIS

SEQ ID NO: 81060 - protein, 514 aa, Arabidopsis thaliana
  peptide (1)..(514): Ceres Seq. ID no. 12658241
  misc_feature (1)..(468): Pfam Name: Glycosyl hydrolases family 32 Pfam Description: Glycosyl hydrolases family 32
  misc_feature (1)..(514): Homolog of NCBI NO: 18405222 NR Description: glycosyl hydrolase family 32; protein id:
  misc_feature (1)..(514): Homolog of NCBI NO: 25289547 NR Description: probable beta-fructofuranosidase, [imported] -
  misc_feature (1)..(514): Homolog of NCBI NO: 6683112 NR Description: beta-fructofuranosidase [Arabidopsis thaliana]
  misc_feature (1)..(511): Homolog of NCBI NO: 15231374 NR Description: glycosyl hydrolase family 32; protein id:
  misc_feature (1)..(514): Homolog of NCBI NO: 4205115 NR Description: cell wall invertase precursor [Fragaria x
  misc_feature (1)..(512): Homolog of NCBI NO: 7435485 NR Description: beta-fructofuranosidase (EC 3.2.1.26) - garden pea
  misc_feature (1)..(514): Homolog of NCBI NO: 7435477 NR Description: beta-fructofuranosidase (EC 3.2.1.26), cell wall
  misc_feature (1)..(482): Homolog of NCBI NO: 2500930 NR Description: BETA-FRUCTOFURANOSIDASE, CELL WALL ISOZYME
  misc_feature (1)..(513): Homolog of NCBI NO: 21322516 NR Description: exocellular acid invertase 2 [Beta vulgaris]
  misc_feature (1)..(514): Homolog of NCBI NO: 5052007 NR Description: apoplastic invertase [Oryza sativa subsp. indica]
MIYKGIYHLFYQWNPKGAVWGNIVWAHSTSTDLINWDPHPPAIFPSAPFDINGCWSGSATILPNGKPVILYTGIDPKNQQVQNIAEPKNLSDPYLREWKKSPLNPLMAPDAVNGINASSFRDPTTAWLGQDKKWRVIIGSKIHRRGLAITYTSKDFLKWEKSPEPLHYDDGSGMWECPDFFPVTRFGSNGVETSSFGEPNEILKHVLKISLDDTKHDYYTIGTYDRVKDKFVPDNGFKMDGTAPRYDYGKYYASKTFFDSAKNRRILWGWTNESSSVEDDVEKGWSGIQTIPRKIWLDRSGKQLIQWPVREVERLRTKQVKNLRNKVLKSGSRLEVYGVTAAQADVEVLFKVRDLEKADVIEPSWTDPQLICSKMNVSVKSGLGPFGLMVLASKNLEEYTSVYFRIFKARQNSNKYVVLMCSDQSRSSLKEDNDKTTYGAFVDINPHQPLSLRALIDHSVVESFGGKGRACITSRVYPKLAIGKSSHLFAFNYGYQSVDVLNLNAWSMNSAQIS

SEQ ID NO: 81061 - DNA, 1104 bp, Arabidopsis thaliana
  misc_feature (1)..(1104): Ceres Seq. ID no. 12658265
  misc_feature: MA Experiment ID: 20000184 Result: Up-regulated in Transcription
  misc_feature: MA Experiment 20000184 PARAMETER Experiment Name: At_Shoots__P Parameter: Age (day) Value: 7
  misc_feature: MA Experiment 20000184 PARAMETER Experiment Name: At_Shoots__P Parameter: Tissue Value: Shoots vs. Whole Plant
atgggtcatcactcatgctgcaacaagcaaaaggtgaagagagggctttggtcacctgaagaagacgaaaagctcatcaactacatcaattcatatggccatggatgttggagctctgttcctaaacatgcaggcacttatacacatatacatgggttttgtttgcagagatgtggaaagagttgtagattaagatggataaattatctaagacctgatcttaaacgtggaagcttctctcctcaagaagctgctcttatcattgagcttcacagcattcttggtaacagatgggctcaaattgctaaacatctacctggaagaacagataacgaggtcaagaatttctggaactcgagcattaaaaagaagctcatgtctcaccatcatcacggtcatcatcatcatcatctctcttccatggcgagtttgctcacaaaccttccttatcacaatggattcaaccctactacagtcgacgatgaaagttcaagattcatgtccaatatcatcacaaacactaaccctaatttcatcactccaagccatctctctcttccttctcctcatgttatgaccccattgatgttcccaacctctagagaaggagatttcaagtttctaaccacaaacaacccaaaccaatctcatcaccatgataataaccattacaacaacctcgacattttgtcacccacaccaactataaacaatcatcatcaaccttcactttcttcttgtcctcatgataataatctccaatggccagcgttaccagatttcccagcgagtaccatttctggtttccaagaaacccttcaagattatgatgatgctaataaactcaacgtgtttgtgacaccattcaacgataatgccaaaaagttattatgtggagaagttctcgaaggcaaagtactatcttcctcctcaccaatttcacaagatcacggcctttttcttcccaccacgtacaactttcaaatgacttctacgagtgatcatcaacatcatcatcgagtggactcatacatcaatcacatgatcataccatcatcatcctcatcgtcgccaatctcttgtggacagtacgtcataacttaa

SEQ ID NO: 81062 - protein, 367 aa, Arabidopsis thaliana
  peptide (1)..(367): Ceres Seq. ID no. 12658266
  misc_feature (14)..(70): Pfam Name: Myb-like DNA-binding domain Pfam Description: Myb-like DNA-binding domain
  misc_feature (1)..(367): Homolog of NCBI NO: 22331071 NR Description: myb family transcription factor; protein id: supported by cDNA: gi_5823326 [Arabidopsis thaliana]
  misc_feature (1)..(367): Homolog of NCBI NO: 11994360 NR Description: transcription factor-like protein [Arabidopsis
  misc_feature (1)..(127): Homolog of NCBI NO: 34910458 NR Description: putative transcription factor [Oryza sativa
  misc_feature (1)..(255): Homolog of NCBI NO: 33320067 NR Description: transcription factor Myb [Capsicum annuum]
  misc_feature (1)..(228): Homolog of NCBI NO: 18399724 NR Description: myb family transcription factor; protein id: supported by cDNA: gi_14517437, supported by cDNA: gi_20908077
  misc_feature (1)..(219): Homolog of NCBI NO: 34901838 NR Description: putative myb-related protein [Oryza sativa
  misc_feature (1)..(217): Homolog of NCBI NO: 15222565 NR Description: putative MYB family transcription factor; protein At1g63910.1, supported by cDNA: gi_15375284 [Arabidopsis
  misc_feature (1)..(125): Homolog of NCBI NO: 7438352 NR Description: transcription factor MYB4 homolog T15B16.7 -
  misc_feature (1)..(147): Homolog of NCBI NO: 2129932 NR Description: myb-related protein 1 - tomato
  misc_feature (1)..(185): Homolog of NCBI NO: 22329445 NR Description: myb family transcription factor; protein id: supported by cDNA: gi_20465974 [Arabidopsis thaliana] putative transcription factor [Arabidopsis thaliana]
MGHHSCCNKQKVKRGLWSPEEDEKLINYINSYGHGCWSSVPKHAGTYTHIHGFCLQRCGKSCRLRWINYLRPDLKRGSFSPQEAALIIELHSILGNRWAQIAKHLPGRTDNEVKNFWNSSIKKKLMSHHHHGHHHHHLSSMASLLTNLPYHNGFNPTTVDDESSRFMSNIITNTNPNFITPSHLSLPSPHVMTPLMFPTSREGDFKFLTTNNPNQSHHHDNNHYNNLDILSPTPTINNHHQPSLSSCPHDNNLQWPALPDFPASTISGFQETLQDYDDANKLNVFVTPFNDNAKKLLCGEVLEGKVLSSSSPISQDHGLFLPTTYNFQMTSTSDHQHHHRVDSYINHMIIPSSSSSSPISCGQYVIT

SEQ ID NO: 81063 - protein, 242 aa, Arabidopsis thaliana
  peptide (1)..(242): Ceres Seq. ID no. 12658267
  misc_feature (1)..(242): Homolog of NCBI NO: 22331071 NR Description: myb family transcription factor; protein id: supported by cDNA: gi_5823326 [Arabidopsis thaliana]
  misc_feature (1)..(242): Homolog of NCBI NO: 11994360 NR Description: transcription factor-like protein [Arabidopsis
  misc_feature (1)..(130): Homolog of NCBI NO: 33320067 NR Description: transcription factor Myb [Capsicum annuum]
  misc_feature (1)..(103): Homolog of NCBI NO: 18399724 NR Description: myb family transcription factor; protein id: supported by cDNA: gi_14517437, supported by cDNA: gi_20908077
  misc_feature (1)..(94): Homolog of NCBI NO: 34901838 NR Description: putative myb-related protein [Oryza sativa
  misc_feature (1)..(92): Homolog of NCBI NO: 15222565 NR Description: putative MYB family transcription factor; protein At1g63910.1, supported by cDNA: gi_15375284 [Arabidopsis
  misc_feature (1)..(22): Homolog of NCBI NO: 2129932 NR Description: myb-related protein 1 - tomato
  misc_feature (1)..(60): Homolog of NCBI NO: 22329445 NR Description: myb family transcription factor; protein id: supported by cDNA: gi_20465974 [Arabidopsis thaliana] putative transcription factor [Arabidopsis thaliana]
  misc_feature (1)..(60): Homolog of NCBI NO: 25294104 NR Description: hypothetical protein [imported] - Arabidopsis >gi|3482929|gb|AAC33214.1| Putative transcription factor
  misc_feature (1)..(40): Homolog of NCBI NO: 15223612 NR Description: myb family transcription factor; protein id: supported by cDNA: 250386. [Arabidopsis thaliana]
MSHHHHGHHHHHLSSMASLLTNLPYHNGFNPTTVDDESSRFMSNIITNTNPNFITPSHLSLPSPHVMTPLMFPTSREGDFKFLTTNNPNQSHHHDNNHYNNLDILSPTPTINNHHQPSLSSCPHDNNLQWPALPDFPASTISGFQETLQDYDDANKLNVFVTPFNDNAKKLLCGEVLEGKVLSSSSPISQDHGLFLPTTYNFQMTSTSDHQHHHRVDSYINHMIIPSSSSSSPISCGQYVIT

SEQ ID NO: 81064 - protein, 227 aa, Arabidopsis thaliana
  peptide (1)..(227): Ceres Seq. ID no. 12658268
  misc_feature (1)..(227): Homolog of NCBI NO: 22331071 NR Description: myb family transcription factor; protein id: supported by cDNA: gi_5823326 [Arabidopsis thaliana]
  misc_feature (1)..(227): Homolog of NCBI NO: 11994360 NR Description: transcription factor-like protein [Arabidopsis
  misc_feature (1)..(115): Homolog of NCBI NO: 33320067 NR Description: transcription factor Myb [Capsicum annuum]
  misc_feature (1)..(88): Homolog of NCBI NO: 18399724 NR Description: myb family transcription factor; protein id: supported by cDNA: gi_14517437, supported by cDNA: gi_20908077
  misc_feature (1)..(79): Homolog of NCBI NO: 34901838 NR Description: putative myb-related protein [Oryza sativa
  misc_feature (1)..(77): Homolog of NCBI NO: 15222565 NR Description: putative MYB family transcription factor; protein At1g63910.1, supported by cDNA: gi_15375284 [Arabidopsis
  misc_feature (1)..(45): Homolog of NCBI NO: 22329445 NR Description: myb family transcription factor; protein id: supported by cDNA: gi_20465974 [Arabidopsis thaliana] putative transcription factor [Arabidopsis thaliana]
  misc_feature (1)..(45): Homolog of NCBI NO: 25294104 NR Description: hypothetical protein [imported] - Arabidopsis >gi|3482929|gb|AAC33214.1| Putative transcription factor
  misc_feature (1)..(25): Homolog of NCBI NO: 15223612 NR Description: myb family transcription factor; protein id: supported by cDNA: 250386. [Arabidopsis thaliana]
  misc_feature (1)..(135): Homolog of NCBI NO: 28628949 NR Description: MYB2 [Dendrobium sp. XMW-2002-2]
MASLLTNLPYHNGFNPTTVDDESSRFMSNIITNTNPNFITPSHLSLPSPHVMTPLMFPTSREGDFKFLTTNNPNQSHHHDNNHYNNLDILSPTPTINNHHQPSLSSCPHDNNLQWPALPDFPASTISGFQETLQDYDDANKLNVFVTPFNDNAKKLLCGEVLEGKVLSSSSPISQDHGLFLPTTYNFQMTSTSDHQHHHRVDSYINHMIIPSSSSSSPISCGQYVIT

SEQ ID NO: 81065 - DNA, 1932 bp, Arabidopsis thaliana
  misc_feature (1)..(1932): Ceres Seq. ID no. 12658283
  misc_feature: MA Experiment ID: 20000436 Result: Up-regulated in Transcription
  misc_feature: MA Experiment 20000436 PARAMETER Experiment Name: At_Drought_P Parameter: Age (day) Value: 7
  misc_feature: MA Experiment 20000436 PARAMETER Experiment Name: At_Drought_P Parameter: Organism Value: A. thaliana
  misc_feature: MA Experiment 20000436 PARAMETER Experiment Name: At_Drought_P Parameter: Plant Line Value: WS
  misc_feature: MA Experiment 20000436 PARAMETER Experiment Name: At_Drought_P Parameter: Timepoint (hr) Value: 12
  misc_feature: MA Experiment 20000436 PARAMETER Experiment Name: At_Drought_P Parameter: Tissue Value: Whole Plant
  misc_feature: MA Experiment 20000436 PARAMETER Experiment Name: At_Drought_P Parameter: Treatment Value: Drought vs. No Drought
  misc_feature: MA Experiment ID: 20000437 Result: Up-regulated in Transcription
  misc_feature: MA Experiment 20000437 PARAMETER Experiment Name: At_Drought_P Parameter: Age (day) Value: 8
  misc_feature: MA Experiment 20000437 PARAMETER Experiment Name: At_Drought_P Parameter: Organism Value: A. thaliana
  misc_feature: MA Experiment 20000437 PARAMETER Experiment Name: At_Drought_P Parameter: Plant Line Value: WS
  misc_feature: MA Experiment 20000437 PARAMETER Experiment Name: At_Drought_P Parameter: Timepoint (hr) Value: 24
  misc_feature: MA Experiment 20000437 PARAMETER Experiment Name: At_Drought_P Parameter: Tissue Value: Whole Plant
  misc_feature: MA Experiment 20000437 PARAMETER Experiment Name: At_Drought_P Parameter: Treatment Value: Drought vs. No Drought
  misc_feature: MA Experiment ID: 20001905 Result: Up-regulated in Transcription
  misc_feature: MA Experiment 20001905 PARAMETER Experiment Name: At_Drought_Reproduction_P Parameter: Age (day) Value: 40
  misc_feature: MA Experiment 20001905 PARAMETER Experiment Name: At_Drought_Reproduction_P Parameter: Organism Value: A. thaliana
  misc_feature: MA Experiment 20001905 PARAMETER Experiment Name: At_Drought_Reproduction_P Parameter: Plant Line Value: WS
  misc_feature: MA Experiment 20001905 PARAMETER Experiment Name: At_Drought_Reproduction_P Parameter: Timepoint (day) Value: 10
  misc_feature: MA Experiment 20001905 PARAMETER Experiment Name: At_Drought_Reproduction_P Parameter: Tissue Value: Rosettes
  misc_feature: MA Experiment 20001905 PARAMETER Experiment Name: At_Drought_Reproduction_P Parameter: Treatment Value: Drought vs. No Drought
atgagcgcggttagttttctttacagctcgaaaacccccaaatttcgaggggttttcaatgggatttgtgctctggttctgttttgcttcttctttgatcggagcgaattactcagaaaccctttgttaaggaacgcgtctttcgtcaatggtggtagtggctcaacctccggaggtatcacccagtttatggtaattcgtagaaatgcgaggcaaattgaaacgaatggttctggtaataatagcagcttgagtagcagtagtactgttttatgctcagggttacacaaacacatgggttatgctgatcaatgcgagttcttaaaagcaaacccaatttgttcccctgatggattctttgattacctcagcttcttttactgctcctgtagagatttcagtatcttgggttacatgatgttaggtgtttggcttgttgctttgttttatctgttgggtaatactgctgctgattacttttgttgttcactggagaagctttcaaagcttttgaggctgcctccaactgttgctggtgttactttacttcctcttgggaatggagcaccagatgtgtttgctagtatagctgcttttgttggtacagataaaggagaagttggtcttaacagcgtcttgggtggtgctgtgtttgttacttctgttgttgtagggattgtttcgctttgtgttgcggataaggaagtcaagatcgataagaattgcttcatcagagacttgagtttcttccttttctcgcttgtgtctttgctggtgattttgatggttggtagagtgacagtccggattgccatcgcgtttgtctcaatatatgtggtttatgctttccttgtggcagcgaatgtgattctgagaaaacatgctaagaggtttaaactagaggctcttactcctttgctacctatgcaaggaagtgtgttttccccgagtgttggagaggatatgccaatgaatacccccttgatagaaactgagactgaggatggtccacctcggctacagagtcttcctcagtggatgtgggcgtcaaatgtggccatctattcaaaccatttcgcaaaagttagtgtacatgatgaagacaggccaccttggggatggattgatgacactgcagaagtagagagctcctcatgtactaaattcacttccttgttggaaattccgctgaccattccaaggagattaacaattccatcggtcgaagaagatacatggtcaaagacatatgctgtggccagcgtctcattagcgcctgtccttttggcgtctctctggagtagccaagacgatgtgagtctccaagcttgtggtgtcgcatactttttcagcgttgttataggctccactcttggctttctggcttacaaaaacacagaacctgatcacccacctcgaagattcttgatcccttgggttcttggtgggtttataatgagcatcgtatggttctacatgatagcaaacgaactcgttgctcttctggtgacatttggtgagatttacggaatcaacccgtcgatacttgcgctaacagtacttgcttggggaaactcaatgggtgacttagtatcgaatatcgcattgacaatgaacggtggggatggtgtacaaatcgctctatcgggatgctacgccggtccaatgttcaacacactcgtcgggctaggtatgtcgatgctttttggcgcatggtccaagagtcctgacacatacatgctaccagaagacaaaagcctattctacacacttgggtttctagtactcggtttggtttgggctatggtgatactcccgcgcaacgacatgcaacctagcagaaccttaggtgttggactcattgcaatatatctgatattcgtcactttcaggctgagctgcgccatgggattcataccatgggctgcttaa

SEQ ID NO: 81066 - protein, 643 aa, Arabidopsis thaliana
  peptide (1)..(643): Ceres Seq. ID no. 12658284
  misc_feature (489)..(631): Pfam Name: Sodium/calcium exchanger protein Pfam Description: Sodium/calcium exchanger protein
  misc_feature (1)..(643): Homolog of NCBI NO: 18404796 NR Description: unknown protein; protein id: At1g54115.1
  misc_feature (24)..(640): Homolog of NCBI NO: 24960738 NR Description: Putative potassium-dependent sodium-calcium
  misc_feature (81)..(342): Homolog of NCBI NO: 18087575 NR Description: AT5g17860/MVA3_210 [Arabidopsis thaliana]
  misc_feature (376)..(639): Homolog of NCBI NO: 18087575 NR Description: AT5g17860/MVA3_210 [Arabidopsis thaliana]
  misc_feature (82)..(342): Homolog of NCBI NO: 15238665 NR Description: potassium-dependent sodium-calcium exchanger - protein; protein id: At5g17860.1, supported by cDNA: gi_18087574 thaliana] >gi|10177887|dbj|BAB11219.1| contains similarity to
  misc_feature (376)..(639): Homolog of NCBI NO: 15238665 NR Description: potassium-dependent sodium-calcium exchanger - protein; protein id: At5g17860.1, supported by cDNA: gi_18087574 thaliana] >gi|10177887|dbj|BAB11219.1| contains similarity to
  misc_feature (393)..(637): Homolog of NCBI NO: 15238663 NR Description: potassium-dependent sodium-calcium exchanger -
  misc_feature (80)..(285): Homolog of NCBI NO: 15238663 NR Description: potassium-dependent sodium-calcium exchanger -
  misc_feature (366)..(642): Homolog of NCBI NO: 18483233 NR Description: K-exchanger-like protein [Sorghum bicolor]
  misc_feature (92)..(307): Homolog of NCBI NO: 18483233 NR Description: K-exchanger-like protein [Sorghum bicolor]
MSAVSFLYSSKTPKFRGVFNGICALVLFCFFFDRSELLRNPLLRNASFVNGGSGSTSGGITQFMVIRRNARQIETNGSGNNSSLSSSSTVLCSGLHKHMGYADQCEFLKANPICSPDGFFDYLSFFYCSCRDFSILGYMMLGVWLVALFYLLGNTAADYFCCSLEKLSKLLRLPPTVAGVTLLPLGNGAPDVFASIAAFVGTDKGEVGLNSVLGGAVFVTSVVVGIVSLCVADKEVKIDKNCFIRDLSFFLFSLVSLLVILMVGRVTVRIAIAFVSIYVVYAFLVAANVILRKHAKRFKLEALTPLLPMQGSVFSPSVGEDMPMNTPLIETETEDGPPRLQSLPQWMWASNVAIYSNHFAKVSVHDEDRPPWGWIDDTAEVESSSCTKFTSLLEIPLTIPRRLTIPSVEEDTWSKTYAVASVSLAPVLLASLWSSQDDVSLQACGVAYFFSVVIGSTLGFLAYKNTEPDHPPRRFLIPWVLGGFIMSIVWFYMIANELVALLVTFGEIYGINPSILALTVLAWGNSMGDLVSNIALTMNGGDGVQIALSGCYAGPMFNTLVGLGMSMLFGAWSKSPDTYMLPEDKSLFYTLGFLVLGLVWAMVILPRNDMQPSRTLGVGLIAIYLIFVTFRLSCAMGFIPWAA

SEQ ID NO: 81067 - protein, 580 aa, Arabidopsis thaliana
  peptide (1)..(580): Ceres Seq. ID no. 12658285
  misc_feature (426)..(568): Pfam Name: Sodium/calcium exchanger protein Pfam Description: Sodium/calcium exchanger protein
  misc_feature (1)..(580): Homolog of NCBI NO: 18404796 NR Description: unknown protein; protein id: At1g54115.1
  misc_feature (1)..(577): Homolog of NCBI NO: 24960738 NR Description: Putative potassium-dependent sodium-calcium
  misc_feature (18)..(279): Homolog of NCBI NO: 18087575 NR Description: AT5g17860/MVA3_210 [Arabidopsis thaliana]
  misc_feature (313)..(576): Homolog of NCBI NO: 18087575 NR Description: AT5g17860/MVA3_210 [Arabidopsis thaliana]
  misc_feature (19)..(279): Homolog of NCBI NO: 15238665 NR Description: potassium-dependent sodium-calcium exchanger - protein; protein id: At5g17860.1, supported by cDNA: gi_18087574 thaliana] >gi|10177887|dbj|BAB11219.1| contains similarity to
  misc_feature (313)..(576): Homolog of NCBI NO: 15238665 NR Description: potassium-dependent sodium-calcium exchanger - protein; protein id: At5g17860.1, supported by cDNA: gi_18087574 thaliana] >gi|10177887|dbj|BAB11219.1| contains similarity to
  misc_feature (330)..(574): Homolog of NCBI NO: 15238663 NR Description: potassium-dependent sodium-calcium exchanger -
  misc_feature (17)..(222): Homolog of NCBI NO: 15238663 NR Description: potassium-dependent sodium-calcium exchanger -
  misc_feature (303)..(579): Homolog of NCBI NO: 18483233 NR Description: K-exchanger-like protein [Sorghum bicolor]
  misc_feature (29)..(244): Homolog of NCBI NO: 18483233 NR Description: K-exchanger-like protein [Sorghum bicolor]
MVIRRNARQIETNGSGNNSSLSSSSTVLCSGLHKHMGYADQCEFLKANPICSPDGFFDYLSFFYCSCRDFSILGYMMLGVWLVALFYLLGNTAADYFCCSLEKLSKLLRLPPTVAGVTLLPLGNGAPDVFASIAAFVGTDKGEVGLNSVLGGAVFVTSVVVGIVSLCVADKEVKIDKNCFIRDLSFFLFSLVSLLVILMVGRVTVRIAIAFVSIYVVYAFLVAANVILRKHAKRFKLEALTPLLPMQGSVFSPSVGEDMPMNTPLIETETEDGPPRLQSLPQWMWASNVAIYSNHFAKVSVHDEDRPPWGWIDDTAEVESSSCTKFTSLLEIPLTIPRRLTIPSVEEDTWSKTYAVASVSLAPVLLASLWSSQDDVSLQACGVAYFFSVVIGSTLGFLAYKNTEPDHPPRRFLIPWVLGGFIMSIVWFYMIANELVALLVTFGEIYGINPSILALTVLAWGNSMGDLVSNIALTMNGGDGVQIALSGCYAGPMFNTLVGLGMSMLFGAWSKSPDTYMLPEDKSLFYTLGFLVLGLVWAMVILPRNDMQPSRTLGVGLIAIYLIFVTFRLSCAMGFIPWAA

SEQ ID NO: 81068 - protein, 545 aa, Arabidopsis thaliana
  peptide (1)..(545): Ceres Seq. ID no. 12658286
  misc_feature (391)..(533): Pfam Name: Sodium/calcium exchanger protein Pfam Description: Sodium/calcium exchanger protein
  misc_feature (1)..(545): Homolog of NCBI NO: 18404796 NR Description: unknown protein; protein id: At1g54115.1
  misc_feature (1)..(542): Homolog of NCBI NO: 24960738 NR Description: Putative potassium-dependent sodium-calcium
  misc_feature (1)..(244): Homolog of NCBI NO: 18087575 NR Description: AT5g17860/MVA3_210 [Arabidopsis thaliana]
  misc_feature (278)..(541): Homolog of NCBI NO: 18087575 NR Description: AT5g17860/MVA3_210 [Arabidopsis thaliana]
  misc_feature (1)..(244): Homolog of NCBI NO: 15238665 NR Description: potassium-dependent sodium-calcium exchanger - protein; protein id: At5g17860.1, supported by cDNA: gi_18087574 thaliana] >gi|10177887|dbj|BAB11219.1| contains similarity to
  misc_feature (278)..(541): Homolog of NCBI NO: 15238665 NR Description: potassium-dependent sodium-calcium exchanger - protein; protein id: At5g17860.1, supported by cDNA: gi_18087574 thaliana] >gi|10177887|dbj|BAB11219.1| contains similarity to
  misc_feature (295)..(539): Homolog of NCBI NO: 15238663 NR Description: potassium-dependent sodium-calcium exchanger -
  misc_feature (1)..(187): Homolog of NCBI NO: 15238663 NR Description: potassium-dependent sodium-calcium exchanger -
  misc_feature (268)..(544): Homolog of NCBI NO: 18483233 NR Description: K-exchanger-like protein [Sorghum bicolor]
  misc_feature (1)..(209): Homolog of NCBI NO: 18483233 NR Description: K-exchanger-like protein [Sorghum bicolor]
MGYADQCEFLKANPICSPDGFFDYLSFFYCSCRDFSILGYMMLGVWLVALFYLLGNTAADYFCCSLEKLSKLLRLPPTVAGVTLLPLGNGAPDVFASIAAFVGTDKGEVGLNSVLGGAVFVTSVVVGIVSLCVADKEVKIDKNCFIRDLSFFLFSLVSLLVILMVGRVTVRIAIAFVSIYVVYAFLVAANVILRKHAKRFKLEALTPLLPMQGSVFSPSVGEDMPMNTPLIETETEDGPPRLQSLPQWMWASNVAIYSNHFAKVSVHDEDRPPWGWIDDTAEVESSSCTKFTSLLEIPLTIPRRLTIPSVEEDTWSKTYAVASVSLAPVLLASLWSSQDDVSLQACGVAYFFSVVIGSTLGFLAYKNTEPDHPPRRFLIPWVLGGFIMSIVWFYMIANELVALLVTFGEIYGINPSILALTVLAWGNSMGDLVSNIALTMNGGDGVQIALSGCYAGPMFNTLVGLGMSMLFGAWSKSPDTYMLPEDKSLFYTLGFLVLGLVWAMVILPRNDMQPSRTLGVGLIAIYLIFVTFRLSCAMGFIPWAA

SEQ ID NO: 81069 - DNA, 1773 bp, Arabidopsis thaliana
  misc_feature (1)..(1773): Ceres Seq. ID no. 12658291
  misc_feature: MA Experiment ID: 20000265 Result: Down-regulated in Transcription
  misc_feature: MA Experiment 20000265 PARAMETER Experiment Name: At_Open_Flower_P Parameter: Age (day) Value: 21
  misc_feature: MA Experiment 20000265 PARAMETER Experiment Name: At_Open_Flower_P Parameter: Plant Line Value: WS
  misc_feature: MA Experiment 20000265 PARAMETER Experiment Name: At_Open_Flower_P Parameter: Tissue Value: Closed Flower vs. Whole Plant
  misc_feature: MA Experiment ID: 20000437 Result: Up-regulated in Transcription
  misc_feature: MA Experiment 20000437 PARAMETER Experiment Name: At_Drought_P Parameter: Age (day) Value: 8
  misc_feature: MA Experiment 20000437 PARAMETER Experiment Name: At_Drought_P Parameter: Organism Value: A. thaliana
  misc_feature: MA Experiment 20000437 PARAMETER Experiment Name: At_Drought_P Parameter: Plant Line Value: WS
  misc_feature: MA Experiment 20000437 PARAMETER Experiment Name: At_Drought_P Parameter: Timepoint (hr) Value: 24
  misc_feature: MA Experiment 20000437 PARAMETER Experiment Name: At_Drought_P Parameter: Tissue Value: Whole Plant
  misc_feature: MA Experiment 20000437 PARAMETER Experiment Name: At_Drought_P Parameter: Treatment Value: Drought vs. No Drought
  misc_feature: MA Experiment ID: 20001905 Result: Up-regulated in Transcription
  misc_feature: MA Experiment 20001905 PARAMETER Experiment Name: At_Drought_Reproduction_P Parameter: Age (day) Value: 40
  misc_feature: MA Experiment 20001905 PARAMETER Experiment Name: At_Drought_Reproduction_P Parameter: Organism Value: A. thaliana
  misc_feature: MA Experiment 20001905 PARAMETER Experiment Name: At_Drought_Reproduction_P Parameter: Plant Line Value: WS
  misc_feature: MA Experiment 20001905 PARAMETER Experiment Name: At_Drought_Reproduction_P Parameter: Timepoint (day) Value: 10
  misc_feature: MA Experiment 20001905 PARAMETER Experiment Name: At_Drought_Reproduction_P Parameter: Tissue Value: Rosettes
  misc_feature: MA Experiment 20001905 PARAMETER Experiment Name: At_Drought_Reproduction_P Parameter: Treatment Value: Drought vs. No Drought
ttcctcgaggaaccatcagtctctccgtctttaaccgtcgaagttggagaagataccaccgtaactcccgaagaagaagaattaaattctccaggtggttccggttcaagccggttaactcgtagaagaagcagttacagatccactagcagtatacgagaaatggatctgatttcgccggaagcagtttctgatctaagatcgattgttcaacgaatggtcgccgccggttactctcgtgaatgtatccaagtctatggaactgttcgcaaatcagccatggaagcaatatttaagcagcttgggattgtgaagataagcattggtgatgttcaaaggcttgagtgggaagttgttgaaggaaagatcaggaaatggattcgtgctgctaaagtttgcattagagttgttttctctagtgagaagagactatgtgagcagctctttgatggtatttgcactgccatggatgagacttgtttcatggagacagtgaaggcttctgctctgagacttttcactttccctgaagctataagtatcagtagaagatcacctgagaagctgttcaagattcttgatttacatgatgctttaacggatatgttgccggatattgaagcaatctttgactcagattcatcagatgctattagagctcaggctgttgagattcaatcgaggttagcggaagcagcgagaggtatactttcggagtttgagaatgcggttcttcgcgaaccttcgatagttcctgtccctggaggaacgattcatccattgacaaggtatgtgatgaactacattgttatgatctctgattataagcaaacgttggatgatctcatcatgtcgaatccctctactggttctgatccaaacacaccggatatggatttcacggagttggatagtaaatctccgttggatttgcatttgatatggttgattgtggtcttgcatttcaacttagaagagaaatccaagcactatagagacacatctctagctcacatattcatcatgaacaacatccattacattgttcagaaagtgaaaaggtcaccagaactacgagagatgattggagaccattatttaaggaaactcactgggatatttagacatgctgccacaaactaccagagagctacatgggtcagagtactgaatagtttgagagatgaaggattacatgtgagtgggagtttctcctcaggtgtatcaagaagtgcattaagagagaggtttaaggcattcaatacaatgttcgaagaggttcacaggactcagtccacatggtcggttccagatgctcagcttagagaagaactccgaatatcgctatccgagcatctaatccctgcttatagatcgtttcttggaaggttcaggggtcatatagagagtggaagacaccctgagaactatttgaaatattcggttgaagatatcgagaccatcgttctagatttcttcgaaggatataccacaccaccacacttgaggaggcgataaaagaagatcgaaaacccgagagttctatcttctttctttcgtttttcagtcacattaggatgtcatagaaatagaaccattctttgaatttttattcacgggtttcctgcccggtggaataatctccaggtgaacatatttgtgtgttgttgtttgtgccatatgtcttctatttataaaagtcctgattgatcacagaaccaataagtaccatgtaaattttgcaatgtgcgacgtcctctactcatttgctcc

SEQ ID NO: 81070 - protein, 505 aa, Arabidopsis thaliana
  peptide (1)..(505): Ceres Seq. ID no. 12658292
  misc_feature (1)..(494): Pfam Name: Exo70 exocyst complex subunit Pfam Description: Exo70 exocyst complex subunit
  misc_feature (1)..(505): Homolog of NCBI NO: 30682979 NR Description: exocyst subunit EXO70 family [Arabidopsis >gi|9294634|dbj|BAB02973.1| gb|AAD25781.1~gene_id:MAG2.5~strong
  misc_feature (3)..(505): Homolog of NCBI NO: 23270388 NR Description: unknown protein [Arabidopsis thaliana]
  misc_feature (2)..(504): Homolog of NCBI NO: 15221040 NR Description: hypothetical protein; protein id: At1g54090.1, by cDNA: gi_20260593 [Arabidopsis thaliana]
  misc_feature (17)..(505): Homolog of NCBI NO: 15218495 NR Description: unknown protein; protein id: At1g72470.1
  misc_feature (33)..(505): Homolog of NCBI NO: 9758920 NR Description: gb|AAD25781.1~gene_id:MXI22.10~strong similarity
  misc_feature (33)..(505): Homolog of NCBI NO: 30695880 NR Description: exocyst subunit EXO70 family [Arabidopsis
  misc_feature (47)..(495): Homolog of NCBI NO: 19386798 NR Description: putative leucine zipper protein [Oryza sativa
  misc_feature (11)..(505): Homolog of NCBI NO: 38346639 NR Description: OSJNBa0072D21.9 [Oryza sativa (japonica
  misc_feature (63)..(495): Homolog of NCBI NO: 100226 NR Description: tomato leucine zipper-containing protein - tomato protein of unknown function [Lycopersicon esculentum]
  misc_feature (24)..(495): Homolog of NCBI NO: 15228701 NR Description: hypothetical protein; protein id: At3g29400.1 thaliana] >gi|11994523|dbj|BAB02587.1|
FLEEPSVSPSLTVEVGEDTTVTPEEEELNSPGGSGSSRLTRRRSSYRSTSSIREMDLISPEAVSDLRSIVQRMVAAGYSRECIQVYGTVRKSAMEAIFKQLGIVKISIGDVQRLEWEVVEGKIRKWIRAAKVCIRVVFSSEKRLCEQLFDGICTAMDETCFMETVKASALRLFTFPEAISISRRSPEKLFKILDLHDALTDMLPDIEAIFDSDSSDAIRAQAVEIQSRLAEAARGILSEFENAVLREPSIVPVPGGTIHPLTRYVMNYIVMISDYKQTLDDLIMSNPSTGSDPNTPDMDFTELDSKSPLDLHLIWLIVVLHFNLEEKSKHYRDTSLAHIFIMNNIHYIVQKVKRSPELREMIGDHYLRKLTGIFRHAATNYQRATWVRVLNSLRDEGLHVSGSFSSGVSRSALRERFKAFNTMFEEVHRTQSTWSVPDAQLREELRISLSEHLIPAYRSFLGRFRGHIESGRHPENYLKYSVEDIETIVLDFFEGYTTPPHLRRR

SEQ ID NO: 81071 - protein, 451 aa, Arabidopsis thaliana
  peptide (1)..(451): Ceres Seq. ID no. 12658293
  misc_feature (1)..(440): Pfam Name: Exo70 exocyst complex subunit Pfam Description: Exo70 exocyst complex subunit
  misc_feature (1)..(451): Homolog of NCBI NO: 30682979 NR Description: exocyst subunit EXO70 family [Arabidopsis >gi|9294634|dbj|BAB02973.1| gb|AAD25781.1~gene_id:MAG2.5~strong
  misc_feature (1)..(451): Homolog of NCBI NO: 23270388 NR Description: unknown protein [Arabidopsis thaliana]
  misc_feature (1)..(450): Homolog of NCBI NO: 15221040 NR Description: hypothetical protein; protein id: At1g54090.1, by cDNA: gi_20260593 [Arabidopsis thaliana]
  misc_feature (1)..(451): Homolog of NCBI NO: 15218495 NR Description: unknown protein; protein id: At1g72470.1
  misc_feature (1)..(451): Homolog of NCBI NO: 9758920 NR Description: gb|AAD25781.1~gene_id:MXI22.10~strong similarity
  misc_feature (1)..(451): Homolog of NCBI NO: 30695880 NR Description: exocyst subunit EXO70 family [Arabidopsis
  misc_feature (1)..(441): Homolog of NCBI NO: 19386798 NR Description: putative leucine zipper protein [Oryza sativa
  misc_feature (1)..(451): Homolog of NCBI NO: 38346639 NR Description: OSJNBa0072D21.9 [Oryza sativa (japonica
  misc_feature (9)..(441): Homolog of NCBI NO: 100226 NR Description: tomato leucine zipper-containing protein - tomato protein of unknown function [Lycopersicon esculentum]
  misc_feature (1)..(441): Homolog of NCBI NO: 15228701 NR Description: hypothetical protein; protein id: At3g29400.1 thaliana] >gi|11994523|dbj|BAB02587.1|
MDLISPEAVSDLRSIVQRMVAAGYSRECIQVYGTVRKSAMEAIFKQLGIVKISIGDVQRLEWEVVEGKIRKWIRAAKVCIRVVFSSEKRLCEQLFDGICTAMDETCFMETVKASALRLFTFPEAISISRRSPEKLFKILDLHDALTDMLPDIEAIFDSDSSDAIRAQAVEIQSRLAEAARGILSEFENAVLREPSIVPVPGGTIHPLTRYVMNYIVMISDYKQTLDDLIMSNPSTGSDPNTPDMDFTELDSKSPLDLHLIWLIVVLHFNLEEKSKHYRDTSLAHIFIMNNIHYIVQKVKRSPELREMIGDHYLRKLTGIFRHAATNYQRATWVRVLNSLRDEGLHVSGSFSSGVSRSALRERFKAFNTMFEEVHRTQSTWSVPDAQLREELRISLSEHLIPAYRSFLGRFRGHIESGRHPENYLKYSVEDIETIVLDFFEGYTTPPHLRRR

SEQ ID NO: 81072 - protein, 433 aa, Arabidopsis thaliana
  peptide (1)..(433): Ceres Seq. ID no. 12658294
  misc_feature (1)..(422): Pfam Name: Exo70 exocyst complex subunit Pfam Description: Exo70 exocyst complex subunit
  misc_feature (1)..(433): Homolog of NCBI NO: 30682979 NR Description: exocyst subunit EXO70 family [Arabidopsis >gi|9294634|dbj|BAB02973.1| gb|AAD25781.1~gene_id:MAG2.5~strong
  misc_feature (1)..(433): Homolog of NCBI NO: 23270388 NR Description: unknown protein [Arabidopsis thaliana]
  misc_feature (1)..(432): Homolog of NCBI NO: 15221040 NR Description: hypothetical protein; protein id: At1g54090.1, by cDNA: gi_20260593 [Arabidopsis thaliana]
  misc_feature (1)..(433): Homolog of NCBI NO: 15218495 NR Description: unknown protein; protein id: At1g72470.1
  misc_feature (1)..(433): Homolog of NCBI NO: 9758920 NR Description: gb|AAD25781.1~gene_id:MXI22.10~strong similarity
  misc_feature (1)..(433): Homolog of NCBI NO: 30695880 NR Description: exocyst subunit EXO70 family [Arabidopsis
  misc_feature (1)..(423): Homolog of NCBI NO: 19386798 NR Description: putative leucine zipper protein [Oryza sativa
  misc_feature (1)..(433): Homolog of NCBI NO: 38346639 NR Description: OSJNBa0072D21.9 [Oryza sativa (japonica
  misc_feature (1)..(423): Homolog of NCBI NO: 100226 NR Description: tomato leucine zipper-containing protein - tomato protein of unknown function [Lycopersicon esculentum]
  misc_feature (1)..(423): Homolog of NCBI NO: 15228701 NR Description: hypothetical protein; protein id: At3g29400.1 thaliana] >gi|11994523|dbj|BAB02587.1|
MVAAGYSRECIQVYGTVRKSAMEAIFKQLGIVKISIGDVQRLEWEVVEGKIRKWIRAAKVCIRVVFSSEKRLCEQLFDGICTAMDETCFMETVKASALRLFTFPEAISISRRSPEKLFKILDLHDALTDMLPDIEAIFDSDSSDAIRAQAVEIQSRLAEAARGILSEFENAVLREPSIVPVPGGTIHPLTRYVMNYIVMISDYKQTLDDLIMSNPSTGSDPNTPDMDFTELDSKSPLDLHLIWLIVVLHFNLEEKSKHYRDTSLAHIFIMNNIHYIVQKVKRSPELREMIGDHYLRKLTGIFRHAATNYQRATWVRVLNSLRDEGLHVSGSFSSGVSRSALRERFKAFNTMFEEVHRTQSTWSVPDAQLREELRISLSEHLIPAYRSFLGRFRGHIESGRHPENYLKYSVEDIETIVLDFFEGYTTPPHLRRR

SEQ ID NO: 81073 - DNA, 2959 bp, Arabidopsis thaliana
  misc_feature (1)..(2959): Ceres Seq. ID no. 12658303
  misc_feature: MA Experiment ID: 20000179 Result: Up-regulated in Transcription
  misc_feature: MA Experiment 20000179 PARAMETER Experiment Name: At_Germinating_Seeds_P Parameter: Age (hr) Value: 6 vs. 0
  misc_feature: MA Experiment 20000179 PARAMETER Experiment Name: At_Germinating_Seeds_P Parameter: Tissue Value: Germinating Seeds
  misc_feature: MA Experiment ID: 20000184 Result: Down-regulated in Transcription
  misc_feature: MA Experiment 20000184 PARAMETER Experiment Name: At_Shoots__P Parameter: Age (day) Value: 7
  misc_feature: MA Experiment 20000184 PARAMETER Experiment Name: At_Shoots__P Parameter: Tissue Value: Shoots vs. Whole Plant
  misc_feature: MA Experiment ID: 20000794 Result: Up-regulated in Transcription
  misc_feature: MA Experiment 20000794 PARAMETER Experiment Name: At_Petals_P Parameter: Age (day) Value: 23-25 days
  misc_feature: MA Experiment 20000794 PARAMETER Experiment Name: At_Petals_P Parameter: Plant Line Value: WS
  misc_feature: MA Experiment 20000794 PARAMETER Experiment Name: At_Petals_P Parameter: Tissue Value: Petals vs. Whole plant
  misc_feature: MA Experiment ID: 20001451 Result: Up-regulated in Transcription
  misc_feature: MA Experiment 20001451 PARAMETER Experiment Name: At_Far-red-induction_P Parameter: Age (day) Value: 7
  misc_feature: MA Experiment 20001451 PARAMETER Experiment Name: At_Far-red-induction_P Parameter: Light Value: Far-red vs. White
  misc_feature: MA Experiment 20001451 PARAMETER Experiment Name: At_Far-red-induction_P Parameter: Organism Value: A. thaliana
  misc_feature: MA Experiment 20001451 PARAMETER Experiment Name: At_Far-red-induction_P Parameter: Plant Line Value: Columbia
  misc_feature: MA Experiment 20001451 PARAMETER Experiment Name: At_Far-red-induction_P Parameter: Timepoint (hr) Value: 24
  misc_feature: MA Experiment 20001451 PARAMETER Experiment Name: At_Far-red-induction_P Parameter: Tissue Value: Whole Plant
  misc_feature: MA Experiment ID: 20001911 Result: Up-regulated in Transcription
  misc_feature: MA Experiment 20001911 PARAMETER Experiment Name: At_Drought_Reproduction_P Parameter: Age (day) Value: 40
  misc_feature: MA Experiment 20001911 PARAMETER Experiment Name: At_Drought_Reproduction_P Parameter: Organism Value: A. thaliana
  misc_feature: MA Experiment 20001911 PARAMETER Experiment Name: At_Drought_Reproduction_P Parameter: Plant Line Value: WS
  misc_feature: MA Experiment 20001911 PARAMETER Experiment Name: At_Drought_Reproduction_P Parameter: Timepoint (day) Value: 10
  misc_feature: MA Experiment 20001911 PARAMETER Experiment Name: At_Drought_Reproduction_P Parameter: Tissue Value: Flowers
  misc_feature: MA Experiment 20001911 PARAMETER Experiment Name: At_Drought_Reproduction_P Parameter: Treatment Value: Drought vs. No Drought
aaacccagaaatcaccaaaaaaaaaaaaagtacatttcctttttttttgttcttaaatttttctgtggttccggtcaccgcagctctgtcatcatcttcttcttcttcatttaccaatctgaaatctactcagattctttgtgattttctccttaaaatctcgatctgtatcgtacagtgacttgtgaaattaggatcgttgtgtctgtgttttctggttacagtttgtaaaatttgaatatttgtgtgtgaagtcagattcagtttcgtgagctgttcggatttggtttgggggtatatatatagcgttgtgtgatctatttggggggttttggtttccctttttttctctcttgtgaattcgtttattgttgtatcgtcggcccgagtttatcggaactccgggtctgacgtgagttttccaaatggcggcgtcagagagatcgattgacaaagaagtcgacatgggttcttcctttcttcaaaaattcaggctttacgagacccgctcgagcttctatatgattggaagagataaaaatcgaacgtcttggagggtcctgaagttagataggacagagccagcagaggtcaatatctacgaagattcaacggcttacacagaagctgaatgctttgaaactttgagaaggatacacgagggaaacagatcatctggtggtttgaaatttgtcaccacctgctacgggatcatcggattcataaggttcttgggaccttattacatgctgataatcactaaaagaaagaagcttggtgaaatttgtgggcacactgtttatggtgttgcgaagagcaagatcatcacgattccacatgcctctgtgctatccaatgtggcttattctaaggacgagaaaaggtacaagaggctgctctgcactgttgatctcacaaaggacttcttcttcagctattcctatcacatcatgcatacacttcagaggaatctgtctaacaatgtggaaggacacacttactacgaatcgatgtttgtctggaacgaatacttaactcgaaggattcggaataacgtgaaggactgtatgtggacagttgccttggtatatggatttttcaaacaggtcaaactatcagtttctgagaagaactttagattgactctaatttctcgcagatctcggcattatgctggtacaagatatctgaaacgtggtgtaaacgagaaaggcagggtagctaatgatgttgagacagagcagattgttttcgaggaagctcaagatggtaatcccggccgaataagttctgtagttcagaatcggggttcaattcctttgttctggtctcaggagacctcacgcttgaatatcaaacctgatataatattgtcaccgaaagaccccaactttgaggcaaccagactgcattttgaaaatcttggaaggagatatgggaatccaatcatcatactgaacttgataaagacgcgtgaaaagaggcctcgggagactattctgcgtgcagagtttgcaaatgcaattagatttattaataaagggttaagcaaagaggatcgtctaaggcctcttcactgggacttgcataaacactccagaaaaaaaggcacaaacgtgttggcaattctcggcaggttggctacttatgctctgaacttgaccagcatcttctactgtcaattaactccagatcttagaggagaaggatttcagaaccagaatccatccaccttggagaacgacgatggtgaatgttctacttatgatccacccagtaaagatgaaactgcaccaaatttggtggtggaaaacggtaatgatagtaaggatgctaaggaagatcagcaaaaggaagttaccatgctgcagaaaggagtcctgaggaccaattgcatagactgtttagatcgcaccaatgttgctcaatatgcctatgggttggtagcatttgggcgtcaactccatgctttgggattgacagagtctactaatattgatctagacaatcccctcgctgaagatttgatgggaatttatgagacgatgggagatacacttgcacttcagtatggaggatccgcggcacacaacaagatattttgtgaaaggcgtggtcaatggagagcagcgactcaatcacaggaattcttcagaactttacaacgttactacagtaacgcctatatggatgccgaaaagcaagatgcaattaacgtgttcttgggatactttcagccacaatcagataagccagcgctatgggaattgggttctgatcagcattacaacgcagcaagatttcttgccaattctgtaccagagacttcaagatcgacgatgaaacgatctctatcagaaagtagcatcattagcgagagcagtccagccgcattgggaccagtaggtagacatggtttagctgaaaaagatgaagaagttaaaggtctttcagattcagcaccggagatctcaacgtctgaaactgccaagattgctgctagtttgagtgctccaccaccgatattagaggaattaggtttagatgatattcttgaaaacgattgcttctgctgtgatgggaatggtgagcaatgtacatgtgcagcttttgatatggattgggtatcttcttcaggaaactcttgtgaagatgagagttgcggaagagccacagtggttagatcctttgaaaccatccctgaaagtagaaaaatagagtcagaaatttgtgttgttgaaacagttggttccaacagtagaaagggaaataaagaagaagaagaagccatttccgggattcctgaaggttatgtgaggtgggtgatggatgaagacggtcatttctggtgatgagagaacaaagcttttcaacaacacctacaagccatatgaaacaaaaccaaaaaaagcaaaacaaaaacaagaaagagcatactctttagtctttagtgggtgac

SEQ ID NO: 81074 - protein, 808 aa, Arabidopsis thaliana
  peptide (1)..(808): Ceres Seq. ID no. 12658304
  misc_feature (93)..(399): Pfam Name: SacI homology domain Pfam Description: SacI homology domain
  misc_feature (15)..(446): Homolog of NCBI NO: 15217295 NR Description: Putative phosphoinositide phosphatase [Oryza
  misc_feature (444)..(785): Homolog of NCBI NO: 15217295 NR Description: Putative phosphoinositide phosphatase [Oryza
  misc_feature (19)..(790): Homolog of NCBI NO: 30688003 NR Description: expressed protein [Arabidopsis thaliana]
  misc_feature (19)..(800): Homolog of NCBI NO: 22331537 NR Description: putative protein; protein id: At3g43220.1,
  misc_feature (170)..(800): Homolog of NCBI NO: 11357847 NR Description: hypothetical protein F7K15.70 - Arabidopsis >gi|7649362|emb|CAB89043.1| putative protein [Arabidopsis
  misc_feature (19)..(154): Homolog of NCBI NO: 11357847 NR Description: hypothetical protein F7K15.70 - Arabidopsis >gi|7649362|emb|CAB89043.1| putative protein [Arabidopsis
  misc_feature (19)..(600): Homolog of NCBI NO: 20453210 NR Description: AT3g43220/F7K15_70 [Arabidopsis thaliana]
  misc_feature (7)..(687): Homolog of NCBI NO: 22329733 NR Description: unknown protein; protein id: At1g22620.1,
  misc_feature (19)..(464): Homolog of NCBI NO: 22329625 NR Description: unknown protein; protein id: At1g17340.1, by cDNA: gi_20147340 [Arabidopsis thaliana] At1g17340/F28G4_6 [Arabidopsis thaliana]
  misc_feature (467)..(649): Homolog of NCBI NO: 22329625 NR Description: unknown protein; protein id: At1g17340.1, by cDNA: gi_20147340 [Arabidopsis thaliana] At1g17340/F28G4_6 [Arabidopsis thaliana]
MAASERSIDKEVDMGSSFLQKFRLYETRSSFYMIGRDKNRTSWRVLKLDRTEPAEVNIYEDSTAYTEAECFETLRRIHEGNRSSGGLKFVTTCYGIIGFIRFLGPYYMLIITKRKKLGEICGHTVYGVAKSKIITIPHASVLSNVAYSKDEKRYKRLLCTVDLTKDFFFSYSYHIMHTLQRNLSNNVEGHTYYESMFVWNEYLTRRIRNNVKDCMWTVALVYGFFKQVKLSVSEKNFRLTLISRRSRHYAGTRYLKRGVNEKGRVANDVETEQIVFEEAQDGNPGRISSVVQNRGSIPLFWSQETSRLNIKPDIILSPKDPNFEATRLHFENLGRRYGNPIIILNLIKTREKRPRETILRAEFANAIRFINKGLSKEDRLRPLHWDLHKHSRKKGTNVLAILGRLATYALNLTSIFYCQLTPDLRGEGFQNQNPSTLENDDGECSTYDPPSKDETAPNLVVENGNDSKDAKEDQQKEVTMLQKGVLRTNCIDCLDRTNVAQYAYGLVAFGRQLHALGLTESTNIDLDNPLAEDLMGIYETMGDTLALQYGGSAAHNKIFCERRGQWRAATQSQEFFRTLQRYYSNAYMDAEKQDAINVFLGYFQPQSDKPALWELGSDQHYNAARFLANSVPETSRSTMKRSLSESSIISESSPAALGPVGRHGLAEKDEEVKGLSDSAPEISTSETAKIAASLSAPPPILEELGLDDILENDCFCCDGNGEQCTCAAFDMDWVSSSGNSCEDESCGRATVVRSFETIPESRKIESEICVVETVGSNSRKGNKEEEEAISGIPEGYVRWVMDEDGHFW

SEQ ID NO: 81075 - protein, 795 aa, Arabidopsis thaliana
  peptide (1)..(795): Ceres Seq. ID no. 12658305
  misc_feature (80)..(386): Pfam Name: SacI homology domain Pfam Description: SacI homology domain
  misc_feature (2)..(433): Homolog of NCBI NO: 15217295 NR Description: Putative phosphoinositide phosphatase [Oryza
  misc_feature (431)..(772): Homolog of NCBI NO: 15217295 NR Description: Putative phosphoinositide phosphatase [Oryza
  misc_feature (6)..(777): Homolog of NCBI NO: 30688003 NR Description: expressed protein [Arabidopsis thaliana]
  misc_feature (6)..(787): Homolog of NCBI NO: 22331537 NR Description: putative protein; protein id: At3g43220.1,
  misc_feature (157)..(787): Homolog of NCBI NO: 11357847 NR Description: hypothetical protein F7K15.70 - Arabidopsis >gi|7649362|emb|CAB89043.1| putative protein [Arabidopsis
  misc_feature (6)..(141): Homolog of NCBI NO: 11357847 NR Description: hypothetical protein F7K15.70 - Arabidopsis >gi|7649362|emb|CAB89043.1| putative protein [Arabidopsis
  misc_feature (6)..(587): Homolog of NCBI NO: 20453210 NR Description: AT3g43220/F7K15_70 [Arabidopsis thaliana]
  misc_feature (1)..(674): Homolog of NCBI NO: 22329733 NR Description: unknown protein; protein id: At1g22620.1,
  misc_feature (6)..(451): Homolog of NCBI NO: 22329625 NR Description: unknown protein; protein id: At1g17340.1, by cDNA: gi_20147340 [Arabidopsis thaliana] At1g17340/F28G4_6 [Arabidopsis thaliana]
  misc_feature (454)..(636): Homolog of NCBI NO: 22329625 NR Description: unknown protein; protein id: At1g17340.1, by cDNA: gi_20147340 [Arabidopsis thaliana] At1g17340/F28G4_6 [Arabidopsis thaliana]
MGSSFLQKFRLYETRSSFYMIGRDKNRTSWRVLKLDRTEPAEVNIYEDSTAYTEAECFETLRRIHEGNRSSGGLKFVTTCYGIIGFIRFLGPYYMLIITKRKKLGEICGHTVYGVAKSKIITIPHASVLSNVAYSKDEKRYKRLLCTVDLTKDFFFSYSYHIMHTLQRNLSNNVEGHTYYESMFVWNEYLTRRIRNNVKDCMWTVALVYGFFKQVKLSVSEKNFRLTLISRRSRHYAGTRYLKRGVNEKGRVANDVETEQIVFEEAQDGNPGRISSVVQNRGSIPLFWSQETSRLNIKPDIILSPKDPNFEATRLHFENLGRRYGNPIIILNLIKTREKRPRETILRAEFANAIRFINKGLSKEDRLRPLHWDLHKHSRKKGTNVLAILGRLATYALNLTSIFYCQLTPDLRGEGFQNQNPSTLENDDGECSTYDPPSKDETAPNLVVENGNDSKDAKEDQQKEVTMLQKGVLRTNCIDCLDRTNVAQYAYGLVAFGRQLHALGLTESTNIDLDNPLAEDLMGIYETMGDTLALQYGGSAAHNKIFCERRGQWRAATQSQEFFRTLQRYYSNAYMDAEKQDAINVFLGYFQPQSDKPALWELGSDQHYNAARFLANSVPETSRSTMKRSLSESSIISESSPAALGPVGRHGLAEKDEEVKGLSDSAPEISTSETAKIAASLSAPPPILEELGLDDILENDCFCCDGNGEQCTCAAFDMDWVSSSGNSCEDESCGRATVVRSFETIPESRKIESEICVVETVGSNSRKGNKEEEEAISGIPEGYVRWVMDEDGHFW

SEQ ID NO: 81076 - protein, 776 aa, Arabidopsis thaliana
  peptide (1)..(776): Ceres Seq. ID no. 12658306
  misc_feature (61)..(367): Pfam Name: SacI homology domain Pfam Description: SacI homology domain
  misc_feature (1)..(414): Homolog of NCBI NO: 15217295 NR Description: Putative phosphoinositide phosphatase [Oryza
  misc_feature (412)..(753): Homolog of NCBI NO: 15217295 NR Description: Putative phosphoinositide phosphatase [Oryza
  misc_feature (1)..(758): Homolog of NCBI NO: 30688003 NR Description: expressed protein [Arabidopsis thaliana]
  misc_feature (1)..(768): Homolog of NCBI NO: 22331537 NR Description: putative protein; protein id: At3g43220.1,
  misc_feature (138)..(768): Homolog of NCBI NO: 11357847 NR Description: hypothetical protein F7K15.70 - Arabidopsis >gi|7649362|emb|CAB89043.1| putative protein [Arabidopsis
  misc_feature (1)..(122): Homolog of NCBI NO: 11357847 NR Description: hypothetical protein F7K15.70 - Arabidopsis >gi|7649362|emb|CAB89043.1| putative protein [Arabidopsis
  misc_feature (1)..(568): Homolog of NCBI NO: 20453210 NR Description: AT3g43220/F7K15_70 [Arabidopsis thaliana]
  misc_feature (1)..(655): Homolog of NCBI NO: 22329733 NR Description: unknown protein; protein id: At1g22620.1,
  misc_feature (1)..(432): Homolog of NCBI NO: 22329625 NR Description: unknown protein; protein id: At1g17340.1, by cDNA: gi_20147340 [Arabidopsis thaliana] At1g17340/F28G4_6 [Arabidopsis thaliana]
  misc_feature (435)..(617): Homolog of NCBI NO: 22329625 NR Description: unknown protein; protein id: At1g17340.1, by cDNA: gi_20147340 [Arabidopsis thaliana] At1g17340/F28G4_6 [Arabidopsis thaliana]
MIGRDKNRTSWRVLKLDRTEPAEVNIYEDSTAYTEAECFETLRRIHEGNRSSGGLKFVTTCYGIIGFIRFLGPYYMLIITKRKKLGEICGHTVYGVAKSKIITIPHASVLSNVAYSKDEKRYKRLLCTVDLTKDFFFSYSYHIMHTLQRNLSNNVEGHTYYESMFVWNEYLTRRIRNNVKDCMWTVALVYGFFKQVKLSVSEKNFRLTLISRRSRHYAGTRYLKRGVNEKGRVANDVETEQIVFEEAQDGNPGRISSVVQNRGSIPLFWSQETSRLNIKPDIILSPKDPNFEATRLHFENLGRRYGNPIIILNLIKTREKRPRETILRAEFANAIRFINKGLSKEDRLRPLHWDLHKHSRKKGTNVLAILGRLATYALNLTSIFYCQLTPDLRGEGFQNQNPSTLENDDGECSTYDPPSKDETAPNLVVENGNDSKDAKEDQQKEVTMLQKGVLRTNCIDCLDRTNVAQYAYGLVAFGRQLHALGLTESTNIDLDNPLAEDLMGIYETMGDTLALQYGGSAAHNKIFCERRGQWRAATQSQEFFRTLQRYYSNAYMDAEKQDAINVFLGYFQPQSDKPALWELGSDQHYNAARFLANSVPETSRSTMKRSLSESSIISESSPAALGPVGRHGLAEKDEEVKGLSDSAPEISTSETAKIAASLSAPPPILEELGLDDILENDCFCCDGNGEQCTCAAFDMDWVSSSGNSCEDESCGRATVVRSFETIPESRKIESEICVVETVGSNSRKGNKEEEEAISGIPEGYVRWVMDEDGHFW

SEQ ID NO: 81077 - DNA, 2043 bp, Arabidopsis thaliana
  misc_feature (1)..(2043): Ceres Seq. ID no. 12658332
  misc_feature: MA Experiment ID: 108573 Result: Up-regulated in Transcription
  misc_feature: MA Experiment 108573 PARAMETER Experiment Name: At_Drought_cDNA_P Parameter: Timepoint (hr) Value: 6
  misc_feature: MA Experiment 108573 PARAMETER Experiment Name: At_Drought_cDNA_P Parameter: Tissue Value: Aerial
  misc_feature: MA Experiment 108573 PARAMETER Experiment Name: At_Drought_cDNA_P Parameter: Treatment Value: Drought vs. No Drought
  misc_feature: MA Experiment ID: 108579 Result: Up-regulated in Transcription
  misc_feature: MA Experiment 108579 PARAMETER Experiment Name: At_4deg_Cold_cDNA_P Parameter: Temperature (deg C) Value: 4 vs. 22
  misc_feature: MA Experiment 108579 PARAMETER Experiment Name: At_4deg_Cold_cDNA_P Parameter: Timepoint (hr) Value: 6
  misc_feature: MA Experiment 108579 PARAMETER Experiment Name: At_4deg_Cold_cDNA_P Parameter: Tissue Value: Aerial
  misc_feature: MA Experiment ID: 20000112 Result: Down-regulated in Transcription
  misc_feature: MA Experiment 20000112 PARAMETER Experiment Name: At_42deg_Heat_cDNA_P Parameter: Temperature (deg C) Value: 42 vs. 22
  misc_feature: MA Experiment 20000112 PARAMETER Experiment Name: At_42deg_Heat_cDNA_P Parameter: Timepoint (hr) Value: 2
  misc_feature: MA Experiment 20000112 PARAMETER Experiment Name: At_42deg_Heat_cDNA_P Parameter: Tissue Value: Aerial
  misc_feature: MA Experiment ID: 20000144 Result: Down-regulated in Transcription
  misc_feature: MA Experiment 20000144 PARAMETER Experiment Name: At_42deg_Heat_cDNA_P Parameter: Temperature (deg C) Value: 42 vs. 22
  misc_feature: MA Experiment 20000144 PARAMETER Experiment Name: At_42deg_Heat_cDNA_P Parameter: Timepoint (hr) Value: 1
  misc_feature: MA Experiment 20000144 PARAMETER Experiment Name: At_42deg_Heat_cDNA_P Parameter: Tissue Value: Aerial
  misc_feature: MA Experiment ID: 20000171 Result: Up-regulated in Transcription
  misc_feature: MA Experiment 20000171 PARAMETER Experiment Name: At_42deg_Heat_P Parameter: Age (day) Value: 14
  misc_feature: MA Experiment 20000171 PARAMETER Experiment Name: At_42deg_Heat_P Parameter: Organism Value: A. thaliana
  misc_feature: MA Experiment 20000171 PARAMETER Experiment Name: At_42deg_Heat_P Parameter: Plant Line Value: WS
  misc_feature: MA Experiment 20000171 PARAMETER Experiment Name: At_42deg_Heat_P Parameter: Temperature (deg C) Value: 42 vs. 22
  misc_feature: MA Experiment 20000171 PARAMETER Experiment Name: At_42deg_Heat_P Parameter: Timepoint (hr) Value: 1
  misc_feature: MA Experiment 20000171 PARAMETER Experiment Name: At_42deg_Heat_P Parameter: Tissue Value: Aerial
  misc_feature: MA Experiment ID: 20000173 Result: Up-regulated in Transcription
  misc_feature: MA Experiment 20000173 PARAMETER Experiment Name: At_42deg_Heat_P Parameter: Age (day) Value: 14
  misc_feature: MA Experiment 20000173 PARAMETER Experiment Name: At_42deg_Heat_P Parameter: Organism Value: A. thaliana
  misc_feature: MA Experiment 20000173 PARAMETER Experiment Name: At_42deg_Heat_P Parameter: Plant Line Value: WS
  misc_feature: MA Experiment 20000173 PARAMETER Experiment Name: At_42deg_Heat_P Parameter: Temperature (deg C) Value: 42 vs. 22
  misc_feature: MA Experiment 20000173 PARAMETER Experiment Name: At_42deg_Heat_P Parameter: Timepoint (hr) Value: 6
  misc_feature: MA Experiment 20000173 PARAMETER Experiment Name: At_42deg_Heat_P Parameter: Tissue Value: Aerial
  misc_feature: MA Experiment ID: 20000439 Result: Up-regulated in Transcription
  misc_feature: MA Experiment 20000439 PARAMETER Experiment Name: At_Roots__P Parameter: Age (day) Value: 14 vs. 21
  misc_feature: MA Experiment 20000439 PARAMETER Experiment Name: At_Roots__P Parameter: Organism Value: A. thaliana
  misc_feature: MA Experiment 20000439 PARAMETER Experiment Name: At_Roots__P Parameter: Tissue Value: Roots vs. Whole Plant
  misc_feature: MA Experiment ID: 20001558 Result: Up-regulated in Transcription
  misc_feature: MA Experiment 20001558 PARAMETER Experiment Name: At_Drought_Soil_Dry_P Parameter: Age (day) Value: 27
  misc_feature: MA Experiment 20001558 PARAMETER Experiment Name: At_Drought_Soil_Dry_P Parameter: Organism Value: A. thaliana
  misc_feature: MA Experiment 20001558 PARAMETER Experiment Name: At_Drought_Soil_Dry_P Parameter: Plant Line Value: WS
  misc_feature: MA Experiment 20001558 PARAMETER Experiment Name: At_Drought_Soil_Dry_P Parameter: Post Timepoint (hr) Value: 6
  misc_feature: MA Experiment 20001558 PARAMETER Experiment Name: At_Drought_Soil_Dry_P Parameter: Post-Treatment Value: Re-Water vs. No Drought
  misc_feature: MA Experiment 20001558 PARAMETER Experiment Name: At_Drought_Soil_Dry_P Parameter: Timepoint (day) Value: 13
  misc_feature: MA Experiment 20001558 PARAMETER Experiment Name: At_Drought_Soil_Dry_P Parameter: Treatment Value: Drought vs. No Drought
  misc_feature: MA Experiment ID: 20001906 Result: Down-regulated in Transcription
  misc_feature: MA Experiment 20001906 PARAMETER Experiment Name: At_Drought_Reproduction_P Parameter: Age (day) Value: 35
  misc_feature: MA Experiment 20001906 PARAMETER Experiment Name: At_Drought_Reproduction_P Parameter: Organism Value: A. thaliana
  misc_feature: MA Experiment 20001906 PARAMETER Experiment Name: At_Drought_Reproduction_P Parameter: Plant Line Value: WS
  misc_feature: MA Experiment 20001906 PARAMETER Experiment Name: At_Drought_Reproduction_P Parameter: Timepoint (day) Value: 5
  misc_feature: MA Experiment 20001906 PARAMETER Experiment Name: At_Drought_Reproduction_P Parameter: Tissue Value: Siliques
  misc_feature: MA Experiment 20001906 PARAMETER Experiment Name: At_Drought_Reproduction_P Parameter: Treatment Value: Drought vs. No Drought
atgttcagctccatgaattctccaggacagctctcacaatggacagcatcaggaggtgatccttgtggccaaaactggaaaggcataacttgctctggctctcgagttacacaaataaagttaccaagtcttggactttctggatcacttggattcatgcttgataaattgacttctgttactgagtttgatatgagcaacaataaccttggaggcgatttgccttatcagcttcctccaaacttggagcgattgaatcttgctaataaccagttcactggatctgctcaatattccatttctatgatggctcctcttaagtacctcaaccttgctcacaaccagttgaagcagctagctattgacttcacaaaactcacctctctctctatattggacctctcttccaatgcttttatagggtctctcccaaacacttgtagctctcttacgagtgcaaaatcaatttatcttcagaacaatcagttctcaggcaccattgatattctagccacccttcctctcgaaaatctgaatattgcaaacaatcggttcacaggctggatccctgattctttgaaaggcattaacttgcaaaaagatggcaatttattaaattccgggcctgcacctccaccacctcctggtacaccaccgatcagtaaatcatcacctactccgaaatccgggaaccgtggaaaccgttccaatggtgattccagcaatagcaaagactccagcaaatcagggcttggagctggtggagtagcaggaatagtcatttctttgatagttgtaacagcagtcatagctttcttcttgatcaagagaaaaagatcaaagcggtcatcatccacggacattgaaaagactgataataacattaaccaacccattatactagcgtccaatgactttcatcaagagaataagtctgtacagaatccaccattggttgagacaaagaaactggatacgtcattgtcgatgaatctacgtcctccaccatctgagcgacataagtcgtttgatgacgatgattcaacaatgagaaaacctattgttgcaaagaaagctgctgttgttgttccttcaaatgtgaacacatatacggtttcagatcttcaagtagctaccaacagtttcagcgtagataatcttctcggtgaaggaacatttggaagagtatacagagctcagtttgaagatggaaaggtacttgctgtgaagaaaatcgactcatctgcgcttcccacggatactgctgatgattttaccgaaattgtatcgaaaatagcgcatttggatcacgaaaatgtcacaaagcttgatggttactgttctgaacacgggcaacacttggtggtctatgagttccatagaaacggctcattgcatgactttttacatcttgcagaagaggaaagcaaaccgttgatatggaatccccgtgtcaagatcgctcttggcactgcacgtgcattggagtacttgcatgaagtttgctcaccatctatagtccacaagaacattaaatcagcaaatattttacttgactcagagctgaatccacacctctcagactcaggtctcgctagcttccttcccactgcaaacgagctactaaaccaaaacgatgaaggatacagcgcaccagaaacttcaatgtcaggccaatactctttgaagagcgatgtttacagttttggagtagtgatgctcgagcttttaaccggaagaaaaccattcgacagcacaaggtcaagatcggaacaatcattggtaagatgggcaacacctcagcttcacgacattgatgctttgggcaaaatggttgatccagctctcaaagggctatacccggttaaatccctctcccgatttgcagatgttatcgccctttgcgtccagccggagccagagtttagaccacccatgtctgaagtggtgcaagcattggttgtattggtgcagagagctaacatgagcaagagaactgttggagtcggctccggtagctccggcgtcaatgattacatgtaa

SEQ ID NO: 81078 - protein, 680 aa, Arabidopsis thaliana; identical to SEQ ID NO: 39645
  peptide (1)..(680): Ceres Seq. ID no. 12658333
  misc_feature (1)..(680): Homolog of NCBI NO: 15220928 NR Description: leucine-rich repeat transmembrane protein kinase
  misc_feature (1)..(665): Homolog of NCBI NO: 7489783 NR Description: leucine-rich repeat transmembrane protein kinase
  misc_feature (1)..(678): Homolog of NCBI NO: 15217283 NR Description: Putative leucine-rich repeat transmembrane
  misc_feature (1)..(678): Homolog of NCBI NO: 29367551 NR Description: putative leucine-rich repeat transmembrane
  misc_feature (1)..(678): Homolog of NCBI NO: 7489784 NR Description: leucine-rich repeat transmembrane protein kinase
  misc_feature (1)..(664): Homolog of NCBI NO: 34906746 NR Description: similar to leucine-rich repeat transmembrane
  misc_feature (66)..(662): Homolog of NCBI NO: 30017524 NR Description: putative leucine-rich repeat transmembrane
  misc_feature (58)..(409): Homolog of NCBI NO: 37533916 NR Description: putative leucine-rich repeat transmembrane
  misc_feature (405)..(678): Homolog of NCBI NO: 37533916 NR Description: putative leucine-rich repeat transmembrane
  misc_feature (1)..(266): Homolog of NCBI NO: 37533916 NR Description: putative leucine-rich repeat transmembrane

SEQ ID NO: 81079 - protein, 676 aa, Arabidopsis thaliana
  peptide (1)..(676): Ceres Seq. ID no. 12658334
  misc_feature (1)..(676): Homolog of NCBI NO: 15220928 NR Description: leucine-rich repeat transmembrane protein kinase
  misc_feature (1)..(661): Homolog of NCBI NO: 7489783 NR Description: leucine-rich repeat transmembrane protein kinase
  misc_feature (1)..(674): Homolog of NCBI NO: 15217283 NR Description: Putative leucine-rich repeat transmembrane
  misc_feature (1)..(674): Homolog of NCBI NO: 29367551 NR Description: putative leucine-rich repeat transmembrane
  misc_feature (1)..(674): Homolog of NCBI NO: 7489784 NR Description: leucine-rich repeat transmembrane protein kinase
  misc_feature (1)..(660): Homolog of NCBI NO: 34906746 NR Description: similar to leucine-rich repeat transmembrane
  misc_feature (62)..(658): Homolog of NCBI NO: 30017524 NR Description: putative leucine-rich repeat transmembrane
  misc_feature (54)..(405): Homolog of NCBI NO: 37533916 NR Description: putative leucine-rich repeat transmembrane
  misc_feature (401)..(674): Homolog of NCBI NO: 37533916 NR Description: putative leucine-rich repeat transmembrane
  misc_feature (1)..(262): Homolog of NCBI NO: 37533916 NR Description: putative leucine-rich repeat transmembrane
MNSPGQLSQWTASGGDPCGQNWKGITCSGSRVTQIKLPSLGLSGSLGFMLDKLTSVTEFDMSNNNLGGDLPYQLPPNLERLNLANNQFTGSAQYSISMMAPLKYLNLAHNQLKQLAIDFTKLTSLSILDLSSNAFIGSLPNTCSSLTSAKSIYLQNNQFSGTIDILATLPLENLNIANNRFTGWIPDSLKGINLQKDGNLLNSGPAPPPPPGTPPISKSSPTPKSGNRGNRSNGDSSNSKDSSKSGLGAGGVAGIVISLIVVTAVIAFFLIKRKRSKRSSSTDIEKTDNNINQPIILASNDFHQENKSVQNPPLVETKKLDTSLSMNLRPPPSERHKSFDDDDSTMRKPIVAKKAAVVVPSNVNTYTVSDLQVATNSFSVDNLLGEGTFGRVYRAQFEDGKVLAVKKIDSSALPTDTADDFTEIVSKIAHLDHENVTKLDGYCSEHGQHLVVYEFHRNGSLHDFLHLAEEESKPLIWNPRVKIALGTARALEYLHEVCSPSIVHKNIKSANILLDSELNPHLSDSGLASFLPTANELLNQNDEGYSAPETSMSGQYSLKSDVYSFGVVMLELLTGRKPFDSTRSRSEQSLVRWATPQLHDIDALGKMVDPALKGLYPVKSLSRFADVIALCVQPEPEFRPPMSEVVQALVVLVQRANMSKRTVGVGSGSSGVNDYM

SEQ ID NO: 81080 - protein, 628 aa, Arabidopsis thaliana
  peptide (1)..(628): Ceres Seq. ID no. 12658335
  misc_feature (1)..(628): Homolog of NCBI NO: 15220928 NR Description: leucine-rich repeat transmembrane protein kinase
  misc_feature (1)..(613): Homolog of NCBI NO: 7489783 NR Description: leucine-rich repeat transmembrane protein kinase
  misc_feature (1)..(626): Homolog of NCBI NO: 15217283 NR Description: Putative leucine-rich repeat transmembrane
  misc_feature (1)..(626): Homolog of NCBI NO: 29367551 NR Description: putative leucine-rich repeat transmembrane
  misc_feature (1)..(626): Homolog of NCBI NO: 7489784 NR Description: leucine-rich repeat transmembrane protein kinase
  misc_feature (1)..(612): Homolog of NCBI NO: 34906746 NR Description: similar to leucine-rich repeat transmembrane
  misc_feature (14)..(610): Homolog of NCBI NO: 30017524 NR Description: putative leucine-rich repeat transmembrane
  misc_feature (6)..(357): Homolog of NCBI NO: 37533916 NR Description: putative leucine-rich repeat transmembrane
  misc_feature (353)..(626): Homolog of NCBI NO: 37533916 NR Description: putative leucine-rich repeat transmembrane
  misc_feature (1)..(214): Homolog of NCBI NO: 37533916 NR Description: putative leucine-rich repeat transmembrane
MLDKLTSVTEFDMSNNNLGGDLPYQLPPNLERLNLANNQFTGSAQYSISMMAPLKYLNLAHNQLKQLAIDFTKLTSLSILDLSSNAFIGSLPNTCSSLTSAKSIYLQNNQFSGTIDILATLPLENLNIANNRFTGWIPDSLKGINLQKDGNLLNSGPAPPPPPGTPPISKSSPTPKSGNRGNRSNGDSSNSKDSSKSGLGAGGVAGIVISLIVVTAVIAFFLIKRKRSKRSSSTDIEKTDNNINQPIILASNDFHQENKSVQNPPLVETKKLDTSLSMNLRPPPSERHKSFDDDDSTMRKPIVAKKAAVVVPSNVNTYTVSDLQVATNSFSVDNLLGEGTFGRVYRAQFEDGKVLAVKKIDSSALPTDTADDFTEIVSKIAHLDHENVTKLDGYCSEHGQHLVVYEFHRNGSLHDFLHLAEEESKPLIWNPRVKIALGTARALEYLHEVCSPSIVHKNIKSANILLDSELNPHLSDSGLASFLPTANELLNQNDEGYSAPETSMSGQYSLKSDVYSFGVVMLELLTGRKPFDSTRSRSEQSLVRWATPQLHDIDALGKMVDPALKGLYPVKSLSRFADVIALCVQPEPEFRPPMSEVVQALVVLVQRANMSKRTVGVGSGSSGVNDYM

SEQ ID NO: 81081 - DNA, 537 bp, Arabidopsis thaliana
  misc_feature (1)..(537): Ceres Seq. ID no. 12658340
  misc_feature: MA Experiment ID: 20000286 Result: Up-regulated in Transcription
  misc_feature: MA Experiment 20000286 PARAMETER Experiment Name: At_Open_Flower_P Parameter: Age (day) Value: 21
  misc_feature: MA Experiment 20000286 PARAMETER Experiment Name: At_Open_Flower_P Parameter: Plant Line Value: WS
  misc_feature: MA Experiment 20000286 PARAMETER Experiment Name: At_Open_Flower_P Parameter: Tissue Value: Half Open vs. Whole Plant
atggacaagactgatcaaaccgccattgacgaatcagctttagtgcttaatcgcactgagaaatcggcagaggcggtcctgcgagtagcatcaatggctctaagtattacgggtctcgtcatcatgatcaagaactctatctccaacgaatttggctctgtttcttactcaaatattggagctttcatgtatttggtgagtgctaatggcgtttgtgctgcttattctcttctctcggctctcgcaatattagcgcttccgtgtccaataagcaaggtccaagtcaggacattgttcttgcttgaccaggtggtcacatacgtggttctagcggctggggctgtatctgcagagacggtttacttagcatactatggaaacatacccattacttggagctctgcttgtgactcctatggatccttctgtcataatgcattgatttcggttgttttcacattcgttgtctcccttctctacatgttgctctcgcttatctcttcctatcgactcttcaccagatttgaagcaccctaa

SEQ ID NO: 81082 - protein, 178 aa, Arabidopsis thaliana
  peptide (1)..(178): Ceres Seq. ID no. 12658341
  misc_feature (17)..(159): Pfam Name: Domain of unknown function (DUF588) Pfam Description: Domain of unknown function (DUF588)
  misc_feature (1)..(178): Homolog of NCBI NO: 15231842 NR Description: unknown protein; protein id: At3g14380.1 thaliana] >gi|9279585|dbj|BAB01043.1|
  misc_feature (16)..(178): Homolog of NCBI NO: 16973324 NR Description: hypothetical protein [Gossypium hirsutum]
  misc_feature (21)..(178): Homolog of NCBI NO: 17380964 NR Description: unknown protein [Arabidopsis thaliana]
  misc_feature (21)..(178): Homolog of NCBI NO: 18394453 NR Description: expressed protein; protein id: At1g17200.1, by cDNA: 28177., supported by cDNA: gi_17380963 [Arabidopsis
  misc_feature (21)..(178): Homolog of NCBI NO: 38344646 NR Description: OSJNBa0094P09.18 [Oryza sativa (japonica
  misc_feature (51)..(178): Homolog of NCBI NO: 14030504 NR Description: salicylic acid-induced fragment 1 protein
  misc_feature (21)..(178): Homolog of NCBI NO: 15240435 NR Description: putative protein; protein id: At5g54980.1 thaliana] >gi|9758278|dbj|BAB08777.1| to unknown protein [Arabidopsis thaliana]
  misc_feature (15)..(177): Homolog of NCBI NO: 18414659 NR Description: Expressed protein; protein id: At4g16442.1, by cDNA: 7632. [Arabidopsis thaliana] >gi|21595041|gb|AAM66067.1| [Arabidopsis thaliana] >gi|28393080|gb|AAO41974.1| unknown
  misc_feature (26)..(171): Homolog of NCBI NO: 15227576 NR Description: unknown protein; protein id: At2g36100.1
  misc_feature (51)..(104): Homolog of NCBI NO: 16973322 NR Description: hypothetical protein [Gossypium hirsutum]
MDKTDQTAIDESALVLNRTEKSAEAVLRVASMALSITGLVIMIKNSISNEFGSVSYSNIGAFMYLVSANGVCAAYSLLSALAILALPCPISKVQVRTLFLLDQVVTYVVLAAGAVSAETVYLAYYGNIPITWSSACDSYGSFCHNALISVVFTFVVSLLYMLLSLISSYRLFTRFEAP

SEQ ID NO: 81083 - protein, 147 aa, Arabidopsis thaliana
  peptide (1)..(147): Ceres Seq. ID no. 12658342
  misc_feature (1)..(128): Pfam Name: Domain of unknown function (DUF588) Pfam Description: Domain of unknown function (DUF588)
  misc_feature (1)..(147): Homolog of NCBI NO: 15231842 NR Description: unknown protein; protein id: At3g14380.1 thaliana] >gi|9279585|dbj|BAB01043.1|
  misc_feature (1)..(147): Homolog of NCBI NO: 16973324 NR Description: hypothetical protein [Gossypium hirsutum]
  misc_feature (1)..(147): Homolog of NCBI NO: 17380964 NR Description: unknown protein [Arabidopsis thaliana]
  misc_feature (1)..(147): Homolog of NCBI NO: 18394453 NR Description: expressed protein; protein id: At1g17200.1, by cDNA: 28177., supported by cDNA: gi_17380963 [Arabidopsis
  misc_feature (1)..(147): Homolog of NCBI NO: 38344646 NR Description: OSJNBa0094P09.18 [Oryza sativa (japonica
  misc_feature (20)..(147): Homolog of NCBI NO: 14030504 NR Description: salicylic acid-induced fragment 1 protein
  misc_feature (1)..(147): Homolog of NCBI NO: 15240435 NR Description: putative protein; protein id: At5g54980.1 thaliana] >gi|9758278|dbj|BAB08777.1| to unknown protein [Arabidopsis thaliana]
  misc_feature (1)..(146): Homolog of NCBI NO: 18414659 NR Description: Expressed protein; protein id: At4g16442.1, by cDNA: 7632. [Arabidopsis thaliana] >gi|21595041|gb|AAM66067.1| [Arabidopsis thaliana] >gi|28393080|gb|AAO41974.1| unknown
  misc_feature (1)..(140): Homolog of NCBI NO: 15227576 NR Description: unknown protein; protein id: At2g36100.1
  misc_feature (20)..(73): Homolog of NCBI NO: 16973322 NR Description: hypothetical protein [Gossypium hirsutum]
MALSITGLVIMIKNSISNEFGSVSYSNIGAFMYLVSANGVCAAYSLLSALAILALPCPISKVQVRTLFLLDQVVTYVVLAAGAVSAETVYLAYYGNIPITWSSACDSYGSFCHNALISVVFTFVVSLLYMLLSLISSYRLFTRFEAP

SEQ ID NO: 81084 - protein, 137 aa, Arabidopsis thaliana
  peptide (1)..(137): Ceres Seq. ID no. 12658343
  misc_feature (1)..(118): Pfam Name: Domain of unknown function (DUF588) Pfam Description: Domain of unknown function (DUF588)
  misc_feature (1)..(137): Homolog of NCBI NO: 15231842 NR Description: unknown protein; protein id: At3g14380.1 thaliana] >gi|9279585|dbj|BAB01043.1|
  misc_feature (1)..(137): Homolog of NCBI NO: 16973324 NR Description: hypothetical protein [Gossypium hirsutum]
  misc_feature (1)..(137): Homolog of NCBI NO: 17380964 NR Description: unknown protein [Arabidopsis thaliana]
  misc_feature (1)..(137): Homolog of NCBI NO: 18394453 NR Description: expressed protein; protein id: At1g17200.1, by cDNA: 28177., supported by cDNA: gi_17380963 [Arabidopsis
  misc_feature (1)..(137): Homolog of NCBI NO: 38344646 NR Description: OSJNBa0094P09.18 [Oryza sativa (japonica
  misc_feature (10)..(137): Homolog of NCBI NO: 14030504 NR Description: salicylic acid-induced fragment 1 protein
  misc_feature (1)..(137): Homolog of NCBI NO: 15240435 NR Description: putative protein; protein id: At5g54980.1 thaliana] >gi|9758278|dbj|BAB08777.1| to unknown protein [Arabidopsis thaliana]
  misc_feature (1)..(136): Homolog of NCBI NO: 18414659 NR Description: Expressed protein; protein id: At4g16442.1, by cDNA: 7632. [Arabidopsis thaliana] >gi|21595041|gb|AAM66067.1| [Arabidopsis thaliana] >gi|28393080|gb|AAO41974.1| unknown
  misc_feature (1)..(130): Homolog of NCBI NO: 15227576 NR Description: unknown protein; protein id: At2g36100.1
  misc_feature (10)..(63): Homolog of NCBI NO: 16973322 NR Description: hypothetical protein [Gossypium hirsutum]
MIKNSISNEFGSVSYSNIGAFMYLVSANGVCAAYSLLSALAILALPCPISKVQVRTLFLLDQVVTYVVLAAGAVSAETVYLAYYGNIPITWSSACDSYGSFCHNALISVVFTFVVSLLYMLLSLISSYRLFTRFEAP

SEQ ID NO: 81085 - DNA, 984 bp, Arabidopsis thaliana
  misc_feature (1)..(984): Ceres Seq. ID no. 12658352
  misc_feature: MA Experiment ID: 20000306 Result: Up-regulated in Transcription
  misc_feature: MA Experiment 20000306 PARAMETER Experiment Name: At_Germinating_Seeds_Sub_P Parameter: Age (hr) Value: 6 vs. 0
  misc_feature: MA Experiment 20000306 PARAMETER Experiment Name: At_Germinating_Seeds_Sub_P Parameter: Organism Value: A. thaliana
  misc_feature: MA Experiment 20000306 PARAMETER Experiment Name: At_Germinating_Seeds_Sub_P Parameter: Plant Line Value: WS
  misc_feature: MA Experiment 20000306 PARAMETER Experiment Name: At_Germinating_Seeds_Sub_P Parameter: Tissue Value: Germinating Seeds
  misc_feature: MA Experiment ID: 20000328 Result: Down-regulated in Transcription
  misc_feature: MA Experiment 20000328 PARAMETER Experiment Name: At_42deg_Heat_Sub_P Parameter: Age (day) Value: 14
  misc_feature: MA Experiment 20000328 PARAMETER Experiment Name: At_42deg_Heat_Sub_P Parameter: Organism Value: A. thaliana
  misc_feature: MA Experiment 20000328 PARAMETER Experiment Name: At_42deg_Heat_Sub_P Parameter: Plant Line Value: WS
  misc_feature: MA Experiment 20000328 PARAMETER Experiment Name: At_42deg_Heat_Sub_P Parameter: Temperature (deg C) Value: 42 vs. 22
  misc_feature: MA Experiment 20000328 PARAMETER Experiment Name: At_42deg_Heat_Sub_P Parameter: Timepoint (hr) Value: 6
  misc_feature: MA Experiment 20000328 PARAMETER Experiment Name: At_42deg_Heat_Sub_P Parameter: Tissue Value: Aerial
  misc_feature: MA Experiment ID: 20000440 Result: Up-regulated in Transcription
  misc_feature: MA Experiment 20000440 PARAMETER Experiment Name: At_Closed-Flower__Sub_P Parameter: Tissue Value: Closed Flower vs. Whole Plant
atggctacggtcactgagatgcccactgatgttgttgttgtcgacgatgttaaggaagttagtaccaaaagcgaaaagatcatcgatgagggaattgagaagagctcgatcacggattctaaaaccgaaactgaatctcggcttgatatgcacaagcttgtggctatgttcaagaaactgaatcctttggccaaggagtttttcccttcttactacgatccgaagaagaacaatcaggtagctaaggctaaccaatttctgccggctgacgattttgagaccaccaagaagcaatctggtgaagaatttgatcttgatgccaagaaggatgacaatacccgcaagagaagaaactatagccaagggagaaggaggttaactggaagaatttctaaggctcaaagagaggatagtattagaagaacagtttatgtttctgacattgaccagagtgtgactgaggagggtcttgctggcttgtttagtaactgtggacaagttgttgactgtagaatttgtggcgatccacattcggttcttcgatttgcgtttgttgagtttgctgatgaccagggcgcacatgaagctttaagccttggtggaacaatgctcgggttctacccggtgagggtcttaccctcaaaaactgccatcctaccagtgaatcccacatttcttccaaggtcagaagatgaaagggagatgtgcacaaggacaatctattgcaccaacatcgacaagaaagtttctcaagctgatgtgagaaacttctttgaatctgcatgtggtgaggtaactcgtctgaggcttcttggcgatcaattgcattcaactcgcatagcttttgttgaatttgctctggcagatagtgcacttagcgcgctcaattgcagcggaatggtcgttggatcacaaccgataagggtaagtccatcaaagacaccagtgaggccaagaatcactcgaccaccatcgacaaactag

SEQ ID NO: 81086 - protein, 327 aa, Arabidopsis thaliana
  peptide (1)..(327): Ceres Seq. ID no. 12658353
  misc_feature (143)..(211): Pfam Name: RNA recognition motif. (a.k.a. RRM, RBD, or RNP domain) Pfam Description: RNA recognition motif. (a.k.a. RRM, RBD, or RNP
  misc_feature (1)..(327): Homolog of NCBI NO: 15231858 NR Description: RNA-binding protein, putative; protein id:
  misc_feature (1)..(327): Homolog of NCBI NO: 15220902 NR Description: RNA-binding protein, putative; protein id:
  misc_feature (56)..(309): Homolog of NCBI NO: 8671859 NR Description: Contains similarity to RNA-binding protein from thaliana gi|2129727 and contains RNA recognition PF|00076 domain.
  misc_feature (49)..(324): Homolog of NCBI NO: 15223304 NR Description: RNA-binding protein, putative; protein id: supported by cDNA: 40998., supported by cDNA: gi_14030686
  misc_feature (43)..(322): Homolog of NCBI NO: 15229132 NR Description: RNA-binding protein, putative; protein id:
  misc_feature (49)..(319): Homolog of NCBI NO: 15235177 NR Description: RNA-binding protein RBP37; protein id: supported by cDNA: 2343., supported by cDNA: gi_1174152,
  misc_feature (49)..(319): Homolog of NCBI NO: 1174153 NR Description: RNA-binding protein
  misc_feature (126)..(324): Homolog of NCBI NO: 14030687 NR Description: At1g32790 [Arabidopsis thaliana]
  misc_feature (20)..(317): Homolog of NCBI NO: 15238531 NR Description: RNA-binding protein, putative; protein id:
  misc_feature (33)..(307): Homolog of NCBI NO: 34903832 NR Description: ATT4F9_7(AL049523|pid:g4539439) Arabidopsis
MATVTEMPTDVVVVDDVKEVSTKSEKIIDEGIEKSSITDSKTETESRLDMHKLVAMFKKLNPLAKEFFPSYYDPKKNNQVAKANQFLPADDFETTKKQSGEEFDLDAKKDDNTRKRRNYSQGRRRLTGRISKAQREDSIRRTVYVSDIDQSVTEEGLAGLFSNCGQVVDCRICGDPHSVLRFAFVEFADDQGAHEALSLGGTMLGFYPVRVLPSKTAILPVNPTFLPRSEDEREMCTRTIYCTNIDKKVSQADVRNFFESACGEVTRLRLLGDQLHSTRIAFVEFALADSALSALNCSGMVVGSQPIRVSPSKTPVRPRITRPPSTN

SEQ ID NO: 81087 - protein, 321 aa, Arabidopsis thaliana
  peptide (1)..(321): Ceres Seq. ID no. 12658354
  misc_feature (137)..(205): Pfam Name: RNA recognition motif. (a.k.a. RRM, RBD, or RNP domain) Pfam Description: RNA recognition motif. (a.k.a. RRM, RBD, or RNP
  misc_feature (1)..(321): Homolog of NCBI NO: 15231858 NR Description: RNA-binding protein, putative; protein id:
  misc_feature (1)..(321): Homolog of NCBI NO: 15220902 NR Description: RNA-binding protein, putative; protein id:
  misc_feature (50)..(303): Homolog of NCBI NO: 8671859 NR Description: Contains similarity to RNA-binding protein from thaliana gi|2129727 and contains RNA recognition PF|00076 domain.
  misc_feature (43)..(318): Homolog of NCBI NO: 15223304 NR Description: RNA-binding protein, putative; protein id: supported by cDNA: 40998., supported by cDNA: gi_14030686
  misc_feature (37)..(316): Homolog of NCBI NO: 15229132 NR Description: RNA-binding protein, putative; protein id:
  misc_feature (43)..(313): Homolog of NCBI NO: 15235177 NR Description: RNA-binding protein RBP37; protein id: supported by cDNA: 2343., supported by cDNA: gi_1174152,
  misc_feature (43)..(313): Homolog of NCBI NO: 1174153 NR Description: RNA-binding protein
  misc_feature (120)..(318): Homolog of NCBI NO: 14030687 NR Description: At1g32790 [Arabidopsis thaliana]
  misc_feature (14)..(311): Homolog of NCBI NO: 15238531 NR Description: RNA-binding protein, putative; protein id:
  misc_feature (27)..(301): Homolog of NCBI NO: 34903832 NR Description: ATT4F9_7(AL049523|pid:g4539439) Arabidopsis
MPTDVVVVDDVKEVSTKSEKIIDEGIEKSSITDSKTETESRLDMHKLVAMFKKLNPLAKEFFPSYYDPKKNNQVAKANQFLPADDFETTKKQSGEEFDLDAKKDDNTRKRRNYSQGRRRLTGRISKAQREDSIRRTVYVSDIDQSVTEEGLAGLFSNCGQVVDCRICGDPHSVLRFAFVEFADDQGAHEALSLGGTMLGFYPVRVLPSKTAILPVNPTFLPRSEDEREMCTRTIYCTNIDKKVSQADVRNFFESACGEVTRLRLLGDQLHSTRIAFVEFALADSALSALNCSGMVVGSQPIRVSPSKTPVRPRITRPPSTN

SEQ ID NO: 81088 - protein, 278 aa, Arabidopsis thaliana
  peptide (1)..(278): Ceres Seq. ID no. 12658355
  misc_feature (94)..(162): Pfam Name: RNA recognition motif. (a.k.a. RRM, RBD, or RNP domain) Pfam Description: RNA recognition motif. (a.k.a. RRM, RBD, or RNP
  misc_feature (1)..(278): Homolog of NCBI NO: 15231858 NR Description: RNA-binding protein, putative; protein id:
  misc_feature (1)..(278): Homolog of NCBI NO: 15220902 NR Description: RNA-binding protein, putative; protein id:
  misc_feature (7)..(260): Homolog of NCBI NO: 8671859 NR Description: Contains similarity to RNA-binding protein from thaliana gi|2129727 and contains RNA recognition PF|00076 domain.
  misc_feature (1)..(275): Homolog of NCBI NO: 15223304 NR Description: RNA-binding protein, putative; protein id: supported by cDNA: 40998., supported by cDNA: gi_14030686
  misc_feature (1)..(273): Homolog of NCBI NO: 15229132 NR Description: RNA-binding protein, putative; protein id:
  misc_feature (1)..(270): Homolog of NCBI NO: 15235177 NR Description: RNA-binding protein RBP37; protein id: supported by cDNA: 2343., supported by cDNA: gi_1174152,
  misc_feature (1)..(270): Homolog of NCBI NO: 1174153 NR Description: RNA-binding protein
  misc_feature (77)..(275): Homolog of NCBI NO: 14030687 NR Description: At1g32790 [Arabidopsis thaliana]
  misc_feature (1)..(268): Homolog of NCBI NO: 15238531 NR Description: RNA-binding protein, putative; protein id:
  misc_feature (1)..(258): Homolog of NCBI NO: 34903832 NR Description: ATT4F9_7(AL049523|pid:g4539439) Arabidopsis
MHKLVAMFKKLNPLAKEFFPSYYDPKKNNQVAKANQFLPADDFETTKKQSGEEFDLDAKKDDNTRKRRNYSQGRRRLTGRISKAQREDSIRRTVYVSDIDQSVTEEGLAGLFSNCGQVVDCRICGDPHSVLRFAFVEFADDQGAHEALSLGGTMLGFYPVRVLPSKTAILPVNPTFLPRSEDEREMCTRTIYCTNIDKKVSQADVRNFFESACGEVTRLRLLGDQLHSTRIAFVEFALADSALSALNCSGMVVGSQPIRVSPSKTPVRPRITRPPSTN

SEQ ID NO: 81089 - DNA, 1784 bp, Arabidopsis thaliana
  misc_feature (1)..(1784): Ceres Seq. ID no. 12658395
  misc_feature: MA Experiment ID: 20000184 Result: Down-regulated in Transcription
  misc_feature: MA Experiment 20000184 PARAMETER Experiment Name: At_Shoots__P Parameter: Age (day) Value: 7
  misc_feature: MA Experiment 20000184 PARAMETER Experiment Name: At_Shoots__P Parameter: Tissue Value: Shoots vs. Whole Plant
  misc_feature: MA Experiment ID: 20000185 Result: Down-regulated in Transcription
  misc_feature: MA Experiment 20000185 PARAMETER Experiment Name: At_Roots__P Parameter: Age (day) Value: 7 vs. 21
  misc_feature: MA Experiment 20000185 PARAMETER Experiment Name: At_Roots__P Parameter: Organism Value: A. thaliana
  misc_feature: MA Experiment 20000185 PARAMETER Experiment Name: At_Roots__P Parameter: Tissue Value: Roots vs. Whole Plant
  misc_feature: MA Experiment ID: 20000234 Result: Down-regulated in Transcription
  misc_feature: MA Experiment 20000234 PARAMETER Experiment Name: At_Siliques_P Parameter: Age (day) Value: 21
  misc_feature: MA Experiment 20000234 PARAMETER Experiment Name: At_Siliques_P Parameter: Organism Value: A. thaliana
  misc_feature: MA Experiment 20000234 PARAMETER Experiment Name: At_Siliques_P Parameter: Plant Line Value: WS
  misc_feature: MA Experiment 20000234 PARAMETER Experiment Name: At_Siliques_P Parameter: Tissue Value: Less Than 5mm Siliques vs. Whole Plant
  misc_feature: MA Experiment ID: 20000235 Result: Down-regulated in Transcription
  misc_feature: MA Experiment 20000235 PARAMETER Experiment Name: At_Siliques_P Parameter: Age (day) Value: 21
  misc_feature: MA Experiment 20000235 PARAMETER Experiment Name: At_Siliques_P Parameter: Organism Value: A. thaliana
  misc_feature: MA Experiment 20000235 PARAMETER Experiment Name: At_Siliques_P Parameter: Plant Line Value: WS
  misc_feature: MA Experiment 20000235 PARAMETER Experiment Name: At_Siliques_P Parameter: Tissue Value: 5-10mm Siliques vs. Whole Plant
  misc_feature: MA Experiment ID: 20000265 Result: Down-regulated in Transcription
  misc_feature: MA Experiment 20000265 PARAMETER Experiment Name: At_Open_Flower_P Parameter: Age (day) Value: 21
  misc_feature: MA Experiment 20000265 PARAMETER Experiment Name: At_Open_Flower_P Parameter: Plant Line Value: WS
  misc_feature: MA Experiment 20000265 PARAMETER Experiment Name: At_Open_Flower_P Parameter: Tissue Value: Closed Flower vs. Whole Plant
  misc_feature: MA Experiment ID: 20000438 Result: Down-regulated in Transcription
  misc_feature: MA Experiment 20000438 PARAMETER Experiment Name: At_Shoots__P Parameter: Age (day) Value: 14
  misc_feature: MA Experiment 20000438 PARAMETER Experiment Name: At_Shoots__P Parameter: Tissue Value: Shoots vs. Whole Plant
  misc_feature: MA Experiment ID: 20000439 Result: Down-regulated in Transcription
  misc_feature: MA Experiment 20000439 PARAMETER Experiment Name: At_Roots__P Parameter: Age (day) Value: 14 vs. 21
  misc_feature: MA Experiment 20000439 PARAMETER Experiment Name: At_Roots__P Parameter: Organism Value: A. thaliana
  misc_feature: MA Experiment 20000439 PARAMETER Experiment Name: At_Roots__P Parameter: Tissue Value: Roots vs. Whole Plant
  misc_feature: MA Experiment ID: 20000445 Result: Up-regulated in Transcription
  misc_feature: MA Experiment 20000445 PARAMETER Experiment Name: At_100uM_NAA__P Parameter: Age (day) Value: 14
  misc_feature: MA Experiment 20000445 PARAMETER Experiment Name: At_100uM_NAA__P Parameter: Organism Value: A. thaliana
  misc_feature: MA Experiment 20000445 PARAMETER Experiment Name: At_100uM_NAA__P Parameter: Plant Line Value: WS
  misc_feature: MA Experiment 20000445 PARAMETER Experiment Name: At_100uM_NAA__P Parameter: Timepoint (hr) Value: 6
  misc_feature: MA Experiment 20000445 PARAMETER Experiment Name: At_100uM_NAA__P Parameter: Tissue Value: Aerial
  misc_feature: MA Experiment 20000445 PARAMETER Experiment Name: At_100uM_NAA__P Parameter: Treatment Value: 100uM NAA vs. No Treatment
  misc_feature: MA Experiment ID: 20000794 Result: Down-regulated in Transcription
  misc_feature: MA Experiment 20000794 PARAMETER Experiment Name: At_Petals_P Parameter: Age (day) Value: 23-25 days
  misc_feature: MA Experiment 20000794 PARAMETER Experiment Name: At_Petals_P Parameter: Plant Line Value: WS
  misc_feature: MA Experiment 20000794 PARAMETER Experiment Name: At_Petals_P Parameter: Tissue Value: Petals vs. Whole plant
  misc_feature: MA Experiment ID: 20001248 Result: Down-regulated in Transcription
  misc_feature: MA Experiment 20001248 PARAMETER Experiment Name: At_Far-red-induction_P Parameter: Age (day) Value: 7
  misc_feature: MA Experiment 20001248 PARAMETER Experiment Name: At_Far-red-induction_P Parameter: Light Value: Far-red vs. White
  misc_feature: MA Experiment 20001248 PARAMETER Experiment Name: At_Far-red-induction_P Parameter: Organism Value: A. thaliana
  misc_feature: MA Experiment 20001248 PARAMETER Experiment Name: At_Far-red-induction_P Parameter: Plant Line Value: Columbia
  misc_feature: MA Experiment 20001248 PARAMETER Experiment Name: At_Far-red-induction_P Parameter: Timepoint (hr) Value: 4
  misc_feature: MA Experiment 20001248 PARAMETER Experiment Name: At_Far-red-induction_P Parameter: Tissue Value: Whole Plant
  misc_feature: MA Experiment ID: 20001450 Result: Down-regulated in Transcription
  misc_feature: MA Experiment 20001450 PARAMETER Experiment Name: At_Far-red-induction_P Parameter: Age (day) Value: 7
  misc_feature: MA Experiment 20001450 PARAMETER Experiment Name: At_Far-red-induction_P Parameter: Light Value: Far-red vs. White
  misc_feature: MA Experiment 20001450 PARAMETER Experiment Name: At_Far-red-induction_P Parameter: Organism Value: A. thaliana
  misc_feature: MA Experiment 20001450 PARAMETER Experiment Name: At_Far-red-induction_P Parameter: Plant Line Value: Columbia
  misc_feature: MA Experiment 20001450 PARAMETER Experiment Name: At_Far-red-induction_P Parameter: Timepoint (hr) Value: 8
  misc_feature: MA Experiment 20001450 PARAMETER Experiment Name: At_Far-red-induction_P Parameter: Tissue Value: Whole Plant
  misc_feature: MA Experiment ID: 20001451 Result: Down-regulated in Transcription
  misc_feature: MA Experiment 20001451 PARAMETER Experiment Name: At_Far-red-induction_P Parameter: Age (day) Value: 7
  misc_feature: MA Experiment 20001451 PARAMETER Experiment Name: At_Far-red-induction_P Parameter: Light Value: Far-red vs. White
  misc_feature: MA Experiment 20001451 PARAMETER Experiment Name: At_Far-red-induction_P Parameter: Organism Value: A. thaliana
  misc_feature: MA Experiment 20001451 PARAMETER Experiment Name: At_Far-red-induction_P Parameter: Plant Line Value: Columbia
  misc_feature: MA Experiment 20001451 PARAMETER Experiment Name: At_Far-red-induction_P Parameter: Timepoint (hr) Value: 24
  misc_feature: MA Experiment 20001451 PARAMETER Experiment Name: At_Far-red-induction_P Parameter: Tissue Value: Whole Plant
agttcagtaaaatagaagaaagcatctaacgaattttacaagtaagtgcgtttatgagtgatacaaagatatcagcagtagcagttgctgctgctgtagtggtggtaactacggttacggtatggatatggaaaggtctgaatgtagcttggcttagaccaaagaaaaatgaggcttatctaaagagacaaggtctctctggaactcctttcacctttcttgtcggagacattaaaagggaagccagtatggtggagcaagaaaagtccagacccatcaatctaactgatgattacacgcatcgtgtcatgcctctgatacaacagaccgttaaggatcatgggaagacatcttacatgtggatgggacctatagcgagtgtgattgtgacgaaaccagaacacatcaaagatgttctaaacagagtttacgatttcccgaagccgccagtgcacccaatcgttgagctcttcgcgactggagtcgcgctgtatgaaggagagaaatggtctaagcacaggaagattataaacccttcttttcatcttgaaaagctcaagattatgatacctgcattctacgagagctgcagcgagatgataagtaaatgggagaagttggtgaccgagcaaggatcatcgaatgagatcgatgtttggccatatcttggagatttaacatcagatgtaatttcacgtactgcatttggtagtagctacgaggaaggtaagagaatctttgagcttcaagaagaacaaggccggcgagtgttaaaagctcttgagttggcttttatccctggaatgaggtttctaccaacaaagaacaatttgaggatgagacaaattaacaaagaagtgaaatctagactgagagagatcatcatgaaaagacagaggggtatggatacaggggaggctccaaagaatgatctgttaggaatacttttggaatcgaattctggagatcatggtatgagtatcgaagatgtggtagaagagtgcaggctgtttcacttcgcgggccaagaaaccaccgcggtgctgctcgtgtggactatgataatgctgagccatcaccaaaaatggcaggatcaagctagagaagagatattaaaagtcattgggaagaacaacaaacctaattttgatgcactctctcgactcaaaacaatgagcatgatcttgaacgaagttttgaggttatacccaccagggatactacttggtcgaaccgtagagaaagaaacaaagcttggtgaagacatgacactaccaggtggtgcacaagtagtgattcctgttcttatggttcatcgtgatcccgagctctggggtgaagatgtgcatgaattcaatcctgaaagattcgcagatggtatctcaaaagccacaaagaaccaagtttcgtttcttccgtttggatggggaccaagattctgtcctggccagaattttgctttgatggaagctaagatggcacttgtcttgattctgcagagattctcctttgagctgtctccttcgtacactcacgcacctcatacggttcttacacttcatcctcagtttggtgctccgttgatcttccacatgctctgaaatcgagtcacagagtacaccaaatttcgaaattcctctgtcttttttgtttttcttaaatcaaatttcagtagcatatataacccaataataccacgatgaaatcaagttcgattcaaacatttagggaatattctcagagaacatatcataaacatttgagcatgaacacgtgatttctat

SEQ ID NO: 81090 - protein, 515 aa, Arabidopsis thaliana
  peptide (1)..(515): Ceres Seq. ID no. 12658396
  misc_feature (1)..(515): Homolog of NCBI NO: 15231895 NR Description: cytochrome P450, putative; protein id: supported by cDNA: gi_15529168, supported by cDNA: gi_17386113 thaliana] >gi|9294384|dbj|BAB02394.1| cytochrome P450
  misc_feature (1)..(515): Homolog of NCBI NO: 17386114 NR Description: AT3g14620/MIE1_12 [Arabidopsis thaliana]
  misc_feature (3)..(515): Homolog of NCBI NO: 15231903 NR Description: cytochrome P450, putative; protein id: supported by cDNA: gi_18086481 [Arabidopsis thaliana] cytochrome P450 [Arabidopsis thaliana]
  misc_feature (6)..(515): Homolog of NCBI NO: 15231889 NR Description: cytochrome P450, putative; protein id: supported by cDNA: gi_18252154 [Arabidopsis thaliana] cytochrome P450 [Arabidopsis thaliana]
  misc_feature (5)..(515): Homolog of NCBI NO: 15231907 NR Description: cytochrome P450, putative; protein id: supported by cDNA: gi_15292786, supported by cDNA: gi_20465786 thaliana] >gi|9294391|dbj|BAB02401.1| cytochrome P450
  misc_feature (3)..(515): Homolog of NCBI NO: 15231901 NR Description: cytochrome P450, putative; protein id: [Arabidopsis thaliana] >gi|9294387|dbj|BAB02397.1| cytochrome
  misc_feature (3)..(515): Homolog of NCBI NO: 15231906 NR Description: cytochrome P450, putative; protein id: supported by cDNA: gi_13605896 [Arabidopsis thaliana] cytochrome P450 [Arabidopsis thaliana]
  misc_feature (5)..(515): Homolog of NCBI NO: 15231899 NR Description: cytochrome P450, putative; protein id:
  misc_feature (11)..(515): Homolog of NCBI NO: 15231897 NR Description: cytochrome P450, putative; protein id:
  misc_feature (5)..(515): Homolog of NCBI NO: 9294386 NR Description: cytochrome P450 [Arabidopsis thaliana]
MSDTKISAVAVAAAVVVVTTVTVWIWKGLNVAWLRPKKNEAYLKRQGLSGTPFTFLVGDIKREASMVEQEKSRPINLTDDYTHRVMPLIQQTVKDHGKTSYMWMGPIASVIVTKPEHIKDVLNRVYDFPKPPVHPIVELFATGVALYEGEKWSKHRKIINPSFHLEKLKIMIPAFYESCSEMISKWEKLVTEQGSSNEIDVWPYLGDLTSDVISRTAFGSSYEEGKRIFELQEEQGRRVLKALELAFIPGMRFLPTKNNLRMRQINKEVKSRLREIIMKRQRGMDTGEAPKNDLLGILLESNSGDHGMSIEDVVEECRLFHFAGQETTAVLLVWTMIMLSHHQKWQDQAREEILKVIGKNNKPNFDALSRLKTMSMILNEVLRLYPPGILLGRTVEKETKLGEDMTLPGGAQVVIPVLMVHRDPELWGEDVHEFNPERFADGISKATKNQVSFLPFGWGPRFCPGQNFALMEAKMALVLILQRFSFELSPSYTHAPHTVLTLHPQFGAPLIFHML

SEQ ID NO: 81091 - protein, 450 aa, Arabidopsis thaliana
  peptide (1)..(450): Ceres Seq. ID no. 12658397
  misc_feature (1)..(450): Homolog of NCBI NO: 15231895 NR Description: cytochrome P450, putative; protein id: supported by cDNA: gi_15529168, supported by cDNA: gi_17386113 thaliana] >gi|9294384|dbj|BAB02394.1| cytochrome P450
  misc_feature (1)..(450): Homolog of NCBI NO: 17386114 NR Description: AT3g14620/MIE1_12 [Arabidopsis thaliana]
  misc_feature (1)..(450): Homolog of NCBI NO: 15231903 NR Description: cytochrome P450, putative; protein id: supported by cDNA: gi_18086481 [Arabidopsis thaliana] cytochrome P450 [Arabidopsis thaliana]
  misc_feature (1)..(450): Homolog of NCBI NO: 15231889 NR Description: cytochrome P450, putative; protein id: supported by cDNA: gi_18252154 [Arabidopsis thaliana] cytochrome P450 [Arabidopsis thaliana]
  misc_feature (1)..(450): Homolog of NCBI NO: 15231907 NR Description: cytochrome P450, putative; protein id: supported by cDNA: gi_15292786, supported by cDNA: gi_20465786 thaliana] >gi|9294391|dbj|BAB02401.1| cytochrome P450
  misc_feature (1)..(450): Homolog of NCBI NO: 15231901 NR Description: cytochrome P450, putative; protein id: [Arabidopsis thaliana] >gi|9294387|dbj|BAB02397.1| cytochrome
  misc_feature (1)..(450): Homolog of NCBI NO: 15231906 NR Description: cytochrome P450, putative; protein id: supported by cDNA: gi_13605896 [Arabidopsis thaliana] cytochrome P450 [Arabidopsis thaliana]
  misc_feature (1)..(450): Homolog of NCBI NO: 15231899 NR Description: cytochrome P450, putative; protein id:
  misc_feature (1)..(450): Homolog of NCBI NO: 15231897 NR Description: cytochrome P450, putative; protein id:
  misc_feature (1)..(450): Homolog of NCBI NO: 9294386 NR Description: cytochrome P450 [Arabidopsis thaliana]
MVEQEKSRPINLTDDYTHRVMPLIQQTVKDHGKTSYMWMGPIASVIVTKPEHIKDVLNRVYDFPKPPVHPIVELFATGVALYEGEKWSKHRKIINPSFHLEKLKIMIPAFYESCSEMISKWEKLVTEQGSSNEIDVWPYLGDLTSDVISRTAFGSSYEEGKRIFELQEEQGRRVLKALELAFIPGMRFLPTKNNLRMRQINKEVKSRLREIIMKRQRGMDTGEAPKNDLLGILLESNSGDHGMSIEDVVEECRLFHFAGQETTAVLLVWTMIMLSHHQKWQDQAREEILKVIGKNNKPNFDALSRLKTMSMILNEVLRLYPPGILLGRTVEKETKLGEDMTLPGGAQVVIPVLMVHRDPELWGEDVHEFNPERFADGISKATKNQVSFLPFGWGPRFCPGQNFALMEAKMALVLILQRFSFELSPSYTHAPHTVLTLHPQFGAPLIFHML

SEQ ID NO: 81092 - protein, 430 aa, Arabidopsis thaliana
  peptide (1)..(430): Ceres Seq. ID no. 12658398
  misc_feature (1)..(430): Homolog of NCBI NO: 15231895 NR Description: cytochrome P450, putative; protein id: supported by cDNA: gi_15529168, supported by cDNA: gi_17386113 thaliana] >gi|9294384|dbj|BAB02394.1| cytochrome P450
  misc_feature (1)..(430): Homolog of NCBI NO: 17386114 NR Description: AT3g14620/MIE1_12 [Arabidopsis thaliana]
  misc_feature (1)..(430): Homolog of NCBI NO: 15231903 NR Description: cytochrome P450, putative; protein id: supported by cDNA: gi_18086481 [Arabidopsis thaliana] cytochrome P450 [Arabidopsis thaliana]
  misc_feature (1)..(430): Homolog of NCBI NO: 15231889 NR Description: cytochrome P450, putative; protein id: supported by cDNA: gi_18252154 [Arabidopsis thaliana] cytochrome P450 [Arabidopsis thaliana]
  misc_feature (1)..(430): Homolog of NCBI NO: 15231907 NR Description: cytochrome P450, putative; protein id: supported by cDNA: gi_15292786, supported by cDNA: gi_20465786 thaliana] >gi|9294391|dbj|BAB02401.1| cytochrome P450
  misc_feature (1)..(430): Homolog of NCBI NO: 15231901 NR Description: cytochrome P450, putative; protein id: [Arabidopsis thaliana] >gi|9294387|dbj|BAB02397.1| cytochrome
  misc_feature (1)..(430): Homolog of NCBI NO: 15231906 NR Description: cytochrome P450, putative; protein id: supported by cDNA: gi_13605896 [Arabidopsis thaliana] cytochrome P450 [Arabidopsis thaliana]
  misc_feature (1)..(430): Homolog of NCBI NO: 15231899 NR Description: cytochrome P450, putative; protein id:
  misc_feature (1)..(430): Homolog of NCBI NO: 15231897 NR Description: cytochrome P450, putative; protein id:
  misc_feature (1)..(430): Homolog of NCBI NO: 9294386 NR Description: cytochrome P450 [Arabidopsis thaliana]
MPLIQQTVKDHGKTSYMWMGPIASVIVTKPEHIKDVLNRVYDFPKPPVHPIVELFATGVALYEGEKWSKHRKIINPSFHLEKLKIMIPAFYESCSEMISKWEKLVTEQGSSNEIDVWPYLGDLTSDVISRTAFGSSYEEGKRIFELQEEQGRRVLKALELAFIPGMRFLPTKNNLRMRQINKEVKSRLREIIMKRQRGMDTGEAPKNDLLGILLESNSGDHGMSIEDVVEECRLFHFAGQETTAVLLVWTMIMLSHHQKWQDQAREEILKVIGKNNKPNFDALSRLKTMSMILNEVLRLYPPGILLGRTVEKETKLGEDMTLPGGAQVVIPVLMVHRDPELWGEDVHEFNPERFADGISKATKNQVSFLPFGWGPRFCPGQNFALMEAKMALVLILQRFSFELSPSYTHAPHTVLTLHPQFGAPLIFHML

SEQ ID NO: 81093 - DNA, 1527 bp, Arabidopsis thaliana
  misc_feature (1)..(1527): Ceres Seq. ID no. 12658399
  misc_feature: MA Experiment ID: 20001906 Result: Up-regulated in Transcription
  misc_feature: MA Experiment 20001906 PARAMETER Experiment Name: At_Drought_Reproduction_P Parameter: Age (day) Value: 35
  misc_feature: MA Experiment 20001906 PARAMETER Experiment Name: At_Drought_Reproduction_P Parameter: Organism Value: A. thaliana
  misc_feature: MA Experiment 20001906 PARAMETER Experiment Name: At_Drought_Reproduction_P Parameter: Plant Line Value: WS
  misc_feature: MA Experiment 20001906 PARAMETER Experiment Name: At_Drought_Reproduction_P Parameter: Timepoint (day) Value: 5
  misc_feature: MA Experiment 20001906 PARAMETER Experiment Name: At_Drought_Reproduction_P Parameter: Tissue Value: Siliques
  misc_feature: MA Experiment 20001906 PARAMETER Experiment Name: At_Drought_Reproduction_P Parameter: Treatment Value: Drought vs. No Drought
atggagatagtaattgcatcattggctttagttgttgtattgtggtgtatatggagaattttggagtgggtttggcttaaacctaagatgcttgagagttacctgagaagacaaggtcttgtcggaactcgttacacgcctcttgtaggagatgtgagaaggagttttagcatgttgaaggaagcaagatccaaaccgatgaaaccaacggatgatctcatctcacttgtcatgccttactcttttcacatgctcaacacttacgggaagacatttttcacatggtcaggacccatacctgccataacaataatgaatccacagctgatcaaagaagtgtacaacaagttttatgatttcgagaagacgcacacgtttcctttgacttcattgctaactgatggacttgctaatgccgatggagataaatgggtgaaacaccggaagattatcaacccggcattccattttgagaagattaagaatatggtccctacgttttataaaagttgcatcgaggtcatgtgtgaatgggagaagttagtttcagataaagggtcgtcgtgcgagcttgatgtttggccatggattgtgaatatgaccggagatgtgatctctcgaaccgcttttggtagcagttacaaagaaggacagaggatattcatattacaagcagaattagcccacctcatcatactagctcttggaaagaattacattcctgcataccggcatttcccaactaagaataacagaaggatgaaaacaatagtcaaagaaatccaagtcatactaagagggatcattagccatagagaaaaggcgagagacgctggagaagcaccgagtgacgatttgttaggtatacttcttaaatcgaattcagagcaaagtaaaggaaatggactgaacatggaagaaatcatggaagagtgcaagttgttttattttgcgggacaagagaccacttcagtacttttggcttggactatggttttgttaagccaacaccaagactggcaagctcgtgcacgagaggaagtgatgcaagtttttggccataacaaacctgatctacaaggcattaaccaactcaaagttatgacaatgattatatatgaagtcctgaggctatatcctccagtaatccagatgaacagagcgactcacaaagagataaagctaggtgatatgacactaccaggcggtattcaagtccatatgcctgttctgctaatccaccgtgacactaagctttggggcgatgatgcagcggagttcaagcccgagaggttcaaagacgggatcgcaaaggcaacaaagaaccaggtctgcttcttgcctttcgggtggggaccgaggatttgcatcggtcagaacttcgctctgttggaagcaaagatggctctggctttgattcttcagagattctccttcgagctttcaccttcctatgttcattcaccttacagagtcttcactatacatccacagtgtggggctcatcttatcctgcacaagctttga

SEQ ID NO: 81094 - protein, 508 aa, Arabidopsis thaliana
  peptide (1)..(508): Ceres Seq. ID no. 12658400
  misc_feature (1)..(508): Homolog of NCBI NO: 15231897 NR Description: cytochrome P450, putative; protein id:
  misc_feature (109)..(508): Homolog of NCBI NO: 9294385 NR Description: cytochrome P450-like protein [Arabidopsis
  misc_feature (1)..(52): Homolog of NCBI NO: 9294385 NR Description: cytochrome P450-like protein [Arabidopsis
  misc_feature (1)..(508): Homolog of NCBI NO: 15231907 NR Description: cytochrome P450, putative; protein id: supported by cDNA: gi_15292786, supported by cDNA: gi_20465786 thaliana] >gi|9294391|dbj|BAB02401.1| cytochrome P450
  misc_feature (1)..(508): Homolog of NCBI NO: 15231903 NR Description: cytochrome P450, putative; protein id: supported by cDNA: gi_18086481 [Arabidopsis thaliana] cytochrome P450 [Arabidopsis thaliana]
  misc_feature (1)..(508): Homolog of NCBI NO: 15231901 NR Description: cytochrome P450, putative; protein id: [Arabidopsis thaliana] >gi|9294387|dbj|BAB02397.1| cytochrome
  misc_feature (4)..(508): Homolog of NCBI NO: 15231906 NR Description: cytochrome P450, putative; protein id: supported by cDNA: gi_13605896 [Arabidopsis thaliana] cytochrome P450 [Arabidopsis thaliana]
  misc_feature (1)..(508): Homolog of NCBI NO: 15231899 NR Description: cytochrome P450, putative; protein id:
  misc_feature (8)..(508): Homolog of NCBI NO: 15231889 NR Description: cytochrome P450, putative; protein id: supported by cDNA: gi_18252154 [Arabidopsis thaliana] cytochrome P450 [Arabidopsis thaliana]
  misc_feature (1)..(508): Homolog of NCBI NO: 9294386 NR Description: cytochrome P450 [Arabidopsis thaliana]
MEIVIASLALVVVLWCIWRILEWVWLKPKMLESYLRRQGLVGTRYTPLVGDVRRSFSMLKEARSKPMKPTDDLISLVMPYSFHMLNTYGKTFFTWSGPIPAITIMNPQLIKEVYNKFYDFEKTHTFPLTSLLTDGLANADGDKWVKHRKIINPAFHFEKIKNMVPTFYKSCIEVMCEWEKLVSDKGSSCELDVWPWIVNMTGDVISRTAFGSSYKEGQRIFILQAELAHLIILALGKNYIPAYRHFPTKNNRRMKTIVKEIQVILRGIISHREKARDAGEAPSDDLLGILLKSNSEQSKGNGLNMEEIMEECKLFYFAGQETTSVLLAWTMVLLSQHQDWQARAREEVMQVFGHNKPDLQGINQLKVMTMIIYEVLRLYPPVIQMNRATHKEIKLGDMTLPGGIQVHMPVLLIHRDTKLWGDDAAEFKPERFKDGIAKATKNQVCFLPFGWGPRICIGQNFALLEAKMALALILQRFSFELSPSYVHSPYRVFTIHPQCGAHLILHKL

SEQ ID NO: 81095 - protein, 479 aa, Arabidopsis thaliana
  peptide (1)..(479): Ceres Seq. ID no. 12658401
  misc_feature (1)..(479): Homolog of NCBI NO: 15231897 NR Description: cytochrome P450, putative; protein id:
  misc_feature (80)..(479): Homolog of NCBI NO: 9294385 NR Description: cytochrome P450-like protein [Arabidopsis
  misc_feature (1)..(23): Homolog of NCBI NO: 9294385 NR Description: cytochrome P450-like protein [Arabidopsis
  misc_feature (1)..(479): Homolog of NCBI NO: 15231907 NR Description: cytochrome P450, putative; protein id: supported by cDNA: gi_15292786, supported by cDNA: gi_20465786 thaliana] >gi|9294391|dbj|BAB02401.1| cytochrome P450
  misc_feature (1)..(479): Homolog of NCBI NO: 15231903 NR Description: cytochrome P450, putative; protein id: supported by cDNA: gi_18086481 [Arabidopsis thaliana] cytochrome P450 [Arabidopsis thaliana]
  misc_feature (1)..(479): Homolog of NCBI NO: 15231901 NR Description: cytochrome P450, putative; protein id: [Arabidopsis thaliana] >gi|9294387|dbj|BAB02397.1| cytochrome
  misc_feature (1)..(479): Homolog of NCBI NO: 15231906 NR Description: cytochrome P450, putative; protein id: supported by cDNA: gi_13605896 [Arabidopsis thaliana] cytochrome P450 [Arabidopsis thaliana]
  misc_feature (1)..(479): Homolog of NCBI NO: 15231899 NR Description: cytochrome P450, putative; protein id:
  misc_feature (1)..(479): Homolog of NCBI NO: 15231889 NR Description: cytochrome P450, putative; protein id: supported by cDNA: gi_18252154 [Arabidopsis thaliana] cytochrome P450 [Arabidopsis thaliana]
  misc_feature (1)..(479): Homolog of NCBI NO: 9294386 NR Description: cytochrome P450 [Arabidopsis thaliana]
MLESYLRRQGLVGTRYTPLVGDVRRSFSMLKEARSKPMKPTDDLISLVMPYSFHMLNTYGKTFFTWSGPIPAITIMNPQLIKEVYNKFYDFEKTHTFPLTSLLTDGLANADGDKWVKHRKIINPAFHFEKIKNMVPTFYKSCIEVMCEWEKLVSDKGSSCELDVWPWIVNMTGDVISRTAFGSSYKEGQRIFILQAELAHLIILALGKNYIPAYRHFPTKNNRRMKTIVKEIQVILRGIISHREKARDAGEAPSDDLLGILLKSNSEQSKGNGLNMEEIMEECKLFYFAGQETTSVLLAWTMVLLSQHQDWQARAREEVMQVFGHNKPDLQGINQLKVMTMIIYEVLRLYPPVIQMNRATHKEIKLGDMTLPGGIQVHMPVLLIHRDTKLWGDDAAEFKPERFKDGIAKATKNQVCFLPFGWGPRICIGQNFALLEAKMALALILQRFSFELSPSYVHSPYRVFTIHPQCGAHLILHKL

SEQ ID NO: 81096 - protein, 451 aa, Arabidopsis thaliana
  peptide (1)..(451): Ceres Seq. ID no. 12658402
  misc_feature (1)..(451): Homolog of NCBI NO: 15231897 NR Description: cytochrome P450, putative; protein id:
  misc_feature (52)..(451): Homolog of NCBI NO: 9294385 NR Description: cytochrome P450-like protein [Arabidopsis
  misc_feature (1)..(451): Homolog of NCBI NO: 15231907 NR Description: cytochrome P450, putative; protein id: supported by cDNA: gi_15292786, supported by cDNA: gi_20465786 thaliana] >gi|9294391|dbj|BAB02401.1| cytochrome P450
  misc_feature (1)..(451): Homolog of NCBI NO: 15231903 NR Description: cytochrome P450, putative; protein id: supported by cDNA: gi_18086481 [Arabidopsis thaliana] cytochrome P450 [Arabidopsis thaliana]
  misc_feature (1)..(451): Homolog of NCBI NO: 15231901 NR Description: cytochrome P450, putative; protein id: [Arabidopsis thaliana] >gi|9294387|dbj|BAB02397.1| cytochrome
  misc_feature (1)..(451): Homolog of NCBI NO: 15231906 NR Description: cytochrome P450, putative; protein id: supported by cDNA: gi_13605896 [Arabidopsis thaliana] cytochrome P450 [Arabidopsis thaliana]
  misc_feature (1)..(451): Homolog of NCBI NO: 15231899 NR Description: cytochrome P450, putative; protein id:
  misc_feature (1)..(451): Homolog of NCBI NO: 15231889 NR Description: cytochrome P450, putative; protein id: supported by cDNA: gi_18252154 [Arabidopsis thaliana] cytochrome P450 [Arabidopsis thaliana]
  misc_feature (1)..(451): Homolog of NCBI NO: 9294386 NR Description: cytochrome P450 [Arabidopsis thaliana]
  misc_feature (1)..(451): Homolog of NCBI NO: 15231895 NR Description: cytochrome P450, putative; protein id: supported by cDNA: gi_15529168, supported by cDNA: gi_17386113 thaliana] >gi|9294384|dbj|BAB02394.1| cytochrome P450
MLKEARSKPMKPTDDLISLVMPYSFHMLNTYGKTFFTWSGPIPAITIMNPQLIKEVYNKFYDFEKTHTFPLTSLLTDGLANADGDKWVKHRKIINPAFHFEKIKNMVPTFYKSCIEVMCEWEKLVSDKGSSCELDVWPWIVNMTGDVISRTAFGSSYKEGQRIFILQAELAHLIILALGKNYIPAYRHFPTKNNRRMKTIVKEIQVILRGIISHREKARDAGEAPSDDLLGILLKSNSEQSKGNGLNMEEIMEECKLFYFAGQETTSVLLAWTMVLLSQHQDWQARAREEVMQVFGHNKPDLQGINQLKVMTMIIYEVLRLYPPVIQMNRATHKEIKLGDMTLPGGIQVHMPVLLIHRDTKLWGDDAAEFKPERFKDGIAKATKNQVCFLPFGWGPRICIGQNFALLEAKMALALILQRFSFELSPSYVHSPYRVFTIHPQCGAHLILHKL

SEQ ID NO: 81097 - DNA, 1545 bp, Arabidopsis thaliana
  misc_feature (1)..(1545): Ceres Seq. ID no. 12658403
  misc_feature: MA Experiment ID: 20000495 Result: Down-regulated in Transcription
  misc_feature: MA Experiment 20000495 PARAMETER Experiment Name: At_Guard_Cells_P Parameter: Harvest Date Value: 8/2/2002
  misc_feature: MA Experiment 20000495 PARAMETER Experiment Name: At_Guard_Cells_P Parameter: Organism Value: A. thaliana
  misc_feature: MA Experiment 20000495 PARAMETER Experiment Name: At_Guard_Cells_P Parameter: Tissue Value: Guard Cells vs. Leaves
  misc_feature: MA Experiment ID: 20000709 Result: Up-regulated in Transcription
  misc_feature: MA Experiment 20000709 PARAMETER Experiment Name: At_15mM_NH4NO3_L-to-H_P Parameter: Age (hr) Value: 14
  misc_feature: MA Experiment 20000709 PARAMETER Experiment Name: At_15mM_NH4NO3_L-to-H_P Parameter: Organism Value: A. thaliana
  misc_feature: MA Experiment 20000709 PARAMETER Experiment Name: At_15mM_NH4NO3_L-to-H_P Parameter: Plant Line Value: WS
  misc_feature: MA Experiment 20000709 PARAMETER Experiment Name: At_15mM_NH4NO3_L-to-H_P Parameter: Timepoint (hr) Value: 4
  misc_feature: MA Experiment 20000709 PARAMETER Experiment Name: At_15mM_NH4NO3_L-to-H_P Parameter: Tissue Value: Aerial
  misc_feature: MA Experiment 20000709 PARAMETER Experiment Name: At_15mM_NH4NO3_L-to-H_P Parameter: Treatment Value: 15mM NH4NO3 vs. 30mM Mannitol
atggagatatcagttgcatgcgtaacagtttctgtagttgtagttgttgtgtcatggtgggtatggagaactttacagtgggtttggtttaaaccaaagatgcttgaaagttacttgagaagacaaggtcttgccggaactccttacacacctcttatcggtgatttgaagaggaacgtcaacatgttgacggaggcaacatccaaacccatcaaactaaccgaagatatcacacctcgtgtcctgcctcatcccttccaaatgctcaagactcacggaaggactttctttacatggcttggacccaaaccaaccatcaccataatggatccagagctaatcaaagaagtgttcaacaaagtttatgattatccgaaggcgcaaacgtttcttttgggcagactaatagccactggaatcattaattacgatggtgataaatgggcgaaacaccgaagaatcatcaaccctgcttttcatatagagaagatcaagaatatggtacctgcgttccaccagagctgcagcgatgttgttggcgaatggagcaagttagtgtcggataaagggtcgtcgtcctgtgaggtagacgtttggccttggcttgtgagtatgactggagatgtgatctctcgtactgcttttggcagcagctacaaagaagggcagaggatctttgagctacaagcagaactagtacatctcatcttacaagctttttggaaagtttacatccctggatatcgttatctccctacgaagagtaatagaaggatgaaagcagcagctagagaaatccaagttatactgaaagggatcgttaacaaaaggttaagggcgagagaagctgggaaagcagcaccaaacgacgatttgttgggaatacttcttgaatcaaatttggggcaagccaaaggaaatggaatgagtactgaggatgtgatggaggagtgcaagttgttctatttcgccgggcaagagacaacttcggtacttctggtctgggcaatggtgctgttaagccaccaccaagattggcaggctcgtgcacgagaggaagtgaagcaagtttttggcgataaagaacctgatacagaatgtcttagccagctcaaagttatgacaatgatattatatgaggttctcaggctatatcctcctgtaactcacctgacccgagcgattgacaaagagatgaagctaggtgacttgacactaccagccggtgttcatatcagtctacctataatgctagtccaacgcgaccccatgctgtggggtactgatgcagcagaatttaagcctgagagattcaaagacggtctttcaaaggcaacaaagagccaagtctccttctttccatttgcatggggaccgaggatatgcatcggccagaattttgccatgttagaggcaaagatggcaatggcgttgattctacagacattcaccttcgagctttctccttcctatgttcatgcgcctcaaacagtcgttaccattcacccgcagttcggtgcacatcttattctgcgcaagctataa

SEQ ID NO: 81098 - protein, 514 aa, Arabidopsis thaliana
  peptide (1)..(514): Ceres Seq. ID no. 12658404
  misc_feature (90)..(489): Pfam Name: Cytochrome P450 Pfam Description: Cytochrome P450
  misc_feature (1)..(514): Homolog of NCBI NO: 15231899 NR Description: cytochrome P450, putative; protein id:
  misc_feature (1)..(514): Homolog of NCBI NO: 9294386 NR Description: cytochrome P450 [Arabidopsis thaliana]
  misc_feature (1)..(514): Homolog of NCBI NO: 15231903 NR Description: cytochrome P450, putative; protein id: supported by cDNA: gi_18086481 [Arabidopsis thaliana] cytochrome P450 [Arabidopsis thaliana]
  misc_feature (1)..(514): Homolog of NCBI NO: 15231907 NR Description: cytochrome P450, putative; protein id: supported by cDNA: gi_15292786, supported by cDNA: gi_20465786 thaliana] >gi|9294391|dbj|BAB02401.1| cytochrome P450
  misc_feature (1)..(514): Homolog of NCBI NO: 15231901 NR Description: cytochrome P450, putative; protein id: [Arabidopsis thaliana] >gi|9294387|dbj|BAB02397.1| cytochrome
  misc_feature (1)..(514): Homolog of NCBI NO: 15231906 NR Description: cytochrome P450, putative; protein id: supported by cDNA: gi_13605896 [Arabidopsis thaliana] cytochrome P450 [Arabidopsis thaliana]
  misc_feature (1)..(514): Homolog of NCBI NO: 15231889 NR Description: cytochrome P450, putative; protein id: supported by cDNA: gi_18252154 [Arabidopsis thaliana] cytochrome P450 [Arabidopsis thaliana]
  misc_feature (1)..(514): Homolog of NCBI NO: 15231897 NR Description: cytochrome P450, putative; protein id:
  misc_feature (112)..(514): Homolog of NCBI NO: 9294385 NR Description: cytochrome P450-like protein [Arabidopsis
  misc_feature (1)..(60): Homolog of NCBI NO: 9294385 NR Description: cytochrome P450-like protein [Arabidopsis
MEISVACVTVSVVVVVVSWWVWRTLQWVWFKPKMLESYLRRQGLAGTPYTPLIGDLKRNVNMLTEATSKPIKLTEDITPRVLPHPFQMLKTHGRTFFTWLGPKPTITIMDPELIKEVFNKVYDYPKAQTFLLGRLIATGIINYDGDKWAKHRRIINPAFHIEKIKNMVPAFHQSCSDVVGEWSKLVSDKGSSSCEVDVWPWLVSMTGDVISRTAFGSSYKEGQRIFELQAELVHLILQAFWKVYIPGYRYLPTKSNRRMKAAAREIQVILKGIVNKRLRAREAGKAAPNDDLLGILLESNLGQAKGNGMSTEDVMEECKLFYFAGQETTSVLLVWAMVLLSHHQDWQARAREEVKQVFGDKEPDTECLSQLKVMTMILYEVLRLYPPVTHLTRAIDKEMKLGDLTLPAGVHISLPIMLVQRDPMLWGTDAAEFKPERFKDGLSKATKSQVSFFPFAWGPRICIGQNFAMLEAKMAMALILQTFTFELSPSYVHAPQTVVTIHPQFGAHLILRKL

SEQ ID NO: 81099 - protein, 481 aa, Arabidopsis thaliana
  peptide (1)..(481): Ceres Seq. ID no. 12658405
  misc_feature (57)..(456): Pfam Name: Cytochrome P450 Pfam Description: Cytochrome P450
  misc_feature (1)..(481): Homolog of NCBI NO: 15231899 NR Description: cytochrome P450, putative; protein id:
  misc_feature (1)..(481): Homolog of NCBI NO: 9294386 NR Description: cytochrome P450 [Arabidopsis thaliana]
  misc_feature (1)..(481): Homolog of NCBI NO: 15231903 NR Description: cytochrome P450, putative; protein id: supported by cDNA: gi_18086481 [Arabidopsis thaliana] cytochrome P450 [Arabidopsis thaliana]
  misc_feature (1)..(481): Homolog of NCBI NO: 15231907 NR Description: cytochrome P450, putative; protein id: supported by cDNA: gi_15292786, supported by cDNA: gi_20465786 thaliana] >gi|9294391|dbj|BAB02401.1| cytochrome P450
  misc_feature (1)..(481): Homolog of NCBI NO: 15231901 NR Description: cytochrome P450, putative; protein id: [Arabidopsis thaliana] >gi|9294387|dbj|BAB02397.1| cytochrome
  misc_feature (1)..(481): Homolog of NCBI NO: 15231906 NR Description: cytochrome P450, putative; protein id: supported by cDNA: gi_13605896 [Arabidopsis thaliana] cytochrome P450 [Arabidopsis thaliana]
  misc_feature (1)..(481): Homolog of NCBI NO: 15231889 NR Description: cytochrome P450, putative; protein id: supported by cDNA: gi_18252154 [Arabidopsis thaliana] cytochrome P450 [Arabidopsis thaliana]
  misc_feature (1)..(481): Homolog of NCBI NO: 15231897 NR Description: cytochrome P450, putative; protein id:
  misc_feature (79)..(481): Homolog of NCBI NO: 9294385 NR Description: cytochrome P450-like protein [Arabidopsis
  misc_feature (1)..(27): Homolog of NCBI NO: 9294385 NR Description: cytochrome P450-like protein [Arabidopsis
MLESYLRRQGLAGTPYTPLIGDLKRNVNMLTEATSKPIKLTEDITPRVLPHPFQMLKTHGRTFFTWLGPKPTITIMDPELIKEVFNKVYDYPKAQTFLLGRLIATGIINYDGDKWAKHRRIINPAFHIEKIKNMVPAFHQSCSDVVGEWSKLVSDKGSSSCEVDVWPWLVSMTGDVISRTAFGSSYKEGQRIFELQAELVHLILQAFWKVYIPGYRYLPTKSNRRMKAAAREIQVILKGIVNKRLRAREAGKAAPNDDLLGILLESNLGQAKGNGMSTEDVMEECKLFYFAGQETTSVLLVWAMVLLSHHQDWQARAREEVKQVFGDKEPDTECLSQLKVMTMILYEVLRLYPPVTHLTRAIDKEMKLGDLTLPAGVHISLPIMLVQRDPMLWGTDAAEFKPERFKDGLSKATKSQVSFFPFAWGPRICIGQNFAMLEAKMAMALILQTFTFELSPSYVHAPQTVVTIHPQFGAHLILRKL

SEQ ID NO: 81100 - protein, 453 aa, Arabidopsis thaliana
  peptide (1)..(453): Ceres Seq. ID no. 12658406
  misc_feature (29)..(428): Pfam Name: Cytochrome P450 Pfam Description: Cytochrome P450
  misc_feature (1)..(453): Homolog of NCBI NO: 15231899 NR Description: cytochrome P450, putative; protein id:
  misc_feature (1)..(453): Homolog of NCBI NO: 9294386 NR Description: cytochrome P450 [Arabidopsis thaliana]
  misc_feature (1)..(453): Homolog of NCBI NO: 15231903 NR Description: cytochrome P450, putative; protein id: supported by cDNA: gi_18086481 [Arabidopsis thaliana] cytochrome P450 [Arabidopsis thaliana]
  misc_feature (1)..(453): Homolog of NCBI NO: 15231907 NR Description: cytochrome P450, putative; protein id: supported by cDNA: gi_15292786, supported by cDNA: gi_20465786 thaliana] >gi|9294391|dbj|BAB02401.1| cytochrome P450
  misc_feature (1)..(453): Homolog of NCBI NO: 15231901 NR Description: cytochrome P450, putative; protein id: [Arabidopsis thaliana] >gi|9294387|dbj|BAB02397.1| cytochrome
  misc_feature (1)..(453): Homolog of NCBI NO: 15231906 NR Description: cytochrome P450, putative; protein id: supported by cDNA: gi_13605896 [Arabidopsis thaliana] cytochrome P450 [Arabidopsis thaliana]
  misc_feature (1)..(453): Homolog of NCBI NO: 15231889 NR Description: cytochrome P450, putative; protein id: supported by cDNA: gi_18252154 [Arabidopsis thaliana] cytochrome P450 [Arabidopsis thaliana]
  misc_feature (1)..(453): Homolog of NCBI NO: 15231897 NR Description: cytochrome P450, putative; protein id:
  misc_feature (51)..(453): Homolog of NCBI NO: 9294385 NR Description: cytochrome P450-like protein [Arabidopsis
  misc_feature (1)..(453): Homolog of NCBI NO: 17386114 NR Description: AT3g14620/MIE1_12 [Arabidopsis thaliana]
MLTEATSKPIKLTEDITPRVLPHPFQMLKTHGRTFFTWLGPKPTITIMDPELIKEVFNKVYDYPKAQTFLLGRLIATGIINYDGDKWAKHRRIINPAFHIEKIKNMVPAFHQSCSDVVGEWSKLVSDKGSSSCEVDVWPWLVSMTGDVISRTAFGSSYKEGQRIFELQAELVHLILQAFWKVYIPGYRYLPTKSNRRMKAAAREIQVILKGIVNKRLRAREAGKAAPNDDLLGILLESNLGQAKGNGMSTEDVMEECKLFYFAGQETTSVLLVWAMVLLSHHQDWQARAREEVKQVFGDKEPDTECLSQLKVMTMILYEVLRLYPPVTHLTRAIDKEMKLGDLTLPAGVHISLPIMLVQRDPMLWGTDAAEFKPERFKDGLSKATKSQVSFFPFAWGPRICIGQNFAMLEAKMAMALILQTFTFELSPSYVHAPQTVVTIHPQFGAHLILRKL

SEQ ID NO: 81101 - DNA, 1962 bp, Arabidopsis thaliana
  misc_feature (1)..(1962): Ceres Seq. ID no. 12658417
  misc_feature: MA Experiment ID: 20000328 Result: Down-regulated in Transcription
  misc_feature: MA Experiment 20000328 PARAMETER Experiment Name: At_42deg_Heat_Sub_P Parameter: Age (day) Value: 14
  misc_feature: MA Experiment 20000328 PARAMETER Experiment Name: At_42deg_Heat_Sub_P Parameter: Organism Value: A. thaliana
  misc_feature: MA Experiment 20000328 PARAMETER Experiment Name: At_42deg_Heat_Sub_P Parameter: Plant Line Value: WS
  misc_feature: MA Experiment 20000328 PARAMETER Experiment Name: At_42deg_Heat_Sub_P Parameter: Temperature (deg C) Value: 42 vs. 22
  misc_feature: MA Experiment 20000328 PARAMETER Experiment Name: At_42deg_Heat_Sub_P Parameter: Timepoint (hr) Value: 6
  misc_feature: MA Experiment 20000328 PARAMETER Experiment Name: At_42deg_Heat_Sub_P Parameter: Tissue Value: Aerial
atgaccgtctcgtttctacggatcgagattcaaaattgttctgccggaattttgagatttctcccacggaacccagatttattcgcagctataaagccttcttctgctttagcatctttatattcgactgtttctgggcaaatcgaagaaaacccgaagagatacgagcaccacaatgttgctacatgtatcgccacattgcaacgctgtgcacagcgcaaagattacgtttccggccaacagatccacggtttcatggttagaaaagggtttctggatgattcgccacgcgccggcacgagcctcgttaacatgtacgctaagtgtggtctcatgcggcgtgcggtgttggtctttggtggatccgaacgcgatgtatttggttacaacgctttgatttctgggtttgtggtaaatgggtctcctttggatgcgatggagacgtacagagaaatgagagctaatgggattttacctgataagtatacatttcctagtttgctaaaaggaagcgatgctatggagctttctgatgttaagaaggttcatggattggcgtttaaacttgggtttgattccgattgttatgtggggagtggcttagttacttcttactcgaagttcatgtcagtggaggatgctcagaaggtgttcgatgaattgcctgatagagatgacagtgtgctttggaatgctttagttaatgggtattcacagatttttagatttgaggatgctttattagtctttagtaaaatgcgtgaagaaggtgtaggtgtgagcaggcataccattacaagcgtcttatcagcatttactgtttcaggggatattgacaacggtaggtcaatccatggccttgcggtgaaaacgggatctggttctgatattgttgtgtcaaatgcattgattgatatgtatgggaagagtaaatggctagaagaggcaaacagtatattcgaagcaatggatgagagagacctgtttacatggaactctgttttatgtgttcatgactactgtggtgatcatgatggaacattagctcttttcgaaaggatgctttgttctggaatccgacctgatattgttacattgacaactgttctgcccacctgcggtcgtctagcttcactgaggcagggcagagagattcatgggtacatgatcgtcagtggacttctaaaccgcaaatctagtaatgaatttatacataattctttgatggatatgtacgtgaaatgcggggacttgagggacgctcggatggttttcgactcaatgagggttaaagactcagcttcttggaatattatgattaatggctatggtgtgcagagctgcggtgagttagctttggatatgttttcatgtatgtgcagagccggtgtcaaacccgatgaaatcacatttgttgggttgctacaagcgtgtagccactctggttttttgaacgaagggagaaattttttggcacagatggagacggtatataacattctcccaacaagtgatcactacgcttgtgtaatagacatgcttggccgtgcagacaagctagaggaagcatatgagttagcaatatcaaagcccatttgcgataatcctgtagtctggcggtcaatattgtcatcttgtcgtctccacgggaacaaagatctcgcactggtggcaggaaagcggctacatgagctcgagccagagcattgtggcggttatgtattaatgtctaatgtttatgtggaagctgggaagtacgaggaagtgttggacgttagagacgcaatgagacaacagaatgtgaagaagacaccaggttgcagctggattgtgctcaagaacggtgttcacacgttctttaccggcaatcagactcacccggaatttaaatctatccacgattggttaagcctagtgatttctcatatgcacggtcatgagtatatgacggtcgacgactaa

SEQ ID NO: 81102 - protein, 653 aa, Arabidopsis thaliana
  peptide (1)..(653): Ceres Seq. ID no. 12658418
  misc_feature (329)..(363): Pfam Name: PPR repeat Pfam Description: PPR repeat
  misc_feature (82)..(650): Homolog of NCBI NO: 34909268 NR Description: P0454H12.17 [Oryza sativa (japonica
  misc_feature (62)..(633): Homolog of NCBI NO: 34915012 NR Description: P0458A05.10 [Oryza sativa (japonica
  misc_feature (48)..(649): Homolog of NCBI NO: 11281371 NR Description: hypothetical protein T8H10.30 - Arabidopsis >gi|6706414|emb|CAB66100.1| putative protein [Arabidopsis
  misc_feature (48)..(649): Homolog of NCBI NO: 30694644 NR Description: pentatricopeptide (PPR) repeat-containing protein
  misc_feature (48)..(649): Homolog of NCBI NO: 30794008 NR Description: unknown protein [Arabidopsis thaliana]
  misc_feature (67)..(649): Homolog of NCBI NO: 15220337 NR Description: hypothetical protein; protein id: At1g11290.1
  misc_feature (79)..(650): Homolog of NCBI NO: 15234006 NR Description: putative protein; protein id: At4g18750.1
  misc_feature (62)..(653): Homolog of NCBI NO: 34897884 NR Description: Similar to Arabidopsis thaliana DNA chromosome 4,
  misc_feature (59)..(653): Homolog of NCBI NO: 38606535 NR Description: OSJNBa0016O02.23 [Oryza sativa (japonica
  misc_feature (297)..(643): Homolog of NCBI NO: 21740490 NR Description: OSJNBa0006B20.5 [Oryza sativa (japonica
MTVSFLRIEIQNCSAGILRFLPRNPDLFAAIKPSSALASLYSTVSGQIEENPKRYEHHNVATCIATLQRCAQRKDYVSGQQIHGFMVRKGFLDDSPRAGTSLVNMYAKCGLMRRAVLVFGGSERDVFGYNALISGFVVNGSPLDAMETYREMRANGILPDKYTFPSLLKGSDAMELSDVKKVHGLAFKLGFDSDCYVGSGLVTSYSKFMSVEDAQKVFDELPDRDDSVLWNALVNGYSQIFRFEDALLVFSKMREEGVGVSRHTITSVLSAFTVSGDIDNGRSIHGLAVKTGSGSDIVVSNALIDMYGKSKWLEEANSIFEAMDERDLFTWNSVLCVHDYCGDHDGTLALFERMLCSGIRPDIVTLTTVLPTCGRLASLRQGREIHGYMIVSGLLNRKSSNEFIHNSLMDMYVKCGDLRDARMVFDSMRVKDSASWNIMINGYGVQSCGELALDMFSCMCRAGVKPDEITFVGLLQACSHSGFLNEGRNFLAQMETVYNILPTSDHYACVIDMLGRADKLEEAYELAISKPICDNPVVWRSILSSCRLHGNKDLALVAGKRLHELEPEHCGGYVLMSNVYVEAGKYEEVLDVRDAMRQQNVKKTPGCSWIVLKNGVHTFFTGNQTHPEFKSIHDWLSLVISHMHGHEYMTVDD

SEQ ID NO: 81103 - protein, 568 aa, Arabidopsis thaliana
  peptide (1)..(568): Ceres Seq. ID no. 12658419
  misc_feature (244)..(278): Pfam Name: PPR repeat Pfam Description: PPR repeat
  misc_feature (1)..(565): Homolog of NCBI NO: 34909268 NR Description: P0454H12.17 [Oryza sativa (japonica
  misc_feature (1)..(548): Homolog of NCBI NO: 34915012 NR Description: P0458A05.10 [Oryza sativa (japonica
  misc_feature (1)..(564): Homolog of NCBI NO: 11281371 NR Description: hypothetical protein T8H10.30 - Arabidopsis >gi|6706414|emb|CAB66100.1| putative protein [Arabidopsis
  misc_feature (1)..(564): Homolog of NCBI NO: 30794008 NR Description: unknown protein [Arabidopsis thaliana]
  misc_feature (1)..(564): Homolog of NCBI NO: 30694644 NR Description: pentatricopeptide (PPR) repeat-containing protein
  misc_feature (1)..(564): Homolog of NCBI NO: 15220337 NR Description: hypothetical protein; protein id: At1g11290.1
  misc_feature (1)..(565): Homolog of NCBI NO: 15234006 NR Description: putative protein; protein id: At4g18750.1
  misc_feature (1)..(568): Homolog of NCBI NO: 34897884 NR Description: Similar to Arabidopsis thaliana DNA chromosome 4,
  misc_feature (1)..(568): Homolog of NCBI NO: 38606535 NR Description: OSJNBa0016O02.23 [Oryza sativa (japonica
  misc_feature (212)..(558): Homolog of NCBI NO: 21740490 NR Description: OSJNBa0006B20.5 [Oryza sativa (japonica
MVRKGFLDDSPRAGTSLVNMYAKCGLMRRAVLVFGGSERDVFGYNALISGFVVNGSPLDAMETYREMRANGILPDKYTFPSLLKGSDAMELSDVKKVHGLAFKLGFDSDCYVGSGLVTSYSKFMSVEDAQKVFDELPDRDDSVLWNALVNGYSQIFRFEDALLVFSKMREEGVGVSRHTITSVLSAFTVSGDIDNGRSIHGLAVKTGSGSDIVVSNALIDMYGKSKWLEEANSIFEAMDERDLFTWNSVLCVHDYCGDHDGTLALFERMLCSGIRPDIVTLTTVLPTCGRLASLRQGREIHGYMIVSGLLNRKSSNEFIHNSLMDMYVKCGDLRDARMVFDSMRVKDSASWNIMINGYGVQSCGELALDMFSCMCRAGVKPDEITFVGLLQACSHSGFLNEGRNFLAQMETVYNILPTSDHYACVIDMLGRADKLEEAYELAISKPICDNPVVWRSILSSCRLHGNKDLALVAGKRLHELEPEHCGGYVLMSNVYVEAGKYEEVLDVRDAMRQQNVKKTPGCSWIVLKNGVHTFFTGNQTHPEFKSIHDWLSLVISHMHGHEYMTVDD

SEQ ID NO: 81104 - protein, 549 aa, Arabidopsis thaliana
  peptide (1)..(549): Ceres Seq. ID no. 12658420
  misc_feature (225)..(259): Pfam Name: PPR repeat Pfam Description: PPR repeat
  misc_feature (1)..(546): Homolog of NCBI NO: 34909268 NR Description: P0454H12.17 [Oryza sativa (japonica
  misc_feature (1)..(529): Homolog of NCBI NO: 34915012 NR Description: P0458A05.10 [Oryza sativa (japonica
  misc_feature (1)..(545): Homolog of NCBI NO: 11281371 NR Description: hypothetical protein T8H10.30 - Arabidopsis >gi|6706414|emb|CAB66100.1| putative protein [Arabidopsis
  misc_feature (1)..(545): Homolog of NCBI NO: 30694644 NR Description: pentatricopeptide (PPR) repeat-containing protein
  misc_feature (1)..(545): Homolog of NCBI NO: 30794008 NR Description: unknown protein [Arabidopsis thaliana]
  misc_feature (1)..(545): Homolog of NCBI NO: 15220337 NR Description: hypothetical protein; protein id: At1g11290.1
  misc_feature (1)..(546): Homolog of NCBI NO: 15234006 NR Description: putative protein; protein id: At4g18750.1
  misc_feature (1)..(549): Homolog of NCBI NO: 34897884 NR Description: Similar to Arabidopsis thaliana DNA chromosome 4,
  misc_feature (1)..(549): Homolog of NCBI NO: 38606535 NR Description: OSJNBa0016O02.23 [Oryza sativa (japonica
  misc_feature (193)..(539): Homolog of NCBI NO: 21740490 NR Description: OSJNBa0006B20.5 [Oryza sativa (japonica
MYAKCGLMRRAVLVFGGSERDVFGYNALISGFVVNGSPLDAMETYREMRANGILPDKYTFPSLLKGSDAMELSDVKKVHGLAFKLGFDSDCYVGSGLVTSYSKFMSVEDAQKVFDELPDRDDSVLWNALVNGYSQIFRFEDALLVFSKMREEGVGVSRHTITSVLSAFTVSGDIDNGRSIHGLAVKTGSGSDIVVSNALIDMYGKSKWLEEANSIFEAMDERDLFTWNSVLCVHDYCGDHDGTLALFERMLCSGIRPDIVTLTTVLPTCGRLASLRQGREIHGYMIVSGLLNRKSSNEFIHNSLMDMYVKCGDLRDARMVFDSMRVKDSASWNIMINGYGVQSCGELALDMFSCMCRAGVKPDEITFVGLLQACSHSGFLNEGRNFLAQMETVYNILPTSDHYACVIDMLGRADKLEEAYELAISKPICDNPVVWRSILSSCRLHGNKDLALVAGKRLHELEPEHCGGYVLMSNVYVEAGKYEEVLDVRDAMRQQNVKKTPGCSWIVLKNGVHTFFTGNQTHPEFKSIHDWLSLVISHMHGHEYMTVDD

SEQ ID NO: 81105 - DNA, 2332 bp, Arabidopsis thaliana
  misc_feature (1)..(2332): Ceres Seq. ID no. 12658429
  misc_feature: MA Experiment ID: 20000307 Result: Up-regulated in Transcription
  misc_feature: MA Experiment 20000307 PARAMETER Experiment Name: At_Germinating_Seeds_Sub_P Parameter: Age (hr) Value: 24 vs. 0
  misc_feature: MA Experiment 20000307 PARAMETER Experiment Name: At_Germinating_Seeds_Sub_P Parameter: Organism Value: A. thaliana
  misc_feature: MA Experiment 20000307 PARAMETER Experiment Name: At_Germinating_Seeds_Sub_P Parameter: Plant Line Value: WS
  misc_feature: MA Experiment 20000307 PARAMETER Experiment Name: At_Germinating_Seeds_Sub_P Parameter: Tissue Value: Germinating Seeds
  misc_feature: MA Experiment ID: 20000327 Result: Down-regulated in Transcription
  misc_feature: MA Experiment 20000327 PARAMETER Experiment Name: At_42deg_Heat_Sub_P Parameter: Age (day) Value: 14
  misc_feature: MA Experiment 20000327 PARAMETER Experiment Name: At_42deg_Heat_Sub_P Parameter: Organism Value: A. thaliana
  misc_feature: MA Experiment 20000327 PARAMETER Experiment Name: At_42deg_Heat_Sub_P Parameter: Plant Line Value: WS
  misc_feature: MA Experiment 20000327 PARAMETER Experiment Name: At_42deg_Heat_Sub_P Parameter: Temperature (deg C) Value: 42 vs. 22
  misc_feature: MA Experiment 20000327 PARAMETER Experiment Name: At_42deg_Heat_Sub_P Parameter: Timepoint (hr) Value: 1
  misc_feature: MA Experiment 20000327 PARAMETER Experiment Name: At_42deg_Heat_Sub_P Parameter: Tissue Value: Aerial
  misc_feature: MA Experiment ID: 20000328 Result: Down-regulated in Transcription
  misc_feature: MA Experiment 20000328 PARAMETER Experiment Name: At_42deg_Heat_Sub_P Parameter: Age (day) Value: 14
  misc_feature: MA Experiment 20000328 PARAMETER Experiment Name: At_42deg_Heat_Sub_P Parameter: Organism Value: A. thaliana
  misc_feature: MA Experiment 20000328 PARAMETER Experiment Name: At_42deg_Heat_Sub_P Parameter: Plant Line Value: WS
  misc_feature: MA Experiment 20000328 PARAMETER Experiment Name: At_42deg_Heat_Sub_P Parameter: Temperature (deg C) Value: 42 vs. 22
  misc_feature: MA Experiment 20000328 PARAMETER Experiment Name: At_42deg_Heat_Sub_P Parameter: Timepoint (hr) Value: 6
  misc_feature: MA Experiment 20000328 PARAMETER Experiment Name: At_42deg_Heat_Sub_P Parameter: Tissue Value: Aerial
  misc_feature: MA Experiment ID: 20000329 Result: Up-regulated in Transcription
  misc_feature: MA Experiment 20000329 PARAMETER Experiment Name: At_4deg_Cold_Sub_P Parameter: Age (day) Value: 14
  misc_feature: MA Experiment 20000329 PARAMETER Experiment Name: At_4deg_Cold_Sub_P Parameter: Organism Value: A. thaliana
  misc_feature: MA Experiment 20000329 PARAMETER Experiment Name: At_4deg_Cold_Sub_P Parameter: Plant Line Value: WS
  misc_feature: MA Experiment 20000329 PARAMETER Experiment Name: At_4deg_Cold_Sub_P Parameter: Temperature (deg C) Value: 4 vs. 22
  misc_feature: MA Experiment 20000329 PARAMETER Experiment Name: At_4deg_Cold_Sub_P Parameter: Timepoint (hr) Value: 6
  misc_feature: MA Experiment 20000329 PARAMETER Experiment Name: At_4deg_Cold_Sub_P Parameter: Tissue Value: Aerial
  misc_feature: MA Experiment ID: 20000355 Result: Up-regulated in Transcription
  misc_feature: MA Experiment 20000355 PARAMETER Experiment Name: At_Siliques_Sub_P Parameter: Age (day) Value: 21
  misc_feature: MA Experiment 20000355 PARAMETER Experiment Name: At_Siliques_Sub_P Parameter: Organism Value: A. thaliana
  misc_feature: MA Experiment 20000355 PARAMETER Experiment Name: At_Siliques_Sub_P Parameter: Plant Line Value: WS
  misc_feature: MA Experiment 20000355 PARAMETER Experiment Name: At_Siliques_Sub_P Parameter: Tissue Value: Less Than 5mm Siliques vs. Whole Plant
attcgttttccttcgttccctctctttcttcacactcctttttttatttatttccattgatctctctcctctcctcgatttttccctcctttaatccatctctgcatattcttcaagcttgggttcatcttcatcttgatctgaatcgatccgatggctacatataagcctaagaacatcctcatcactggggctgctggattcatagcctctcatgttgctaacagactagttcgcagctaccctgactacaaaattgttgtgcttgacaagcttgattactgttctaatctgaagaaccttaatccttctaaatcctctcccaacttcaagtttgtgaaaggagatatcgccagtgctgatctcgtcaactaccttctcatcactgaagaaatcgacaccattatgcactttgctgctcaaacccatgttgacaattctttcggtaatagctttgagtttaccaagaacaatatttatggtacccatgtccttttggaagcttgtaaagtcactggccagatcaggaggttcatccatgtgagtactgatgaggtctatggagagactgatgaggatgcttcagtgggtaatcacgaggcttctcagttgctcccaactaatccatactccgccactaaagctggagctgagatgcttgtcatggcatatggtagatcatatgggttgccggttataacaactcgcgggaacaatgtttatggtcctaaccagtttcctgaaaagttgattcctaagttcatcctcttggccatgaatgggaagcctctcccaatccacggagatggatctaatgtgagaagttatctctactgcgaagatgttgctgaggcatttgaggttgttcttcacaaaggggaagttaaccatgtctacaatatagggacaacgagagaaaggagagtgattgatgtggctaatgacatcagtaaactctttgggatagaccctgactccaccattcagtatgtggaaaaccggccattcaatgaccagaggtacttcctcgatgaccagaagctgaagaaattaggatggtgtgagcgaaccaattgggaagaaggactgaggaagacaatggaatggtatactgagaaccctgagtggtggggcgatgtttctggagctctgcttcctcatccacggatgttgatgatgcccggtgaccgacactctgatggctctgacgagcacaagaatgcagatggtaatcagacattcacggtggttactcccaccaaggctggttgttccggagacaaaagatccttgaagttcctcatctatgggaagactgggtggctcggtggtcttctgggaaaactatgtgagaaacaagggattccttacgagtatggaaaaggaagactagaggatagagcttctctcatcgcagatattcgcagcatcaaaccaagtcatgtcttcaacgccgctggtttaactgggagacccaatgttgactggtgtgaatctcacaaaactgaaaccatccgagtcaacgttgctggaactttgactcttgcagatgtttgcagagagaatgatctgttgatgatgaactttgccactggttgtatattcgagtatgacgctgcacatccagaaggttcagggattggttttaaggaagaagataaaccgaatttcactggttctttctactcaaaaacaaaggcaatggtggaagagcttctaagagaatttgacaacgtatgcaccttgagagtgcggatgccaatctcatctgacttaaataacccgcgaaacttcatcacgaagatctcgcgttacaacaaagtggtgaacattccaaacagcatgaccatactagatgaactcttaccaatctcgatcgagatggcgaagaggaacctaaggggaatatggaacttcaccaatccaggagtggtgagccacaacgagatattagagatgtacaagagttacatcgagcctgatttcaaatggtccaacttcaatttggaagaacaggctaaggtcattgttgctccacggagcaacaacgagatggatggtgccaagctcagcaaggagtttccagagatgctttccatcaaagattcgttgatcaaatacgtcttcgaacctaacaagagaacgtaaaacacagacacacacacgcacttccccgctctgtgttcactataatgtttctactatagttttatctgattcatttactctctttttttgcattctacgacttgcatgtagctgtcttcactcattctacgtcacaacacatctttgttttccattaatgttattacacagatcgatttgttgg

SEQ ID NO: 81106 - protein, 664 aa, Arabidopsis thaliana
  peptide (1)..(664): Ceres Seq. ID no. 12658430
  misc_feature (9)..(323): Pfam Name: NAD dependent epimerase/dehydratase family Pfam Description: NAD dependent epimerase/dehydratase family
  misc_feature (168)..(664): Homolog of NCBI NO: 18404494 NR Description: dTDP-D-glucose 4,6-dehydratase, putative; protein At1g53500.1, supported by cDNA: gi_15081768 [Arabidopsis
  misc_feature (168)..(664): Homolog of NCBI NO: 15081769 NR Description: At1g53500/F22G10_13 [Arabidopsis thaliana]
  misc_feature (371)..(664): Homolog of NCBI NO: 21593701 NR Description: unknown [Arabidopsis thaliana]
  misc_feature (379)..(664): Homolog of NCBI NO: 18407710 NR Description: expressed protein; protein id: At1g63000.1, by cDNA: 41505., supported by cDNA: gi_12083297, supported by
  misc_feature (379)..(664): Homolog of NCBI NO: 14423536 NR Description: Unknown protein [Arabidopsis thaliana]
  misc_feature (397)..(663): Homolog of NCBI NO: 2982303 NR Description: hypothetical protein [Picea mariana]
  misc_feature (3)..(316): Homolog of NCBI NO: 39595079 NR Description: Hypothetical protein CBG03656 [Caenorhabditis
  misc_feature (384)..(659): Homolog of NCBI NO: 39595079 NR Description: Hypothetical protein CBG03656 [Caenorhabditis
  misc_feature (4)..(316): Homolog of NCBI NO: 17531421 NR Description: 4 6-dehydratase (71.1 kD) [Caenorhabditis elegans]
  misc_feature (384)..(659): Homolog of NCBI NO: 17531421 NR Description: 4 6-dehydratase (71.1 kD) [Caenorhabditis elegans]
MATYKPKNILITGAAGFIASHVANRLVRSYPDYKIVVLDKLDYCSNLKNLNPSKSSPNFKFVKGDIASADLVNYLLITEEIDTIMHFAAQTHVDNSFGNSFEFTKNNIYGTHVLLEACKVTGQIRRFIHVSTDEVYGETDEDASVGNHEASQLLPTNPYSATKAGAEMLVMAYGRSYGLPVITTRGNNVYGPNQFPEKLIPKFILLAMNGKPLPIHGDGSNVRSYLYCEDVAEAFEVVLHKGEVNHVYNIGTTRERRVIDVANDISKLFGIDPDSTIQYVENRPFNDQRYFLDDQKLKKLGWCERTNWEEGLRKTMEWYTENPEWWGDVSGALLPHPRMLMMPGDRHSDGSDEHKNADGNQTFTVVTPTKAGCSGDKRSLKFLIYGKTGWLGGLLGKLCEKQGIPYEYGKGRLEDRASLIADIRSIKPSHVFNAAGLTGRPNVDWCESHKTETIRVNVAGTLTLADVCRENDLLMMNFATGCIFEYDAAHPEGSGIGFKEEDKPNFTGSFYSKTKAMVEELLREFDNVCTLRVRMPISSDLNNPRNFITKISRYNKVVNIPNSMTILDELLPISIEMAKRNLRGIWNFTNPGVVSHNEILEMYKSYIEPDFKWSNFNLEEQAKVIVAPRSNNEMDGAKLSKEFPEMLSIKDSLIKYVFEPNKRT

SEQ ID NO: 81107 - protein, 580 aa, Arabidopsis thaliana
  peptide (1)..(580): Ceres Seq. ID no. 12658431
  misc_feature (1)..(239): Pfam Name: NAD dependent epimerase/dehydratase family Pfam Description: NAD dependent epimerase/dehydratase family
  misc_feature (84)..(580): Homolog of NCBI NO: 18404494 NR Description: dTDP-D-glucose 4,6-dehydratase, putative; protein At1g53500.1, supported by cDNA: gi_15081768 [Arabidopsis
  misc_feature (84)..(580): Homolog of NCBI NO: 15081769 NR Description: At1g53500/F22G10_13 [Arabidopsis thaliana]
  misc_feature (287)..(580): Homolog of NCBI NO: 21593701 NR Description: unknown [Arabidopsis thaliana]
  misc_feature (295)..(580): Homolog of NCBI NO: 18407710 NR Description: expressed protein; protein id: At1g63000.1, by cDNA: 41505., supported by cDNA: gi_12083297, supported by
  misc_feature (295)..(580): Homolog of NCBI NO: 14423536 NR Description: Unknown protein [Arabidopsis thaliana]
  misc_feature (313)..(579): Homolog of NCBI NO: 2982303 NR Description: hypothetical protein [Picea mariana]
  misc_feature (1)..(232): Homolog of NCBI NO: 39595079 NR Description: Hypothetical protein CBG03656 [Caenorhabditis
  misc_feature (300)..(575): Homolog of NCBI NO: 39595079 NR Description: Hypothetical protein CBG03656 [Caenorhabditis
  misc_feature (1)..(232): Homolog of NCBI NO: 17531421 NR Description: 4 6-dehydratase (71.1 kD) [Caenorhabditis elegans]
  misc_feature (300)..(575): Homolog of NCBI NO: 17531421 NR Description: 4 6-dehydratase (71.1 kD) [Caenorhabditis elegans]
MHFAAQTHVDNSFGNSFEFTKNNIYGTHVLLEACKVTGQIRRFIHVSTDEVYGETDEDASVGNHEASQLLPTNPYSATKAGAEMLVMAYGRSYGLPVITTRGNNVYGPNQFPEKLIPKFILLAMNGKPLPIHGDGSNVRSYLYCEDVAEAFEVVLHKGEVNHVYNIGTTRERRVIDVANDISKLFGIDPDSTIQYVENRPFNDQRYFLDDQKLKKLGWCERTNWEEGLRKTMEWYTENPEWWGDVSGALLPHPRMLMMPGDRHSDGSDEHKNADGNQTFTVVTPTKAGCSGDKRSLKFLIYGKTGWLGGLLGKLCEKQGIPYEYGKGRLEDRASLIADIRSIKPSHVFNAAGLTGRPNVDWCESHKTETIRVNVAGTLTLADVCRENDLLMMNFATGCIFEYDAAHPEGSGIGFKEEDKPNFTGSFYSKTKAMVEELLREFDNVCTLRVRMPISSDLNNPRNFITKISRYNKVVNIPNSMTILDELLPISIEMAKRNLRGIWNFTNPGVVSHNEILEMYKSYIEPDFKWSNFNLEEQAKVIVAPRSNNEMDGAKLSKEFPEMLSIKDSLIKYVFEPNKRT

SEQ ID NO: 81108 - protein, 497 aa, Arabidopsis thaliana
  peptide (1)..(497): Ceres Seq. ID no. 12658432
  misc_feature (1)..(156): Pfam Name: NAD dependent epimerase/dehydratase family Pfam Description: NAD dependent epimerase/dehydratase family
  misc_feature (1)..(497): Homolog of NCBI NO: 18404494 NR Description: dTDP-D-glucose 4,6-dehydratase, putative; protein At1g53500.1, supported by cDNA: gi_15081768 [Arabidopsis
  misc_feature (1)..(497): Homolog of NCBI NO: 15081769 NR Description: At1g53500/F22G10_13 [Arabidopsis thaliana]
  misc_feature (204)..(497): Homolog of NCBI NO: 21593701 NR Description: unknown [Arabidopsis thaliana]
  misc_feature (212)..(497): Homolog of NCBI NO: 18407710 NR Description: expressed protein; protein id: At1g63000.1, by cDNA: 41505., supported by cDNA: gi_12083297, supported by
  misc_feature (212)..(497): Homolog of NCBI NO: 14423536 NR Description: Unknown protein [Arabidopsis thaliana]
  misc_feature (230)..(496): Homolog of NCBI NO: 2982303 NR Description: hypothetical protein [Picea mariana]
  misc_feature (1)..(149): Homolog of NCBI NO: 39595079 NR Description: Hypothetical protein CBG03656 [Caenorhabditis
  misc_feature (217)..(492): Homolog of NCBI NO: 39595079 NR Description: Hypothetical protein CBG03656 [Caenorhabditis
  misc_feature (1)..(149): Homolog of NCBI NO: 17531421 NR Description: 4 6-dehydratase (71.1 kD) [Caenorhabditis elegans]
  misc_feature (217)..(492): Homolog of NCBI NO: 17531421 NR Description: 4 6-dehydratase (71.1 kD) [Caenorhabditis elegans]
MLVMAYGRSYGLPVITTRGNNVYGPNQFPEKLIPKFILLAMNGKPLPIHGDGSNVRSYLYCEDVAEAFEVVLHKGEVNHVYNIGTTRERRVIDVANDISKLFGIDPDSTIQYVENRPFNDQRYFLDDQKLKKLGWCERTNWEEGLRKTMEWYTENPEWWGDVSGALLPHPRMLMMPGDRHSDGSDEHKNADGNQTFTVVTPTKAGCSGDKRSLKFLIYGKTGWLGGLLGKLCEKQGIPYEYGKGRLEDRASLIADIRSIKPSHVFNAAGLTGRPNVDWCESHKTETIRVNVAGTLTLADVCRENDLLMMNFATGCIFEYDAAHPEGSGIGFKEEDKPNFTGSFYSKTKAMVEELLREFDNVCTLRVRMPISSDLNNPRNFITKISRYNKVVNIPNSMTILDELLPISIEMAKRNLRGIWNFTNPGVVSHNEILEMYKSYIEPDFKWSNFNLEEQAKVIVAPRSNNEMDGAKLSKEFPEMLSIKDSLIKYVFEPNKRT

SEQ ID NO: 81109 - DNA, 2466 bp, Arabidopsis thaliana
  misc_feature (1)..(2466): Ceres Seq. ID no. 12658433
attcttcgatccagcttcttccacccgtaacccttaaaagagctcctcggatcctccgattctagtctccaaagattctgacggctttgcttttttctcttataaacaaagggattttggtgtagcagggatacaagttttgtatgatggatgaatcaaatgagataatcttgcagaaatcaaagaggttgacatctgttgtctggaattactttgagagagtgagaaaggctgatgtgtgctatgctgtttgcattcagtgtaataaaaaactcagtggttcgagcaacagcggaacaactcatcttcggaaccatcttatgcggtgtctcaaaagaactaatcacgacatgtctcagttgctgacacctaaaagaaggaaaaaagagaatccagttactgttgctactatcaattttgatgacggtcaagcgaaagaagagtatcttagacctaagtttgatcaggaccaacgaagggacgaggtggttctaagccgaggaagtggtggaaggtttagtcaagaaaggagtcaggttgatcttgcacgtatgattattttgcacaattatccgttagccatggttgatcatgttggattcaaagtttttgctaggaatcttcagccgttgtttgaagctgtgccaaatagcacaattgaggattcatgtatggagatttacattagggagaagcagagagtgcagcacactttgaatcatttatacggtaaagtcaatctttcggtggagatgtggtcttcccgggataattctaactatgtgtgtttggcctctaattatatcgatgaggagtggaggctacataggaatgttctaaactttatcaccttggatccttctcatactgaagatatgctctcggaagtgatcatcagatgtttgattgaatggagtcttgagaacaagcttttcgctgttacgttcgacagtgtttctgttaatgaagagattgtcctgcgaattaaagaccatatgtctcagagcagccagatattaatcaacgggcagttatttgagttgaaatctgccgctcatcttctgaattctcttgtcgaagattgcttggaggctatgagagatgtgatccaaaagattcgaggaagtgtgagatatgtcaagagctcgcaatcaacacaagtaaggttcaacgaaattgctcaactcgccggaatcaactcccagaagatcttggttcttgattctattgttaactcgaactctacgttcgtgatgcttgaaaccgtattggagtacaagggtgcgttttgccatctgcgtgatcacgatcacagctttgattcatctctaaccgacgaggagtgggaatggacaagatacgttactggttatcttaaacttgtattcgatattgcctctgacttttcagcaaacaaatgtcctacagcaaatgtatactttgctgagatgtgtgatatccacatccagttggtcgagtggtgcaagaaccaggacaacttcttgagttctctcgcagcaaatatgaaggctaaattcgatgagtattggaacaaatgcagccttgttttagcaatcgctgcgatattggatccgcgattcaagatgaagttggtagagtattactactctaagatctatggcagtaccgctctggatcgtatcaaggaagtgtcgaatggtgtcaaggagcttcttgatgcatattcgatgtgctcagccattgtcggtgaagattccttctctggatccggtttaggtagagctagtatggacactagagacagactgaaagggttcgacaagtttcttcacgagacttctcagaaccaaaacacaacaacggatttggacaagtacttgtctgaaccgatctttccccgtagtggcgagttcaacattctgaattactggaaggtccatacaccaagataccctatcctctctttgttggcccgtgacattttgggtacgccgatgtcaatctgtgcgcctgattcaaccttcaactctgggacaccggtgatctctgatagtcagagttccttgaaccctgatatcagacaggctttgttctgtgcacatgactggttgtctacagaaacagagggtacaatctcaaactctatttaagtcttcttctcctttataagaattcaaaagccaatcaatcatcaactcctactgacttaaatctcttataacgagccaagaaattctaccattgtctagacaataccctcaaactctgtgaagagaagaacaaaatacaaggatgaaaagatcatggaatgtcactcgtagttctctaaggtggtgaaactgaagagaaagccaaatgcttttagatggtcgtgttgcgtagatggaacagaaagtacagaagtttaatttatttatgcatttgagtttgctgtttgtaacaaatagaatcctcaagtttaaagcaaagggaaataagttaaag

SEQ ID NO: 81110 - protein, 662 aa, Arabidopsis thaliana
  peptide (1)..(662): Ceres Seq. ID no. 12658434
  misc_feature (568)..(650): Pfam Name: hAT family dimerisation domain Pfam Description: hAT family dimerisation domain
  misc_feature (2)..(657): Homolog of NCBI NO: 15222508 NR Description: unknown protein; protein id: At1g69950.1
  misc_feature (12)..(525): Homolog of NCBI NO: 22535576 NR Description: Ac transposase-like protein [Oryza sativa
  misc_feature (547)..(655): Homolog of NCBI NO: 22535576 NR Description: Ac transposase-like protein [Oryza sativa
  misc_feature (84)..(650): Homolog of NCBI NO: 15228474 NR Description: putative transposase; protein id: At3g42170.1
  misc_feature (2)..(540): Homolog of NCBI NO: 15220044 NR Description: hypothetical protein; protein id: At1g80020.1
  misc_feature (547)..(662): Homolog of NCBI NO: 15220044 NR Description: hypothetical protein; protein id: At1g80020.1
  misc_feature (133)..(650): Homolog of NCBI NO: 37531504 NR Description: putative transposable element [Oryza sativa
  misc_feature (14)..(100): Homolog of NCBI NO: 37531504 NR Description: putative transposable element [Oryza sativa
  misc_feature (100)..(522): Homolog of NCBI NO: 20521440 NR Description: B1003B09.3 [Oryza sativa (japonica
  misc_feature (495)..(650): Homolog of NCBI NO: 20521440 NR Description: B1003B09.3 [Oryza sativa (japonica
MMDESNEIILQKSKRLTSVVWNYFERVRKADVCYAVCIQCNKKLSGSSNSGTTHLRNHLMRCLKRTNHDMSQLLTPKRRKKENPVTVATINFDDGQAKEEYLRPKFDQDQRRDEVVLSRGSGGRFSQERSQVDLARMIILHNYPLAMVDHVGFKVFARNLQPLFEAVPNSTIEDSCMEIYIREKQRVQHTLNHLYGKVNLSVEMWSSRDNSNYVCLASNYIDEEWRLHRNVLNFITLDPSHTEDMLSEVIIRCLIEWSLENKLFAVTFDSVSVNEEIVLRIKDHMSQSSQILINGQLFELKSAAHLLNSLVEDCLEAMRDVIQKIRGSVRYVKSSQSTQVRFNEIAQLAGINSQKILVLDSIVNSNSTFVMLETVLEYKGAFCHLRDHDHSFDSSLTDEEWEWTRYVTGYLKLVFDIASDFSANKCPTANVYFAEMCDIHIQLVEWCKNQDNFLSSLAANMKAKFDEYWNKCSLVLAIAAILDPRFKMKLVEYYYSKIYGSTALDRIKEVSNGVKELLDAYSMCSAIVGEDSFSGSGLGRASMDTRDRLKGFDKFLHETSQNQNTTTDLDKYLSEPIFPRSGEFNILNYWKVHTPRYPILSLLARDILGTPMSICAPDSTFNSGTPVISDSQSSLNPDIRQALFCAHDWLSTETEGTISNSI

SEQ ID NO: 81111 - protein, 661 aa, Arabidopsis thaliana; identical to SEQ ID NO: 78865
  peptide (1)..(661): Ceres Seq. ID no. 12658435
  misc_feature (567)..(649): Pfam Name: hAT family dimerisation domain Pfam Description: hAT family dimerisation domain
  misc_feature (1)..(656): Homolog of NCBI NO: 15222508 NR Description: unknown protein; protein id: At1g69950.1
  misc_feature (11)..(524): Homolog of NCBI NO: 22535576 NR Description: Ac transposase-like protein [Oryza sativa
  misc_feature (546)..(654): Homolog of NCBI NO: 22535576 NR Description: Ac transposase-like protein [Oryza sativa
  misc_feature (83)..(649): Homolog of NCBI NO: 15228474 NR Description: putative transposase; protein id: At3g42170.1
  misc_feature (1)..(539): Homolog of NCBI NO: 15220044 NR Description: hypothetical protein; protein id: At1g80020.1
  misc_feature (546)..(661): Homolog of NCBI NO: 15220044 NR Description: hypothetical protein; protein id: At1g80020.1
  misc_feature (132)..(649): Homolog of NCBI NO: 37531504 NR Description: putative transposable element [Oryza sativa
  misc_feature (13)..(99): Homolog of NCBI NO: 37531504 NR Description: putative transposable element [Oryza sativa
  misc_feature (99)..(521): Homolog of NCBI NO: 20521440 NR Description: B1003B09.3 [Oryza sativa (japonica
  misc_feature (494)..(649): Homolog of NCBI NO: 20521440 NR Description: B1003B09.3 [Oryza sativa (japonica

SEQ ID NO: 81112 - protein, 603 aa, Arabidopsis thaliana; identical to SEQ ID NO: 78866
  peptide (1)..(603): Ceres Seq. ID no. 12658436
  misc_feature (509)..(591): Pfam Name: hAT family dimerisation domain Pfam Description: hAT family dimerisation domain
  misc_feature (1)..(598): Homolog of NCBI NO: 15222508 NR Description: unknown protein; protein id: At1g69950.1
  misc_feature (1)..(466): Homolog of NCBI NO: 22535576 NR Description: Ac transposase-like protein [Oryza sativa
  misc_feature (488)..(596): Homolog of NCBI NO: 22535576 NR Description: Ac transposase-like protein [Oryza sativa
  misc_feature (25)..(591): Homolog of NCBI NO: 15228474 NR Description: putative transposase; protein id: At3g42170.1
  misc_feature (1)..(481): Homolog of NCBI NO: 15220044 NR Description: hypothetical protein; protein id: At1g80020.1
  misc_feature (488)..(603): Homolog of NCBI NO: 15220044 NR Description: hypothetical protein; protein id: At1g80020.1
  misc_feature (74)..(591): Homolog of NCBI NO: 37531504 NR Description: putative transposable element [Oryza sativa
  misc_feature (1)..(41): Homolog of NCBI NO: 37531504 NR Description: putative transposable element [Oryza sativa
  misc_feature (41)..(463): Homolog of NCBI NO: 20521440 NR Description: B1003B09.3 [Oryza sativa (japonica
  misc_feature (436)..(591): Homolog of NCBI NO: 20521440 NR Description: B1003B09.3 [Oryza sativa (japonica

SEQ ID NO: 81113 - DNA, 936 bp, Arabidopsis thaliana
  misc_feature (1)..(936): Ceres Seq. ID no. 12658437
  misc_feature: MA Experiment ID: 20000307 Result: Up-regulated in Transcription
  misc_feature: MA Experiment 20000307 PARAMETER Experiment Name: At_Germinating_Seeds_Sub_P Parameter: Age (hr) Value: 24 vs. 0
  misc_feature: MA Experiment 20000307 PARAMETER Experiment Name: At_Germinating_Seeds_Sub_P Parameter: Organism Value: A. thaliana
  misc_feature: MA Experiment 20000307 PARAMETER Experiment Name: At_Germinating_Seeds_Sub_P Parameter: Plant Line Value: WS
  misc_feature: MA Experiment 20000307 PARAMETER Experiment Name: At_Germinating_Seeds_Sub_P Parameter: Tissue Value: Germinating Seeds
  misc_feature: MA Experiment ID: 20000314 Result: Down-regulated in Transcription
  misc_feature: MA Experiment 20000314 PARAMETER Experiment Name: At_14day_Shoots-Roots_Sub_P Parameter: Age (day) Value: 14
  misc_feature: MA Experiment 20000314 PARAMETER Experiment Name: At_14day_Shoots-Roots_Sub_P Parameter: Organism Value: A. thaliana
  misc_feature: MA Experiment 20000314 PARAMETER Experiment Name: At_14day_Shoots-Roots_Sub_P Parameter: Plant Line Value: WS
  misc_feature: MA Experiment 20000314 PARAMETER Experiment Name: At_14day_Shoots-Roots_Sub_P Parameter: Tissue Value: Roots vs. Whole Plant
  misc_feature: MA Experiment ID: 20000315 Result: Up-regulated in Transcription
  misc_feature: MA Experiment 20000315 PARAMETER Experiment Name: At_14day_Shoots-Roots_Sub_P Parameter: Age (day) Value: 14
  misc_feature: MA Experiment 20000315 PARAMETER Experiment Name: At_14day_Shoots-Roots_Sub_P Parameter: Organism Value: A. thaliana
  misc_feature: MA Experiment 20000315 PARAMETER Experiment Name: At_14day_Shoots-Roots_Sub_P Parameter: Plant Line Value: WS
  misc_feature: MA Experiment 20000315 PARAMETER Experiment Name: At_14day_Shoots-Roots_Sub_P Parameter: Tissue Value: Shoots vs. Whole Plant
  misc_feature: MA Experiment ID: 20000329 Result: Up-regulated in Transcription
  misc_feature: MA Experiment 20000329 PARAMETER Experiment Name: At_4deg_Cold_Sub_P Parameter: Age (day) Value: 14
  misc_feature: MA Experiment 20000329 PARAMETER Experiment Name: At_4deg_Cold_Sub_P Parameter: Organism Value: A. thaliana
  misc_feature: MA Experiment 20000329 PARAMETER Experiment Name: At_4deg_Cold_Sub_P Parameter: Plant Line Value: WS
  misc_feature: MA Experiment 20000329 PARAMETER Experiment Name: At_4deg_Cold_Sub_P Parameter: Temperature (deg C) Value: 4 vs. 22
  misc_feature: MA Experiment 20000329 PARAMETER Experiment Name: At_4deg_Cold_Sub_P Parameter: Timepoint (hr) Value: 6
  misc_feature: MA Experiment 20000329 PARAMETER Experiment Name: At_4deg_Cold_Sub_P Parameter: Tissue Value: Aerial
  misc_feature: MA Experiment ID: 20000347 Result: Down-regulated in Transcription
  misc_feature: MA Experiment 20000347 PARAMETER Experiment Name: At_2mM_SA_Sub_P Parameter: Age (day) Value: 14
  misc_feature: MA Experiment 20000347 PARAMETER Experiment Name: At_2mM_SA_Sub_P Parameter: Organism Value: A. thaliana
  misc_feature: MA Experiment 20000347 PARAMETER Experiment Name: At_2mM_SA_Sub_P Parameter: Plant Line Value: WS
  misc_feature: MA Experiment 20000347 PARAMETER Experiment Name: At_2mM_SA_Sub_P Parameter: Timepoint (hr) Value: 6
  misc_feature: MA Experiment 20000347 PARAMETER Experiment Name: At_2mM_SA_Sub_P Parameter: Tissue Value: Aerial
  misc_feature: MA Experiment 20000347 PARAMETER Experiment Name: At_2mM_SA_Sub_P Parameter: Treatment Value: 2mM SA vs. No Treatment
  misc_feature: MA Experiment ID: 20000355 Result: Up-regulated in Transcription
  misc_feature: MA Experiment 20000355 PARAMETER Experiment Name: At_Siliques_Sub_P Parameter: Age (day) Value: 21
  misc_feature: MA Experiment 20000355 PARAMETER Experiment Name: At_Siliques_Sub_P Parameter: Organism Value: A. thaliana
  misc_feature: MA Experiment 20000355 PARAMETER Experiment Name: At_Siliques_Sub_P Parameter: Plant Line Value: WS
  misc_feature: MA Experiment 20000355 PARAMETER Experiment Name: At_Siliques_Sub_P Parameter: Tissue Value: Less Than 5mm Siliques vs. Whole Plant
atggatacaggaaataataatgacatccccactcttcttaagtccaattttcctccctatggtcgagattttcctggtgctattcctaccggtagattttcagacgggaaagttccatcggacatcattgcggaatcgttaggaatagcaaaaacactaccaccatatttaggctcgaatctaaagccacatgatcttctaaaaggtgtaatctttgcttctggaggttccggttatgatccattaacatctacattactgtctgtagtatcaatgtcagaccaactaaagtattttcaagaatacctagcaaaaattaagcaacactttggagaagaaaaagttaagttcatattggagaaaagtgtgtttcttgtggtctctagcagtaatgatctcgctgagacttattgggttcgatcggtcgaatatgatcgtaactcatatgctgaatatctggttgagttggcttcagagttcatcaaagaattatctgaacttggagctaaaaacattggactgtttagcggagtaccagtagggtgtttacccgcgcaaagaacactttttggaggctttgaaagaaaatgttatgaaaagttgaataacatggcacttcatttcaattcaaagctatcttctagtttggatactctaaagaaagaactgcccagcagactaatatttatcgacgtttacgatactcttctcgatataattaaaaatcctacaaattacggatttaaagtggcagataaaggatgttgtggtacaggaaaaattgagttgatggaattgtgcaataaatttactccttttacatgttcggatgcatcgactcatgtgttcttcgactcttatcatccgagtgaaaaggcatatcagattatcactcataaattgttagcaaaataccgtaaatacctaaacacctga

SEQ ID NO: 81114 - protein, 311 aa, Arabidopsis thaliana
  peptide (1)..(311): Ceres Seq. ID no. 12658438
  misc_feature (1)..(301): Pfam Name: GDSL-like Lipase/Acylhydrolase Pfam Description: GDSL-like Lipase/Acylhydrolase
  misc_feature (1)..(311): Homolog of NCBI NO: 15231934 NR Description: hypothetical protein; protein id: At3g14820.1
  misc_feature (1)..(305): Homolog of NCBI NO: 18406327 NR Description: proline-rich protein, putative; protein id:
  misc_feature (1)..(305): Homolog of NCBI NO: 15217977 NR Description: proline-rich protein, putative; protein id:
  misc_feature (1)..(194): Homolog of NCBI NO: 22330312 NR Description: similar to proline-rich protein, putative;
  misc_feature (221)..(305): Homolog of NCBI NO: 22330312 NR Description: similar to proline-rich protein, putative;
  misc_feature (1)..(194): Homolog of NCBI NO: 15229719 NR Description: putative protein; protein id: At3g43570.1 thaliana] >gi|9967506|emb|CAC05631.1| putative protein
  misc_feature (221)..(305): Homolog of NCBI NO: 15229719 NR Description: putative protein; protein id: At3g43570.1 thaliana] >gi|9967506|emb|CAC05631.1| putative protein
  misc_feature (1)..(305): Homolog of NCBI NO: 15222901 NR Description: family II extracellular lipase 3 (EXL3); protein At1g75900.1, supported by cDNA: gi_15054385 [Arabidopsis >gi|15054386|gb|AAK30018.1| family II lipase EXL3 [Arabidopsis
  misc_feature (1)..(305): Homolog of NCBI NO: 26449364 NR Description: putative family II lipase EXL3 [Arabidopsis
  misc_feature (44)..(305): Homolog of NCBI NO: 15238307 NR Description: GDSL-motif lipase/hydrolase-like protein; protein
MDTGNNNDIPTLLKSNFPPYGRDFPGAIPTGRFSDGKVPSDIIAESLGIAKTLPPYLGSNLKPHDLLKGVIFASGGSGYDPLTSTLLSVVSMSDQLKYFQEYLAKIKQHFGEEKVKFILEKSVFLVVSSSNDLAETYWVRSVEYDRNSYAEYLVELASEFIKELSELGAKNIGLFSGVPVGCLPAQRTLFGGFERKCYEKLNNMALHFNSKLSSSLDTLKKELPSRLIFIDVYDTLLDIIKNPTNYGFKVADKGCCGTGKIELMELCNKFTPFTCSDASTHVFFDSYHPSEKAYQIITHKLLAKYRKYLNT

SEQ ID NO: 81115 - protein, 220 aa, Arabidopsis thaliana
  peptide (1)..(220): Ceres Seq. ID no. 12658439
  misc_feature (1)..(210): Pfam Name: GDSL-like Lipase/Acylhydrolase Pfam Description: GDSL-like Lipase/Acylhydrolase
  misc_feature (1)..(220): Homolog of NCBI NO: 15231934 NR Description: hypothetical protein; protein id: At3g14820.1
  misc_feature (1)..(214): Homolog of NCBI NO: 18406327 NR Description: proline-rich protein, putative; protein id:
  misc_feature (1)..(214): Homolog of NCBI NO: 15217977 NR Description: proline-rich protein, putative; protein id:
  misc_feature (1)..(103): Homolog of NCBI NO: 22330312 NR Description: similar to proline-rich protein, putative;
  misc_feature (130)..(214): Homolog of NCBI NO: 22330312 NR Description: similar to proline-rich protein, putative;
  misc_feature (1)..(103): Homolog of NCBI NO: 15229719 NR Description: putative protein; protein id: At3g43570.1 thaliana] >gi|9967506|emb|CAC05631.1| putative protein
  misc_feature (130)..(214): Homolog of NCBI NO: 15229719 NR Description: putative protein; protein id: At3g43570.1 thaliana] >gi|9967506|emb|CAC05631.1| putative protein
  misc_feature (1)..(214): Homolog of NCBI NO: 15222901 NR Description: family II extracellular lipase 3 (EXL3); protein At1g75900.1, supported by cDNA: gi_15054385 [Arabidopsis >gi|15054386|gb|AAK30018.1| family II lipase EXL3 [Arabidopsis
  misc_feature (1)..(214): Homolog of NCBI NO: 26449364 NR Description: putative family II lipase EXL3 [Arabidopsis
  misc_feature (1)..(214): Homolog of NCBI NO: 15238307 NR Description: GDSL-motif lipase/hydrolase-like protein; protein
MSDQLKYFQEYLAKIKQHFGEEKVKFILEKSVFLVVSSSNDLAETYWVRSVEYDRNSYAEYLVELASEFIKELSELGAKNIGLFSGVPVGCLPAQRTLFGGFERKCYEKLNNMALHFNSKLSSSLDTLKKELPSRLIFIDVYDTLLDIIKNPTNYGFKVADKGCCGTGKIELMELCNKFTPFTCSDASTHVFFDSYHPSEKAYQIITHKLLAKYRKYLNT

SEQ ID NO: 81116 - DNA, 987 bp, Arabidopsis thaliana
  misc_feature (1)..(987): Ceres Seq. ID no. 12658442
  misc_feature: MA Experiment ID: 20000180 Result: Up-regulated in Transcription
  misc_feature: MA Experiment 20000180 PARAMETER Experiment Name: At_Germinating_Seeds_P Parameter: Age (hr) Value: 24 vs. 0
  misc_feature: MA Experiment 20000180 PARAMETER Experiment Name: At_Germinating_Seeds_P Parameter: Tissue Value: Germinating Seeds
  misc_feature: MA Experiment ID: 20000185 Result: Up-regulated in Transcription
  misc_feature: MA Experiment 20000185 PARAMETER Experiment Name: At_Roots__P Parameter: Age (day) Value: 7 vs. 21
  misc_feature: MA Experiment 20000185 PARAMETER Experiment Name: At_Roots__P Parameter: Organism Value: A. thaliana
  misc_feature: MA Experiment 20000185 PARAMETER Experiment Name: At_Roots__P Parameter: Tissue Value: Roots vs. Whole Plant
  misc_feature: MA Experiment ID: 20000227 Result: Up-regulated in Transcription
  misc_feature: MA Experiment 20000227 PARAMETER Experiment Name: At_Root-Tips-vs-Tops_P Parameter: Tissue Value: Root Tips vs. Root Tops
  misc_feature: MA Experiment ID: 20000234 Result: Up-regulated in Transcription
  misc_feature: MA Experiment 20000234 PARAMETER Experiment Name: At_Siliques_P Parameter: Age (day) Value: 21
  misc_feature: MA Experiment 20000234 PARAMETER Experiment Name: At_Siliques_P Parameter: Organism Value: A. thaliana
  misc_feature: MA Experiment 20000234 PARAMETER Experiment Name: At_Siliques_P Parameter: Plant Line Value: WS
  misc_feature: MA Experiment 20000234 PARAMETER Experiment Name: At_Siliques_P Parameter: Tissue Value: Less Than 5mm Siliques vs. Whole Plant
  misc_feature: MA Experiment ID: 20000235 Result: Up-regulated in Transcription
  misc_feature: MA Experiment 20000235 PARAMETER Experiment Name: At_Siliques_P Parameter: Age (day) Value: 21
  misc_feature: MA Experiment 20000235 PARAMETER Experiment Name: At_Siliques_P Parameter: Organism Value: A. thaliana
  misc_feature: MA Experiment 20000235 PARAMETER Experiment Name: At_Siliques_P Parameter: Plant Line Value: WS
  misc_feature: MA Experiment 20000235 PARAMETER Experiment Name: At_Siliques_P Parameter: Tissue Value: 5-10mm Siliques vs. Whole Plant
  misc_feature: MA Experiment ID: 20000264 Result: Up-regulated in Transcription
  misc_feature: MA Experiment 20000264 PARAMETER Experiment Name: At_Open_Flower_P Parameter: Age (day) Value: 21
  misc_feature: MA Experiment 20000264 PARAMETER Experiment Name: At_Open_Flower_P Parameter: Plant Line Value: WS
  misc_feature: MA Experiment 20000264 PARAMETER Experiment Name: At_Open_Flower_P Parameter: Tissue Value: Open Flower vs. Whole Plant
  misc_feature: MA Experiment ID: 20000437 Result: Down-regulated in Transcription
  misc_feature: MA Experiment 20000437 PARAMETER Experiment Name: At_Drought_P Parameter: Age (day) Value: 8
  misc_feature: MA Experiment 20000437 PARAMETER Experiment Name: At_Drought_P Parameter: Organism Value: A. thaliana
  misc_feature: MA Experiment 20000437 PARAMETER Experiment Name: At_Drought_P Parameter: Plant Line Value: WS
  misc_feature: MA Experiment 20000437 PARAMETER Experiment Name: At_Drought_P Parameter: Timepoint (hr) Value: 24
  misc_feature: MA Experiment 20000437 PARAMETER Experiment Name: At_Drought_P Parameter: Tissue Value: Whole Plant
  misc_feature: MA Experiment 20000437 PARAMETER Experiment Name: At_Drought_P Parameter: Treatment Value: Drought vs. No Drought
  misc_feature: MA Experiment ID: 20000439 Result: Up-regulated in Transcription
  misc_feature: MA Experiment 20000439 PARAMETER Experiment Name: At_Roots__P Parameter: Age (day) Value: 14 vs. 21
  misc_feature: MA Experiment 20000439 PARAMETER Experiment Name: At_Roots__P Parameter: Organism Value: A. thaliana
  misc_feature: MA Experiment 20000439 PARAMETER Experiment Name: At_Roots__P Parameter: Tissue Value: Roots vs. Whole Plant
  misc_feature: MA Experiment ID: 20000451 Result: Down-regulated in Transcription
  misc_feature: MA Experiment 20000451 PARAMETER Experiment Name: At_CS6879_Shoots-Roots_P Parameter: Age (day) Value: 14
  misc_feature: MA Experiment 20000451 PARAMETER Experiment Name: At_CS6879_Shoots-Roots_P Parameter: Organism Value: A. thaliana
  misc_feature: MA Experiment 20000451 PARAMETER Experiment Name: At_CS6879_Shoots-Roots_P Parameter: Plant Line Value: CS6879 vs. WS
  misc_feature: MA Experiment 20000451 PARAMETER Experiment Name: At_CS6879_Shoots-Roots_P Parameter: Tissue Value: Roots
  misc_feature: MA Experiment ID: 20000573 Result: Down-regulated in Transcription
  misc_feature: MA Experiment 20000573 PARAMETER Experiment Name: At_100uM_ABA_Mutants__P Parameter: Organism Value: A. thaliana
  misc_feature: MA Experiment 20000573 PARAMETER Experiment Name: At_100uM_ABA_Mutants__P Parameter: Plant Line Value: CS22 vs. Ler wt
  misc_feature: MA Experiment 20000573 PARAMETER Experiment Name: At_100uM_ABA_Mutants__P Parameter: Timepoint (hr) Value: N/A
  misc_feature: MA Experiment 20000573 PARAMETER Experiment Name: At_100uM_ABA_Mutants__P Parameter: Tissue Value: Whole Plant
  misc_feature: MA Experiment 20000573 PARAMETER Experiment Name: At_100uM_ABA_Mutants__P Parameter: Treatment Value: None
  misc_feature: MA Experiment ID: 20000794 Result: Up-regulated in Transcription
  misc_feature: MA Experiment 20000794 PARAMETER Experiment Name: At_Petals_P Parameter: Age (day) Value: 23-25 days
  misc_feature: MA Experiment 20000794 PARAMETER Experiment Name: At_Petals_P Parameter: Plant Line Value: WS
  misc_feature: MA Experiment 20000794 PARAMETER Experiment Name: At_Petals_P Parameter: Tissue Value: Petals vs. Whole plant
  misc_feature: MA Experiment ID: 20001248 Result: Down-regulated in Transcription
  misc_feature: MA Experiment 20001248 PARAMETER Experiment Name: At_Far-red-induction_P Parameter: Age (day) Value: 7
  misc_feature: MA Experiment 20001248 PARAMETER Experiment Name: At_Far-red-induction_P Parameter: Light Value: Far-red vs. White
  misc_feature: MA Experiment 20001248 PARAMETER Experiment Name: At_Far-red-induction_P Parameter: Organism Value: A. thaliana
  misc_feature: MA Experiment 20001248 PARAMETER Experiment Name: At_Far-red-induction_P Parameter: Plant Line Value: Columbia
  misc_feature: MA Experiment 20001248 PARAMETER Experiment Name: At_Far-red-induction_P Parameter: Timepoint (hr) Value: 4
  misc_feature: MA Experiment 20001248 PARAMETER Experiment Name: At_Far-red-induction_P Parameter: Tissue Value: Whole Plant
  misc_feature: MA Experiment ID: 20001451 Result: Down-regulated in Transcription
  misc_feature: MA Experiment 20001451 PARAMETER Experiment Name: At_Far-red-induction_P Parameter: Age (day) Value: 7
  misc_feature: MA Experiment 20001451 PARAMETER Experiment Name: At_Far-red-induction_P Parameter: Light Value: Far-red vs. White
  misc_feature: MA Experiment 20001451 PARAMETER Experiment Name: At_Far-red-induction_P Parameter: Organism Value: A. thaliana
  misc_feature: MA Experiment 20001451 PARAMETER Experiment Name: At_Far-red-induction_P Parameter: Plant Line Value: Columbia
  misc_feature: MA Experiment 20001451 PARAMETER Experiment Name: At_Far-red-induction_P Parameter: Timepoint (hr) Value: 24
  misc_feature: MA Experiment 20001451 PARAMETER Experiment Name: At_Far-red-induction_P Parameter: Tissue Value: Whole Plant
  misc_feature: MA Experiment ID: 20001905 Result: Up-regulated in Transcription
  misc_feature: MA Experiment 20001905 PARAMETER Experiment Name: At_Drought_Reproduction_P Parameter: Age (day) Value: 40
  misc_feature: MA Experiment 20001905 PARAMETER Experiment Name: At_Drought_Reproduction_P Parameter: Organism Value: A. thaliana
  misc_feature: MA Experiment 20001905 PARAMETER Experiment Name: At_Drought_Reproduction_P Parameter: Plant Line Value: WS
  misc_feature: MA Experiment 20001905 PARAMETER Experiment Name: At_Drought_Reproduction_P Parameter: Timepoint (day) Value: 10
  misc_feature: MA Experiment 20001905 PARAMETER Experiment Name: At_Drought_Reproduction_P Parameter: Tissue Value: Rosettes
  misc_feature: MA Experiment 20001905 PARAMETER Experiment Name: At_Drought_Reproduction_P Parameter: Treatment Value: Drought vs. No Drought
aactcaaatctttcgacggttctgtcctcctgtttcttaagttaatttcaatgcatgccaccgacataaaacgccaccgtttatattgtttgttctaggttcaatggattgcagtttttgaagaaaaacaaagggaagaagattatgtttgttggtgattctcttagtctaaatcaatggcaatcgttggcatgtatgcttcattcctctgttccaaattctacgtatactttaaccacacaaggtagtatatcaacctacacattcaaggagtatggactggaattgaagcttgataggaatgtttatctagtagatatagttagggagaagattgggagagttttgaagcttgattcgatcaatgatggaaaaaattgggtagagatggatacattgatttttaatacttggcattggtggagtcggagaggtcctgcacaaccatgggatttgattcaaatagggactaacgttacaaaagacatggaccgtgtggccgcgtttgaaattgcgcttgggacttgggggaaatgggtcgataccgtcttaaatactaagaaaactagagtcttttttcaaggaatttctccatctcattacaaaggagttctgtggggcgaaccagcggcaaagagttgcgtgggacagaaggaaccacttttggggacaaaatatccaggaggattgccagcagaagtgggagttttgaagagagcactcgggaaaatatcgaaaccggtgacattgctagacattacgatgctttcgttgcttcgcaaagatgctcatccttcggtttacggtctaggcgggcgaaactcctccggtgactgcagccactggtgtctctctggggtaccggatacttggaatgagattctttacaattatatggttgagtaaaagaaataaaatacggaaacatcaattatagcatttgttattgtgattgatcatttaaatctgaataaaaggtccgtttct

SEQ ID NO: 81117 - protein, 253 aa, Arabidopsis thaliana; identical to SEQ ID NO: 78871
  peptide (1)..(253): Ceres Seq. ID no. 12658443
  misc_feature (1)..(253): Homolog of NCBI NO: 22331091 NR Description: hypothetical protein; protein id: At3g14850.1, by cDNA: gi_17065211, supported by cDNA: gi_20259977 [Arabidopsis >gi|17065212|gb|AAL32760.1| Unknown protein [Arabidopsis
  misc_feature (1)..(177): Homolog of NCBI NO: 11994596 NR Description: gb|AAD22996.1~gene_id:T21E2.11~similar to unknown
  misc_feature (1)..(248): Homolog of NCBI NO: 34911864 NR Description: OSJNBb0032K15.9 [Oryza sativa (japonica
  misc_feature (1)..(248): Homolog of NCBI NO: 18396930 NR Description: expressed protein; protein id: At1g29050.1, by cDNA: 30068., supported by cDNA: gi_18377637, supported by gi_20465654 [Arabidopsis thaliana] >gi|18377638|gb|AAL66969.1|
  misc_feature (1)..(248): Homolog of NCBI NO: 25366741 NR Description: F28N24.24 protein - Arabidopsis thaliana
  misc_feature (1)..(249): Homolog of NCBI NO: 18406003 NR Description: expressed protein; protein id: At2g42570.1, by cDNA: 17752., supported by cDNA: gi_14334589, supported by
  misc_feature (1)..(248): Homolog of NCBI NO: 18403435 NR Description: expressed protein; protein id: At2g34070.1, by cDNA: 25519. [Arabidopsis thaliana] expressed protein [Arabidopsis thaliana]
  misc_feature (1)..(252): Homolog of NCBI NO: 15219157 NR Description: hypothetical protein; protein id: At1g78710.1
  misc_feature (40)..(248): Homolog of NCBI NO: 34904010 NR Description: unnamed protein product [Oryza sativa (japonica group)] >gi|7523484|dbj|BAA94212.1| unnamed protein product
  misc_feature (1)..(45): Homolog of NCBI NO: 34904010 NR Description: unnamed protein product [Oryza sativa (japonica group)] >gi|7523484|dbj|BAA94212.1| unnamed protein product

SEQ ID NO: 81118 - protein, 236 aa, Arabidopsis thaliana
  peptide (1)..(236): Ceres Seq. ID no. 12658444
  misc_feature (1)..(236): Homolog of NCBI NO: 22331091 NR Description: hypothetical protein; protein id: At3g14850.1, by cDNA: gi_17065211, supported by cDNA: gi_20259977 [Arabidopsis >gi|17065212|gb|AAL32760.1| Unknown protein [Arabidopsis
  misc_feature (1)..(160): Homolog of NCBI NO: 11994596 NR Description: gb|AAD22996.1~gene_id:T21E2.11~similar to unknown
  misc_feature (1)..(231): Homolog of NCBI NO: 34911864 NR Description: OSJNBb0032K15.9 [Oryza sativa (japonica
  misc_feature (1)..(231): Homolog of NCBI NO: 18396930 NR Description: expressed protein; protein id: At1g29050.1, by cDNA: 30068., supported by cDNA: gi_18377637, supported by gi_20465654 [Arabidopsis thaliana] >gi|18377638|gb|AAL66969.1|
  misc_feature (1)..(231): Homolog of NCBI NO: 25366741 NR Description: F28N24.24 protein - Arabidopsis thaliana
  misc_feature (1)..(232): Homolog of NCBI NO: 18406003 NR Description: expressed protein; protein id: At2g42570.1, by cDNA: 17752., supported by cDNA: gi_14334589, supported by
  misc_feature (1)..(231): Homolog of NCBI NO: 18403435 NR Description: expressed protein; protein id: At2g34070.1, by cDNA: 25519. [Arabidopsis thaliana] expressed protein [Arabidopsis thaliana]
  misc_feature (1)..(235): Homolog of NCBI NO: 15219157 NR Description: hypothetical protein; protein id: At1g78710.1
  misc_feature (23)..(231): Homolog of NCBI NO: 34904010 NR Description: unnamed protein product [Oryza sativa (japonica group)] >gi|7523484|dbj|BAA94212.1| unnamed protein product
  misc_feature (1)..(28): Homolog of NCBI NO: 34904010 NR Description: unnamed protein product [Oryza sativa (japonica group)] >gi|7523484|dbj|BAA94212.1| unnamed protein product
MLHSSVPNSTYTLTTQGSISTYTFKEYGLELKLDRNVYLVDIVREKIGRVLKLDSINDGKNWVEMDTLIFNTWHWWSRRGPAQPWDLIQIGTNVTKDMDRVAAFEIALGTWGKWVDTVLNTKKTRVFFQGISPSHYKGVLWGEPAAKSCVGQKEPLLGTKYPGGLPAEVGVLKRALGKISKPVTLLDITMLSLLRKDAHPSVYGLGGRNSSGDCSHWCLSGVPDTWNEILYNYMVE

SEQ ID NO: 81119 - protein, 172 aa, Arabidopsis thaliana
  peptide (1)..(172): Ceres Seq. ID no. 12658445
  misc_feature (1)..(172): Homolog of NCBI NO: 22331091 NR Description: hypothetical protein; protein id: At3g14850.1, by cDNA: gi_17065211, supported by cDNA: gi_20259977 [Arabidopsis >gi|17065212|gb|AAL32760.1| Unknown protein [Arabidopsis
  misc_feature (1)..(96): Homolog of NCBI NO: 11994596 NR Description: gb|AAD22996.1~gene_id:T21E2.11~similar to unknown
  misc_feature (1)..(167): Homolog of NCBI NO: 34911864 NR Description: OSJNBb0032K15.9 [Oryza sativa (japonica
  misc_feature (1)..(167): Homolog of NCBI NO: 18396930 NR Description: expressed protein; protein id: At1g29050.1, by cDNA: 30068., supported by cDNA: gi_18377637, supported by gi_20465654 [Arabidopsis thaliana] >gi|18377638|gb|AAL66969.1|
  misc_feature (1)..(167): Homolog of NCBI NO: 25366741 NR Description: F28N24.24 protein - Arabidopsis thaliana
  misc_feature (1)..(168): Homolog of NCBI NO: 18406003 NR Description: expressed protein; protein id: At2g42570.1, by cDNA: 17752., supported by cDNA: gi_14334589, supported by
  misc_feature (1)..(167): Homolog of NCBI NO: 18403435 NR Description: expressed protein; protein id: At2g34070.1, by cDNA: 25519. [Arabidopsis thaliana] expressed protein [Arabidopsis thaliana]
  misc_feature (1)..(171): Homolog of NCBI NO: 15219157 NR Description: hypothetical protein; protein id: At1g78710.1
  misc_feature (1)..(167): Homolog of NCBI NO: 34904010 NR Description: unnamed protein product [Oryza sativa (japonica group)] >gi|7523484|dbj|BAA94212.1| unnamed protein product
  misc_feature (1)..(168): Homolog of NCBI NO: 21593142 NR Description: unknown [Arabidopsis thaliana]
MDTLIFNTWHWWSRRGPAQPWDLIQIGTNVTKDMDRVAAFEIALGTWGKWVDTVLNTKKTRVFFQGISPSHYKGVLWGEPAAKSCVGQKEPLLGTKYPGGLPAEVGVLKRALGKISKPVTLLDITMLSLLRKDAHPSVYGLGGRNSSGDCSHWCLSGVPDTWNEILYNYMVE

SEQ ID NO: 81120 - DNA, 1411 bp, Arabidopsis thaliana
  misc_feature (1)..(1411): Ceres Seq. ID no. 12658461
  misc_feature: MA Experiment ID: 20000307 Result: Up-regulated in Transcription
  misc_feature: MA Experiment 20000307 PARAMETER Experiment Name: At_Germinating_Seeds_Sub_P Parameter: Age (hr) Value: 24 vs. 0
  misc_feature: MA Experiment 20000307 PARAMETER Experiment Name: At_Germinating_Seeds_Sub_P Parameter: Organism Value: A. thaliana
  misc_feature: MA Experiment 20000307 PARAMETER Experiment Name: At_Germinating_Seeds_Sub_P Parameter: Plant Line Value: WS
  misc_feature: MA Experiment 20000307 PARAMETER Experiment Name: At_Germinating_Seeds_Sub_P Parameter: Tissue Value: Germinating Seeds
  misc_feature: MA Experiment ID: 20000327 Result: Down-regulated in Transcription
  misc_feature: MA Experiment 20000327 PARAMETER Experiment Name: At_42deg_Heat_Sub_P Parameter: Age (day) Value: 14
  misc_feature: MA Experiment 20000327 PARAMETER Experiment Name: At_42deg_Heat_Sub_P Parameter: Organism Value: A. thaliana
  misc_feature: MA Experiment 20000327 PARAMETER Experiment Name: At_42deg_Heat_Sub_P Parameter: Plant Line Value: WS
  misc_feature: MA Experiment 20000327 PARAMETER Experiment Name: At_42deg_Heat_Sub_P Parameter: Temperature (deg C) Value: 42 vs. 22
  misc_feature: MA Experiment 20000327 PARAMETER Experiment Name: At_42deg_Heat_Sub_P Parameter: Timepoint (hr) Value: 1
  misc_feature: MA Experiment 20000327 PARAMETER Experiment Name: At_42deg_Heat_Sub_P Parameter: Tissue Value: Aerial
  misc_feature: MA Experiment ID: 20000328 Result: Down-regulated in Transcription
  misc_feature: MA Experiment 20000328 PARAMETER Experiment Name: At_42deg_Heat_Sub_P Parameter: Age (day) Value: 14
  misc_feature: MA Experiment 20000328 PARAMETER Experiment Name: At_42deg_Heat_Sub_P Parameter: Organism Value: A. thaliana
  misc_feature: MA Experiment 20000328 PARAMETER Experiment Name: At_42deg_Heat_Sub_P Parameter: Plant Line Value: WS
  misc_feature: MA Experiment 20000328 PARAMETER Experiment Name: At_42deg_Heat_Sub_P Parameter: Temperature (deg C) Value: 42 vs. 22
  misc_feature: MA Experiment 20000328 PARAMETER Experiment Name: At_42deg_Heat_Sub_P Parameter: Timepoint (hr) Value: 6
  misc_feature: MA Experiment 20000328 PARAMETER Experiment Name: At_42deg_Heat_Sub_P Parameter: Tissue Value: Aerial
aaacgcttccgagaaagtggatccgccgtagctggaggatccgtcgttacaaaatcatgtcatcttctcccaagctgtttcacgcgcgtccatcattcttcacgcgccgatcgacgcctttgatcgtcttcacctctctcgctatcggtctaaccggtttccttttcggattatcaacgatccttttccctggtctccggttatctggccggtcctgcctcaccaacttgccaccgaagactgttaaaatcgtctgggacgtcgctggtaatagtatcgttaatggcgaagtcaagaggcacaaagtgatgggattcgtcggaatccagaccggattcagatctgctggccggagacgagctctcaggaacacatggatgccgtccgatcccgaaggccttcgaagattggaagaatcaacaggattagccattagatttattataggcaaaaccaaagacgaggccaaaatggttgagctgagaagcgaagttgcaatgtacgatgactttatactgctcgatatcgaggaggagtacagtaagctcccctacaaaactttggctttcttcaaagctgcatatgcactatatgattcagaattctatgtcaaagctgatgatgatatatacttgaggccagatcgtttgtctttactgttggctaaagagcggggtcactcgcagacataccttggatgcatgaaaaaaggtccggttttcacagatccaaagcttaaatggtatgaacctttggcagatctgctcgggaaagagtactttcttcatgcttatggccccatatatgctctttctgctgatgttgtcactagtttggttgccctcaagaacaacagtttcaggatgtttagcaatgaggacgtgaccataggtgcgtggatgctggcaatgaacgttaaccacgagaaccttcacaccctttgtgaaccagagtgctcaccatactccattgctgtttgggatataccaaaatgctcaggcctctgtaacccagagaaaaggatgttggaacttcacatgctagagagctgctcaaaaagcccgactttgccatcggatgatgagtgatctaccattctgccatctaatattttcttctttaatgatctaagatccgaggcgtaacaatttgcagatctctttctctgacatgtccaccattgaagtagcttcacagagattgtgcaagtcttttcacttactctgatctgttattttcggtgggaatgcaagaaaaagcaacgagagttgatctcgcttagacggctttagggaatttttaaactagggttagtaattttggtgtatcacaagttttgggcgataccttgttgtacaagtataagattaaacattgttatagtgtgaaactatcaaagctacatagtttg

SEQ ID NO: 81121 - protein, 361 aa, Arabidopsis thaliana
  peptide (1)..(361): Ceres Seq. ID no. 12658462
  misc_feature (116)..(311): Pfam Name: Galactosyltransferase Pfam Description: Galactosyltransferase
  misc_feature (19)..(361): Homolog of NCBI NO: 15232447 NR Description: galactosyltransferase, putative; protein id: supported by cDNA: gi_17979336 [Arabidopsis thaliana] contains similarity to Avr9 elicitor response
  misc_feature (19)..(361): Homolog of NCBI NO: 30695469 NR Description: galactosyltransferase family [Arabidopsis >gi|22135994|gb|AAM91579.1| unknown protein [Arabidopsis
  misc_feature (19)..(361): Homolog of NCBI NO: 25405979 NR Description: protein F12M16.19 [imported] - Arabidopsis >gi|7769857|gb|AAF69535.1|AC008007_10 F12M16.19 [Arabidopsis
  misc_feature (17)..(360): Homolog of NCBI NO: 30683005 NR Description: galactosyltransferase family [Arabidopsis
  misc_feature (17)..(246): Homolog of NCBI NO: 7487205 NR Description: hypothetical protein At2g26100 [imported] - thaliana >gi|3413704|gb|AAC31227.1| unknown protein [Arabidopsis
  misc_feature (251)..(360): Homolog of NCBI NO: 7487205 NR Description: hypothetical protein At2g26100 [imported] - thaliana >gi|3413704|gb|AAC31227.1| unknown protein [Arabidopsis
  misc_feature (157)..(361): Homolog of NCBI NO: 22553074 NR Description: beta 1,3-glycosyltransferase-like protein III
  misc_feature (74)..(347): Homolog of NCBI NO: 18395060 NR Description: Expressed protein; protein id: At1g22015.1, by cDNA: 115483. [Arabidopsis thaliana] >gi|25370622|pir||B86353
  misc_feature (87)..(352): Homolog of NCBI NO: 15221085 NR Description: Avr9 elicitor response-like protein; protein id:
  misc_feature (101)..(355): Homolog of NCBI NO: 15217544 NR Description: elicitor response protein, putative; protein id: [Arabidopsis thaliana] >gi|25370623|pir||A86458 probasble
TLPRKWIRRSWRIRRYKIMSSSPKLFHARPSFFTRRSTPLIVFTSLAIGLTGFLFGLSTILFPGLRLSGRSCLTNLPPKTVKIVWDVAGNSIVNGEVKRHKVMGFVGIQTGFRSAGRRRALRNTWMPSDPEGLRRLEESTGLAIRFIIGKTKDEAKMVELRSEVAMYDDFILLDIEEEYSKLPYKTLAFFKAAYALYDSEFYVKADDDIYLRPDRLSLLLAKERGHSQTYLGCMKKGPVFTDPKLKWYEPLADLLGKEYFLHAYGPIYALSADVVTSLVALKNNSFRMFSNEDVTIGAWMLAMNVNHENLHTLCEPECSPYSIAVWDIPKCSGLCNPEKRMLELHMLESCSKSPTLPSDDE

SEQ ID NO: 81122 - protein, 343 aa, Arabidopsis thaliana
  peptide (1)..(343): Ceres Seq. ID no. 12658463
  misc_feature (98)..(293): Pfam Name: Galactosyltransferase Pfam Description: Galactosyltransferase
  misc_feature (1)..(343): Homolog of NCBI NO: 15232447 NR Description: galactosyltransferase, putative; protein id: supported by cDNA: gi_17979336 [Arabidopsis thaliana] contains similarity to Avr9 elicitor response
  misc_feature (1)..(343): Homolog of NCBI NO: 30695469 NR Description: galactosyltransferase family [Arabidopsis >gi|22135994|gb|AAM91579.1| unknown protein [Arabidopsis
  misc_feature (1)..(343): Homolog of NCBI NO: 25405979 NR Description: protein F12M16.19 [imported] - Arabidopsis >gi|7769857|gb|AAF69535.1|AC008007_10 F12M16.19 [Arabidopsis
  misc_feature (1)..(342): Homolog of NCBI NO: 30683005 NR Description: galactosyltransferase family [Arabidopsis
  misc_feature (1)..(228): Homolog of NCBI NO: 7487205 NR Description: hypothetical protein At2g26100 [imported] - thaliana >gi|3413704|gb|AAC31227.1| unknown protein [Arabidopsis
  misc_feature (233)..(342): Homolog of NCBI NO: 7487205 NR Description: hypothetical protein At2g26100 [imported] - thaliana >gi|3413704|gb|AAC31227.1| unknown protein [Arabidopsis
  misc_feature (139)..(343): Homolog of NCBI NO: 22553074 NR Description: beta 1,3-glycosyltransferase-like protein III
  misc_feature (56)..(329): Homolog of NCBI NO: 18395060 NR Description: Expressed protein; protein id: At1g22015.1, by cDNA: 115483. [Arabidopsis thaliana] >gi|25370622|pir||B86353
  misc_feature (69)..(334): Homolog of NCBI NO: 15221085 NR Description: Avr9 elicitor response-like protein; protein id:
  misc_feature (83)..(337): Homolog of NCBI NO: 15217544 NR Description: elicitor response protein, putative; protein id: [Arabidopsis thaliana] >gi|25370623|pir||A86458 probasble
MSSSPKLFHARPSFFTRRSTPLIVFTSLAIGLTGFLFGLSTILFPGLRLSGRSCLTNLPPKTVKIVWDVAGNSIVNGEVKRHKVMGFVGIQTGFRSAGRRRALRNTWMPSDPEGLRRLEESTGLAIRFIIGKTKDEAKMVELRSEVAMYDDFILLDIEEEYSKLPYKTLAFFKAAYALYDSEFYVKADDDIYLRPDRLSLLLAKERGHSQTYLGCMKKGPVFTDPKLKWYEPLADLLGKEYFLHAYGPIYALSADVVTSLVALKNNSFRMFSNEDVTIGAWMLAMNVNHENLHTLCEPECSPYSIAVWDIPKCSGLCNPEKRMLELHMLESCSKSPTLPSDDE

SEQ ID NO: 81123 - protein, 259 aa, Arabidopsis thaliana
  peptide (1)..(259): Ceres Seq. ID no. 12658464
  misc_feature (14)..(209): Pfam Name: Galactosyltransferase Pfam Description: Galactosyltransferase
  misc_feature (1)..(259): Homolog of NCBI NO: 15232447 NR Description: galactosyltransferase, putative; protein id: supported by cDNA: gi_17979336 [Arabidopsis thaliana] contains similarity to Avr9 elicitor response
  misc_feature (1)..(259): Homolog of NCBI NO: 30695469 NR Description: galactosyltransferase family [Arabidopsis >gi|22135994|gb|AAM91579.1| unknown protein [Arabidopsis
  misc_feature (1)..(259): Homolog of NCBI NO: 25405979 NR Description: protein F12M16.19 [imported] - Arabidopsis >gi|7769857|gb|AAF69535.1|AC008007_10 F12M16.19 [Arabidopsis
  misc_feature (1)..(258): Homolog of NCBI NO: 30683005 NR Description: galactosyltransferase family [Arabidopsis
  misc_feature (1)..(144): Homolog of NCBI NO: 7487205 NR Description: hypothetical protein At2g26100 [imported] - thaliana >gi|3413704|gb|AAC31227.1| unknown protein [Arabidopsis
  misc_feature (149)..(258): Homolog of NCBI NO: 7487205 NR Description: hypothetical protein At2g26100 [imported] - thaliana >gi|3413704|gb|AAC31227.1| unknown protein [Arabidopsis
  misc_feature (55)..(259): Homolog of NCBI NO: 22553074 NR Description: beta 1,3-glycosyltransferase-like protein III
  misc_feature (1)..(245): Homolog of NCBI NO: 18395060 NR Description: Expressed protein; protein id: At1g22015.1, by cDNA: 115483. [Arabidopsis thaliana] >gi|25370622|pir||B86353
  misc_feature (1)..(250): Homolog of NCBI NO: 15221085 NR Description: Avr9 elicitor response-like protein; protein id:
  misc_feature (1)..(253): Homolog of NCBI NO: 15217544 NR Description: elicitor response protein, putative; protein id: [Arabidopsis thaliana] >gi|25370623|pir||A86458 probasble
MGFVGIQTGFRSAGRRRALRNTWMPSDPEGLRRLEESTGLAIRFIIGKTKDEAKMVELRSEVAMYDDFILLDIEEEYSKLPYKTLAFFKAAYALYDSEFYVKADDDIYLRPDRLSLLLAKERGHSQTYLGCMKKGPVFTDPKLKWYEPLADLLGKEYFLHAYGPIYALSADVVTSLVALKNNSFRMFSNEDVTIGAWMLAMNVNHENLHTLCEPECSPYSIAVWDIPKCSGLCNPEKRMLELHMLESCSKSPTLPSDDE

SEQ ID NO: 81124 - DNA, 1585 bp, Arabidopsis thaliana
  misc_feature (1)..(1585): Ceres Seq. ID no. 12658468
  misc_feature: MA Experiment ID: 20001451 Result: Down-regulated in Transcription
  misc_feature: MA Experiment 20001451 PARAMETER Experiment Name: At_Far-red-induction_P Parameter: Age (day) Value: 7
  misc_feature: MA Experiment 20001451 PARAMETER Experiment Name: At_Far-red-induction_P Parameter: Light Value: Far-red vs. White
  misc_feature: MA Experiment 20001451 PARAMETER Experiment Name: At_Far-red-induction_P Parameter: Organism Value: A. thaliana
  misc_feature: MA Experiment 20001451 PARAMETER Experiment Name: At_Far-red-induction_P Parameter: Plant Line Value: Columbia
  misc_feature: MA Experiment 20001451 PARAMETER Experiment Name: At_Far-red-induction_P Parameter: Timepoint (hr) Value: 24
  misc_feature: MA Experiment 20001451 PARAMETER Experiment Name: At_Far-red-induction_P Parameter: Tissue Value: Whole Plant
  misc_feature: MA Experiment ID: 20001557 Result: Up-regulated in Transcription
  misc_feature: MA Experiment 20001557 PARAMETER Experiment Name: At_Drought_Soil_Dry_P Parameter: Age (day) Value: 27
  misc_feature: MA Experiment 20001557 PARAMETER Experiment Name: At_Drought_Soil_Dry_P Parameter: Organism Value: A. thaliana
  misc_feature: MA Experiment 20001557 PARAMETER Experiment Name: At_Drought_Soil_Dry_P Parameter: Plant Line Value: WS
  misc_feature: MA Experiment 20001557 PARAMETER Experiment Name: At_Drought_Soil_Dry_P Parameter: Post Timepoint (hr) Value: 3
  misc_feature: MA Experiment 20001557 PARAMETER Experiment Name: At_Drought_Soil_Dry_P Parameter: Post-Treatment Value: Re-Water vs. No Drought
  misc_feature: MA Experiment 20001557 PARAMETER Experiment Name: At_Drought_Soil_Dry_P Parameter: Timepoint (day) Value: 13
  misc_feature: MA Experiment 20001557 PARAMETER Experiment Name: At_Drought_Soil_Dry_P Parameter: Treatment Value: Drought vs. No Drought
gtcacatattttcccctcttttttttcgtgtcagattcgctttctctacggctggactagaaggattagggatttaccggtgaaagaataactccagagataaatctgtaaccatggatatgatgaagaagcgtaagctcgatgagaacggtaacggactcaataccaacggtggcggaaccattggtccaactcgattgtcgccgcaagacgcgaggaagattatcgagcgattcaccactgatcagctgctcgacttattgcaagaggctatcgtacgccatcccgacgtgcttgaatctgtccgattaaccgccgactctgatatctcgcagcggaagctattcatccgtggtctcgcggcggatactactacggaaggtctccgttcgcttttttccagttacggagatctagaagaagctattgtgatccttgacaaggtcactgggaaatcgaaagggtatggtttcgtcacttttatgcacgttgatggagctttactagctctgaaagaaccatctaagaaaattgatgggcgtgttacagtaacgcagctcgcggcatctggaaatcaaggtacgggttcccagattgcagatatatcaatgaggaagatctatgtggcgaatgttccttttgatatgccggcggataggctattgaatcactttatggcttatggagatgttgaggaaggtcctttgggttttgataaggttactggtaaatctagaggctttgcattgtttgtctacaagacagcggaaggtgcgcaggctgctcttgctgatccggtgaaggtgattgatggaaaacatttgaattgtaagttggctgttgatggtaagaaaggagggaagcctggaatgccacaagctcaagatggtggttctggtcatggacacgttcatggtgagggaatgggaatggtgcgtcctgcaggaccttatggtgcagctggtggtatcagtgcttatggtgggtactctggaggaccaccagcgcatcacatgaattccacacactcctcaatgggtgttggttctgctgggtatggtggacactatggtggatatggaggtccaggtggtactggcgtctacggtggacttggcggtgggtatggtgggcctggtactggaagtgggcagtatagaatgccaccaagttcgatgcctggtggtggtggttatcccgagagtgggcattacggtctttcatcatctgctgggtatcctggacagcatcatcaggctgttggaacgtcccctgtgccaagagttcctcatggcggaatgtaccccaacggtccaccaaactactgaaaaggtttgtgacagcatattgggtgaagatgctttttgtgcttagtggtgattacctgattgcagctctttaatctctggaatgatgaatgtatagctgctttgacctatctgcacttgacctgaatgtgctttggtttctataatgaatgattagactaggatatatttatgtacttttaaatatagacatactcggcaaatgagttttgttggtcagattagtgagtcttcaataatatgttgtattttctcct

SEQ ID NO: 81125 - protein, 404 aa, Arabidopsis thaliana
  peptide (1)..(404): Ceres Seq. ID no. 12658469
  misc_feature (77)..(147): Pfam Name: RNA recognition motif. (a.k.a. RRM, RBD, or RNP domain) Pfam Description: RNA recognition motif. (a.k.a. RRM, RBD, or RNP
  misc_feature (1)..(404): Homolog of NCBI NO: 15232459 NR Description: RNA-binding protein; protein id: At3g15010.1, by cDNA: gi_17380743, supported by cDNA: gi_20259620 [Arabidopsis
  misc_feature (5)..(361): Homolog of NCBI NO: 34912640 NR Description: P0410E01.24 [Oryza sativa (japonica
  misc_feature (161)..(380): Homolog of NCBI NO: 34903096 NR Description: unnamed protein product [Oryza sativa (japonica group)] >gi|6815067|dbj|BAA90354.1| unnamed protein product
  misc_feature (10)..(153): Homolog of NCBI NO: 34903096 NR Description: unnamed protein product [Oryza sativa (japonica group)] >gi|6815067|dbj|BAA90354.1| unnamed protein product
  misc_feature (1)..(401): Homolog of NCBI NO: 15226817 NR Description: RRM-containing RNA-binding protein; protein id: supported by cDNA: gi_16612301 [Arabidopsis thaliana]
  misc_feature (1)..(378): Homolog of NCBI NO: 21666573 NR Description: RNA-binding protein AKIP1 [Vicia faba]
  misc_feature (18)..(402): Homolog of NCBI NO: 18410591 NR Description: RRM-containing RNA-binding protein; protein id: supported by cDNA: gi_14194148, supported by cDNA: gi_14335131, by cDNA: gi_14596194, supported by cDNA: gi_20148396, supported
  misc_feature (37)..(402): Homolog of NCBI NO: 14596195 NR Description: putative protein [Arabidopsis thaliana]
  misc_feature (75)..(400): Homolog of NCBI NO: 23274114 NR Description: Similar to heterogeneous nuclear A3 [Mus musculus] >gi|25991929|gb|AAN76992.1|AF463524_1
  misc_feature (75)..(400): Homolog of NCBI NO: 33416839 NR Description: Unknown (protein for MGC:66127) [Danio rerio]
MDMMKKRKLDENGNGLNTNGGGTIGPTRLSPQDARKIIERFTTDQLLDLLQEAIVRHPDVLESVRLTADSDISQRKLFIRGLAADTTTEGLRSLFSSYGDLEEAIVILDKVTGKSKGYGFVTFMHVDGALLALKEPSKKIDGRVTVTQLAASGNQGTGSQIADISMRKIYVANVPFDMPADRLLNHFMAYGDVEEGPLGFDKVTGKSRGFALFVYKTAEGAQAALADPVKVIDGKHLNCKLAVDGKKGGKPGMPQAQDGGSGHGHVHGEGMGMVRPAGPYGAAGGISAYGGYSGGPPAHHMNSTHSSMGVGSAGYGGHYGGYGGPGGTGVYGGLGGGYGGPGTGSGQYRMPPSSMPGGGGYPESGHYGLSSSAGYPGQHHQAVGTSPVPRVPHGGMYPNGPPNY

SEQ ID NO: 81126 - protein, 402 aa, Arabidopsis thaliana
  peptide (1)..(402): Ceres Seq. ID no. 12658470
  misc_feature (75)..(145): Pfam Name: RNA recognition motif. (a.k.a. RRM, RBD, or RNP domain) Pfam Description: RNA recognition motif. (a.k.a. RRM, RBD, or RNP
  misc_feature (1)..(402): Homolog of NCBI NO: 15232459 NR Description: RNA-binding protein; protein id: At3g15010.1, by cDNA: gi_17380743, supported by cDNA: gi_20259620 [Arabidopsis
  misc_feature (3)..(359): Homolog of NCBI NO: 34912640 NR Description: P0410E01.24 [Oryza sativa (japonica
  misc_feature (159)..(378): Homolog of NCBI NO: 34903096 NR Description: unnamed protein product [Oryza sativa (japonica group)] >gi|6815067|dbj|BAA90354.1| unnamed protein product
  misc_feature (8)..(151): Homolog of NCBI NO: 34903096 NR Description: unnamed protein product [Oryza sativa (japonica group)] >gi|6815067|dbj|BAA90354.1| unnamed protein product
  misc_feature (1)..(399): Homolog of NCBI NO: 15226817 NR Description: RRM-containing RNA-binding protein; protein id: supported by cDNA: gi_16612301 [Arabidopsis thaliana]
  misc_feature (1)..(376): Homolog of NCBI NO: 21666573 NR Description: RNA-binding protein AKIP1 [Vicia faba]
  misc_feature (16)..(400): Homolog of NCBI NO: 18410591 NR Description: RRM-containing RNA-binding protein; protein id: supported by cDNA: gi_14194148, supported by cDNA: gi_14335131, by cDNA: gi_14596194, supported by cDNA: gi_20148396, supported
  misc_feature (35)..(400): Homolog of NCBI NO: 14596195 NR Description: putative protein [Arabidopsis thaliana]
  misc_feature (73)..(398): Homolog of NCBI NO: 23274114 NR Description: Similar to heterogeneous nuclear A3 [Mus musculus] >gi|25991929|gb|AAN76992.1|AF463524_1
  misc_feature (73)..(398): Homolog of NCBI NO: 33416839 NR Description: Unknown (protein for MGC:66127) [Danio rerio]
MMKKRKLDENGNGLNTNGGGTIGPTRLSPQDARKIIERFTTDQLLDLLQEAIVRHPDVLESVRLTADSDISQRKLFIRGLAADTTTEGLRSLFSSYGDLEEAIVILDKVTGKSKGYGFVTFMHVDGALLALKEPSKKIDGRVTVTQLAASGNQGTGSQIADISMRKIYVANVPFDMPADRLLNHFMAYGDVEEGPLGFDKVTGKSRGFALFVYKTAEGAQAALADPVKVIDGKHLNCKLAVDGKKGGKPGMPQAQDGGSGHGHVHGEGMGMVRPAGPYGAAGGISAYGGYSGGPPAHHMNSTHSSMGVGSAGYGGHYGGYGGPGGTGVYGGLGGGYGGPGTGSGQYRMPPSSMPGGGGYPESGHYGLSSSAGYPGQHHQAVGTSPVPRVPHGGMYPNGPPNY

SEQ ID NO: 81127 - protein, 401 aa, Arabidopsis thaliana
  peptide (1)..(401): Ceres Seq. ID no. 12658471
  misc_feature (74)..(144): Pfam Name: RNA recognition motif. (a.k.a. RRM, RBD, or RNP domain) Pfam Description: RNA recognition motif. (a.k.a. RRM, RBD, or RNP
  misc_feature (1)..(401): Homolog of NCBI NO: 15232459 NR Description: RNA-binding protein; protein id: At3g15010.1, by cDNA: gi_17380743, supported by cDNA: gi_20259620 [Arabidopsis
  misc_feature (2)..(358): Homolog of NCBI NO: 34912640 NR Description: P0410E01.24 [Oryza sativa (japonica
  misc_feature (158)..(377): Homolog of NCBI NO: 34903096 NR Description: unnamed protein product [Oryza sativa (japonica group)] >gi|6815067|dbj|BAA90354.1| unnamed protein product
  misc_feature (7)..(150): Homolog of NCBI NO: 34903096 NR Description: unnamed protein product [Oryza sativa (japonica group)] >gi|6815067|dbj|BAA90354.1| unnamed protein product
  misc_feature (1)..(398): Homolog of NCBI NO: 15226817 NR Description: RRM-containing RNA-binding protein; protein id: supported by cDNA: gi_16612301 [Arabidopsis thaliana]
  misc_feature (1)..(375): Homolog of NCBI NO: 21666573 NR Description: RNA-binding protein AKIP1 [Vicia faba]
  misc_feature (15)..(399): Homolog of NCBI NO: 18410591 NR Description: RRM-containing RNA-binding protein; protein id: supported by cDNA: gi_14194148, supported by cDNA: gi_14335131, by cDNA: gi_14596194, supported by cDNA: gi_20148396, supported
  misc_feature (34)..(399): Homolog of NCBI NO: 14596195 NR Description: putative protein [Arabidopsis thaliana]
  misc_feature (72)..(397): Homolog of NCBI NO: 23274114 NR Description: Similar to heterogeneous nuclear A3 [Mus musculus] >gi|25991929|gb|AAN76992.1|AF463524_1
  misc_feature (72)..(397): Homolog of NCBI NO: 33416839 NR Description: Unknown (protein for MGC:66127) [Danio rerio]
MKKRKLDENGNGLNTNGGGTIGPTRLSPQDARKIIERFTTDQLLDLLQEAIVRHPDVLESVRLTADSDISQRKLFIRGLAADTTTEGLRSLFSSYGDLEEAIVILDKVTGKSKGYGFVTFMHVDGALLALKEPSKKIDGRVTVTQLAASGNQGTGSQIADISMRKIYVANVPFDMPADRLLNHFMAYGDVEEGPLGFDKVTGKSRGFALFVYKTAEGAQAALADPVKVIDGKHLNCKLAVDGKKGGKPGMPQAQDGGSGHGHVHGEGMGMVRPAGPYGAAGGISAYGGYSGGPPAHHMNSTHSSMGVGSAGYGGHYGGYGGPGGTGVYGGLGGGYGGPGTGSGQYRMPPSSMPGGGGYPESGHYGLSSSAGYPGQHHQAVGTSPVPRVPHGGMYPNGPPNY

SEQ ID NO: 81128 - DNA, 780 bp, Arabidopsis thaliana
  misc_feature (1)..(780): Ceres Seq. ID no. 12658472
  misc_feature: MA Experiment ID: 20000184 Result: Down-regulated in Transcription
  misc_feature: MA Experiment 20000184 PARAMETER Experiment Name: At_Shoots__P Parameter: Age (day) Value: 7
  misc_feature: MA Experiment 20000184 PARAMETER Experiment Name: At_Shoots__P Parameter: Tissue Value: Shoots vs. Whole Plant
  misc_feature: MA Experiment ID: 20000185 Result: Down-regulated in Transcription
  misc_feature: MA Experiment 20000185 PARAMETER Experiment Name: At_Roots__P Parameter: Age (day) Value: 7 vs. 21
  misc_feature: MA Experiment 20000185 PARAMETER Experiment Name: At_Roots__P Parameter: Organism Value: A. thaliana
  misc_feature: MA Experiment 20000185 PARAMETER Experiment Name: At_Roots__P Parameter: Tissue Value: Roots vs. Whole Plant
  misc_feature: MA Experiment ID: 20000234 Result: Down-regulated in Transcription
  misc_feature: MA Experiment 20000234 PARAMETER Experiment Name: At_Siliques_P Parameter: Age (day) Value: 21
  misc_feature: MA Experiment 20000234 PARAMETER Experiment Name: At_Siliques_P Parameter: Organism Value: A. thaliana
  misc_feature: MA Experiment 20000234 PARAMETER Experiment Name: At_Siliques_P Parameter: Plant Line Value: WS
  misc_feature: MA Experiment 20000234 PARAMETER Experiment Name: At_Siliques_P Parameter: Tissue Value: Less Than 5mm Siliques vs. Whole Plant
  misc_feature: MA Experiment ID: 20000264 Result: Down-regulated in Transcription
  misc_feature: MA Experiment 20000264 PARAMETER Experiment Name: At_Open_Flower_P Parameter: Age (day) Value: 21
  misc_feature: MA Experiment 20000264 PARAMETER Experiment Name: At_Open_Flower_P Parameter: Plant Line Value: WS
  misc_feature: MA Experiment 20000264 PARAMETER Experiment Name: At_Open_Flower_P Parameter: Tissue Value: Open Flower vs. Whole Plant
  misc_feature: MA Experiment ID: 20000265 Result: Down-regulated in Transcription
  misc_feature: MA Experiment 20000265 PARAMETER Experiment Name: At_Open_Flower_P Parameter: Age (day) Value: 21
  misc_feature: MA Experiment 20000265 PARAMETER Experiment Name: At_Open_Flower_P Parameter: Plant Line Value: WS
  misc_feature: MA Experiment 20000265 PARAMETER Experiment Name: At_Open_Flower_P Parameter: Tissue Value: Closed Flower vs. Whole Plant
  misc_feature: MA Experiment ID: 20000286 Result: Down-regulated in Transcription
  misc_feature: MA Experiment 20000286 PARAMETER Experiment Name: At_Open_Flower_P Parameter: Age (day) Value: 21
  misc_feature: MA Experiment 20000286 PARAMETER Experiment Name: At_Open_Flower_P Parameter: Plant Line Value: WS
  misc_feature: MA Experiment 20000286 PARAMETER Experiment Name: At_Open_Flower_P Parameter: Tissue Value: Half Open vs. Whole Plant
  misc_feature: MA Experiment ID: 20000438 Result: Down-regulated in Transcription
  misc_feature: MA Experiment 20000438 PARAMETER Experiment Name: At_Shoots__P Parameter: Age (day) Value: 14
  misc_feature: MA Experiment 20000438 PARAMETER Experiment Name: At_Shoots__P Parameter: Tissue Value: Shoots vs. Whole Plant
  misc_feature: MA Experiment ID: 20000439 Result: Down-regulated in Transcription
  misc_feature: MA Experiment 20000439 PARAMETER Experiment Name: At_Roots__P Parameter: Age (day) Value: 14 vs. 21
  misc_feature: MA Experiment 20000439 PARAMETER Experiment Name: At_Roots__P Parameter: Organism Value: A. thaliana
  misc_feature: MA Experiment 20000439 PARAMETER Experiment Name: At_Roots__P Parameter: Tissue Value: Roots vs. Whole Plant
  misc_feature: MA Experiment ID: 20000794 Result: Down-regulated in Transcription
  misc_feature: MA Experiment 20000794 PARAMETER Experiment Name: At_Petals_P Parameter: Age (day) Value: 23-25 days
  misc_feature: MA Experiment 20000794 PARAMETER Experiment Name: At_Petals_P Parameter: Plant Line Value: WS
  misc_feature: MA Experiment 20000794 PARAMETER Experiment Name: At_Petals_P Parameter: Tissue Value: Petals vs. Whole plant
  misc_feature: MA Experiment ID: 20001556 Result: Down-regulated in Transcription
  misc_feature: MA Experiment 20001556 PARAMETER Experiment Name: At_Drought_Soil_Dry_P Parameter: Age (day) Value: 26
  misc_feature: MA Experiment 20001556 PARAMETER Experiment Name: At_Drought_Soil_Dry_P Parameter: Organism Value: A. thaliana
  misc_feature: MA Experiment 20001556 PARAMETER Experiment Name: At_Drought_Soil_Dry_P Parameter: Plant Line Value: WS
  misc_feature: MA Experiment 20001556 PARAMETER Experiment Name: At_Drought_Soil_Dry_P Parameter: Post Timepoint (hr) Value: None
  misc_feature: MA Experiment 20001556 PARAMETER Experiment Name: At_Drought_Soil_Dry_P Parameter: Post-Treatment Value: None
  misc_feature: MA Experiment 20001556 PARAMETER Experiment Name: At_Drought_Soil_Dry_P Parameter: Timepoint (day) Value: 12
  misc_feature: MA Experiment 20001556 PARAMETER Experiment Name: At_Drought_Soil_Dry_P Parameter: Treatment Value: Drought vs. No Drought
  misc_feature: MA Experiment ID: 20001768 Result: Up-regulated in Transcription
  misc_feature: MA Experiment 20001768 PARAMETER Experiment Name: At_Far-red-enriched-adult_P Parameter: Age (day) Value: 28
  misc_feature: MA Experiment 20001768 PARAMETER Experiment Name: At_Far-red-enriched-adult_P Parameter: Light Value: Far-red enriched vs. White
  misc_feature: MA Experiment 20001768 PARAMETER Experiment Name: At_Far-red-enriched-adult_P Parameter: Organism Value: A. thaliana
  misc_feature: MA Experiment 20001768 PARAMETER Experiment Name: At_Far-red-enriched-adult_P Parameter: Plant Line Value: Columbia
  misc_feature: MA Experiment 20001768 PARAMETER Experiment Name: At_Far-red-enriched-adult_P Parameter: Timepoint (hr) Value: 1
  misc_feature: MA Experiment 20001768 PARAMETER Experiment Name: At_Far-red-enriched-adult_P Parameter: Tissue Value: Aerial
  misc_feature: MA Experiment ID: 20001771 Result: Up-regulated in Transcription
  misc_feature: MA Experiment 20001771 PARAMETER Experiment Name: At_Far-red-enriched-adult_P Parameter: Age (day) Value: 28
  misc_feature: MA Experiment 20001771 PARAMETER Experiment Name: At_Far-red-enriched-adult_P Parameter: Light Value: Far-red enriched vs. White
  misc_feature: MA Experiment 20001771 PARAMETER Experiment Name: At_Far-red-enriched-adult_P Parameter: Organism Value: A. thaliana
  misc_feature: MA Experiment 20001771 PARAMETER Experiment Name: At_Far-red-enriched-adult_P Parameter: Plant Line Value: Columbia
  misc_feature: MA Experiment 20001771 PARAMETER Experiment Name: At_Far-red-enriched-adult_P Parameter: Timepoint (hr) Value: 16
  misc_feature: MA Experiment 20001771 PARAMETER Experiment Name: At_Far-red-enriched-adult_P Parameter: Tissue Value: Aerial
  misc_feature: MA Experiment ID: 20001773 Result: Up-regulated in Transcription
  misc_feature: MA Experiment 20001773 PARAMETER Experiment Name: At_Far-red-enriched-adult_P Parameter: Age (day) Value: 30
  misc_feature: MA Experiment 20001773 PARAMETER Experiment Name: At_Far-red-enriched-adult_P Parameter: Light Value: Far-red enriched vs. White
  misc_feature: MA Experiment 20001773 PARAMETER Experiment Name: At_Far-red-enriched-adult_P Parameter: Organism Value: A. thaliana
  misc_feature: MA Experiment 20001773 PARAMETER Experiment Name: At_Far-red-enriched-adult_P Parameter: Plant Line Value: Columbia
  misc_feature: MA Experiment 20001773 PARAMETER Experiment Name: At_Far-red-enriched-adult_P Parameter: Timepoint (hr) Value: 48
  misc_feature: MA Experiment 20001773 PARAMETER Experiment Name: At_Far-red-enriched-adult_P Parameter: Tissue Value: Aerial
  misc_feature: MA Experiment ID: 20001906 Result: Down-regulated in Transcription
  misc_feature: MA Experiment 20001906 PARAMETER Experiment Name: At_Drought_Reproduction_P Parameter: Age (day) Value: 35
  misc_feature: MA Experiment 20001906 PARAMETER Experiment Name: At_Drought_Reproduction_P Parameter: Organism Value: A. thaliana
  misc_feature: MA Experiment 20001906 PARAMETER Experiment Name: At_Drought_Reproduction_P Parameter: Plant Line Value: WS
  misc_feature: MA Experiment 20001906 PARAMETER Experiment Name: At_Drought_Reproduction_P Parameter: Timepoint (day) Value: 5
  misc_feature: MA Experiment 20001906 PARAMETER Experiment Name: At_Drought_Reproduction_P Parameter: Tissue Value: Siliques
  misc_feature: MA Experiment 20001906 PARAMETER Experiment Name: At_Drought_Reproduction_P Parameter: Treatment Value: Drought vs. No Drought
atgggatctggatggctgctccgctcaatcatctgtctaaacggaacaaagaagaacaaatcaaatcgaggcaacgtacattctgaaacatcaaaccgtgtcaaaccggttgaatcaagctctgctgcttctactaagcttaccgtagaagtcgctgttattcgcattcaaaaggcttttcgagcattcaaggcgagaaaaagactatgcagcttgaagagtgcgaggagatttaactcgctgatccaaggccatacagtgatgaaccaaacctcgactgcactcaatgtgattcattcttggtacgatatacagaatcagatcagagcacgacgtttgtatatggtgacacaaggtagactccaacacaaaagattggagaatcgtttgaagctggagatcaaacttcacgagctagaagttgaatggtgtggaggctctgaaacaatggaggagattctcgcaaagatacaacagaaagaagaagctacggttaagcgtgaaagagcaatggcttatgctttctctcatcagtggagggctaatgctacacagtatctaggtcaagcttcgtttaaccttggcaaagaaagctggggatggagttggaaagaacggtggattgcggctcgaccttgggagattagggctcaatgctacgtcgttaaaccgatcaaaccatctaagaaaccggagaaatcatcacccaataatgtgatcacaaaaacctctgctaaaccggatgaagttggtaactcgaaaaagcctggttccggataa

SEQ ID NO: 81129 - protein, 259 aa, Arabidopsis thaliana
  peptide (1)..(259): Ceres Seq. ID no. 12658473
  misc_feature (50)..(70): Pfam Name: IQ calmodulin-binding motif Pfam Description: IQ calmodulin-binding motif
  misc_feature (1)..(259): Homolog of NCBI NO: 15232474 NR Description: hypothetical protein; protein id: At3g15050.1 thaliana] >gi|8777488|dbj|BAA97068.1| contains similarity to SF16
  misc_feature (1)..(256): Homolog of NCBI NO: 15226186 NR Description: putative SF16 protein {Helianthus annuus}; id: At2g33990.1 [Arabidopsis thaliana] >gi|25408319|pir||A84751
  misc_feature (5)..(233): Homolog of NCBI NO: 15225258 NR Description: putative SF16 protein {Helianthus annuus}; id: At2g26180.1 [Arabidopsis thaliana] >gi|25367166|pir||D84657
  misc_feature (52)..(216): Homolog of NCBI NO: 15233296 NR Description: unknown protein; protein id: At3g22190.1
  misc_feature (52)..(216): Homolog of NCBI NO: 11994738 NR Description: contains similarity to SF16
  misc_feature (50)..(216): Homolog of NCBI NO: 34903518 NR Description: P0001B06.11 [Oryza sativa (japonica
  misc_feature (50)..(250): Homolog of NCBI NO: 15225299 NR Description: putative SF16 protein {Helianthus annuus}; id: At2g26410.1 [Arabidopsis thaliana] >gi|7487891|pir||T00974
  misc_feature (80)..(233): Homolog of NCBI NO: 7487190 NR Description: hypothetical protein T19L18.1 - Arabidopsis
  misc_feature (50)..(256): Homolog of NCBI NO: 15231175 NR Description: unknown protein; protein id: At3g52290.1
  misc_feature (37)..(251): Homolog of NCBI NO: 7489344 NR Description: SF16 protein, pollen specific - common sunflower
MGSGWLLRSIICLNGTKKNKSNRGNVHSETSNRVKPVESSSAASTKLTVEVAVIRIQKAFRAFKARKRLCSLKSARRFNSLIQGHTVMNQTSTALNVIHSWYDIQNQIRARRLYMVTQGRLQHKRLENRLKLEIKLHELEVEWCGGSETMEEILAKIQQKEEATVKRERAMAYAFSHQWRANATQYLGQASFNLGKESWGWSWKERWIAARPWEIRAQCYVVKPIKPSKKPEKSSPNNVITKTSAKPDEVGNSKKPGSG

SEQ ID NO: 81130 - protein, 172 aa, Arabidopsis thaliana
  peptide (1)..(172): Ceres Seq. ID no. 12658474
  misc_feature (1)..(172): Homolog of NCBI NO: 15232474 NR Description: hypothetical protein; protein id: At3g15050.1 thaliana] >gi|8777488|dbj|BAA97068.1| contains similarity to SF16
  misc_feature (1)..(169): Homolog of NCBI NO: 15226186 NR Description: putative SF16 protein {Helianthus annuus}; id: At2g33990.1 [Arabidopsis thaliana] >gi|25408319|pir||A84751
  misc_feature (1)..(146): Homolog of NCBI NO: 15225258 NR Description: putative SF16 protein {Helianthus annuus}; id: At2g26180.1 [Arabidopsis thaliana] >gi|25367166|pir||D84657
  misc_feature (1)..(129): Homolog of NCBI NO: 15233296 NR Description: unknown protein; protein id: At3g22190.1
  misc_feature (1)..(129): Homolog of NCBI NO: 11994738 NR Description: contains similarity to SF16
  misc_feature (1)..(129): Homolog of NCBI NO: 34903518 NR Description: P0001B06.11 [Oryza sativa (japonica
  misc_feature (1)..(163): Homolog of NCBI NO: 15225299 NR Description: putative SF16 protein {Helianthus annuus}; id: At2g26410.1 [Arabidopsis thaliana] >gi|7487891|pir||T00974
  misc_feature (1)..(146): Homolog of NCBI NO: 7487190 NR Description: hypothetical protein T19L18.1 - Arabidopsis
  misc_feature (1)..(169): Homolog of NCBI NO: 15231175 NR Description: unknown protein; protein id: At3g52290.1
  misc_feature (1)..(164): Homolog of NCBI NO: 7489344 NR Description: SF16 protein, pollen specific - common sunflower
MNQTSTALNVIHSWYDIQNQIRARRLYMVTQGRLQHKRLENRLKLEIKLHELEVEWCGGSETMEEILAKIQQKEEATVKRERAMAYAFSHQWRANATQYLGQASFNLGKESWGWSWKERWIAARPWEIRAQCYVVKPIKPSKKPEKSSPNNVITKTSAKPDEVGNSKKPGSG

SEQ ID NO: 81131 - protein, 145 aa, Arabidopsis thaliana
  peptide (1)..(145): Ceres Seq. ID no. 12658475
  misc_feature (1)..(145): Homolog of NCBI NO: 15232474 NR Description: hypothetical protein; protein id: At3g15050.1 thaliana] >gi|8777488|dbj|BAA97068.1| contains similarity to SF16
  misc_feature (1)..(142): Homolog of NCBI NO: 15226186 NR Description: putative SF16 protein {Helianthus annuus}; id: At2g33990.1 [Arabidopsis thaliana] >gi|25408319|pir||A84751
  misc_feature (1)..(119): Homolog of NCBI NO: 15225258 NR Description: putative SF16 protein {Helianthus annuus}; id: At2g26180.1 [Arabidopsis thaliana] >gi|25367166|pir||D84657
  misc_feature (1)..(102): Homolog of NCBI NO: 15233296 NR Description: unknown protein; protein id: At3g22190.1
  misc_feature (1)..(102): Homolog of NCBI NO: 11994738 NR Description: contains similarity to SF16
  misc_feature (1)..(102): Homolog of NCBI NO: 34903518 NR Description: P0001B06.11 [Oryza sativa (japonica
  misc_feature (1)..(136): Homolog of NCBI NO: 15225299 NR Description: putative SF16 protein {Helianthus annuus}; id: At2g26410.1 [Arabidopsis thaliana] >gi|7487891|pir||T00974
  misc_feature (1)..(119): Homolog of NCBI NO: 7487190 NR Description: hypothetical protein T19L18.1 - Arabidopsis
  misc_feature (1)..(142): Homolog of NCBI NO: 15231175 NR Description: unknown protein; protein id: At3g52290.1
  misc_feature (1)..(137): Homolog of NCBI NO: 7489344 NR Description: SF16 protein, pollen specific - common sunflower
MVTQGRLQHKRLENRLKLEIKLHELEVEWCGGSETMEEILAKIQQKEEATVKRERAMAYAFSHQWRANATQYLGQASFNLGKESWGWSWKERWIAARPWEIRAQCYVVKPIKPSKKPEKSSPNNVITKTSAKPDEVGNSKKPGSG

SEQ ID NO: 81132 - DNA, 1845 bp, Arabidopsis thaliana
  misc_feature (1)..(1845): Ceres Seq. ID no. 12658486
  misc_feature: MA Experiment ID: 20000179 Result: Up-regulated in Transcription
  misc_feature: MA Experiment 20000179 PARAMETER Experiment Name: At_Germinating_Seeds_P Parameter: Age (hr) Value: 6 vs. 0
  misc_feature: MA Experiment 20000179 PARAMETER Experiment Name: At_Germinating_Seeds_P Parameter: Tissue Value: Germinating Seeds
  misc_feature: MA Experiment ID: 20000180 Result: Up-regulated in Transcription
  misc_feature: MA Experiment 20000180 PARAMETER Experiment Name: At_Germinating_Seeds_P Parameter: Age (hr) Value: 24 vs. 0
  misc_feature: MA Experiment 20000180 PARAMETER Experiment Name: At_Germinating_Seeds_P Parameter: Tissue Value: Germinating Seeds
gagaacatgagtgatcaagaaggagactgggatttttacctcagaatcctaagcaacagcgcgcgggattctacggatcctgcttctgatccatctatactacaatcagtgaagaagctgcatgggttctgtaaaatggagaaatcagatgatcttgtggctagaatttatccacaattcaataaagtcttccatcgttcggttgcttcactatctcagtccgagtcaggggcgtccaaaggccttctcttgctagccattcttcagttttttcttgattttggggatatggttctgcacgattctgacccaagtttgaggacattcttccgctcatgtcttagccgtgagttctcagatgccgctgtggcagaggcaacttgtgaattccttgttgtgaaccaaagaaagctcttagcatctttcccaaacttactccctcagtttttcccgttgttgcttaagctcattgcctggaattgggagaagttggagaagtccttcctgaagatatttccaggactgatatcacctgggtcatttcttcctctgtttccatccattgtagacttgccaatattggtcgtggcattagaaaaggtggaaaggagctcggggtcggggtcaagggttggaggtagcattgcttcaattcagaagagtgcagctccggagatgcttcttgcccttatggatgaagcatatactggttcaaccatcggggatggaggggatgactctgaatctgaagataacaatacaatagatgtagctgatcctctgtttctggagcttctgaaggacgaaaatgatggtctagcggaaagacaccgcgcttctcctacattgaatgcagcgctgcaggctgctgcaagtggtcctcggtcagagaggatgaagcagactcttaagattgctccccgacttcttgatgtctactttagtgttacattgcgagatgcaaatgactctctgatctgtgctttaatccctctactcatgacaagaaactctacaatgtttccggataagattttttctcatgagatccgtaggaggctactggaatttgtactagctgcatttcagaggtctccaaatttcattgccctgttgaaaaagcctattattgaccgacttggggaagcttacgatgatgttgcaaagagagagttagccttacagctatgttgggcaattggagagtatggtggtgggggagaatctcacaaggaagctgctcgagagctttttgaaagtttagagttgcttgtatatgagaatctctcatcaagccgcctaggtttgaggcaagaatctgggaatggttcaagaagaacaacacagtcaagacttctgtgttttgtagtgacagctatcgcaaagctcgcaacatatcaccgagaattattaccaagagcccgcgtcgccttgggaaaggtagtaaagtctcggatatctgatgcaagggtttggagacgagcacatgattacttaggactaatgaacgaaccaggaatctgttggtctgtgttaggaccttcacgggtttcagaaaaacggtttccaggcacagttaactggagcgagggtggacaaaaaatggttgcacacattccatttcacattcttagtgaacaaggaggtcctccattccatgactttgctttctccgatatcatccccaaaaactaatcaaacaaacaagtctcttaaattgtgttttattgtgaatagtgaaactcaaaggtgtttgtgtttgtatacatcggcatctcttttttttctagcagatgtagttttgtaaccttcttgactatggttcgttcaaacttggcaaaattc

SEQ ID NO: 81133 - protein, 564 aa, Arabidopsis thaliana
  peptide (1)..(564): Ceres Seq. ID no. 12658487
  misc_feature (3)..(564): Homolog of NCBI NO: 22331098 NR Description: hypothetical protein; protein id: At3g15160.1, by cDNA: gi_20465413 [Arabidopsis thaliana]
  misc_feature (3)..(564): Homolog of NCBI NO: 20465414 NR Description: unknown protein [Arabidopsis thaliana]
  misc_feature (226)..(564): Homolog of NCBI NO: 11994505 NR Description: gene_id:F4B12.7~unknown protein [Arabidopsis
  misc_feature (7)..(373): Homolog of NCBI NO: 39545844 NR Description: OSJNBb0060E08.15 [Oryza sativa (japonica
  misc_feature (284)..(562): Homolog of NCBI NO: 39545844 NR Description: OSJNBb0060E08.15 [Oryza sativa (japonica
  misc_feature (261)..(527): Homolog of NCBI NO: 26349931 NR Description: unnamed protein product [Mus musculus]
  misc_feature (62)..(237): Homolog of NCBI NO: 26349931 NR Description: unnamed protein product [Mus musculus]
  misc_feature (261)..(527): Homolog of NCBI NO: 27370056 NR Description: RIKEN cDNA C330006K01 [Mus musculus]
  misc_feature (6)..(237): Homolog of NCBI NO: 27370056 NR Description: RIKEN cDNA C330006K01 [Mus musculus]
  misc_feature (261)..(527): Homolog of NCBI NO: 37538332 NR Description: similar to Hypothetical protein KIAA0415 [Homo
ENMSDQEGDWDFYLRILSNSARDSTDPASDPSILQSVKKLHGFCKMEKSDDLVARIYPQFNKVFHRSVASLSQSESGASKGLLLLAILQFFLDFGDMVLHDSDPSLRTFFRSCLSREFSDAAVAEATCEFLVVNQRKLLASFPNLLPQFFPLLLKLIAWNWEKLEKSFLKIFPGLISPGSFLPLFPSIVDLPILVVALEKVERSSGSGSRVGGSIASIQKSAAPEMLLALMDEAYTGSTIGDGGDDSESEDNNTIDVADPLFLELLKDENDGLAERHRASPTLNAALQAAASGPRSERMKQTLKIAPRLLDVYFSVTLRDANDSLICALIPLLMTRNSTMFPDKIFSHEIRRRLLEFVLAAFQRSPNFIALLKKPIIDRLGEAYDDVAKRELALQLCWAIGEYGGGGESHKEAARELFESLELLVYENLSSSRLGLRQESGNGSRRTTQSRLLCFVVTAIAKLATYHRELLPRARVALGKVVKSRISDARVWRRAHDYLGLMNEPGICWSVLGPSRVSEKRFPGTVNWSEGGQKMVAHIPFHILSEQGGPPFHDFAFSDIIPKN

SEQ ID NO: 81134 - protein, 562 aa, Arabidopsis thaliana
  peptide (1)..(562): Ceres Seq. ID no. 12658488
  misc_feature (1)..(562): Homolog of NCBI NO: 22331098 NR Description: hypothetical protein; protein id: At3g15160.1, by cDNA: gi_20465413 [Arabidopsis thaliana]
  misc_feature (1)..(562): Homolog of NCBI NO: 20465414 NR Description: unknown protein [Arabidopsis thaliana]
  misc_feature (224)..(562): Homolog of NCBI NO: 11994505 NR Description: gene_id:F4B12.7~unknown protein [Arabidopsis
  misc_feature (5)..(371): Homolog of NCBI NO: 39545844 NR Description: OSJNBb0060E08.15 [Oryza sativa (japonica
  misc_feature (282)..(560): Homolog of NCBI NO: 39545844 NR Description: OSJNBb0060E08.15 [Oryza sativa (japonica
  misc_feature (259)..(525): Homolog of NCBI NO: 26349931 NR Description: unnamed protein product [Mus musculus]
  misc_feature (60)..(235): Homolog of NCBI NO: 26349931 NR Description: unnamed protein product [Mus musculus]
  misc_feature (259)..(525): Homolog of NCBI NO: 27370056 NR Description: RIKEN cDNA C330006K01 [Mus musculus]
  misc_feature (4)..(235): Homolog of NCBI NO: 27370056 NR Description: RIKEN cDNA C330006K01 [Mus musculus]
  misc_feature (259)..(525): Homolog of NCBI NO: 37538332 NR Description: similar to Hypothetical protein KIAA0415 [Homo
MSDQEGDWDFYLRILSNSARDSTDPASDPSILQSVKKLHGFCKMEKSDDLVARIYPQFNKVFHRSVASLSQSESGASKGLLLLAILQFFLDFGDMVLHDSDPSLRTFFRSCLSREFSDAAVAEATCEFLVVNQRKLLASFPNLLPQFFPLLLKLIAWNWEKLEKSFLKIFPGLISPGSFLPLFPSIVDLPILVVALEKVERSSGSGSRVGGSIASIQKSAAPEMLLALMDEAYTGSTIGDGGDDSESEDNNTIDVADPLFLELLKDENDGLAERHRASPTLNAALQAAASGPRSERMKQTLKIAPRLLDVYFSVTLRDANDSLICALIPLLMTRNSTMFPDKIFSHEIRRRLLEFVLAAFQRSPNFIALLKKPIIDRLGEAYDDVAKRELALQLCWAIGEYGGGGESHKEAARELFESLELLVYENLSSSRLGLRQESGNGSRRTTQSRLLCFVVTAIAKLATYHRELLPRARVALGKVVKSRISDARVWRRAHDYLGLMNEPGICWSVLGPSRVSEKRFPGTVNWSEGGQKMVAHIPFHILSEQGGPPFHDFAFSDIIPKN

SEQ ID NO: 81135 - protein, 519 aa, Arabidopsis thaliana
  peptide (1)..(519): Ceres Seq. ID no. 12658489
  misc_feature (1)..(519): Homolog of NCBI NO: 22331098 NR Description: hypothetical protein; protein id: At3g15160.1, by cDNA: gi_20465413 [Arabidopsis thaliana]
  misc_feature (1)..(519): Homolog of NCBI NO: 20465414 NR Description: unknown protein [Arabidopsis thaliana]
  misc_feature (181)..(519): Homolog of NCBI NO: 11994505 NR Description: gene_id:F4B12.7~unknown protein [Arabidopsis
  misc_feature (1)..(328): Homolog of NCBI NO: 39545844 NR Description: OSJNBb0060E08.15 [Oryza sativa (japonica
  misc_feature (239)..(517): Homolog of NCBI NO: 39545844 NR Description: OSJNBb0060E08.15 [Oryza sativa (japonica
  misc_feature (216)..(482): Homolog of NCBI NO: 26349931 NR Description: unnamed protein product [Mus musculus]
  misc_feature (17)..(192): Homolog of NCBI NO: 26349931 NR Description: unnamed protein product [Mus musculus]
  misc_feature (216)..(482): Homolog of NCBI NO: 27370056 NR Description: RIKEN cDNA C330006K01 [Mus musculus]
  misc_feature (1)..(192): Homolog of NCBI NO: 27370056 NR Description: RIKEN cDNA C330006K01 [Mus musculus]
  misc_feature (216)..(482): Homolog of NCBI NO: 37538332 NR Description: similar to Hypothetical protein KIAA0415 [Homo
MEKSDDLVARIYPQFNKVFHRSVASLSQSESGASKGLLLLAILQFFLDFGDMVLHDSDPSLRTFFRSCLSREFSDAAVAEATCEFLVVNQRKLLASFPNLLPQFFPLLLKLIAWNWEKLEKSFLKIFPGLISPGSFLPLFPSIVDLPILVVALEKVERSSGSGSRVGGSIASIQKSAAPEMLLALMDEAYTGSTIGDGGDDSESEDNNTIDVADPLFLELLKDENDGLAERHRASPTLNAALQAAASGPRSERMKQTLKIAPRLLDVYFSVTLRDANDSLICALIPLLMTRNSTMFPDKIFSHEIRRRLLEFVLAAFQRSPNFIALLKKPIIDRLGEAYDDVAKRELALQLCWAIGEYGGGGESHKEAARELFESLELLVYENLSSSRLGLRQESGNGSRRTTQSRLLCFVVTAIAKLATYHRELLPRARVALGKVVKSRISDARVWRRAHDYLGLMNEPGICWSVLGPSRVSEKRFPGTVNWSEGGQKMVAHIPFHILSEQGGPPFHDFAFSDIIPKN

SEQ ID NO: 81136 - DNA, 1008 bp, Arabidopsis thaliana
  misc_feature (1)..(1008): Ceres Seq. ID no. 12658543
  misc_feature: MA Experiment ID: 20000166 Result: Up-regulated in Transcription
  misc_feature: MA Experiment 20000166 PARAMETER Experiment Name: At_100uM_ABA_P Parameter: Age (day) Value: 14
  misc_feature: MA Experiment 20000166 PARAMETER Experiment Name: At_100uM_ABA_P Parameter: Organism Value: A. thaliana
  misc_feature: MA Experiment 20000166 PARAMETER Experiment Name: At_100uM_ABA_P Parameter: Plant Line Value: WS
  misc_feature: MA Experiment 20000166 PARAMETER Experiment Name: At_100uM_ABA_P Parameter: Timepoint (hr) Value: 1
  misc_feature: MA Experiment 20000166 PARAMETER Experiment Name: At_100uM_ABA_P Parameter: Tissue Value: Aerial
  misc_feature: MA Experiment 20000166 PARAMETER Experiment Name: At_100uM_ABA_P Parameter: Treatment Value: 100uM ABA vs. No Treatment
  misc_feature: MA Experiment ID: 20000169 Result: Up-regulated in Transcription
  misc_feature: MA Experiment 20000169 PARAMETER Experiment Name: At_100uM_ABA_P Parameter: Age (day) Value: 14
  misc_feature: MA Experiment 20000169 PARAMETER Experiment Name: At_100uM_ABA_P Parameter: Organism Value: A. thaliana
  misc_feature: MA Experiment 20000169 PARAMETER Experiment Name: At_100uM_ABA_P Parameter: Plant Line Value: WS
  misc_feature: MA Experiment 20000169 PARAMETER Experiment Name: At_100uM_ABA_P Parameter: Timepoint (hr) Value: 6
  misc_feature: MA Experiment 20000169 PARAMETER Experiment Name: At_100uM_ABA_P Parameter: Tissue Value: Aerial
  misc_feature: MA Experiment 20000169 PARAMETER Experiment Name: At_100uM_ABA_P Parameter: Treatment Value: 100uM ABA vs. No Treatment
  misc_feature: MA Experiment ID: 20000171 Result: Down-regulated in Transcription
  misc_feature: MA Experiment 20000171 PARAMETER Experiment Name: At_42deg_Heat_P Parameter: Age (day) Value: 14
  misc_feature: MA Experiment 20000171 PARAMETER Experiment Name: At_42deg_Heat_P Parameter: Organism Value: A. thaliana
  misc_feature: MA Experiment 20000171 PARAMETER Experiment Name: At_42deg_Heat_P Parameter: Plant Line Value: WS
  misc_feature: MA Experiment 20000171 PARAMETER Experiment Name: At_42deg_Heat_P Parameter: Temperature (deg C) Value: 42 vs. 22
  misc_feature: MA Experiment 20000171 PARAMETER Experiment Name: At_42deg_Heat_P Parameter: Timepoint (hr) Value: 1
  misc_feature: MA Experiment 20000171 PARAMETER Experiment Name: At_42deg_Heat_P Parameter: Tissue Value: Aerial
  misc_feature: MA Experiment ID: 20000173 Result: Down-regulated in Transcription
  misc_feature: MA Experiment 20000173 PARAMETER Experiment Name: At_42deg_Heat_P Parameter: Age (day) Value: 14
  misc_feature: MA Experiment 20000173 PARAMETER Experiment Name: At_42deg_Heat_P Parameter: Organism Value: A. thaliana
  misc_feature: MA Experiment 20000173 PARAMETER Experiment Name: At_42deg_Heat_P Parameter: Plant Line Value: WS
  misc_feature: MA Experiment 20000173 PARAMETER Experiment Name: At_42deg_Heat_P Parameter: Temperature (deg C) Value: 42 vs. 22
  misc_feature: MA Experiment 20000173 PARAMETER Experiment Name: At_42deg_Heat_P Parameter: Timepoint (hr) Value: 6
  misc_feature: MA Experiment 20000173 PARAMETER Experiment Name: At_42deg_Heat_P Parameter: Tissue Value: Aerial
  misc_feature: MA Experiment ID: 20000182 Result: Up-regulated in Transcription
  misc_feature: MA Experiment 20000182 PARAMETER Experiment Name: At_2mM_SA_P Parameter: Age (day) Value: 14
  misc_feature: MA Experiment 20000182 PARAMETER Experiment Name: At_2mM_SA_P Parameter: Organism Value: A. thaliana
  misc_feature: MA Experiment 20000182 PARAMETER Experiment Name: At_2mM_SA_P Parameter: Plant Line Value: WS
  misc_feature: MA Experiment 20000182 PARAMETER Experiment Name: At_2mM_SA_P Parameter: Timepoint (hr) Value: 6
  misc_feature: MA Experiment 20000182 PARAMETER Experiment Name: At_2mM_SA_P Parameter: Tissue Value: Aerial
  misc_feature: MA Experiment 20000182 PARAMETER Experiment Name: At_2mM_SA_P Parameter: Treatment Value: 2mM SA vs. No Treatment
  misc_feature: MA Experiment ID: 20000184 Result: Down-regulated in Transcription
  misc_feature: MA Experiment 20000184 PARAMETER Experiment Name: At_Shoots__P Parameter: Age (day) Value: 7
  misc_feature: MA Experiment 20000184 PARAMETER Experiment Name: At_Shoots__P Parameter: Tissue Value: Shoots vs. Whole Plant
  misc_feature: MA Experiment ID: 20000185 Result: Down-regulated in Transcription
  misc_feature: MA Experiment 20000185 PARAMETER Experiment Name: At_Roots__P Parameter: Age (day) Value: 7 vs. 21
  misc_feature: MA Experiment 20000185 PARAMETER Experiment Name: At_Roots__P Parameter: Organism Value: A. thaliana
  misc_feature: MA Experiment 20000185 PARAMETER Experiment Name: At_Roots__P Parameter: Tissue Value: Roots vs. Whole Plant
  misc_feature: MA Experiment ID: 20000227 Result: Up-regulated in Transcription
  misc_feature: MA Experiment 20000227 PARAMETER Experiment Name: At_Root-Tips-vs-Tops_P Parameter: Tissue Value: Root Tips vs. Root Tops
  misc_feature: MA Experiment ID: 20000234 Result: Down-regulated in Transcription
  misc_feature: MA Experiment 20000234 PARAMETER Experiment Name: At_Siliques_P Parameter: Age (day) Value: 21
  misc_feature: MA Experiment 20000234 PARAMETER Experiment Name: At_Siliques_P Parameter: Organism Value: A. thaliana
  misc_feature: MA Experiment 20000234 PARAMETER Experiment Name: At_Siliques_P Parameter: Plant Line Value: WS
  misc_feature: MA Experiment 20000234 PARAMETER Experiment Name: At_Siliques_P Parameter: Tissue Value: Less Than 5mm Siliques vs. Whole Plant
  misc_feature: MA Experiment ID: 20000264 Result: Down-regulated in Transcription
  misc_feature: MA Experiment 20000264 PARAMETER Experiment Name: At_Open_Flower_P Parameter: Age (day) Value: 21
  misc_feature: MA Experiment 20000264 PARAMETER Experiment Name: At_Open_Flower_P Parameter: Plant Line Value: WS
  misc_feature: MA Experiment 20000264 PARAMETER Experiment Name: At_Open_Flower_P Parameter: Tissue Value: Open Flower vs. Whole Plant
  misc_feature: MA Experiment ID: 20000265 Result: Down-regulated in Transcription
  misc_feature: MA Experiment 20000265 PARAMETER Experiment Name: At_Open_Flower_P Parameter: Age (day) Value: 21
  misc_feature: MA Experiment 20000265 PARAMETER Experiment Name: At_Open_Flower_P Parameter: Plant Line Value: WS
  misc_feature: MA Experiment 20000265 PARAMETER Experiment Name: At_Open_Flower_P Parameter: Tissue Value: Closed Flower vs. Whole Plant
  misc_feature: MA Experiment ID: 20000267 Result: Up-regulated in Transcription
  misc_feature: MA Experiment 20000267 PARAMETER Experiment Name: At_Drought_P Parameter: Age (day) Value: 7
  misc_feature: MA Experiment 20000267 PARAMETER Experiment Name: At_Drought_P Parameter: Organism Value: A. thaliana
  misc_feature: MA Experiment 20000267 PARAMETER Experiment Name: At_Drought_P Parameter: Plant Line Value: WS
  misc_feature: MA Experiment 20000267 PARAMETER Experiment Name: At_Drought_P Parameter: Timepoint (hr) Value: 6
  misc_feature: MA Experiment 20000267 PARAMETER Experiment Name: At_Drought_P Parameter: Tissue Value: Whole Plant
  misc_feature: MA Experiment 20000267 PARAMETER Experiment Name: At_Drought_P Parameter: Treatment Value: Drought vs. No Drought
  misc_feature: MA Experiment ID: 20000268 Result: Up-regulated in Transcription
  misc_feature: MA Experiment 20000268 PARAMETER Experiment Name: At_100mM_NaCl__P Parameter: Age (day) Value: 14
  misc_feature: MA Experiment 20000268 PARAMETER Experiment Name: At_100mM_NaCl__P Parameter: Organism Value: A. thaliana
  misc_feature: MA Experiment 20000268 PARAMETER Experiment Name: At_100mM_NaCl__P Parameter: Plant Line Value: WS
  misc_feature: MA Experiment 20000268 PARAMETER Experiment Name: At_100mM_NaCl__P Parameter: Timepoint (hr) Value: 6
  misc_feature: MA Experiment 20000268 PARAMETER Experiment Name: At_100mM_NaCl__P Parameter: Tissue Value: Whole Plant
  misc_feature: MA Experiment 20000268 PARAMETER Experiment Name: At_100mM_NaCl__P Parameter: Treatment Value: 100mM NaCl vs. No Treatment
  misc_feature: MA Experiment ID: 20000286 Result: Down-regulated in Transcription
  misc_feature: MA Experiment 20000286 PARAMETER Experiment Name: At_Open_Flower_P Parameter: Age (day) Value: 21
  misc_feature: MA Experiment 20000286 PARAMETER Experiment Name: At_Open_Flower_P Parameter: Plant Line Value: WS
  misc_feature: MA Experiment 20000286 PARAMETER Experiment Name: At_Open_Flower_P Parameter: Tissue Value: Half Open vs. Whole Plant
  misc_feature: MA Experiment ID: 20000288 Result: Up-regulated in Transcription
  misc_feature: MA Experiment 20000288 PARAMETER Experiment Name: At_Drought_P Parameter: Age (day) Value: 7
  misc_feature: MA Experiment 20000288 PARAMETER Experiment Name: At_Drought_P Parameter: Organism Value: A. thaliana
  misc_feature: MA Experiment 20000288 PARAMETER Experiment Name: At_Drought_P Parameter: Plant Line Value: WS
  misc_feature: MA Experiment 20000288 PARAMETER Experiment Name: At_Drought_P Parameter: Timepoint (hr) Value: 1
  misc_feature: MA Experiment 20000288 PARAMETER Experiment Name: At_Drought_P Parameter: Tissue Value: Whole Plant
  misc_feature: MA Experiment 20000288 PARAMETER Experiment Name: At_Drought_P Parameter: Treatment Value: Drought vs. No Drought
  misc_feature: MA Experiment ID: 20000436 Result: Up-regulated in Transcription
  misc_feature: MA Experiment 20000436 PARAMETER Experiment Name: At_Drought_P Parameter: Age (day) Value: 7
  misc_feature: MA Experiment 20000436 PARAMETER Experiment Name: At_Drought_P Parameter: Organism Value: A. thaliana
  misc_feature: MA Experiment 20000436 PARAMETER Experiment Name: At_Drought_P Parameter: Plant Line Value: WS
  misc_feature: MA Experiment 20000436 PARAMETER Experiment Name: At_Drought_P Parameter: Timepoint (hr) Value: 12
  misc_feature: MA Experiment 20000436 PARAMETER Experiment Name: At_Drought_P Parameter: Tissue Value: Whole Plant
  misc_feature: MA Experiment 20000436 PARAMETER Experiment Name: At_Drought_P Parameter: Treatment Value: Drought vs. No Drought
  misc_feature: MA Experiment ID: 20000437 Result: Up-regulated in Transcription
  misc_feature: MA Experiment 20000437 PARAMETER Experiment Name: At_Drought_P Parameter: Age (day) Value: 8
  misc_feature: MA Experiment 20000437 PARAMETER Experiment Name: At_Drought_P Parameter: Organism Value: A. thaliana
  misc_feature: MA Experiment 20000437 PARAMETER Experiment Name: At_Drought_P Parameter: Plant Line Value: WS
  misc_feature: MA Experiment 20000437 PARAMETER Experiment Name: At_Drought_P Parameter: Timepoint (hr) Value: 24
  misc_feature: MA Experiment 20000437 PARAMETER Experiment Name: At_Drought_P Parameter: Tissue Value: Whole Plant
  misc_feature: MA Experiment 20000437 PARAMETER Experiment Name: At_Drought_P Parameter: Treatment Value: Drought vs. No Drought
  misc_feature: MA Experiment ID: 20000438 Result: Down-regulated in Transcription
  misc_feature: MA Experiment 20000438 PARAMETER Experiment Name: At_Shoots__P Parameter: Age (day) Value: 14
  misc_feature: MA Experiment 20000438 PARAMETER Experiment Name: At_Shoots__P Parameter: Tissue Value: Shoots vs. Whole Plant
  misc_feature: MA Experiment ID: 20000439 Result: Down-regulated in Transcription
  misc_feature: MA Experiment 20000439 PARAMETER Experiment Name: At_Roots__P Parameter: Age (day) Value: 14 vs. 21
  misc_feature: MA Experiment 20000439 PARAMETER Experiment Name: At_Roots__P Parameter: Organism Value: A. thaliana
  misc_feature: MA Experiment 20000439 PARAMETER Experiment Name: At_Roots__P Parameter: Tissue Value: Roots vs. Whole Plant
  misc_feature: MA Experiment ID: 20000441 Result: Down-regulated in Transcription
  misc_feature: MA Experiment 20000441 PARAMETER Experiment Name: At_1uM_BR-BRZ__P Parameter: Tissue Value: Shoot Apices
  misc_feature: MA Experiment 20000441 PARAMETER Experiment Name: At_1uM_BR-BRZ__P Parameter: Treatment Value: 1uM BR vs. No Treatment
  misc_feature: MA Experiment ID: 20000443 Result: Down-regulated in Transcription
  misc_feature: MA Experiment 20000443 PARAMETER Experiment Name: At_1uM_BR-BRZ__P Parameter: Tissue Value: Shoot Apices
  misc_feature: MA Experiment 20000443 PARAMETER Experiment Name: At_1uM_BR-BRZ__P Parameter: Treatment Value: 1uM BRZ vs. No Treatment
  misc_feature: MA Experiment ID: 20000453 Result: Up-regulated in Transcription
  misc_feature: MA Experiment 20000453 PARAMETER Experiment Name: At_100uM_ABA_P Parameter: Age (day) Value: 15
  misc_feature: MA Experiment 20000453 PARAMETER Experiment Name: At_100uM_ABA_P Parameter: Organism Value: A. thaliana
  misc_feature: MA Experiment 20000453 PARAMETER Experiment Name: At_100uM_ABA_P Parameter: Plant Line Value: WS
  misc_feature: MA Experiment 20000453 PARAMETER Experiment Name: At_100uM_ABA_P Parameter: Timepoint (hr) Value: 24
  misc_feature: MA Experiment 20000453 PARAMETER Experiment Name: At_100uM_ABA_P Parameter: Tissue Value: Aerial
  misc_feature: MA Experiment 20000453 PARAMETER Experiment Name: At_100uM_ABA_P Parameter: Treatment Value: 100uM ABA vs. No Treatment
  misc_feature: MA Experiment ID: 20000495 Result: Down-regulated in Transcription
  misc_feature: MA Experiment 20000495 PARAMETER Experiment Name: At_Guard_Cells_P Parameter: Harvest Date Value: 8/2/2002
  misc_feature: MA Experiment 20000495 PARAMETER Experiment Name: At_Guard_Cells_P Parameter: Organism Value: A. thaliana
  misc_feature: MA Experiment 20000495 PARAMETER Experiment Name: At_Guard_Cells_P Parameter: Tissue Value: Guard Cells vs. Leaves
  misc_feature: MA Experiment ID: 20000575 Result: Up-regulated in Transcription
  misc_feature: MA Experiment 20000575 PARAMETER Experiment Name: At_100uM_ABA_Mutants__P Parameter: Organism Value: A. thaliana
  misc_feature: MA Experiment 20000575 PARAMETER Experiment Name: At_100uM_ABA_Mutants__P Parameter: Plant Line Value: CS22
  misc_feature: MA Experiment 20000575 PARAMETER Experiment Name: At_100uM_ABA_Mutants__P Parameter: Timepoint (hr) Value: 6
  misc_feature: MA Experiment 20000575 PARAMETER Experiment Name: At_100uM_ABA_Mutants__P Parameter: Tissue Value: Whole Plant
  misc_feature: MA Experiment 20000575 PARAMETER Experiment Name: At_100uM_ABA_Mutants__P Parameter: Treatment Value: 1uM ABA vs. No Treatment
  misc_feature: MA Experiment ID: 20001248 Result: Up-regulated in Transcription
  misc_feature: MA Experiment 20001248 PARAMETER Experiment Name: At_Far-red-induction_P Parameter: Age (day) Value: 7
  misc_feature: MA Experiment 20001248 PARAMETER Experiment Name: At_Far-red-induction_P Parameter: Light Value: Far-red vs. White
  misc_feature: MA Experiment 20001248 PARAMETER Experiment Name: At_Far-red-induction_P Parameter: Organism Value: A. thaliana
  misc_feature: MA Experiment 20001248 PARAMETER Experiment Name: At_Far-red-induction_P Parameter: Plant Line Value: Columbia
  misc_feature: MA Experiment 20001248 PARAMETER Experiment Name: At_Far-red-induction_P Parameter: Timepoint (hr) Value: 4
  misc_feature: MA Experiment 20001248 PARAMETER Experiment Name: At_Far-red-induction_P Parameter: Tissue Value: Whole Plant
  misc_feature: MA Experiment ID: 20001450 Result: Up-regulated in Transcription
  misc_feature: MA Experiment 20001450 PARAMETER Experiment Name: At_Far-red-induction_P Parameter: Age (day) Value: 7
  misc_feature: MA Experiment 20001450 PARAMETER Experiment Name: At_Far-red-induction_P Parameter: Light Value: Far-red vs. White
  misc_feature: MA Experiment 20001450 PARAMETER Experiment Name: At_Far-red-induction_P Parameter: Organism Value: A. thaliana
  misc_feature: MA Experiment 20001450 PARAMETER Experiment Name: At_Far-red-induction_P Parameter: Plant Line Value: Columbia
  misc_feature: MA Experiment 20001450 PARAMETER Experiment Name: At_Far-red-induction_P Parameter: Timepoint (hr) Value: 8
  misc_feature: MA Experiment 20001450 PARAMETER Experiment Name: At_Far-red-induction_P Parameter: Tissue Value: Whole Plant
  misc_feature: MA Experiment ID: 20001451 Result: Up-regulated in Transcription
  misc_feature: MA Experiment 20001451 PARAMETER Experiment Name: At_Far-red-induction_P Parameter: Age (day) Value: 7
  misc_feature: MA Experiment 20001451 PARAMETER Experiment Name: At_Far-red-induction_P Parameter: Light Value: Far-red vs. White
  misc_feature: MA Experiment 20001451 PARAMETER Experiment Name: At_Far-red-induction_P Parameter: Organism Value: A. thaliana
  misc_feature: MA Experiment 20001451 PARAMETER Experiment Name: At_Far-red-induction_P Parameter: Plant Line Value: Columbia
  misc_feature: MA Experiment 20001451 PARAMETER Experiment Name: At_Far-red-induction_P Parameter: Timepoint (hr) Value: 24
  misc_feature: MA Experiment 20001451 PARAMETER Experiment Name: At_Far-red-induction_P Parameter: Tissue Value: Whole Plant
atggaagaaagcaatgatatttttcagaacaatttcagtcctaaaatctcagaaatcagagcatctctgtctcagatcatattagcaggaggaccaaacacactcgactcaatcttctcacttctcactccctcctccgtagaatccgccacaacatcattcaacactcacaatcctccgccaccgccgcagctcgggtcctccgtctatctccgccaacgagatatcatcgagaagttccaccttcagaacagagcaatctccactcctcatcctcctctgttttcctcaacgtacgatcatcatcaaacttccgagctaatgctccaagcggcggccgggtctccagccgccgctttcgccgctgcgttagcggctgggagggtgacgaaaaagaagaaactttacagaggagtgaggcagagacattggggaaaatgggttgcggagataagattgccgcaaaacagaatgagggtttggttaggtacttacgacacggcggaagccgccgcttacgcttacgatcgcgccgcctataagctccgtggagaatacgctcgtctcaattttcctaatctcaaagacccgagtgagctactcggactcggagattcctctaagctaatagctctcaagaacgccgtcgacgggaagatccaatccatttgccagagagtcagaaaagagagagcaaaaaagagcgtaaaagtgagcaaaaactcgtcggccacggcggattcttcgtgtttgtcatcgccggagattctgtcgtcgtctccggtgacgacaactactactgcggttacttcagaggatagttattgggtttcacctatgggtttgtgtaacagtgaaaatagttctccggtatcagtttcggtccctagtgaagtaccggcgacggcggaggaagaggcaatgatgggagtggacactgatgggtttttattagcgaggatgccatcgttcgatccagagctgatttgggaagttcttgccaattaa

SEQ ID NO: 81137 - protein, 335 aa, Arabidopsis thaliana
  peptide (1)..(335): Ceres Seq. ID no. 12658544
  misc_feature (133)..(197): Pfam Name: AP2 domain Pfam Description: AP2 domain
  misc_feature (1)..(335): Homolog of NCBI NO: 15217629 NR Description: AP2-containing DNA-binding protein; protein id:
  misc_feature (127)..(333): Homolog of NCBI NO: 8571476 NR Description: apetala2 domain-containing protein [Atriplex
  misc_feature (64)..(252): Homolog of NCBI NO: 6573771 NR Description: F28K19.29 [Arabidopsis thaliana]
  misc_feature (64)..(252): Homolog of NCBI NO: 15218204 NR Description: AP2 domain protein RAP2.4; protein id: supported by cDNA: gi_13877778 [Arabidopsis thaliana]
  misc_feature (64)..(252): Homolog of NCBI NO: 13877779 NR Description: putative AP2 domain-containing protein
  misc_feature (103)..(325): Homolog of NCBI NO: 27436378 NR Description: dehydration-responsive element binding protein 3
  misc_feature (108)..(252): Homolog of NCBI NO: 2281633 NR Description: AP2 domain containing protein RAP2.4 [Arabidopsis
  misc_feature (114)..(333): Homolog of NCBI NO: 37533596 NR Description: putative AP2-domain transcriptional regulator
  misc_feature (134)..(252): Homolog of NCBI NO: 12324244 NR Description: putative AP2 domain transcriptional regulator, 5'
  misc_feature (8)..(272): Homolog of NCBI NO: 18400001 NR Description: AP2 domain transcription factor RAP2, putative; id: At1g36060.1 [Arabidopsis thaliana] >gi|25350213|pir||E86482
MEESNDIFQNNFSPKISEIRASLSQIILAGGPNTLDSIFSLLTPSSVESATTSFNTHNPPPPPQLGSSVYLRQRDIIEKFHLQNRAISTPHPPLFSSTYDHHQTSELMLQAAAGSPAAAFAAALAAGRVTKKKKLYRGVRQRHWGKWVAEIRLPQNRMRVWLGTYDTAEAAAYAYDRAAYKLRGEYARLNFPNLKDPSELLGLGDSSKLIALKNAVDGKIQSICQRVRKERAKKSVKVSKNSSATADSSCLSSPEILSSSPVTTTTTAVTSEDSYWVSPMGLCNSENSSPVSVSVPSEVPATAEEEAMMGVDTDGFLLARMPSFDPELIWEVLAN

SEQ ID NO: 81138 - protein, 228 aa, Arabidopsis thaliana
  peptide (1)..(228): Ceres Seq. ID no. 12658545
  misc_feature (26)..(90): Pfam Name: AP2 domain Pfam Description: AP2 domain
  misc_feature (1)..(228): Homolog of NCBI NO: 15217629 NR Description: AP2-containing DNA-binding protein; protein id:
  misc_feature (20)..(226): Homolog of NCBI NO: 8571476 NR Description: apetala2 domain-containing protein [Atriplex
  misc_feature (1)..(145): Homolog of NCBI NO: 6573771 NR Description: F28K19.29 [Arabidopsis thaliana]
  misc_feature (1)..(145): Homolog of NCBI NO: 15218204 NR Description: AP2 domain protein RAP2.4; protein id: supported by cDNA: gi_13877778 [Arabidopsis thaliana]
  misc_feature (1)..(145): Homolog of NCBI NO: 13877779 NR Description: putative AP2 domain-containing protein
  misc_feature (1)..(218): Homolog of NCBI NO: 27436378 NR Description: dehydration-responsive element binding protein 3
  misc_feature (1)..(145): Homolog of NCBI NO: 2281633 NR Description: AP2 domain containing protein RAP2.4 [Arabidopsis
  misc_feature (7)..(226): Homolog of NCBI NO: 37533596 NR Description: putative AP2-domain transcriptional regulator
  misc_feature (27)..(145): Homolog of NCBI NO: 12324244 NR Description: putative AP2 domain transcriptional regulator, 5'
  misc_feature (1)..(165): Homolog of NCBI NO: 18400001 NR Description: AP2 domain transcription factor RAP2, putative; id: At1g36060.1 [Arabidopsis thaliana] >gi|25350213|pir||E86482
MLQAAAGSPAAAFAAALAAGRVTKKKKLYRGVRQRHWGKWVAEIRLPQNRMRVWLGTYDTAEAAAYAYDRAAYKLRGEYARLNFPNLKDPSELLGLGDSSKLIALKNAVDGKIQSICQRVRKERAKKSVKVSKNSSATADSSCLSSPEILSSSPVTTTTTAVTSEDSYWVSPMGLCNSENSSPVSVSVPSEVPATAEEEAMMGVDTDGFLLARMPSFDPELIWEVLAN

SEQ ID NO: 81139 - protein, 178 aa, Arabidopsis thaliana
  peptide (1)..(178): Ceres Seq. ID no. 12658546
  misc_feature (1)..(178): Homolog of NCBI NO: 15217629 NR Description: AP2-containing DNA-binding protein; protein id:
  misc_feature (1)..(176): Homolog of NCBI NO: 8571476 NR Description: apetala2 domain-containing protein [Atriplex
  misc_feature (1)..(95): Homolog of NCBI NO: 6573771 NR Description: F28K19.29 [Arabidopsis thaliana]
  misc_feature (1)..(95): Homolog of NCBI NO: 15218204 NR Description: AP2 domain protein RAP2.4; protein id: supported by cDNA: gi_13877778 [Arabidopsis thaliana]
  misc_feature (1)..(95): Homolog of NCBI NO: 13877779 NR Description: putative AP2 domain-containing protein
  misc_feature (1)..(168): Homolog of NCBI NO: 27436378 NR Description: dehydration-responsive element binding protein 3
  misc_feature (1)..(95): Homolog of NCBI NO: 2281633 NR Description: AP2 domain containing protein RAP2.4 [Arabidopsis
  misc_feature (1)..(176): Homolog of NCBI NO: 37533596 NR Description: putative AP2-domain transcriptional regulator
  misc_feature (1)..(95): Homolog of NCBI NO: 12324244 NR Description: putative AP2 domain transcriptional regulator, 5'
  misc_feature (1)..(115): Homolog of NCBI NO: 18400001 NR Description: AP2 domain transcription factor RAP2, putative; id: At1g36060.1 [Arabidopsis thaliana] >gi|25350213|pir||E86482
MRVWLGTYDTAEAAAYAYDRAAYKLRGEYARLNFPNLKDPSELLGLGDSSKLIALKNAVDGKIQSICQRVRKERAKKSVKVSKNSSATADSSCLSSPEILSSSPVTTTTTAVTSEDSYWVSPMGLCNSENSSPVSVSVPSEVPATAEEEAMMGVDTDGFLLARMPSFDPELIWEVLAN

SEQ ID NO: 81140 - DNA, 645 bp, Arabidopsis thaliana
  misc_feature (1)..(645): Ceres Seq. ID no. 12658559
  misc_feature: MA Experiment ID: 20000440 Result: Up-regulated in Transcription
  misc_feature: MA Experiment 20000440 PARAMETER Experiment Name: At_Closed-Flower__Sub_P Parameter: Tissue Value: Closed Flower vs. Whole Plant
atgttggcattcgtgaaatgcttctcgttgaagcgagcaaagcatcctcgtggatatgaggatcctcatgttcttgcatccgaaactcccttcaccgtgaatgagattgaggctttacacgatttattcaagaagctaagtacatctattatcaatgatggtctaatccataaggaagagtttcttctggctttgttcagaaacggcagtatgcaaaatctatttgcggacagggtgttttatatgtttgataggaaacgcaacggtgtgattgagtttggagaatttgttcgttcccttagcatattccatccatacactcccgaacatgaaaaatctgcatttatgttcaagctttttgacctccatggaaccggcttcatcgagccccatgagctgaagaagatggttggcgcactacttggtgaaacagacttagaactctcggaagaatctattgaagctatcgtggaacagacgatgctcgaggttgatacaaacaaagatgggaagattgatgaagaagagtggaaagagctcgttgctaagaatccttcaatcctcaagaacatgactctgccttacctcaaggaagtgactttagcatttccaagctttgtactcgactctgaagttgaagactag

SEQ ID NO: 81141 - protein, 214 aa, Arabidopsis thaliana
  peptide (1)..(214): Ceres Seq. ID no. 12658560
  misc_feature (112)..(140): Pfam Name: EF hand Pfam Description: EF hand
  misc_feature (1)..(214): Homolog of NCBI NO: 15217657 NR Description: calcineurin B-like protein; protein id: supported by cDNA: gi_15866275, supported by cDNA: gi_9965361
  misc_feature (1)..(214): Homolog of NCBI NO: 25295757 NR Description: protein F1N19.5 [imported] - Arabidopsis thaliana
  misc_feature (11)..(214): Homolog of NCBI NO: 15237928 NR Description: calcium sensor homolog (gb|AAC26110.1); protein At5g24270.1, supported by cDNA: gi_11065946, supported by cDNA: supported by cDNA: gi_20465716 [Arabidopsis thaliana]
  misc_feature (5)..(214): Homolog of NCBI NO: 16924116 NR Description: putative calcineurin B-like protein [Oryza sativa]
  misc_feature (7)..(214): Homolog of NCBI NO: 18414931 NR Description: calcineurin B-like protein 1; protein id: supported by cDNA: gi_3309081 [Arabidopsis thaliana]
  misc_feature (3)..(214): Homolog of NCBI NO: 15236778 NR Description: calcineurin B-like protein 3; protein id: supported by cDNA: gi_18253012, supported by cDNA: gi_3309085
  misc_feature (5)..(214): Homolog of NCBI NO: 22137326 NR Description: calcineurin B [Pisum sativum]
  misc_feature (6)..(214): Homolog of NCBI NO: 15234011 NR Description: putative protein (fragment); protein id:
  misc_feature (6)..(214): Homolog of NCBI NO: 30689575 NR Description: calcineurin B-like protein (fragment) thaliana] >gi|26449967|dbj|BAC42104.1| unknown protein
  misc_feature (7)..(214): Homolog of NCBI NO: 15238015 NR Description: calcineurin B 1; protein id: At5g47100.1, by cDNA: gi_15866278, supported by cDNA: gi_16151824 [Arabidopsis
MLAFVKCFSLKRAKHPRGYEDPHVLASETPFTVNEIEALHDLFKKLSTSIINDGLIHKEEFLLALFRNGSMQNLFADRVFYMFDRKRNGVIEFGEFVRSLSIFHPYTPEHEKSAFMFKLFDLHGTGFIEPHELKKMVGALLGETDLELSEESIEAIVEQTMLEVDTNKDGKIDEEEWKELVAKNPSILKNMTLPYLKEVTLAFPSFVLDSEVED

SEQ ID NO: 81142 - protein, 144 aa, Arabidopsis thaliana
  peptide (1)..(144): Ceres Seq. ID no. 12658561
  misc_feature (42)..(70): Pfam Name: EF hand Pfam Description: EF hand
  misc_feature (1)..(144): Homolog of NCBI NO: 15217657 NR Description: calcineurin B-like protein; protein id: supported by cDNA: gi_15866275, supported by cDNA: gi_9965361
  misc_feature (1)..(144): Homolog of NCBI NO: 25295757 NR Description: protein F1N19.5 [imported] - Arabidopsis thaliana
  misc_feature (1)..(144): Homolog of NCBI NO: 15237928 NR Description: calcium sensor homolog (gb|AAC26110.1); protein At5g24270.1, supported by cDNA: gi_11065946, supported by cDNA: supported by cDNA: gi_20465716 [Arabidopsis thaliana]
  misc_feature (1)..(144): Homolog of NCBI NO: 16924116 NR Description: putative calcineurin B-like protein [Oryza sativa]
  misc_feature (1)..(144): Homolog of NCBI NO: 18414931 NR Description: calcineurin B-like protein 1; protein id: supported by cDNA: gi_3309081 [Arabidopsis thaliana]
  misc_feature (1)..(144): Homolog of NCBI NO: 15236778 NR Description: calcineurin B-like protein 3; protein id: supported by cDNA: gi_18253012, supported by cDNA: gi_3309085
  misc_feature (1)..(144): Homolog of NCBI NO: 22137326 NR Description: calcineurin B [Pisum sativum]
  misc_feature (1)..(144): Homolog of NCBI NO: 15234011 NR Description: putative protein (fragment); protein id:
  misc_feature (1)..(144): Homolog of NCBI NO: 30689575 NR Description: calcineurin B-like protein (fragment) thaliana] >gi|26449967|dbj|BAC42104.1| unknown protein
  misc_feature (1)..(144): Homolog of NCBI NO: 15238015 NR Description: calcineurin B 1; protein id: At5g47100.1, by cDNA: gi_15866278, supported by cDNA: gi_16151824 [Arabidopsis
MQNLFADRVFYMFDRKRNGVIEFGEFVRSLSIFHPYTPEHEKSAFMFKLFDLHGTGFIEPHELKKMVGALLGETDLELSEESIEAIVEQTMLEVDTNKDGKIDEEEWKELVAKNPSILKNMTLPYLKEVTLAFPSFVLDSEVED

SEQ ID NO: 81143 - protein, 133 aa, Arabidopsis thaliana
  peptide (1)..(133): Ceres Seq. ID no. 12658562
  misc_feature (31)..(59): Pfam Name: EF hand Pfam Description: EF hand
  misc_feature (1)..(133): Homolog of NCBI NO: 15217657 NR Description: calcineurin B-like protein; protein id: supported by cDNA: gi_15866275, supported by cDNA: gi_9965361
  misc_feature (1)..(133): Homolog of NCBI NO: 25295757 NR Description: protein F1N19.5 [imported] - Arabidopsis thaliana
  misc_feature (1)..(133): Homolog of NCBI NO: 15237928 NR Description: calcium sensor homolog (gb|AAC26110.1); protein At5g24270.1, supported by cDNA: gi_11065946, supported by cDNA: supported by cDNA: gi_20465716 [Arabidopsis thaliana]
  misc_feature (1)..(133): Homolog of NCBI NO: 16924116 NR Description: putative calcineurin B-like protein [Oryza sativa]
  misc_feature (1)..(133): Homolog of NCBI NO: 18414931 NR Description: calcineurin B-like protein 1; protein id: supported by cDNA: gi_3309081 [Arabidopsis thaliana]
  misc_feature (1)..(133): Homolog of NCBI NO: 15236778 NR Description: calcineurin B-like protein 3; protein id: supported by cDNA: gi_18253012, supported by cDNA: gi_3309085
  misc_feature (1)..(133): Homolog of NCBI NO: 22137326 NR Description: calcineurin B [Pisum sativum]
  misc_feature (1)..(133): Homolog of NCBI NO: 15234011 NR Description: putative protein (fragment); protein id:
  misc_feature (1)..(133): Homolog of NCBI NO: 30689575 NR Description: calcineurin B-like protein (fragment) thaliana] >gi|26449967|dbj|BAC42104.1| unknown protein
  misc_feature (1)..(133): Homolog of NCBI NO: 15238015 NR Description: calcineurin B 1; protein id: At5g47100.1, by cDNA: gi_15866278, supported by cDNA: gi_16151824 [Arabidopsis
MFDRKRNGVIEFGEFVRSLSIFHPYTPEHEKSAFMFKLFDLHGTGFIEPHELKKMVGALLGETDLELSEESIEAIVEQTMLEVDTNKDGKIDEEEWKELVAKNPSILKNMTLPYLKEVTLAFPSFVLDSEVED

SEQ ID NO: 81144 - DNA, 1255 bp, Arabidopsis thaliana
  misc_feature (1)..(1255): Ceres Seq. ID no. 12658563
  misc_feature: MA Experiment ID: 20000173 Result: Up-regulated in Transcription
  misc_feature: MA Experiment 20000173 PARAMETER Experiment Name: At_42deg_Heat_P Parameter: Age (day) Value: 14
  misc_feature: MA Experiment 20000173 PARAMETER Experiment Name: At_42deg_Heat_P Parameter: Organism Value: A. thaliana
  misc_feature: MA Experiment 20000173 PARAMETER Experiment Name: At_42deg_Heat_P Parameter: Plant Line Value: WS
  misc_feature: MA Experiment 20000173 PARAMETER Experiment Name: At_42deg_Heat_P Parameter: Temperature (deg C) Value: 42 vs. 22
  misc_feature: MA Experiment 20000173 PARAMETER Experiment Name: At_42deg_Heat_P Parameter: Timepoint (hr) Value: 6
  misc_feature: MA Experiment 20000173 PARAMETER Experiment Name: At_42deg_Heat_P Parameter: Tissue Value: Aerial
  misc_feature: MA Experiment ID: 20000180 Result: Up-regulated in Transcription
  misc_feature: MA Experiment 20000180 PARAMETER Experiment Name: At_Germinating_Seeds_P Parameter: Age (hr) Value: 24 vs. 0
  misc_feature: MA Experiment 20000180 PARAMETER Experiment Name: At_Germinating_Seeds_P Parameter: Tissue Value: Germinating Seeds
  misc_feature: MA Experiment ID: 20000184 Result: Up-regulated in Transcription
  misc_feature: MA Experiment 20000184 PARAMETER Experiment Name: At_Shoots__P Parameter: Age (day) Value: 7
  misc_feature: MA Experiment 20000184 PARAMETER Experiment Name: At_Shoots__P Parameter: Tissue Value: Shoots vs. Whole Plant
  misc_feature: MA Experiment ID: 20000214 Result: Up-regulated in Transcription
  misc_feature: MA Experiment 20000214 PARAMETER Experiment Name: At_4deg_Cold_P Parameter: Timepoint (hr) Value: 6
  misc_feature: MA Experiment ID: 20000438 Result: Up-regulated in Transcription
  misc_feature: MA Experiment 20000438 PARAMETER Experiment Name: At_Shoots__P Parameter: Age (day) Value: 14
  misc_feature: MA Experiment 20000438 PARAMETER Experiment Name: At_Shoots__P Parameter: Tissue Value: Shoots vs. Whole Plant
  misc_feature: MA Experiment ID: 20000441 Result: Up-regulated in Transcription
  misc_feature: MA Experiment 20000441 PARAMETER Experiment Name: At_1uM_BR-BRZ__P Parameter: Tissue Value: Shoot Apices
  misc_feature: MA Experiment 20000441 PARAMETER Experiment Name: At_1uM_BR-BRZ__P Parameter: Treatment Value: 1uM BR vs. No Treatment
  misc_feature: MA Experiment ID: 20000443 Result: Up-regulated in Transcription
  misc_feature: MA Experiment 20000443 PARAMETER Experiment Name: At_1uM_BR-BRZ__P Parameter: Tissue Value: Shoot Apices
  misc_feature: MA Experiment 20000443 PARAMETER Experiment Name: At_1uM_BR-BRZ__P Parameter: Treatment Value: 1uM BRZ vs. No Treatment
  misc_feature: MA Experiment ID: 20000573 Result: Down-regulated in Transcription
  misc_feature: MA Experiment 20000573 PARAMETER Experiment Name: At_100uM_ABA_Mutants__P Parameter: Organism Value: A. thaliana
  misc_feature: MA Experiment 20000573 PARAMETER Experiment Name: At_100uM_ABA_Mutants__P Parameter: Plant Line Value: CS22 vs. Ler wt
  misc_feature: MA Experiment 20000573 PARAMETER Experiment Name: At_100uM_ABA_Mutants__P Parameter: Timepoint (hr) Value: N/A
  misc_feature: MA Experiment 20000573 PARAMETER Experiment Name: At_100uM_ABA_Mutants__P Parameter: Tissue Value: Whole Plant
  misc_feature: MA Experiment 20000573 PARAMETER Experiment Name: At_100uM_ABA_Mutants__P Parameter: Treatment Value: None
  misc_feature: MA Experiment ID: 20000574 Result: Down-regulated in Transcription
  misc_feature: MA Experiment 20000574 PARAMETER Experiment Name: At_100uM_ABA_Mutants__P Parameter: Organism Value: A. thaliana
  misc_feature: MA Experiment 20000574 PARAMETER Experiment Name: At_100uM_ABA_Mutants__P Parameter: Plant Line Value: CS23 vs. Ler wt
  misc_feature: MA Experiment 20000574 PARAMETER Experiment Name: At_100uM_ABA_Mutants__P Parameter: Timepoint (hr) Value: N/A
  misc_feature: MA Experiment 20000574 PARAMETER Experiment Name: At_100uM_ABA_Mutants__P Parameter: Tissue Value: Whole Plant
  misc_feature: MA Experiment 20000574 PARAMETER Experiment Name: At_100uM_ABA_Mutants__P Parameter: Treatment Value: None
  misc_feature: MA Experiment ID: 20001451 Result: Up-regulated in Transcription
  misc_feature: MA Experiment 20001451 PARAMETER Experiment Name: At_Far-red-induction_P Parameter: Age (day) Value: 7
  misc_feature: MA Experiment 20001451 PARAMETER Experiment Name: At_Far-red-induction_P Parameter: Light Value: Far-red vs. White
  misc_feature: MA Experiment 20001451 PARAMETER Experiment Name: At_Far-red-induction_P Parameter: Organism Value: A. thaliana
  misc_feature: MA Experiment 20001451 PARAMETER Experiment Name: At_Far-red-induction_P Parameter: Plant Line Value: Columbia
  misc_feature: MA Experiment 20001451 PARAMETER Experiment Name: At_Far-red-induction_P Parameter: Timepoint (hr) Value: 24
  misc_feature: MA Experiment 20001451 PARAMETER Experiment Name: At_Far-red-induction_P Parameter: Tissue Value: Whole Plant
  misc_feature: MA Experiment ID: 20001459 Result: Up-regulated in Transcription
  misc_feature: MA Experiment 20001459 PARAMETER Experiment Name: At_50mM_NH4NO3_L-to-H_P Parameter: Age (day) Value: Undefined
  misc_feature: MA Experiment 20001459 PARAMETER Experiment Name: At_50mM_NH4NO3_L-to-H_P Parameter: Organism Value: Undefined
  misc_feature: MA Experiment 20001459 PARAMETER Experiment Name: At_50mM_NH4NO3_L-to-H_P Parameter: Plant Line Value: Undefined
  misc_feature: MA Experiment 20001459 PARAMETER Experiment Name: At_50mM_NH4NO3_L-to-H_P Parameter: Timepoint (hr) Value: 4
  misc_feature: MA Experiment 20001459 PARAMETER Experiment Name: At_50mM_NH4NO3_L-to-H_P Parameter: Tissue Value: Siliques
  misc_feature: MA Experiment 20001459 PARAMETER Experiment Name: At_50mM_NH4NO3_L-to-H_P Parameter: Treatment Value: 50mM NH4NO3 vs. 100mM Manitol
  misc_feature: MA Experiment ID: 20001911 Result: Up-regulated in Transcription
  misc_feature: MA Experiment 20001911 PARAMETER Experiment Name: At_Drought_Reproduction_P Parameter: Age (day) Value: 40
  misc_feature: MA Experiment 20001911 PARAMETER Experiment Name: At_Drought_Reproduction_P Parameter: Organism Value: A. thaliana
  misc_feature: MA Experiment 20001911 PARAMETER Experiment Name: At_Drought_Reproduction_P Parameter: Plant Line Value: WS
  misc_feature: MA Experiment 20001911 PARAMETER Experiment Name: At_Drought_Reproduction_P Parameter: Timepoint (day) Value: 10
  misc_feature: MA Experiment 20001911 PARAMETER Experiment Name: At_Drought_Reproduction_P Parameter: Tissue Value: Flowers
  misc_feature: MA Experiment 20001911 PARAMETER Experiment Name: At_Drought_Reproduction_P Parameter: Treatment Value: Drought vs. No Drought
acaaagaaaactgaacaaaatttgaagagttattaaaatggggtgtacatcttccaagcaagcaaaagctaacgtcgtcgccgacgtttacaaaccaccgccgtctagtttcgcggtgtttgatgtcaacgccatccaagagccatggctaaaatttgaacatgaagatgatgagaaaccgccacgctccaccgtcttcgaccgtctcgacgaggatgatgatgatgatgatgatgatggtgatgacgctcctaaaacatgggaagaagtcagcaaatctctagaaactaaacttaaacctgccgccgttaaaccgccggaagtagactctgttaaacctccggcgactcctccacggcggcttccgcggaagagcgcatcgttccacacactggacgagcttgaagtgagggccaaaagaagcatcgccgcgcaaatcccgacgacaatggttaagcttaagagaaccgagtcgatgtccaagctaagacccgagtcagatgatcgaaccgagtccactcagtcgtcctactcggggcctcggtcagtgaaggagaacatattcgtcaagagagacagagaacggagggagaaagaagggaacaagaagccggtgatgaactgggacccacttagggagttcccggagaagtgtccgccgggaggaggggaaggtttgattgtctacacgacgtcgttgcaaggagtgcgtcgcacgtacgaggattgtatgcgtgtgagggccatcatggagcagcaaggagttgtggtggacgagagggacgtgtctttagacgccggagtcttgagcgagcttaaggagcttctccaagacgaagcatcagtggcgccgccgcgagtgtttgtgaaagggaggtacttgggaggagcagcggaagtgacagcgatgaatgagaacgggaagttagggagggtgttgcggtgggcacgtgtggagagagtaggggaggaagggaggctcacgtgtgaagggtgcggaggagcgaggtggttgccttgtttcgagtgcggcggaagctgtaaggtggcggcggttggggcggccaaaggtgaaaggtgggagaggtgtgtcaagtgtaatgagaatggattgattcgttgtcccgtgtgttttgttaattaagaacattattagtttacacaagcaaatagaggtgtgtcaaatatactttgtcccgtttgttttgttatatgtatgtgacacgtttgattttgtggaattgaaaatgatttg

SEQ ID NO: 81145 - protein, 368 aa, Arabidopsis thaliana
  peptide (1)..(368): Ceres Seq. ID no. 12658564
  misc_feature (213)..(301): Pfam Name: Glutaredoxin Pfam Description: Glutaredoxin
  misc_feature (1)..(368): Homolog of NCBI NO: 15217659 NR Description: peptide transporter, putative; protein id: supported by cDNA: gi_15810442, supported by cDNA: gi_17381051
  misc_feature (1)..(368): Homolog of NCBI NO: 17381052 NR Description: putative peptide transporter protein [Arabidopsis
  misc_feature (41)..(365): Homolog of NCBI NO: 34904420 NR Description: unnamed protein product [Oryza sativa (japonica group)] >gi|7339706|dbj|BAA92911.1| unnamed protein product
  misc_feature (156)..(365): Homolog of NCBI NO: 15235179 NR Description: putative protein; protein id: At4g10630.1
  misc_feature (88)..(365): Homolog of NCBI NO: 15223291 NR Description: unknown protein; protein id: At1g32760.1 thaliana] >gi|6714276|gb|AAF25972.1|AC017118_9 F6N18.14
  misc_feature (102)..(365): Homolog of NCBI NO: 32490043 NR Description: OSJNBa0063C18.3 [Oryza sativa (japonica
  misc_feature (197)..(365): Homolog of NCBI NO: 34899868 NR Description: OJ1714_H10.16 [Oryza sativa (japonica
  misc_feature (102)..(364): Homolog of NCBI NO: 10241626 NR Description: Contains similarity to F1N 19.7 [Oryza sativa
  misc_feature (205)..(365): Homolog of NCBI NO: 38346321 NR Description: OJ000126_13.3 [Oryza sativa (japonica
  misc_feature (199)..(365): Homolog of NCBI NO: 15240060 NR Description: putative protein; protein id: At5g06470.1 thaliana] >gi|9758427|dbj|BAB08969.1|
MGCTSSKQAKANVVADVYKPPPSSFAVFDVNAIQEPWLKFEHEDDEKPPRSTVFDRLDEDDDDDDDDGDDAPKTWEEVSKSLETKLKPAAVKPPEVDSVKPPATPPRRLPRKSASFHTLDELEVRAKRSIAAQIPTTMVKLKRTESMSKLRPESDDRTESTQSSYSGPRSVKENIFVKRDRERREKEGNKKPVMNWDPLREFPEKCPPGGGEGLIVYTTSLQGVRRTYEDCMRVRAIMEQQGVVVDERDVSLDAGVLSELKELLQDEASVAPPRVFVKGRYLGGAAEVTAMNENGKLGRVLRWARVERVGEEGRLTCEGCGGARWLPCFECGGSCKVAAVGAAKGERWERCVKCNENGLIRCPVCFVN

SEQ ID NO: 81146 - protein, 231 aa, Arabidopsis thaliana
  peptide (1)..(231): Ceres Seq. ID no. 12658565
  misc_feature (76)..(164): Pfam Name: Glutaredoxin Pfam Description: Glutaredoxin
  misc_feature (1)..(231): Homolog of NCBI NO: 15217659 NR Description: peptide transporter, putative; protein id: supported by cDNA: gi_15810442, supported by cDNA: gi_17381051
  misc_feature (1)..(231): Homolog of NCBI NO: 17381052 NR Description: putative peptide transporter protein [Arabidopsis
  misc_feature (1)..(228): Homolog of NCBI NO: 34904420 NR Description: unnamed protein product [Oryza sativa (japonica group)] >gi|7339706|dbj|BAA92911.1| unnamed protein product
  misc_feature (19)..(228): Homolog of NCBI NO: 15235179 NR Description: putative protein; protein id: At4g10630.1
  misc_feature (1)..(228): Homolog of NCBI NO: 15223291 NR Description: unknown protein; protein id: At1g32760.1 thaliana] >gi|6714276|gb|AAF25972.1|AC017118_9 F6N18.14
  misc_feature (1)..(228): Homolog of NCBI NO: 32490043 NR Description: OSJNBa0063C18.3 [Oryza sativa (japonica
  misc_feature (60)..(228): Homolog of NCBI NO: 34899868 NR Description: OJ1714_H10.16 [Oryza sativa (japonica
  misc_feature (1)..(227): Homolog of NCBI NO: 10241626 NR Description: Contains similarity to F1N 19.7 [Oryza sativa
  misc_feature (68)..(228): Homolog of NCBI NO: 38346321 NR Description: OJ000126_13.3 [Oryza sativa (japonica
  misc_feature (62)..(228): Homolog of NCBI NO: 15240060 NR Description: putative protein; protein id: At5g06470.1 thaliana] >gi|9758427|dbj|BAB08969.1|
MVKLKRTESMSKLRPESDDRTESTQSSYSGPRSVKENIFVKRDRERREKEGNKKPVMNWDPLREFPEKCPPGGGEGLIVYTTSLQGVRRTYEDCMRVRAIMEQQGVVVDERDVSLDAGVLSELKELLQDEASVAPPRVFVKGRYLGGAAEVTAMNENGKLGRVLRWARVERVGEEGRLTCEGCGGARWLPCFECGGSCKVAAVGAAKGERWERCVKCNENGLIRCPVCFVN

SEQ ID NO: 81147 - protein, 222 aa, Arabidopsis thaliana
  peptide (1)..(222): Ceres Seq. ID no. 12658566
  misc_feature (67)..(155): Pfam Name: Glutaredoxin Pfam Description: Glutaredoxin
  misc_feature (1)..(222): Homolog of NCBI NO: 15217659 NR Description: peptide transporter, putative; protein id: supported by cDNA: gi_15810442, supported by cDNA: gi_17381051
  misc_feature (1)..(222): Homolog of NCBI NO: 17381052 NR Description: putative peptide transporter protein [Arabidopsis
  misc_feature (1)..(219): Homolog of NCBI NO: 34904420 NR Description: unnamed protein product [Oryza sativa (japonica group)] >gi|7339706|dbj|BAA92911.1| unnamed protein product
  misc_feature (10)..(219): Homolog of NCBI NO: 15235179 NR Description: putative protein; protein id: At4g10630.1
  misc_feature (1)..(219): Homolog of NCBI NO: 15223291 NR Description: unknown protein; protein id: At1g32760.1 thaliana] >gi|6714276|gb|AAF25972.1|AC017118_9 F6N18.14
  misc_feature (1)..(219): Homolog of NCBI NO: 32490043 NR Description: OSJNBa0063C18.3 [Oryza sativa (japonica
  misc_feature (51)..(219): Homolog of NCBI NO: 34899868 NR Description: OJ1714_H10.16 [Oryza sativa (japonica
  misc_feature (1)..(218): Homolog of NCBI NO: 10241626 NR Description: Contains similarity to F1N 19.7 [Oryza sativa
  misc_feature (59)..(219): Homolog of NCBI NO: 38346321 NR Description: OJ000126_13.3 [Oryza sativa (japonica
  misc_feature (53)..(219): Homolog of NCBI NO: 15240060 NR Description: putative protein; protein id: At5g06470.1 thaliana] >gi|9758427|dbj|BAB08969.1|
MSKLRPESDDRTESTQSSYSGPRSVKENIFVKRDRERREKEGNKKPVMNWDPLREFPEKCPPGGGEGLIVYTTSLQGVRRTYEDCMRVRAIMEQQGVVVDERDVSLDAGVLSELKELLQDEASVAPPRVFVKGRYLGGAAEVTAMNENGKLGRVLRWARVERVGEEGRLTCEGCGGARWLPCFECGGSCKVAAVGAAKGERWERCVKCNENGLIRCPVCFVN

SEQ ID NO: 81148 - DNA, 3159 bp, Arabidopsis thaliana
  misc_feature (1)..(3159): Ceres Seq. ID no. 12658567
  misc_feature: MA Experiment ID: 20000171 Result: Down-regulated in Transcription
  misc_feature: MA Experiment 20000171 PARAMETER Experiment Name: At_42deg_Heat_P Parameter: Age (day) Value: 14
  misc_feature: MA Experiment 20000171 PARAMETER Experiment Name: At_42deg_Heat_P Parameter: Organism Value: A. thaliana
  misc_feature: MA Experiment 20000171 PARAMETER Experiment Name: At_42deg_Heat_P Parameter: Plant Line Value: WS
  misc_feature: MA Experiment 20000171 PARAMETER Experiment Name: At_42deg_Heat_P Parameter: Temperature (deg C) Value: 42 vs. 22
  misc_feature: MA Experiment 20000171 PARAMETER Experiment Name: At_42deg_Heat_P Parameter: Timepoint (hr) Value: 1
  misc_feature: MA Experiment 20000171 PARAMETER Experiment Name: At_42deg_Heat_P Parameter: Tissue Value: Aerial
  misc_feature: MA Experiment ID: 20000173 Result: Down-regulated in Transcription
  misc_feature: MA Experiment 20000173 PARAMETER Experiment Name: At_42deg_Heat_P Parameter: Age (day) Value: 14
  misc_feature: MA Experiment 20000173 PARAMETER Experiment Name: At_42deg_Heat_P Parameter: Organism Value: A. thaliana
  misc_feature: MA Experiment 20000173 PARAMETER Experiment Name: At_42deg_Heat_P Parameter: Plant Line Value: WS
  misc_feature: MA Experiment 20000173 PARAMETER Experiment Name: At_42deg_Heat_P Parameter: Temperature (deg C) Value: 42 vs. 22
  misc_feature: MA Experiment 20000173 PARAMETER Experiment Name: At_42deg_Heat_P Parameter: Timepoint (hr) Value: 6
  misc_feature: MA Experiment 20000173 PARAMETER Experiment Name: At_42deg_Heat_P Parameter: Tissue Value: Aerial
  misc_feature: MA Experiment ID: 20000437 Result: Down-regulated in Transcription
  misc_feature: MA Experiment 20000437 PARAMETER Experiment Name: At_Drought_P Parameter: Age (day) Value: 8
  misc_feature: MA Experiment 20000437 PARAMETER Experiment Name: At_Drought_P Parameter: Organism Value: A. thaliana
  misc_feature: MA Experiment 20000437 PARAMETER Experiment Name: At_Drought_P Parameter: Plant Line Value: WS
  misc_feature: MA Experiment 20000437 PARAMETER Experiment Name: At_Drought_P Parameter: Timepoint (hr) Value: 24
  misc_feature: MA Experiment 20000437 PARAMETER Experiment Name: At_Drought_P Parameter: Tissue Value: Whole Plant
  misc_feature: MA Experiment 20000437 PARAMETER Experiment Name: At_Drought_P Parameter: Treatment Value: Drought vs. No Drought
  misc_feature: MA Experiment ID: 20001451 Result: Down-regulated in Transcription
  misc_feature: MA Experiment 20001451 PARAMETER Experiment Name: At_Far-red-induction_P Parameter: Age (day) Value: 7
  misc_feature: MA Experiment 20001451 PARAMETER Experiment Name: At_Far-red-induction_P Parameter: Light Value: Far-red vs. White
  misc_feature: MA Experiment 20001451 PARAMETER Experiment Name: At_Far-red-induction_P Parameter: Organism Value: A. thaliana
  misc_feature: MA Experiment 20001451 PARAMETER Experiment Name: At_Far-red-induction_P Parameter: Plant Line Value: Columbia
  misc_feature: MA Experiment 20001451 PARAMETER Experiment Name: At_Far-red-induction_P Parameter: Timepoint (hr) Value: 24
  misc_feature: MA Experiment 20001451 PARAMETER Experiment Name: At_Far-red-induction_P Parameter: Tissue Value: Whole Plant
  misc_feature: MA Experiment ID: 20001558 Result: Up-regulated in Transcription
  misc_feature: MA Experiment 20001558 PARAMETER Experiment Name: At_Drought_Soil_Dry_P Parameter: Age (day) Value: 27
  misc_feature: MA Experiment 20001558 PARAMETER Experiment Name: At_Drought_Soil_Dry_P Parameter: Organism Value: A. thaliana
  misc_feature: MA Experiment 20001558 PARAMETER Experiment Name: At_Drought_Soil_Dry_P Parameter: Plant Line Value: WS
  misc_feature: MA Experiment 20001558 PARAMETER Experiment Name: At_Drought_Soil_Dry_P Parameter: Post Timepoint (hr) Value: 6
  misc_feature: MA Experiment 20001558 PARAMETER Experiment Name: At_Drought_Soil_Dry_P Parameter: Post-Treatment Value: Re-Water vs. No Drought
  misc_feature: MA Experiment 20001558 PARAMETER Experiment Name: At_Drought_Soil_Dry_P Parameter: Timepoint (day) Value: 13
  misc_feature: MA Experiment 20001558 PARAMETER Experiment Name: At_Drought_Soil_Dry_P Parameter: Treatment Value: Drought vs. No Drought
atgcggagattgattgtgacggggattgcgacatcgacggcgaagggatttcggagagtagttaaccctaaccttttaggaggaggagctgctgctagagctttttctgattaccgagagaaactgagaacagggtttcttcactctatcaggtttgaagatgcgtttgctttgttctttgagatggttcattctcaacccttaccttccattgttgatttcactagattacttactgccactgccaatttgagaagatatgagactgttatctatttctcccagaagatggaactctatggaatctcacacgatctctatagtttcaccattttgattcattgtttctgccgatgctctcgtctctcctttgctctatctgttcttggaaaaatgatgaaacttggttatgagcccagcattgtcacctttggctctctgctccatggattctgtctcgtgaatagaattggtgacgccttctctttagtcattttaatggttaaatcgggatatgagcctaatgttgtagtctacaacactcttattgacggtctctgcaagaacggtgaactgaatattgcgttggagcttctcaacgagatggagaagaaaggtctcggagccgatgttgttacatacaacactctcttaacaggtctttgttattctggtcgatggagcgacgcagctcgaatgctgagagatatgatgaagaggagtataaaccctgatgttgtcactttcactgcgttgatcgatgtatttgtgaaacaaggcaatcttgatgaggctcaagaattgtacaaggagatgatccaaagctctgttgatcctaataatgtcacttataattcaatcattaatgggctgtgcatgcacggtcgtctatatgacgccaagaaaacatttgatttgatggcaagcaagggttgcttccctaatgtggtgacatataacactctcattagtggattctgtaagtttaggatggtagatgaagggatgaaactcttccaaaggatgtcttgtgaaggattcaatgccgacatatttacttacaacactcttatccacggttattgtcaggtgggtaaacttagagttgccctagacatcttctgctggatggtttctcgtcgcgtgactcctgatatcataacccactgcattctgttacatggtctttgtgttaatggggagatcgaaagcgcactggtgaaattcgatgatatgagagaaagcgaaaagtatattggcattgttgcatataacatcatgattcacgggttgtgcaaggcggataaagtggaaaaagcttgggagttattttgtagactccctgtcgaaggagtgaagcctgatgctagaacatacactataatgatactaggtttatgtaagaatgggcctaggcgtgaagcggatgagctgattagaagaatgaaagaggaggggatcatatgtcaaatgaatgcggaagatgaccatctagaagagcatagctcaagtaataaggagataagccttggttcggcgcagagtttgagagagatttgggaaagaagcaaatcgaatccattttggatgcagagattaattccgatagcgttttcgtcatcggtgaaggggtttgttcgtcggcattatcttcttctggagagaggtaacaatcccgagacttctctctctcgatctttttccggtgcgagtcatcatcatcattacagagagagattgagaaatgagcttcactgtataaagtttgacgatgcatttagtttgttctgtgagatgcttcagtctcgtcccattcctagcattgttgatttcactagagttttgactgtcattgctaagatgaacaagtttgacattgtcatctatctctaccacaagatggagaatttgggaatctcacatgatctctatagcttcaccattctgattcattgtttctgccgatgctcacgactctctcttgctcttgctcttcttggaaaaatgatgaaacttgggtttcgtcccagcattgtcactcttggctctctcctcaacggtttctgtcaagggaatagatttcaggaggctgtttctctcgttgattcaatggatggattcggattcgttcctaatgttgtcatctacaacactgtcattaacggtctttgcaagaacagagatttgaataacgcactcgaggttttctactgtatggagaagaaaggaatcagagctgatgctgttacttacaacactctcataagtggtctttctaactctggtagatggaccgacgctgctcgacttctcagagatatggtgaagaggaaaatcgatcctaatgtgatatttttcactgcgctgatcgatacgtttgtgaaagagggtaaccttttagaggctagaaacttgtacaaggagatgatccgaagatctgtagttcctaatgttttcacttacaattcactcatcaatgggttttgcattcatggttgcttaggtgatgccaaatatatgtttgatctgatggtaagcaagggttgcttccctgatgttgtgacctataacactctcataacaggattttgtaagtctaagagggtagaagatgggatgaaactcttttgtgagatgacttatcaaggattggttggcgatgcattcacttacaacacgcttatccacggttattgtcaagcgggcaaacttaatgttgcacaaaaggttttcaataggatggttgattgtggtgtgtctcctgatattgttacctacaacatcttgttagattgtctatgtaataacgggaagatagagaaagcattagtgatggtagaggatctgcaaaagagtgaaatggatgttgatattattacatataatatcatcattcaagggttgtgtagaactgataagttgaaagaggcttggtgtttatttcgtagcctcactcgcaaaggagtgaagcctgatgctatagcatacattacaatgatatcaggcttgtgcaggaaaggcctacagcgtgaagcggacaagctgtgtagaagaatgaaagaagatgggtttatgccaagtgaacgcatatatgatgagacacttagagatcactacacaagcttatcagctgaactcatcaaagcagctcatgagtaa

SEQ ID NO: 81149 - protein, 1052 aa, Arabidopsis thaliana
  peptide (1)..(1052): Ceres Seq. ID no. 12658568
  misc_feature (819)..(853): Pfam Name: PPR repeat Pfam Description: PPR repeat
  misc_feature (55)..(1007): Homolog of NCBI NO: 15221621 NR Description: unknown protein; protein id: At1g62910.1
  misc_feature (96)..(1048): Homolog of NCBI NO: 6630464 NR Description: F23N19.4 [Arabidopsis thaliana]
  misc_feature (530)..(1026): Homolog of NCBI NO: 15221540 NR Description: hypothetical protein; protein id: At1g06580.1 thaliana] >gi|6692678|gb|AAF24812.1|AC007592_5 F12K11.8
  misc_feature (46)..(975): Homolog of NCBI NO: 15221621 NR Description: unknown protein; protein id: At1g62910.1
  misc_feature (24)..(475): Homolog of NCBI NO: 15221621 NR Description: unknown protein; protein id: At1g62910.1
  misc_feature (588)..(1007): Homolog of NCBI NO: 15221621 NR Description: unknown protein; protein id: At1g62910.1
  misc_feature (537)..(1028): Homolog of NCBI NO: 15237384 NR Description: putative protein; protein id: At5g16640.1 thaliana] >gi|10176973|dbj|BAB10191.1|
  misc_feature (508)..(1048): Homolog of NCBI NO: 6630464 NR Description: F23N19.4 [Arabidopsis thaliana]
  misc_feature (541)..(1048): Homolog of NCBI NO: 15221550 NR Description: PPR-repeat protein; protein id: At1g62680.1
  misc_feature (530)..(1026): Homolog of NCBI NO: 6630449 NR Description: F23N19.8 [Arabidopsis thaliana]
MRRLIVTGIATSTAKGFRRVVNPNLLGGGAAARAFSDYREKLRTGFLHSIRFEDAFALFFEMVHSQPLPSIVDFTRLLTATANLRRYETVIYFSQKMELYGISHDLYSFTILIHCFCRCSRLSFALSVLGKMMKLGYEPSIVTFGSLLHGFCLVNRIGDAFSLVILMVKSGYEPNVVVYNTLIDGLCKNGELNIALELLNEMEKKGLGADVVTYNTLLTGLCYSGRWSDAARMLRDMMKRSINPDVVTFTALIDVFVKQGNLDEAQELYKEMIQSSVDPNNVTYNSIINGLCMHGRLYDAKKTFDLMASKGCFPNVVTYNTLISGFCKFRMVDEGMKLFQRMSCEGFNADIFTYNTLIHGYCQVGKLRVALDIFCWMVSRRVTPDIITHCILLHGLCVNGEIESALVKFDDMRESEKYIGIVAYNIMIHGLCKADKVEKAWELFCRLPVEGVKPDARTYTIMILGLCKNGPRREADELIRRMKEEGIICQMNAEDDHLEEHSSSNKEISLGSAQSLREIWERSKSNPFWMQRLIPIAFSSSVKGFVRRHYLLLERGNNPETSLSRSFSGASHHHHYRERLRNELHCIKFDDAFSLFCEMLQSRPIPSIVDFTRVLTVIAKMNKFDIVIYLYHKMENLGISHDLYSFTILIHCFCRCSRLSLALALLGKMMKLGFRPSIVTLGSLLNGFCQGNRFQEAVSLVDSMDGFGFVPNVVIYNTVINGLCKNRDLNNALEVFYCMEKKGIRADAVTYNTLISGLSNSGRWTDAARLLRDMVKRKIDPNVIFFTALIDTFVKEGNLLEARNLYKEMIRRSVVPNVFTYNSLINGFCIHGCLGDAKYMFDLMVSKGCFPDVVTYNTLITGFCKSKRVEDGMKLFCEMTYQGLVGDAFTYNTLIHGYCQAGKLNVAQKVFNRMVDCGVSPDIVTYNILLDCLCNNGKIEKALVMVEDLQKSEMDVDIITYNIIIQGLCRTDKLKEAWCLFRSLTRKGVKPDAIAYITMISGLCRKGLQREADKLCRRMKEDGFMPSERIYDETLRDHYTSLSAELIKAAHE

SEQ ID NO: 81150 - protein, 991 aa, Arabidopsis thaliana
  peptide (1)..(991): Ceres Seq. ID no. 12658569
  misc_feature (758)..(792): Pfam Name: PPR repeat Pfam Description: PPR repeat
  misc_feature (1)..(946): Homolog of NCBI NO: 15221621 NR Description: unknown protein; protein id: At1g62910.1
  misc_feature (35)..(987): Homolog of NCBI NO: 6630464 NR Description: F23N19.4 [Arabidopsis thaliana]
  misc_feature (469)..(965): Homolog of NCBI NO: 15221540 NR Description: hypothetical protein; protein id: At1g06580.1 thaliana] >gi|6692678|gb|AAF24812.1|AC007592_5 F12K11.8
  misc_feature (1)..(914): Homolog of NCBI NO: 15221621 NR Description: unknown protein; protein id: At1g62910.1
  misc_feature (1)..(414): Homolog of NCBI NO: 15221621 NR Description: unknown protein; protein id: At1g62910.1
  misc_feature (527)..(946): Homolog of NCBI NO: 15221621 NR Description: unknown protein; protein id: At1g62910.1
  misc_feature (476)..(967): Homolog of NCBI NO: 15237384 NR Description: putative protein; protein id: At5g16640.1 thaliana] >gi|10176973|dbj|BAB10191.1|
  misc_feature (447)..(987): Homolog of NCBI NO: 6630464 NR Description: F23N19.4 [Arabidopsis thaliana]
  misc_feature (480)..(987): Homolog of NCBI NO: 15221550 NR Description: PPR-repeat protein; protein id: At1g62680.1
  misc_feature (469)..(965): Homolog of NCBI NO: 6630449 NR Description: F23N19.8 [Arabidopsis thaliana]
MVHSQPLPSIVDFTRLLTATANLRRYETVIYFSQKMELYGISHDLYSFTILIHCFCRCSRLSFALSVLGKMMKLGYEPSIVTFGSLLHGFCLVNRIGDAFSLVILMVKSGYEPNVVVYNTLIDGLCKNGELNIALELLNEMEKKGLGADVVTYNTLLTGLCYSGRWSDAARMLRDMMKRSINPDVVTFTALIDVFVKQGNLDEAQELYKEMIQSSVDPNNVTYNSIINGLCMHGRLYDAKKTFDLMASKGCFPNVVTYNTLISGFCKFRMVDEGMKLFQRMSCEGFNADIFTYNTLIHGYCQVGKLRVALDIFCWMVSRRVTPDIITHCILLHGLCVNGEIESALVKFDDMRESEKYIGIVAYNIMIHGLCKADKVEKAWELFCRLPVEGVKPDARTYTIMILGLCKNGPRREADELIRRMKEEGIICQMNAEDDHLEEHSSSNKEISLGSAQSLREIWERSKSNPFWMQRLIPIAFSSSVKGFVRRHYLLLERGNNPETSLSRSFSGASHHHHYRERLRNELHCIKFDDAFSLFCEMLQSRPIPSIVDFTRVLTVIAKMNKFDIVIYLYHKMENLGISHDLYSFTILIHCFCRCSRLSLALALLGKMMKLGFRPSIVTLGSLLNGFCQGNRFQEAVSLVDSMDGFGFVPNVVIYNTVINGLCKNRDLNNALEVFYCMEKKGIRADAVTYNTLISGLSNSGRWTDAARLLRDMVKRKIDPNVIFFTALIDTFVKEGNLLEARNLYKEMIRRSVVPNVFTYNSLINGFCIHGCLGDAKYMFDLMVSKGCFPDVVTYNTLITGFCKSKRVEDGMKLFCEMTYQGLVGDAFTYNTLIHGYCQAGKLNVAQKVFNRMVDCGVSPDIVTYNILLDCLCNNGKIEKALVMVEDLQKSEMDVDIITYNIIIQGLCRTDKLKEAWCLFRSLTRKGVKPDAIAYITMISGLCRKGLQREADKLCRRMKEDGFMPSERIYDETLRDHYTSLSAELIKAAHE

SEQ ID NO: 81151 - protein, 956 aa, Arabidopsis thaliana
  peptide (1)..(956): Ceres Seq. ID no. 12658570
  misc_feature (723)..(757): Pfam Name: PPR repeat Pfam Description: PPR repeat
  misc_feature (1)..(911): Homolog of NCBI NO: 15221621 NR Description: unknown protein; protein id: At1g62910.1
  misc_feature (1)..(952): Homolog of NCBI NO: 6630464 NR Description: F23N19.4 [Arabidopsis thaliana]
  misc_feature (434)..(930): Homolog of NCBI NO: 15221540 NR Description: hypothetical protein; protein id: At1g06580.1 thaliana] >gi|6692678|gb|AAF24812.1|AC007592_5 F12K11.8
  misc_feature (1)..(879): Homolog of NCBI NO: 15221621 NR Description: unknown protein; protein id: At1g62910.1
  misc_feature (1)..(379): Homolog of NCBI NO: 15221621 NR Description: unknown protein; protein id: At1g62910.1
  misc_feature (492)..(911): Homolog of NCBI NO: 15221621 NR Description: unknown protein; protein id: At1g62910.1
  misc_feature (441)..(932): Homolog of NCBI NO: 15237384 NR Description: putative protein; protein id: At5g16640.1 thaliana] >gi|10176973|dbj|BAB10191.1|
  misc_feature (412)..(952): Homolog of NCBI NO: 6630464 NR Description: F23N19.4 [Arabidopsis thaliana]
  misc_feature (445)..(952): Homolog of NCBI NO: 15221550 NR Description: PPR-repeat protein; protein id: At1g62680.1
  misc_feature (434)..(930): Homolog of NCBI NO: 6630449 NR Description: F23N19.8 [Arabidopsis thaliana]
MELYGISHDLYSFTILIHCFCRCSRLSFALSVLGKMMKLGYEPSIVTFGSLLHGFCLVNRIGDAFSLVILMVKSGYEPNVVVYNTLIDGLCKNGELNIALELLNEMEKKGLGADVVTYNTLLTGLCYSGRWSDAARMLRDMMKRSINPDVVTFTALIDVFVKQGNLDEAQELYKEMIQSSVDPNNVTYNSIINGLCMHGRLYDAKKTFDLMASKGCFPNVVTYNTLISGFCKFRMVDEGMKLFQRMSCEGFNADIFTYNTLIHGYCQVGKLRVALDIFCWMVSRRVTPDIITHCILLHGLCVNGEIESALVKFDDMRESEKYIGIVAYNIMIHGLCKADKVEKAWELFCRLPVEGVKPDARTYTIMILGLCKNGPRREADELIRRMKEEGIICQMNAEDDHLEEHSSSNKEISLGSAQSLREIWERSKSNPFWMQRLIPIAFSSSVKGFVRRHYLLLERGNNPETSLSRSFSGASHHHHYRERLRNELHCIKFDDAFSLFCEMLQSRPIPSIVDFTRVLTVIAKMNKFDIVIYLYHKMENLGISHDLYSFTILIHCFCRCSRLSLALALLGKMMKLGFRPSIVTLGSLLNGFCQGNRFQEAVSLVDSMDGFGFVPNVVIYNTVINGLCKNRDLNNALEVFYCMEKKGIRADAVTYNTLISGLSNSGRWTDAARLLRDMVKRKIDPNVIFFTALIDTFVKEGNLLEARNLYKEMIRRSVVPNVFTYNSLINGFCIHGCLGDAKYMFDLMVSKGCFPDVVTYNTLITGFCKSKRVEDGMKLFCEMTYQGLVGDAFTYNTLIHGYCQAGKLNVAQKVFNRMVDCGVSPDIVTYNILLDCLCNNGKIEKALVMVEDLQKSEMDVDIITYNIIIQGLCRTDKLKEAWCLFRSLTRKGVKPDAIAYITMISGLCRKGLQREADKLCRRMKEDGFMPSERIYDETLRDHYTSLSAELIKAAHE

SEQ ID NO: 81152 - DNA, 709 bp, Arabidopsis thaliana
  misc_feature (1)..(709): Ceres Seq. ID no. 12658575
  misc_feature: MA Experiment ID: 20000184 Result: Up-regulated in Transcription
  misc_feature: MA Experiment 20000184 PARAMETER Experiment Name: At_Shoots__P Parameter: Age (day) Value: 7
  misc_feature: MA Experiment 20000184 PARAMETER Experiment Name: At_Shoots__P Parameter: Tissue Value: Shoots vs. Whole Plant
  misc_feature: MA Experiment ID: 20000234 Result: Up-regulated in Transcription
  misc_feature: MA Experiment 20000234 PARAMETER Experiment Name: At_Siliques_P Parameter: Age (day) Value: 21
  misc_feature: MA Experiment 20000234 PARAMETER Experiment Name: At_Siliques_P Parameter: Organism Value: A. thaliana
  misc_feature: MA Experiment 20000234 PARAMETER Experiment Name: At_Siliques_P Parameter: Plant Line Value: WS
  misc_feature: MA Experiment 20000234 PARAMETER Experiment Name: At_Siliques_P Parameter: Tissue Value: Less Than 5mm Siliques vs. Whole Plant
  misc_feature: MA Experiment ID: 20000439 Result: Up-regulated in Transcription
  misc_feature: MA Experiment 20000439 PARAMETER Experiment Name: At_Roots__P Parameter: Age (day) Value: 14 vs. 21
  misc_feature: MA Experiment 20000439 PARAMETER Experiment Name: At_Roots__P Parameter: Organism Value: A. thaliana
  misc_feature: MA Experiment 20000439 PARAMETER Experiment Name: At_Roots__P Parameter: Tissue Value: Roots vs. Whole Plant
atcggaatccctagaacactcgatttcagcaaaatcaaatcggattcagtgatcaaaagtcaatttggtcgagaagaaattgagcgttgaagatgacggaggcgatgataagaaataagccaggaatggcgagtgtgaaggatatgccgctgcttcaggatggtccgccaccgggtgggttcgcaccggtccgatatgcccgccggatatccaatacgggtcctagtgcaatggccatgttccttgccgtttctggtgcctttgcttggggaatgtaccaggtcggccagggaaacaaaatccgcagggcattgaaggaagagaaatatgctgctcgtagaacaatacttcccattcttcaagcagaagaagatgaaaggtttgtgtctgagtggaaaaagtatctggaatatgaggctgatgtaatgaaagatgttccgggatggaaagttggcgagaatgtgtacaattctggtcgctggatgcctccggctactggggaactccgtcctgatgtgtggtgatttcctagtttctctcaaatgcatatgatgatgatgaatgatgtttcgctgaggattgatatgttcttgttatatctttttttcttcgggtaataagagaatgattcaacagacagtattcttcttgtattggttttctcttaagtgtttcaatcgtaatatgaggcaaaaacagtttcatgatt

SEQ ID NO: 81153 - protein, 143 aa, Arabidopsis thaliana; identical to SEQ ID NO: 21859
  peptide (1)..(143): Ceres Seq. ID no. 12658576
  misc_feature (16)..(141): Pfam Name: GRIM-19 protein Pfam Description: GRIM-19 protein
  misc_feature (1)..(143): Homolog of NCBI NO: 20260652 NR Description: unknown protein [Arabidopsis thaliana]
  misc_feature (1)..(141): Homolog of NCBI NO: 25406799 NR Description: hypothetical protein [imported] - Arabidopsis >gi|2494128|gb|AAB80637.1| EST gb|T43244 comes from this gene.
  misc_feature (1)..(142): Homolog of NCBI NO: 15219769 NR Description: unknown protein; protein id: At1g04630.1
  misc_feature (1)..(143): Homolog of NCBI NO: 18403216 NR Description: expressed protein; protein id: At2g33220.1, by cDNA: 954., supported by cDNA: gi_17529029, supported by cDNA: [Arabidopsis thaliana] >gi|25408250|pir||G84742
  misc_feature (1)..(139): Homolog of NCBI NO: 16973316 NR Description: F6 [Gossypium hirsutum]
  misc_feature (1)..(72): Homolog of NCBI NO: 26451954 NR Description: unknown protein [Arabidopsis thaliana]
  misc_feature (1)..(140): Homolog of NCBI NO: 34334020 NR Description: NADH:ubiquinone oxidoreductase B16.6 subunit
  misc_feature (1)..(138): Homolog of NCBI NO: 21361822 NR Description: cell death-regulatory protein GRIM19; CGI-39 [Homo sapiens] >gi|12005918|gb|AAG44670.1|AF261134_1 CDA016 [Homo
  misc_feature (22)..(138): Homolog of NCBI NO: 28603804 NR Description: cell death-regulatory protein GRIM19 [Bos taurus]
  misc_feature (13)..(138): Homolog of NCBI NO: 34809544 NR Description: GRIM19 protein [Homo sapiens]

SEQ ID NO: 81154 - protein, 139 aa, Arabidopsis thaliana; identical to SEQ ID NO: 21860
  peptide (1)..(139): Ceres Seq. ID no. 12658577
  misc_feature (12)..(137): Pfam Name: GRIM-19 protein Pfam Description: GRIM-19 protein
  misc_feature (1)..(139): Homolog of NCBI NO: 20260652 NR Description: unknown protein [Arabidopsis thaliana]
  misc_feature (1)..(137): Homolog of NCBI NO: 25406799 NR Description: hypothetical protein [imported] - Arabidopsis >gi|2494128|gb|AAB80637.1| EST gb|T43244 comes from this gene.
  misc_feature (1)..(138): Homolog of NCBI NO: 15219769 NR Description: unknown protein; protein id: At1g04630.1
  misc_feature (1)..(139): Homolog of NCBI NO: 18403216 NR Description: expressed protein; protein id: At2g33220.1, by cDNA: 954., supported by cDNA: gi_17529029, supported by cDNA: [Arabidopsis thaliana] >gi|25408250|pir||G84742
  misc_feature (1)..(135): Homolog of NCBI NO: 16973316 NR Description: F6 [Gossypium hirsutum]
  misc_feature (1)..(68): Homolog of NCBI NO: 26451954 NR Description: unknown protein [Arabidopsis thaliana]
  misc_feature (1)..(136): Homolog of NCBI NO: 34334020 NR Description: NADH:ubiquinone oxidoreductase B16.6 subunit
  misc_feature (1)..(134): Homolog of NCBI NO: 21361822 NR Description: cell death-regulatory protein GRIM19; CGI-39 [Homo sapiens] >gi|12005918|gb|AAG44670.1|AF261134_1 CDA016 [Homo
  misc_feature (18)..(134): Homolog of NCBI NO: 28603804 NR Description: cell death-regulatory protein GRIM19 [Bos taurus]
  misc_feature (9)..(134): Homolog of NCBI NO: 34809544 NR Description: GRIM19 protein [Homo sapiens]

SEQ ID NO: 81155 - protein, 132 aa, Arabidopsis thaliana; identical to SEQ ID NO: 21861
  peptide (1)..(132): Ceres Seq. ID no. 12658578
  misc_feature (5)..(130): Pfam Name: GRIM-19 protein Pfam Description: GRIM-19 protein
  misc_feature (1)..(132): Homolog of NCBI NO: 20260652 NR Description: unknown protein [Arabidopsis thaliana]
  misc_feature (1)..(130): Homolog of NCBI NO: 25406799 NR Description: hypothetical protein [imported] - Arabidopsis >gi|2494128|gb|AAB80637.1| EST gb|T43244 comes from this gene.
  misc_feature (1)..(131): Homolog of NCBI NO: 15219769 NR Description: unknown protein; protein id: At1g04630.1
  misc_feature (1)..(132): Homolog of NCBI NO: 18403216 NR Description: expressed protein; protein id: At2g33220.1, by cDNA: 954., supported by cDNA: gi_17529029, supported by cDNA: [Arabidopsis thaliana] >gi|25408250|pir||G84742
  misc_feature (1)..(128): Homolog of NCBI NO: 16973316 NR Description: F6 [Gossypium hirsutum]
  misc_feature (1)..(61): Homolog of NCBI NO: 26451954 NR Description: unknown protein [Arabidopsis thaliana]
  misc_feature (1)..(129): Homolog of NCBI NO: 34334020 NR Description: NADH:ubiquinone oxidoreductase B16.6 subunit
  misc_feature (1)..(127): Homolog of NCBI NO: 21361822 NR Description: cell death-regulatory protein GRIM19; CGI-39 [Homo sapiens] >gi|12005918|gb|AAG44670.1|AF261134_1 CDA016 [Homo
  misc_feature (11)..(127): Homolog of NCBI NO: 28603804 NR Description: cell death-regulatory protein GRIM19 [Bos taurus]
  misc_feature (2)..(127): Homolog of NCBI NO: 34809544 NR Description: GRIM19 protein [Homo sapiens]

SEQ ID NO: 81156 - DNA, 1175 bp, Arabidopsis thaliana
  misc_feature (1)..(1175): Ceres Seq. ID no. 12658599
  misc_feature: MA Experiment ID: 108434 Result: Down-regulated in Transcription
  misc_feature: MA Experiment 108434 PARAMETER Experiment Name: At_Root_Tips_cDNA_P Parameter: Tissue Value: Root Tips
  misc_feature: MA Experiment ID: 108435 Result: Down-regulated in Transcription
  misc_feature: MA Experiment 108435 PARAMETER Experiment Name: At_stm_Mutants_cDNA_P Parameter: Plant Line Value: wt Landsburg vs stm
  misc_feature: MA Experiment 108435 PARAMETER Experiment Name: At_stm_Mutants_cDNA_P Parameter: Tissue Value: Shoot Apical Meristem Region
  misc_feature: MA Experiment ID: 108461 Result: Up-regulated in Transcription
  misc_feature: MA Experiment 108461 PARAMETER Experiment Name: At_Germinating_Seeds_cDNA_P Parameter: Age (day) Value: 1 vs. 0
  misc_feature: MA Experiment 108461 PARAMETER Experiment Name: At_Germinating_Seeds_cDNA_P Parameter: Tissue Value: Germinating Seeds
  misc_feature: MA Experiment ID: 108462 Result: Up-regulated in Transcription
  misc_feature: MA Experiment 108462 PARAMETER Experiment Name: At_Germinating_Seeds_cDNA_P Parameter: Age (day) Value: 2 vs. 0
  misc_feature: MA Experiment 108462 PARAMETER Experiment Name: At_Germinating_Seeds_cDNA_P Parameter: Tissue Value: Germinating Seeds
  misc_feature: MA Experiment ID: 108463 Result: Up-regulated in Transcription
  misc_feature: MA Experiment 108463 PARAMETER Experiment Name: At_Germinating_Seeds_cDNA_P Parameter: Age (day) Value: 3 vs. 0
  misc_feature: MA Experiment 108463 PARAMETER Experiment Name: At_Germinating_Seeds_cDNA_P Parameter: Tissue Value: Germinating Seeds
  misc_feature: MA Experiment ID: 108464 Result: Up-regulated in Transcription
  misc_feature: MA Experiment 108464 PARAMETER Experiment Name: At_Germinating_Seeds_cDNA_P Parameter: Age (day) Value: 4 vs. 0
  misc_feature: MA Experiment 108464 PARAMETER Experiment Name: At_Germinating_Seeds_cDNA_P Parameter: Tissue Value: Germinating Seeds
  misc_feature: MA Experiment ID: 108469 Result: Up-regulated in Transcription
  misc_feature: MA Experiment ID: 108488 Result: Down-regulated in Transcription
  misc_feature: MA Experiment ID: 108573 Result: Down-regulated in Transcription
  misc_feature: MA Experiment 108573 PARAMETER Experiment Name: At_Drought_cDNA_P Parameter: Timepoint (hr) Value: 6
  misc_feature: MA Experiment 108573 PARAMETER Experiment Name: At_Drought_cDNA_P Parameter: Tissue Value: Aerial
  misc_feature: MA Experiment 108573 PARAMETER Experiment Name: At_Drought_cDNA_P Parameter: Treatment Value: Drought vs. No Drought
  misc_feature: MA Experiment ID: 108577 Result: Down-regulated in Transcription
  misc_feature: MA Experiment 108577 PARAMETER Experiment Name: At_42deg_Heat_cDNA_P Parameter: Temperature (deg C) Value: 42 vs. 22
  misc_feature: MA Experiment 108577 PARAMETER Experiment Name: At_42deg_Heat_cDNA_P Parameter: Timepoint (hr) Value: 6
  misc_feature: MA Experiment 108577 PARAMETER Experiment Name: At_42deg_Heat_cDNA_P Parameter: Tissue Value: Aerial
  misc_feature: MA Experiment ID: 108594 Result: Down-regulated in Transcription
  misc_feature: MA Experiment 108594 PARAMETER Experiment Name: At_Ler-rhl_Root_cDNA_P Parameter: Plant Line Value: null
  misc_feature: MA Experiment ID: 108595 Result: Down-regulated in Transcription
  misc_feature: MA Experiment 108595 PARAMETER Experiment Name: At_Ler-pi_Ovule_cDNA_P Parameter: Plant Line Value: null
  misc_feature: MA Experiment ID: 108668 Result: Up-regulated in Transcription
  misc_feature: MA Experiment 108668 PARAMETER Experiment Name: At_2mM_SA_cDNA_P Parameter: Plant Line Value: WS
  misc_feature: MA Experiment 108668 PARAMETER Experiment Name: At_2mM_SA_cDNA_P Parameter: Timepoint (hr) Value: 6
  misc_feature: MA Experiment 108668 PARAMETER Experiment Name: At_2mM_SA_cDNA_P Parameter: Treatment Value: 2mM SA vs. No Treatment
  misc_feature: MA Experiment ID: 20000088 Result: Up-regulated in Transcription
  misc_feature: MA Experiment 20000088 PARAMETER Experiment Name: At_100uM_ABA_Mutants_cDNA_P Parameter: Plant Line Value: Landsberg
  misc_feature: MA Experiment 20000088 PARAMETER Experiment Name: At_100uM_ABA_Mutants_cDNA_P Parameter: Timepoint (hr) Value: 6
  misc_feature: MA Experiment 20000088 PARAMETER Experiment Name: At_100uM_ABA_Mutants_cDNA_P Parameter: Tissue Value: Aerial
  misc_feature: MA Experiment 20000088 PARAMETER Experiment Name: At_100uM_ABA_Mutants_cDNA_P Parameter: Treatment Value: 100uM ABA vs. No Treatment
  misc_feature: MA Experiment ID: 20000113 Result: Down-regulated in Transcription
  misc_feature: MA Experiment 20000113 PARAMETER Experiment Name: At_42deg_Heat_cDNA_P Parameter: Temperature (deg C) Value: 42 vs. 22
  misc_feature: MA Experiment 20000113 PARAMETER Experiment Name: At_42deg_Heat_cDNA_P Parameter: Timepoint (hr) Value: 8
  misc_feature: MA Experiment 20000113 PARAMETER Experiment Name: At_42deg_Heat_cDNA_P Parameter: Tissue Value: Aerial
  misc_feature: MA Experiment ID: 20000173 Result: Down-regulated in Transcription
  misc_feature: MA Experiment 20000173 PARAMETER Experiment Name: At_42deg_Heat_P Parameter: Age (day) Value: 14
  misc_feature: MA Experiment 20000173 PARAMETER Experiment Name: At_42deg_Heat_P Parameter: Organism Value: A. thaliana
  misc_feature: MA Experiment 20000173 PARAMETER Experiment Name: At_42deg_Heat_P Parameter: Plant Line Value: WS
  misc_feature: MA Experiment 20000173 PARAMETER Experiment Name: At_42deg_Heat_P Parameter: Temperature (deg C) Value: 42 vs. 22
  misc_feature: MA Experiment 20000173 PARAMETER Experiment Name: At_42deg_Heat_P Parameter: Timepoint (hr) Value: 6
  misc_feature: MA Experiment 20000173 PARAMETER Experiment Name: At_42deg_Heat_P Parameter: Tissue Value: Aerial
  misc_feature: MA Experiment ID: 20000179 Result: Down-regulated in Transcription
  misc_feature: MA Experiment 20000179 PARAMETER Experiment Name: At_Germinating_Seeds_P Parameter: Age (hr) Value: 6 vs. 0
  misc_feature: MA Experiment 20000179 PARAMETER Experiment Name: At_Germinating_Seeds_P Parameter: Tissue Value: Germinating Seeds
  misc_feature: MA Experiment ID: 20000180 Result: Up-regulated in Transcription
  misc_feature: MA Experiment 20000180 PARAMETER Experiment Name: At_Germinating_Seeds_P Parameter: Age (hr) Value: 24 vs. 0
  misc_feature: MA Experiment 20000180 PARAMETER Experiment Name: At_Germinating_Seeds_P Parameter: Tissue Value: Germinating Seeds
  misc_feature: MA Experiment ID: 20000182 Result: Up-regulated in Transcription
  misc_feature: MA Experiment 20000182 PARAMETER Experiment Name: At_2mM_SA_P Parameter: Age (day) Value: 14
  misc_feature: MA Experiment 20000182 PARAMETER Experiment Name: At_2mM_SA_P Parameter: Organism Value: A. thaliana
  misc_feature: MA Experiment 20000182 PARAMETER Experiment Name: At_2mM_SA_P Parameter: Plant Line Value: WS
  misc_feature: MA Experiment 20000182 PARAMETER Experiment Name: At_2mM_SA_P Parameter: Timepoint (hr) Value: 6
  misc_feature: MA Experiment 20000182 PARAMETER Experiment Name: At_2mM_SA_P Parameter: Tissue Value: Aerial
  misc_feature: MA Experiment 20000182 PARAMETER Experiment Name: At_2mM_SA_P Parameter: Treatment Value: 2mM SA vs. No Treatment
  misc_feature: MA Experiment ID: 20000184 Result: Up-regulated in Transcription
  misc_feature: MA Experiment 20000184 PARAMETER Experiment Name: At_Shoots__P Parameter: Age (day) Value: 7
  misc_feature: MA Experiment 20000184 PARAMETER Experiment Name: At_Shoots__P Parameter: Tissue Value: Shoots vs. Whole Plant
  misc_feature: MA Experiment ID: 20000234 Result: Down-regulated in Transcription
  misc_feature: MA Experiment 20000234 PARAMETER Experiment Name: At_Siliques_P Parameter: Age (day) Value: 21
  misc_feature: MA Experiment 20000234 PARAMETER Experiment Name: At_Siliques_P Parameter: Organism Value: A. thaliana
  misc_feature: MA Experiment 20000234 PARAMETER Experiment Name: At_Siliques_P Parameter: Plant Line Value: WS
  misc_feature: MA Experiment 20000234 PARAMETER Experiment Name: At_Siliques_P Parameter: Tissue Value: Less Than 5mm Siliques vs. Whole Plant
  misc_feature: MA Experiment ID: 20000264 Result: Down-regulated in Transcription
  misc_feature: MA Experiment 20000264 PARAMETER Experiment Name: At_Open_Flower_P Parameter: Age (day) Value: 21
  misc_feature: MA Experiment 20000264 PARAMETER Experiment Name: At_Open_Flower_P Parameter: Plant Line Value: WS
  misc_feature: MA Experiment 20000264 PARAMETER Experiment Name: At_Open_Flower_P Parameter: Tissue Value: Open Flower vs. Whole Plant
  misc_feature: MA Experiment ID: 20000265 Result: Down-regulated in Transcription
  misc_feature: MA Experiment 20000265 PARAMETER Experiment Name: At_Open_Flower_P Parameter: Age (day) Value: 21
  misc_feature: MA Experiment 20000265 PARAMETER Experiment Name: At_Open_Flower_P Parameter: Plant Line Value: WS
  misc_feature: MA Experiment 20000265 PARAMETER Experiment Name: At_Open_Flower_P Parameter: Tissue Value: Closed Flower vs. Whole Plant
  misc_feature: MA Experiment ID: 20000286 Result: Down-regulated in Transcription
  misc_feature: MA Experiment 20000286 PARAMETER Experiment Name: At_Open_Flower_P Parameter: Age (day) Value: 21
  misc_feature: MA Experiment 20000286 PARAMETER Experiment Name: At_Open_Flower_P Parameter: Plant Line Value: WS
  misc_feature: MA Experiment 20000286 PARAMETER Experiment Name: At_Open_Flower_P Parameter: Tissue Value: Half Open vs. Whole Plant
  misc_feature: MA Experiment ID: 20000436 Result: Down-regulated in Transcription
  misc_feature: MA Experiment 20000436 PARAMETER Experiment Name: At_Drought_P Parameter: Age (day) Value: 7
  misc_feature: MA Experiment 20000436 PARAMETER Experiment Name: At_Drought_P Parameter: Organism Value: A. thaliana
  misc_feature: MA Experiment 20000436 PARAMETER Experiment Name: At_Drought_P Parameter: Plant Line Value: WS
  misc_feature: MA Experiment 20000436 PARAMETER Experiment Name: At_Drought_P Parameter: Timepoint (hr) Value: 12
  misc_feature: MA Experiment 20000436 PARAMETER Experiment Name: At_Drought_P Parameter: Tissue Value: Whole Plant
  misc_feature: MA Experiment 20000436 PARAMETER Experiment Name: At_Drought_P Parameter: Treatment Value: Drought vs. No Drought
  misc_feature: MA Experiment ID: 20000437 Result: Down-regulated in Transcription
  misc_feature: MA Experiment 20000437 PARAMETER Experiment Name: At_Drought_P Parameter: Age (day) Value: 8
  misc_feature: MA Experiment 20000437 PARAMETER Experiment Name: At_Drought_P Parameter: Organism Value: A. thaliana
  misc_feature: MA Experiment 20000437 PARAMETER Experiment Name: At_Drought_P Parameter: Plant Line Value: WS
  misc_feature: MA Experiment 20000437 PARAMETER Experiment Name: At_Drought_P Parameter: Timepoint (hr) Value: 24
  misc_feature: MA Experiment 20000437 PARAMETER Experiment Name: At_Drought_P Parameter: Tissue Value: Whole Plant
  misc_feature: MA Experiment 20000437 PARAMETER Experiment Name: At_Drought_P Parameter: Treatment Value: Drought vs. No Drought
  misc_feature: MA Experiment ID: 20000438 Result: Up-regulated in Transcription
  misc_feature: MA Experiment 20000438 PARAMETER Experiment Name: At_Shoots__P Parameter: Age (day) Value: 14
  misc_feature: MA Experiment 20000438 PARAMETER Experiment Name: At_Shoots__P Parameter: Tissue Value: Shoots vs. Whole Plant
  misc_feature: MA Experiment ID: 20000439 Result: Down-regulated in Transcription
  misc_feature: MA Experiment 20000439 PARAMETER Experiment Name: At_Roots__P Parameter: Age (day) Value: 14 vs. 21
  misc_feature: MA Experiment 20000439 PARAMETER Experiment Name: At_Roots__P Parameter: Organism Value: A. thaliana
  misc_feature: MA Experiment 20000439 PARAMETER Experiment Name: At_Roots__P Parameter: Tissue Value: Roots vs. Whole Plant
  misc_feature: MA Experiment ID: 20000441 Result: Up-regulated in Transcription
  misc_feature: MA Experiment 20000441 PARAMETER Experiment Name: At_1uM_BR-BRZ__P Parameter: Tissue Value: Shoot Apices
  misc_feature: MA Experiment 20000441 PARAMETER Experiment Name: At_1uM_BR-BRZ__P Parameter: Treatment Value: 1uM BR vs. No Treatment
  misc_feature: MA Experiment ID: 20000527 Result: Down-regulated in Transcription
  misc_feature: MA Experiment 20000527 PARAMETER Experiment Name: At_10percent_PEG_P Parameter: Age (day) Value: 20
  misc_feature: MA Experiment 20000527 PARAMETER Experiment Name: At_10percent_PEG_P Parameter: Organism Value: A. thaliana
  misc_feature: MA Experiment 20000527 PARAMETER Experiment Name: At_10percent_PEG_P Parameter: Plant Line Value: WS
  misc_feature: MA Experiment 20000527 PARAMETER Experiment Name: At_10percent_PEG_P Parameter: Timepoint (day) Value: 20
  misc_feature: MA Experiment 20000527 PARAMETER Experiment Name: At_10percent_PEG_P Parameter: Tissue Value: Whole Plant
  misc_feature: MA Experiment 20000527 PARAMETER Experiment Name: At_10percent_PEG_P Parameter: Treatment Value: 10percent PEG vs. No Treatment
  misc_feature: MA Experiment ID: 20001248 Result: Up-regulated in Transcription
  misc_feature: MA Experiment 20001248 PARAMETER Experiment Name: At_Far-red-induction_P Parameter: Age (day) Value: 7
  misc_feature: MA Experiment 20001248 PARAMETER Experiment Name: At_Far-red-induction_P Parameter: Light Value: Far-red vs. White
  misc_feature: MA Experiment 20001248 PARAMETER Experiment Name: At_Far-red-induction_P Parameter: Organism Value: A. thaliana
  misc_feature: MA Experiment 20001248 PARAMETER Experiment Name: At_Far-red-induction_P Parameter: Plant Line Value: Columbia
  misc_feature: MA Experiment 20001248 PARAMETER Experiment Name: At_Far-red-induction_P Parameter: Timepoint (hr) Value: 4
  misc_feature: MA Experiment 20001248 PARAMETER Experiment Name: At_Far-red-induction_P Parameter: Tissue Value: Whole Plant
  misc_feature: MA Experiment ID: 20001554 Result: Down-regulated in Transcription
  misc_feature: MA Experiment 20001554 PARAMETER Experiment Name: At_Drought_Soil_Dry_P Parameter: Age (day) Value: 21
  misc_feature: MA Experiment 20001554 PARAMETER Experiment Name: At_Drought_Soil_Dry_P Parameter: Organism Value: A. thaliana
  misc_feature: MA Experiment 20001554 PARAMETER Experiment Name: At_Drought_Soil_Dry_P Parameter: Plant Line Value: WS
  misc_feature: MA Experiment 20001554 PARAMETER Experiment Name: At_Drought_Soil_Dry_P Parameter: Post Timepoint (hr) Value: None
  misc_feature: MA Experiment 20001554 PARAMETER Experiment Name: At_Drought_Soil_Dry_P Parameter: Post-Treatment Value: None
  misc_feature: MA Experiment 20001554 PARAMETER Experiment Name: At_Drought_Soil_Dry_P Parameter: Timepoint (day) Value: 7
  misc_feature: MA Experiment 20001554 PARAMETER Experiment Name: At_Drought_Soil_Dry_P Parameter: Treatment Value: Drought vs. No Drought
  misc_feature: MA Experiment ID: 20001555 Result: Down-regulated in Transcription
  misc_feature: MA Experiment 20001555 PARAMETER Experiment Name: At_Drought_Soil_Dry_P Parameter: Age (day) Value: 24
  misc_feature: MA Experiment 20001555 PARAMETER Experiment Name: At_Drought_Soil_Dry_P Parameter: Organism Value: A. thaliana
  misc_feature: MA Experiment 20001555 PARAMETER Experiment Name: At_Drought_Soil_Dry_P Parameter: Plant Line Value: WS
  misc_feature: MA Experiment 20001555 PARAMETER Experiment Name: At_Drought_Soil_Dry_P Parameter: Post Timepoint (hr) Value: None
  misc_feature: MA Experiment 20001555 PARAMETER Experiment Name: At_Drought_Soil_Dry_P Parameter: Post-Treatment Value: None
  misc_feature: MA Experiment 20001555 PARAMETER Experiment Name: At_Drought_Soil_Dry_P Parameter: Timepoint (day) Value: 10
  misc_feature: MA Experiment 20001555 PARAMETER Experiment Name: At_Drought_Soil_Dry_P Parameter: Treatment Value: Drought vs. No Drought
  misc_feature: MA Experiment ID: 20001557 Result: Up-regulated in Transcription
  misc_feature: MA Experiment 20001557 PARAMETER Experiment Name: At_Drought_Soil_Dry_P Parameter: Age (day) Value: 27
  misc_feature: MA Experiment 20001557 PARAMETER Experiment Name: At_Drought_Soil_Dry_P Parameter: Organism Value: A. thaliana
  misc_feature: MA Experiment 20001557 PARAMETER Experiment Name: At_Drought_Soil_Dry_P Parameter: Plant Line Value: WS
  misc_feature: MA Experiment 20001557 PARAMETER Experiment Name: At_Drought_Soil_Dry_P Parameter: Post Timepoint (hr) Value: 3
  misc_feature: MA Experiment 20001557 PARAMETER Experiment Name: At_Drought_Soil_Dry_P Parameter: Post-Treatment Value: Re-Water vs. No Drought
  misc_feature: MA Experiment 20001557 PARAMETER Experiment Name: At_Drought_Soil_Dry_P Parameter: Timepoint (day) Value: 13
  misc_feature: MA Experiment 20001557 PARAMETER Experiment Name: At_Drought_Soil_Dry_P Parameter: Treatment Value: Drought vs. No Drought
  misc_feature: MA Experiment ID: 20001905 Result: Up-regulated in Transcription
  misc_feature: MA Experiment 20001905 PARAMETER Experiment Name: At_Drought_Reproduction_P Parameter: Age (day) Value: 40
  misc_feature: MA Experiment 20001905 PARAMETER Experiment Name: At_Drought_Reproduction_P Parameter: Organism Value: A. thaliana
  misc_feature: MA Experiment 20001905 PARAMETER Experiment Name: At_Drought_Reproduction_P Parameter: Plant Line Value: WS
  misc_feature: MA Experiment 20001905 PARAMETER Experiment Name: At_Drought_Reproduction_P Parameter: Timepoint (day) Value: 10
  misc_feature: MA Experiment 20001905 PARAMETER Experiment Name: At_Drought_Reproduction_P Parameter: Tissue Value: Rosettes
  misc_feature: MA Experiment 20001905 PARAMETER Experiment Name: At_Drought_Reproduction_P Parameter: Treatment Value: Drought vs. No Drought
  misc_feature: MA Experiment ID: 20001911 Result: Down-regulated in Transcription
  misc_feature: MA Experiment 20001911 PARAMETER Experiment Name: At_Drought_Reproduction_P Parameter: Age (day) Value: 40
  misc_feature: MA Experiment 20001911 PARAMETER Experiment Name: At_Drought_Reproduction_P Parameter: Organism Value: A. thaliana
  misc_feature: MA Experiment 20001911 PARAMETER Experiment Name: At_Drought_Reproduction_P Parameter: Plant Line Value: WS
  misc_feature: MA Experiment 20001911 PARAMETER Experiment Name: At_Drought_Reproduction_P Parameter: Timepoint (day) Value: 10
  misc_feature: MA Experiment 20001911 PARAMETER Experiment Name: At_Drought_Reproduction_P Parameter: Tissue Value: Flowers
  misc_feature: MA Experiment 20001911 PARAMETER Experiment Name: At_Drought_Reproduction_P Parameter: Treatment Value: Drought vs. No Drought
aagttaggccaagaaacccatttaaaaaaaaagagagagagatggagagtttcccgatcatcaatctcgagaagcttaatggagaagagagagcaatcactatggagaagatcaaagacgcttgtgaaaactggggcttctttgagtgtgtgaaccatgggatttcactcgagcttttggacaaagtggagaagatgaccaaggaacattacaagaagtgcatggaagagagattcaaggaatcgattaagaacagaggtcttgactctcttcgctctgaagtcaacgacgttgactgggaatccactttctacctcaagcaccttcccgtctctaatatctccgatgtccctgatctcgacgacgattacagaacgttaatgaaagacttcgccggaaagatagagaagttgtcggaggagctactggatctgctgtgcgagaatctcggtttagagaagggttatttaaaaaaggtgttttacgggtcgaaaagaccgacttttggaaccaaagtcagcaattatccaccttgtcctaatccggacctagtcaagggtctccgagcccacaccgacgccggcggcatcatcctcctcttccaagacgacaaagtcagtggacttcagcttcttaaagacggcgagtgggtcgatgttcctccggttaagcattcaatcgtcgttaatctcggcgatcaacttgaggtgataaccaatgggaagtacaagagtgtggaacatagagtgctatctcagacagacggagaaggaagaatgtcgatcgcatcattctataatccgggaagcgactctgttatttttccggcgccggagctgatcggaaaagaagcagagaaggagaagaaagagaactatccgagatttgtgtttgaagattacatgaaactctactctgctgtcaagtttcaggccaaggaaccaaggtttgaagccatgaaagctatggagacaactgtggccaacaatgttggaccattggccactgcgtgaatgatatgtaactggttaataaatatatatatatatatatatatagtctttatataatgtcttagaaacttgattattcactatacgaataattttgttcatgttgttgtatgtttaagtggtgaatgtgttttatatatgggaattaatgttttctgttcg

SEQ ID NO: 81157 - protein, 336 aa, Arabidopsis thaliana
  peptide (1)..(336): Ceres Seq. ID no. 12658600
  misc_feature (166)..(267): Pfam Name: 2OG-Fe(II) oxygenase superfamily Pfam Description: 2OG-Fe(II) oxygenase superfamily
  misc_feature (14)..(336): Homolog of NCBI NO: 15220386 NR Description: 1-aminocyclopropane-1-carboxylate oxidase; id: At1g05010.1, supported by cDNA: gi_13877784 [Arabidopsis
  misc_feature (14)..(336): Homolog of NCBI NO: 541861 NR Description: ethylene-forming enzyme - Arabidopsis thaliana
  misc_feature (14)..(336): Homolog of NCBI NO: 13877785 NR Description: putative 1-aminocyclopropane-1-carboxylate
  misc_feature (14)..(336): Homolog of NCBI NO: 27447954 NR Description: putative 1-aminocyclopropane-1-carboxylate
  misc_feature (14)..(336): Homolog of NCBI NO: 7576446 NR Description: 1-aminocyclopropane-1-carboxylate oxidase
  misc_feature (14)..(335): Homolog of NCBI NO: 14573463 NR Description: 1-aminocyclopropane-1-carboxylate oxidase
  misc_feature (14)..(335): Homolog of NCBI NO: 398994 NR Description: 1-aminocyclopropane-1-carboxylate oxidase (ACC
  misc_feature (14)..(336): Homolog of NCBI NO: 584711 NR Description: 1-aminocyclopropane-1-carboxylate oxidase 3 (ACC
  misc_feature (14)..(336): Homolog of NCBI NO: 532530 NR Description: 1-aminocyclopropane-1-carboxylate oxidase
  misc_feature (14)..(336): Homolog of NCBI NO: 1085595 NR Description: 1-aminocyclopropane-1-carboxylate oxidase
VRPRNPFKKKEREMESFPIINLEKLNGEERAITMEKIKDACENWGFFECVNHGISLELLDKVEKMTKEHYKKCMEERFKESIKNRGLDSLRSEVNDVDWESTFYLKHLPVSNISDVPDLDDDYRTLMKDFAGKIEKLSEELLDLLCENLGLEKGYLKKVFYGSKRPTFGTKVSNYPPCPNPDLVKGLRAHTDAGGIILLFQDDKVSGLQLLKDGEWVDVPPVKHSIVVNLGDQLEVITNGKYKSVEHRVLSQTDGEGRMSIASFYNPGSDSVIFPAPELIGKEAEKEKKENYPRFVFEDYMKLYSAVKFQAKEPRFEAMKAMETTVANNVGPLATA

SEQ ID NO: 81158 - protein, 323 aa, Arabidopsis thaliana; identical to SEQ ID NO: 25991
  peptide (1)..(323): Ceres Seq. ID no. 12658601
  misc_feature (153)..(254): Pfam Name: 2OG-Fe(II) oxygenase superfamily Pfam Description: 2OG-Fe(II) oxygenase superfamily
  misc_feature (1)..(323): Homolog of NCBI NO: 15220386 NR Description: 1-aminocyclopropane-1-carboxylate oxidase; id: At1g05010.1, supported by cDNA: gi_13877784 [Arabidopsis
  misc_feature (1)..(323): Homolog of NCBI NO: 541861 NR Description: ethylene-forming enzyme - Arabidopsis thaliana
  misc_feature (1)..(323): Homolog of NCBI NO: 13877785 NR Description: putative 1-aminocyclopropane-1-carboxylate
  misc_feature (1)..(323): Homolog of NCBI NO: 27447954 NR Description: putative 1-aminocyclopropane-1-carboxylate
  misc_feature (1)..(323): Homolog of NCBI NO: 7576446 NR Description: 1-aminocyclopropane-1-carboxylate oxidase
  misc_feature (1)..(322): Homolog of NCBI NO: 14573463 NR Description: 1-aminocyclopropane-1-carboxylate oxidase
  misc_feature (1)..(322): Homolog of NCBI NO: 398994 NR Description: 1-aminocyclopropane-1-carboxylate oxidase (ACC
  misc_feature (1)..(323): Homolog of NCBI NO: 584711 NR Description: 1-aminocyclopropane-1-carboxylate oxidase 3 (ACC
  misc_feature (1)..(323): Homolog of NCBI NO: 532530 NR Description: 1-aminocyclopropane-1-carboxylate oxidase
  misc_feature (1)..(323): Homolog of NCBI NO: 1085595 NR Description: 1-aminocyclopropane-1-carboxylate oxidase

SEQ ID NO: 81159 - protein, 303 aa, Arabidopsis thaliana; identical to SEQ ID NO: 25992
  peptide (1)..(303): Ceres Seq. ID no. 12658602
  misc_feature (133)..(234): Pfam Name: 2OG-Fe(II) oxygenase superfamily Pfam Description: 2OG-Fe(II) oxygenase superfamily
  misc_feature (1)..(303): Homolog of NCBI NO: 15220386 NR Description: 1-aminocyclopropane-1-carboxylate oxidase; id: At1g05010.1, supported by cDNA: gi_13877784 [Arabidopsis
  misc_feature (1)..(303): Homolog of NCBI NO: 541861 NR Description: ethylene-forming enzyme - Arabidopsis thaliana
  misc_feature (1)..(303): Homolog of NCBI NO: 13877785 NR Description: putative 1-aminocyclopropane-1-carboxylate
  misc_feature (1)..(303): Homolog of NCBI NO: 27447954 NR Description: putative 1-aminocyclopropane-1-carboxylate
  misc_feature (1)..(303): Homolog of NCBI NO: 7576446 NR Description: 1-aminocyclopropane-1-carboxylate oxidase
  misc_feature (1)..(302): Homolog of NCBI NO: 14573463 NR Description: 1-aminocyclopropane-1-carboxylate oxidase
  misc_feature (1)..(302): Homolog of NCBI NO: 398994 NR Description: 1-aminocyclopropane-1-carboxylate oxidase (ACC
  misc_feature (1)..(303): Homolog of NCBI NO: 584711 NR Description: 1-aminocyclopropane-1-carboxylate oxidase 3 (ACC
  misc_feature (1)..(303): Homolog of NCBI NO: 532530 NR Description: 1-aminocyclopropane-1-carboxylate oxidase
  misc_feature (1)..(303): Homolog of NCBI NO: 1085595 NR Description: 1-aminocyclopropane-1-carboxylate oxidase

SEQ ID NO: 81160 - DNA, 1591 bp, Arabidopsis thaliana
  misc_feature (1)..(1591): Ceres Seq. ID no. 12658618
  misc_feature: MA Experiment ID: 108462 Result: Up-regulated in Transcription
  misc_feature: MA Experiment 108462 PARAMETER Experiment Name: At_Germinating_Seeds_cDNA_P Parameter: Age (day) Value: 2 vs. 0
  misc_feature: MA Experiment 108462 PARAMETER Experiment Name: At_Germinating_Seeds_cDNA_P Parameter: Tissue Value: Germinating Seeds
  misc_feature: MA Experiment ID: 108463 Result: Up-regulated in Transcription
  misc_feature: MA Experiment 108463 PARAMETER Experiment Name: At_Germinating_Seeds_cDNA_P Parameter: Age (day) Value: 3 vs. 0
  misc_feature: MA Experiment 108463 PARAMETER Experiment Name: At_Germinating_Seeds_cDNA_P Parameter: Tissue Value: Germinating Seeds
  misc_feature: MA Experiment ID: 108464 Result: Up-regulated in Transcription
  misc_feature: MA Experiment 108464 PARAMETER Experiment Name: At_Germinating_Seeds_cDNA_P Parameter: Age (day) Value: 4 vs. 0
  misc_feature: MA Experiment 108464 PARAMETER Experiment Name: At_Germinating_Seeds_cDNA_P Parameter: Tissue Value: Germinating Seeds
  misc_feature: MA Experiment ID: 108501 Result: Down-regulated in Transcription
  misc_feature: MA Experiment 108501 PARAMETER Experiment Name: At_ap2_floral_buds_cDNA_P Parameter: Plant Line Value: ap2 (Ler.)
  misc_feature: MA Experiment 108501 PARAMETER Experiment Name: At_ap2_floral_buds_cDNA_P Parameter: Tissue Value: Closed Flower
  misc_feature: MA Experiment ID: 20000069 Result: Down-regulated in Transcription
  misc_feature: MA Experiment 20000069 PARAMETER Experiment Name: At_100uM_ABA_Mutants_cDNA_P Parameter: Plant Line Value: CS23
  misc_feature: MA Experiment 20000069 PARAMETER Experiment Name: At_100uM_ABA_Mutants_cDNA_P Parameter: Timepoint (hr) Value: 6
  misc_feature: MA Experiment 20000069 PARAMETER Experiment Name: At_100uM_ABA_Mutants_cDNA_P Parameter: Tissue Value: Aerial
  misc_feature: MA Experiment 20000069 PARAMETER Experiment Name: At_100uM_ABA_Mutants_cDNA_P Parameter: Treatment Value: 100uM ABA vs. No Treatment
  misc_feature: MA Experiment ID: 20000072 Result: Down-regulated in Transcription
  misc_feature: MA Experiment 20000072 PARAMETER Experiment Name: At_100uM_ABA_Mutants_cDNA_P Parameter: Plant Line Value: CS8105
  misc_feature: MA Experiment 20000072 PARAMETER Experiment Name: At_100uM_ABA_Mutants_cDNA_P Parameter: Timepoint (hr) Value: 6
  misc_feature: MA Experiment 20000072 PARAMETER Experiment Name: At_100uM_ABA_Mutants_cDNA_P Parameter: Tissue Value: Aerial
  misc_feature: MA Experiment 20000072 PARAMETER Experiment Name: At_100uM_ABA_Mutants_cDNA_P Parameter: Treatment Value: 100uM ABA vs. No Treatment
  misc_feature: MA Experiment ID: 20000087 Result: Down-regulated in Transcription
  misc_feature: MA Experiment 20000087 PARAMETER Experiment Name: At_100uM_ABA_Mutants_cDNA_P Parameter: Plant Line Value: WS
  misc_feature: MA Experiment 20000087 PARAMETER Experiment Name: At_100uM_ABA_Mutants_cDNA_P Parameter: Timepoint (hr) Value: 6
  misc_feature: MA Experiment 20000087 PARAMETER Experiment Name: At_100uM_ABA_Mutants_cDNA_P Parameter: Tissue Value: Aerial
  misc_feature: MA Experiment 20000087 PARAMETER Experiment Name: At_100uM_ABA_Mutants_cDNA_P Parameter: Treatment Value: 100uM ABA vs. No Treatment
  misc_feature: MA Experiment ID: 20000090 Result: Down-regulated in Transcription
  misc_feature: MA Experiment ID: 20000185 Result: Down-regulated in Transcription
  misc_feature: MA Experiment 20000185 PARAMETER Experiment Name: At_Roots__P Parameter: Age (day) Value: 7 vs. 21
  misc_feature: MA Experiment 20000185 PARAMETER Experiment Name: At_Roots__P Parameter: Organism Value: A. thaliana
  misc_feature: MA Experiment 20000185 PARAMETER Experiment Name: At_Roots__P Parameter: Tissue Value: Roots vs. Whole Plant
  misc_feature: MA Experiment ID: 20001248 Result: Down-regulated in Transcription
  misc_feature: MA Experiment 20001248 PARAMETER Experiment Name: At_Far-red-induction_P Parameter: Age (day) Value: 7
  misc_feature: MA Experiment 20001248 PARAMETER Experiment Name: At_Far-red-induction_P Parameter: Light Value: Far-red vs. White
  misc_feature: MA Experiment 20001248 PARAMETER Experiment Name: At_Far-red-induction_P Parameter: Organism Value: A. thaliana
  misc_feature: MA Experiment 20001248 PARAMETER Experiment Name: At_Far-red-induction_P Parameter: Plant Line Value: Columbia
  misc_feature: MA Experiment 20001248 PARAMETER Experiment Name: At_Far-red-induction_P Parameter: Timepoint (hr) Value: 4
  misc_feature: MA Experiment 20001248 PARAMETER Experiment Name: At_Far-red-induction_P Parameter: Tissue Value: Whole Plant
  misc_feature: MA Experiment ID: 20001557 Result: Down-regulated in Transcription
  misc_feature: MA Experiment 20001557 PARAMETER Experiment Name: At_Drought_Soil_Dry_P Parameter: Age (day) Value: 27
  misc_feature: MA Experiment 20001557 PARAMETER Experiment Name: At_Drought_Soil_Dry_P Parameter: Organism Value: A. thaliana
  misc_feature: MA Experiment 20001557 PARAMETER Experiment Name: At_Drought_Soil_Dry_P Parameter: Plant Line Value: WS
  misc_feature: MA Experiment 20001557 PARAMETER Experiment Name: At_Drought_Soil_Dry_P Parameter: Post Timepoint (hr) Value: 3
  misc_feature: MA Experiment 20001557 PARAMETER Experiment Name: At_Drought_Soil_Dry_P Parameter: Post-Treatment Value: Re-Water vs. No Drought
  misc_feature: MA Experiment 20001557 PARAMETER Experiment Name: At_Drought_Soil_Dry_P Parameter: Timepoint (day) Value: 13
  misc_feature: MA Experiment 20001557 PARAMETER Experiment Name: At_Drought_Soil_Dry_P Parameter: Treatment Value: Drought vs. No Drought
  misc_feature: MA Experiment ID: 20001558 Result: Down-regulated in Transcription
  misc_feature: MA Experiment 20001558 PARAMETER Experiment Name: At_Drought_Soil_Dry_P Parameter: Age (day) Value: 27
  misc_feature: MA Experiment 20001558 PARAMETER Experiment Name: At_Drought_Soil_Dry_P Parameter: Organism Value: A. thaliana
  misc_feature: MA Experiment 20001558 PARAMETER Experiment Name: At_Drought_Soil_Dry_P Parameter: Plant Line Value: WS
  misc_feature: MA Experiment 20001558 PARAMETER Experiment Name: At_Drought_Soil_Dry_P Parameter: Post Timepoint (hr) Value: 6
  misc_feature: MA Experiment 20001558 PARAMETER Experiment Name: At_Drought_Soil_Dry_P Parameter: Post-Treatment Value: Re-Water vs. No Drought
  misc_feature: MA Experiment 20001558 PARAMETER Experiment Name: At_Drought_Soil_Dry_P Parameter: Timepoint (day) Value: 13
  misc_feature: MA Experiment 20001558 PARAMETER Experiment Name: At_Drought_Soil_Dry_P Parameter: Treatment Value: Drought vs. No Drought
  misc_feature: MA Experiment ID: 20001905 Result: Down-regulated in Transcription
  misc_feature: MA Experiment 20001905 PARAMETER Experiment Name: At_Drought_Reproduction_P Parameter: Age (day) Value: 40
  misc_feature: MA Experiment 20001905 PARAMETER Experiment Name: At_Drought_Reproduction_P Parameter: Organism Value: A. thaliana
  misc_feature: MA Experiment 20001905 PARAMETER Experiment Name: At_Drought_Reproduction_P Parameter: Plant Line Value: WS
  misc_feature: MA Experiment 20001905 PARAMETER Experiment Name: At_Drought_Reproduction_P Parameter: Timepoint (day) Value: 10
  misc_feature: MA Experiment 20001905 PARAMETER Experiment Name: At_Drought_Reproduction_P Parameter: Tissue Value: Rosettes
  misc_feature: MA Experiment 20001905 PARAMETER Experiment Name: At_Drought_Reproduction_P Parameter: Treatment Value: Drought vs. No Drought
gacctttggtttctgtgttgtgtgatatttactacgaaaccacttgtcaccaaaggttcttctttctgttagcgttgggttcgtgattccaagatcaatggttgtgaacttcactagttagagatactgaatcaaagagatgattcttccgagaattgggtaaatcttcgattctgattttctggattaaagaacacgtaacctattttcaattcgcgggtttgattccatagcttcttcagatcatacattctcgcaagtgttcgatacgggagtagaagaagaagagtctttctatgctcctgatcatgatgtcttgactctgcttcaacctaacttcaccagcaacgatgtctagtagtaccaagaacattccaaaacctcctcctcttccttgtattacctaccagcgttttcaatctagtacaaggaaaccttcgagcttaatgcgccttgtgcctaaagaagcacttgaaacttgggataagcttttcaaggaaggatctggagcagatacatatgttgaaaccgataacaagtctcactttcctgcccattcaagtgtcctggctgcagcctcaccagttatagcgacacttctgaatcaatcgagggataagaatgggaatacatacctcaaaatccatggagttccttgtgaagcagtctacatgttcattaggtttctatactcttcctgctacgaggaggaagaaatgaagaagtttgtgctccatttattggttctgtcacattgctactcggtcccatctcttaaaagactttgtgtagagattctcgatcaaggatggattaacaaggagaatgtgatcgatgtgcttcaactagcgagaaactgtgacgtgacaaggatttgctttgtatgtctttccatggtcatcaaagacttcaaatctgtatcttcaacagagggatggaaagtgatgaaacgctctaatcctttgctcgaacaagagctcattgaggcagtcatcgaatccgacagtaggaaacaagaaagaagaagaaaactggaggagagagaagtgtatttgcagctctatgaagccatggaagctcttgtccacatatgtcgtgaaggttgtgggacaattggacctcgcgataaggcccttaaaggaagccataccgtgtgtaaattcccggcgtgtaaagggcttgaaggtgcgctcagacatttcttgggatgcaagtctagggcttcatgttctcattgcaaaaggatgtggcagcttcttcagcttcactcttgtatctgtgatgattctaattcttgcaaagtttctctctgctggaatttcaaggagaaaatgaagaagcttagcaagaaagaacaatctaaatggcgattgcttgtagaaaacattattagggcgaggaacagtctcgggcccttctcgtcacgttcttctggtttgatatagaaacaggttttagattttagtgtatagccagttagacacaaaaagaaaacgtacataggcgcagggtatagtgtatattgcgcaccaatacggcgcacaatagtggttttgaacaaacattgtctatatcaagttggttgttatat

SEQ ID NO: 81161 - protein, 364 aa, Arabidopsis thaliana; identical to SEQ ID NO: 75983
  peptide (1)..(364): Ceres Seq. ID no. 12658619
  misc_feature (44)..(154): Pfam Name: BTB/POZ domain Pfam Description: BTB/POZ domain
  misc_feature (1)..(322): Homolog of NCBI NO: 15221235 NR Description: hypothetical protein; protein id: At1g05690.1
  misc_feature (2)..(356): Homolog of NCBI NO: 15240763 NR Description: putative protein; protein id: At5g67480.1, by cDNA: gi_15529177, supported by cDNA: gi_17386119 [Arabidopsis >gi|9757869|dbj|BAB08456.1| gene_id:K9I9.4~pir||T04718~strong
  misc_feature (4)..(356): Homolog of NCBI NO: 21537174 NR Description: unknown [Arabidopsis thaliana]
  misc_feature (4)..(356): Homolog of NCBI NO: 7485765 NR Description: hypothetical protein F19F18.100 - Arabidopsis >gi|4468986|emb|CAB38300.1| putative protein [Arabidopsis >gi|7270743|emb|CAB80426.1| putative protein [Arabidopsis
  misc_feature (4)..(356): Homolog of NCBI NO: 26453150 NR Description: unknown protein [Arabidopsis thaliana]
  misc_feature (4)..(356): Homolog of NCBI NO: 18420081 NR Description: putative protein; protein id: At4g37610.1,
  misc_feature (1)..(291): Homolog of NCBI NO: 34907566 NR Description: B1078G07.24 [Oryza sativa (japonica
  misc_feature (55)..(364): Homolog of NCBI NO: 15242656 NR Description: putative protein; protein id: At5g63160.1 thaliana] >gi|10177297|dbj|BAB10558.1| contains similarity to
  misc_feature (45)..(350): Homolog of NCBI NO: 18408618 NR Description: putative protein; protein id: At3g48360.1, by cDNA: gi_14532781, supported by cDNA: gi_19310816 [Arabidopsis >gi|14532782|gb|AAK64172.1| unknown protein [Arabidopsis
  misc_feature (45)..(350): Homolog of NCBI NO: 7487530 NR Description: hypothetical protein T29H11.120 - Arabidopsis >gi|4678352|emb|CAB41162.1| putative protein [Arabidopsis

SEQ ID NO: 81162 - protein, 332 aa, Arabidopsis thaliana; identical to SEQ ID NO: 75984
  peptide (1)..(332): Ceres Seq. ID no. 12658620
  misc_feature (12)..(122): Pfam Name: BTB/POZ domain Pfam Description: BTB/POZ domain
  misc_feature (1)..(290): Homolog of NCBI NO: 15221235 NR Description: hypothetical protein; protein id: At1g05690.1
  misc_feature (1)..(324): Homolog of NCBI NO: 15240763 NR Description: putative protein; protein id: At5g67480.1, by cDNA: gi_15529177, supported by cDNA: gi_17386119 [Arabidopsis >gi|9757869|dbj|BAB08456.1| gene_id:K9I9.4~pir||T04718~strong
  misc_feature (1)..(324): Homolog of NCBI NO: 21537174 NR Description: unknown [Arabidopsis thaliana]
  misc_feature (1)..(324): Homolog of NCBI NO: 7485765 NR Description: hypothetical protein F19F18.100 - Arabidopsis >gi|4468986|emb|CAB38300.1| putative protein [Arabidopsis >gi|7270743|emb|CAB80426.1| putative protein [Arabidopsis
  misc_feature (1)..(324): Homolog of NCBI NO: 18420081 NR Description: putative protein; protein id: At4g37610.1,
  misc_feature (1)..(324): Homolog of NCBI NO: 26453150 NR Description: unknown protein [Arabidopsis thaliana]
  misc_feature (1)..(259): Homolog of NCBI NO: 34907566 NR Description: B1078G07.24 [Oryza sativa (japonica
  misc_feature (23)..(332): Homolog of NCBI NO: 15242656 NR Description: putative protein; protein id: At5g63160.1 thaliana] >gi|10177297|dbj|BAB10558.1| contains similarity to
  misc_feature (13)..(318): Homolog of NCBI NO: 18408618 NR Description: putative protein; protein id: At3g48360.1, by cDNA: gi_14532781, supported by cDNA: gi_19310816 [Arabidopsis >gi|14532782|gb|AAK64172.1| unknown protein [Arabidopsis
  misc_feature (13)..(318): Homolog of NCBI NO: 7487530 NR Description: hypothetical protein T29H11.120 - Arabidopsis >gi|4678352|emb|CAB41162.1| putative protein [Arabidopsis

SEQ ID NO: 81163 - protein, 257 aa, Arabidopsis thaliana; identical to SEQ ID NO: 75985
  peptide (1)..(257): Ceres Seq. ID no. 12658621
  misc_feature (122)..(214): Pfam Name: TAZ zinc finger Pfam Description: TAZ zinc finger
  misc_feature (1)..(215): Homolog of NCBI NO: 15221235 NR Description: hypothetical protein; protein id: At1g05690.1
  misc_feature (1)..(249): Homolog of NCBI NO: 15240763 NR Description: putative protein; protein id: At5g67480.1, by cDNA: gi_15529177, supported by cDNA: gi_17386119 [Arabidopsis >gi|9757869|dbj|BAB08456.1| gene_id:K9I9.4~pir||T04718~strong
  misc_feature (1)..(249): Homolog of NCBI NO: 21537174 NR Description: unknown [Arabidopsis thaliana]
  misc_feature (1)..(249): Homolog of NCBI NO: 7485765 NR Description: hypothetical protein F19F18.100 - Arabidopsis >gi|4468986|emb|CAB38300.1| putative protein [Arabidopsis >gi|7270743|emb|CAB80426.1| putative protein [Arabidopsis
  misc_feature (1)..(249): Homolog of NCBI NO: 18420081 NR Description: putative protein; protein id: At4g37610.1,
  misc_feature (1)..(249): Homolog of NCBI NO: 26453150 NR Description: unknown protein [Arabidopsis thaliana]
  misc_feature (1)..(184): Homolog of NCBI NO: 34907566 NR Description: B1078G07.24 [Oryza sativa (japonica
  misc_feature (1)..(257): Homolog of NCBI NO: 15242656 NR Description: putative protein; protein id: At5g63160.1 thaliana] >gi|10177297|dbj|BAB10558.1| contains similarity to
  misc_feature (1)..(243): Homolog of NCBI NO: 18408618 NR Description: putative protein; protein id: At3g48360.1, by cDNA: gi_14532781, supported by cDNA: gi_19310816 [Arabidopsis >gi|14532782|gb|AAK64172.1| unknown protein [Arabidopsis
  misc_feature (1)..(243): Homolog of NCBI NO: 7487530 NR Description: hypothetical protein T29H11.120 - Arabidopsis >gi|4678352|emb|CAB41162.1| putative protein [Arabidopsis

SEQ ID NO: 81164 - DNA, 1363 bp, Arabidopsis thaliana
  misc_feature (1)..(1363): Ceres Seq. ID no. 12658622
  misc_feature: MA Experiment ID: 20000166 Result: Down-regulated in Transcription
  misc_feature: MA Experiment 20000166 PARAMETER Experiment Name: At_100uM_ABA_P Parameter: Age (day) Value: 14
  misc_feature: MA Experiment 20000166 PARAMETER Experiment Name: At_100uM_ABA_P Parameter: Organism Value: A. thaliana
  misc_feature: MA Experiment 20000166 PARAMETER Experiment Name: At_100uM_ABA_P Parameter: Plant Line Value: WS
  misc_feature: MA Experiment 20000166 PARAMETER Experiment Name: At_100uM_ABA_P Parameter: Timepoint (hr) Value: 1
  misc_feature: MA Experiment 20000166 PARAMETER Experiment Name: At_100uM_ABA_P Parameter: Tissue Value: Aerial
  misc_feature: MA Experiment 20000166 PARAMETER Experiment Name: At_100uM_ABA_P Parameter: Treatment Value: 100uM ABA vs. No Treatment
  misc_feature: MA Experiment ID: 20000173 Result: Down-regulated in Transcription
  misc_feature: MA Experiment 20000173 PARAMETER Experiment Name: At_42deg_Heat_P Parameter: Age (day) Value: 14
  misc_feature: MA Experiment 20000173 PARAMETER Experiment Name: At_42deg_Heat_P Parameter: Organism Value: A. thaliana
  misc_feature: MA Experiment 20000173 PARAMETER Experiment Name: At_42deg_Heat_P Parameter: Plant Line Value: WS
  misc_feature: MA Experiment 20000173 PARAMETER Experiment Name: At_42deg_Heat_P Parameter: Temperature (deg C) Value: 42 vs. 22
  misc_feature: MA Experiment 20000173 PARAMETER Experiment Name: At_42deg_Heat_P Parameter: Timepoint (hr) Value: 6
  misc_feature: MA Experiment 20000173 PARAMETER Experiment Name: At_42deg_Heat_P Parameter: Tissue Value: Aerial
  misc_feature: MA Experiment ID: 20000184 Result: Down-regulated in Transcription
  misc_feature: MA Experiment 20000184 PARAMETER Experiment Name: At_Shoots__P Parameter: Age (day) Value: 7
  misc_feature: MA Experiment 20000184 PARAMETER Experiment Name: At_Shoots__P Parameter: Tissue Value: Shoots vs. Whole Plant
  misc_feature: MA Experiment ID: 20000234 Result: Down-regulated in Transcription
  misc_feature: MA Experiment 20000234 PARAMETER Experiment Name: At_Siliques_P Parameter: Age (day) Value: 21
  misc_feature: MA Experiment 20000234 PARAMETER Experiment Name: At_Siliques_P Parameter: Organism Value: A. thaliana
  misc_feature: MA Experiment 20000234 PARAMETER Experiment Name: At_Siliques_P Parameter: Plant Line Value: WS
  misc_feature: MA Experiment 20000234 PARAMETER Experiment Name: At_Siliques_P Parameter: Tissue Value: Less Than 5mm Siliques vs. Whole Plant
  misc_feature: MA Experiment ID: 20001248 Result: Up-regulated in Transcription
  misc_feature: MA Experiment 20001248 PARAMETER Experiment Name: At_Far-red-induction_P Parameter: Age (day) Value: 7
  misc_feature: MA Experiment 20001248 PARAMETER Experiment Name: At_Far-red-induction_P Parameter: Light Value: Far-red vs. White
  misc_feature: MA Experiment 20001248 PARAMETER Experiment Name: At_Far-red-induction_P Parameter: Organism Value: A. thaliana
  misc_feature: MA Experiment 20001248 PARAMETER Experiment Name: At_Far-red-induction_P Parameter: Plant Line Value: Columbia
  misc_feature: MA Experiment 20001248 PARAMETER Experiment Name: At_Far-red-induction_P Parameter: Timepoint (hr) Value: 4
  misc_feature: MA Experiment 20001248 PARAMETER Experiment Name: At_Far-red-induction_P Parameter: Tissue Value: Whole Plant
  misc_feature: MA Experiment ID: 20001555 Result: Down-regulated in Transcription
  misc_feature: MA Experiment 20001555 PARAMETER Experiment Name: At_Drought_Soil_Dry_P Parameter: Age (day) Value: 24
  misc_feature: MA Experiment 20001555 PARAMETER Experiment Name: At_Drought_Soil_Dry_P Parameter: Organism Value: A. thaliana
  misc_feature: MA Experiment 20001555 PARAMETER Experiment Name: At_Drought_Soil_Dry_P Parameter: Plant Line Value: WS
  misc_feature: MA Experiment 20001555 PARAMETER Experiment Name: At_Drought_Soil_Dry_P Parameter: Post Timepoint (hr) Value: None
  misc_feature: MA Experiment 20001555 PARAMETER Experiment Name: At_Drought_Soil_Dry_P Parameter: Post-Treatment Value: None
  misc_feature: MA Experiment 20001555 PARAMETER Experiment Name: At_Drought_Soil_Dry_P Parameter: Timepoint (day) Value: 10
  misc_feature: MA Experiment 20001555 PARAMETER Experiment Name: At_Drought_Soil_Dry_P Parameter: Treatment Value: Drought vs. No Drought
  misc_feature: MA Experiment ID: 20001556 Result: Down-regulated in Transcription
  misc_feature: MA Experiment 20001556 PARAMETER Experiment Name: At_Drought_Soil_Dry_P Parameter: Age (day) Value: 26
  misc_feature: MA Experiment 20001556 PARAMETER Experiment Name: At_Drought_Soil_Dry_P Parameter: Organism Value: A. thaliana
  misc_feature: MA Experiment 20001556 PARAMETER Experiment Name: At_Drought_Soil_Dry_P Parameter: Plant Line Value: WS
  misc_feature: MA Experiment 20001556 PARAMETER Experiment Name: At_Drought_Soil_Dry_P Parameter: Post Timepoint (hr) Value: None
  misc_feature: MA Experiment 20001556 PARAMETER Experiment Name: At_Drought_Soil_Dry_P Parameter: Post-Treatment Value: None
  misc_feature: MA Experiment 20001556 PARAMETER Experiment Name: At_Drought_Soil_Dry_P Parameter: Timepoint (day) Value: 12
  misc_feature: MA Experiment 20001556 PARAMETER Experiment Name: At_Drought_Soil_Dry_P Parameter: Treatment Value: Drought vs. No Drought
  misc_feature: MA Experiment ID: 20001557 Result: Down-regulated in Transcription
  misc_feature: MA Experiment 20001557 PARAMETER Experiment Name: At_Drought_Soil_Dry_P Parameter: Age (day) Value: 27
  misc_feature: MA Experiment 20001557 PARAMETER Experiment Name: At_Drought_Soil_Dry_P Parameter: Organism Value: A. thaliana
  misc_feature: MA Experiment 20001557 PARAMETER Experiment Name: At_Drought_Soil_Dry_P Parameter: Plant Line Value: WS
  misc_feature: MA Experiment 20001557 PARAMETER Experiment Name: At_Drought_Soil_Dry_P Parameter: Post Timepoint (hr) Value: 3
  misc_feature: MA Experiment 20001557 PARAMETER Experiment Name: At_Drought_Soil_Dry_P Parameter: Post-Treatment Value: Re-Water vs. No Drought
  misc_feature: MA Experiment 20001557 PARAMETER Experiment Name: At_Drought_Soil_Dry_P Parameter: Timepoint (day) Value: 13
  misc_feature: MA Experiment 20001557 PARAMETER Experiment Name: At_Drought_Soil_Dry_P Parameter: Treatment Value: Drought vs. No Drought
  misc_feature: MA Experiment ID: 20001560 Result: Down-regulated in Transcription
  misc_feature: MA Experiment 20001560 PARAMETER Experiment Name: At_Drought_Soil_Dry_P Parameter: Age (day) Value: 28
  misc_feature: MA Experiment 20001560 PARAMETER Experiment Name: At_Drought_Soil_Dry_P Parameter: Organism Value: A. thaliana
  misc_feature: MA Experiment 20001560 PARAMETER Experiment Name: At_Drought_Soil_Dry_P Parameter: Plant Line Value: WS
  misc_feature: MA Experiment 20001560 PARAMETER Experiment Name: At_Drought_Soil_Dry_P Parameter: Post Timepoint (hr) Value: None
  misc_feature: MA Experiment 20001560 PARAMETER Experiment Name: At_Drought_Soil_Dry_P Parameter: Post-Treatment Value: None
  misc_feature: MA Experiment 20001560 PARAMETER Experiment Name: At_Drought_Soil_Dry_P Parameter: Timepoint (day) Value: 14
  misc_feature: MA Experiment 20001560 PARAMETER Experiment Name: At_Drought_Soil_Dry_P Parameter: Treatment Value: Drought vs. No Drought
  misc_feature: MA Experiment ID: 20001904 Result: Down-regulated in Transcription
  misc_feature: MA Experiment 20001904 PARAMETER Experiment Name: At_Drought_Reproduction_P Parameter: Age (day) Value: 37
  misc_feature: MA Experiment 20001904 PARAMETER Experiment Name: At_Drought_Reproduction_P Parameter: Organism Value: A. thaliana
  misc_feature: MA Experiment 20001904 PARAMETER Experiment Name: At_Drought_Reproduction_P Parameter: Plant Line Value: WS
  misc_feature: MA Experiment 20001904 PARAMETER Experiment Name: At_Drought_Reproduction_P Parameter: Timepoint (day) Value: 7
  misc_feature: MA Experiment 20001904 PARAMETER Experiment Name: At_Drought_Reproduction_P Parameter: Tissue Value: Rosettes
  misc_feature: MA Experiment 20001904 PARAMETER Experiment Name: At_Drought_Reproduction_P Parameter: Treatment Value: Drought vs. No Drought
  misc_feature: MA Experiment ID: 20001905 Result: Down-regulated in Transcription
  misc_feature: MA Experiment 20001905 PARAMETER Experiment Name: At_Drought_Reproduction_P Parameter: Age (day) Value: 40
  misc_feature: MA Experiment 20001905 PARAMETER Experiment Name: At_Drought_Reproduction_P Parameter: Organism Value: A. thaliana
  misc_feature: MA Experiment 20001905 PARAMETER Experiment Name: At_Drought_Reproduction_P Parameter: Plant Line Value: WS
  misc_feature: MA Experiment 20001905 PARAMETER Experiment Name: At_Drought_Reproduction_P Parameter: Timepoint (day) Value: 10
  misc_feature: MA Experiment 20001905 PARAMETER Experiment Name: At_Drought_Reproduction_P Parameter: Tissue Value: Rosettes
  misc_feature: MA Experiment 20001905 PARAMETER Experiment Name: At_Drought_Reproduction_P Parameter: Treatment Value: Drought vs. No Drought
  misc_feature: MA Experiment ID: 20001906 Result: Down-regulated in Transcription
  misc_feature: MA Experiment 20001906 PARAMETER Experiment Name: At_Drought_Reproduction_P Parameter: Age (day) Value: 35
  misc_feature: MA Experiment 20001906 PARAMETER Experiment Name: At_Drought_Reproduction_P Parameter: Organism Value: A. thaliana
  misc_feature: MA Experiment 20001906 PARAMETER Experiment Name: At_Drought_Reproduction_P Parameter: Plant Line Value: WS
  misc_feature: MA Experiment 20001906 PARAMETER Experiment Name: At_Drought_Reproduction_P Parameter: Timepoint (day) Value: 5
  misc_feature: MA Experiment 20001906 PARAMETER Experiment Name: At_Drought_Reproduction_P Parameter: Tissue Value: Siliques
  misc_feature: MA Experiment 20001906 PARAMETER Experiment Name: At_Drought_Reproduction_P Parameter: Treatment Value: Drought vs. No Drought
  misc_feature: MA Experiment ID: 20001907 Result: Down-regulated in Transcription
  misc_feature: MA Experiment 20001907 PARAMETER Experiment Name: At_Drought_Reproduction_P Parameter: Age (day) Value: 37
  misc_feature: MA Experiment 20001907 PARAMETER Experiment Name: At_Drought_Reproduction_P Parameter: Organism Value: A. thaliana
  misc_feature: MA Experiment 20001907 PARAMETER Experiment Name: At_Drought_Reproduction_P Parameter: Plant Line Value: WS
  misc_feature: MA Experiment 20001907 PARAMETER Experiment Name: At_Drought_Reproduction_P Parameter: Timepoint (day) Value: 7
  misc_feature: MA Experiment 20001907 PARAMETER Experiment Name: At_Drought_Reproduction_P Parameter: Tissue Value: Siliques
  misc_feature: MA Experiment 20001907 PARAMETER Experiment Name: At_Drought_Reproduction_P Parameter: Treatment Value: Drought vs. No Drought
  misc_feature: MA Experiment ID: 20001911 Result: Down-regulated in Transcription
  misc_feature: MA Experiment 20001911 PARAMETER Experiment Name: At_Drought_Reproduction_P Parameter: Age (day) Value: 40
  misc_feature: MA Experiment 20001911 PARAMETER Experiment Name: At_Drought_Reproduction_P Parameter: Organism Value: A. thaliana
  misc_feature: MA Experiment 20001911 PARAMETER Experiment Name: At_Drought_Reproduction_P Parameter: Plant Line Value: WS
  misc_feature: MA Experiment 20001911 PARAMETER Experiment Name: At_Drought_Reproduction_P Parameter: Timepoint (day) Value: 10
  misc_feature: MA Experiment 20001911 PARAMETER Experiment Name: At_Drought_Reproduction_P Parameter: Tissue Value: Flowers
  misc_feature: MA Experiment 20001911 PARAMETER Experiment Name: At_Drought_Reproduction_P Parameter: Treatment Value: Drought vs. No Drought
  misc_feature: Pfam Name: HLH Pfam Description: Helix-loop-helix DNA-binding domain
atttttcttttagaaaccaaacttttcagatttctctctctccatttggcgatagaagaagtcatgtaccaatcatcatcctccacgtcatcatcatcgcagagatcatcgcttcccggcggcggaggactgatccgttacggctcagctccgggatcgtttctaaactctgtggttgacgaagtcatcggaggaggctcatcaaacgctcgtgacttcaccggctatcaaccgtcgtcggataacttcatcggtaactttttcaccggagctgctgactcatcctcgctgagatccgattcgacgacttgtggagtcaacaactcatccgacggacagaaacagctaggcaataacaataataataatagtaataaagatatcttcctcgacagatcctacggtggattcaacgagatctcgcaacaacacaagagcaacgacatcggaggaggaaacagctcaggatcttactctctcgctagacaacgtagctctcccgccgatttcttcacctacctcgcctcagataaaaacaatttctcgttgaaccaaccaaccagtgattatagtccgcaaggagggtctaatgggggacgaggacattccagattgaagtctcagctaagcttcacgaatcacgactctctggctcggatcaacgaggtcaatgagaccccagtccacgacggttcaggccattcgttttctgcggctagctttggtgcagccactactgattcttgggatgacggttccggttcgatagggtttaccgtgactaggcccagtaaacgatccaaggacatggactctggtctcttttcgcagtcttccttcagacacttcaatgaactacatggataacttcatgcagcttccagaagattctgtaccctgcaaaatccgggccaaacgcggctgcgccacccatcctagaagcatcgctgagcgggagaggagaacgagaataagtgggaagctaaagaagctacaagatcttgtccccaacatggataagcaaacaagctattcagacatgctggatttagctgtacaacacatcaaaggccttcagcatcaacttcagaatttgaaaaaagatcaagagaattgcacgtgtgggtgcagtgagaaaccaagctagctcaaacccaaaggtagggtcatcctaattttatttgcattgttccgattttatcatatgagagaattagagaagatgtaaataaaatagattatattaaatgtctaatcctcttataattaagctcctcattcgttatcattataagatagaacagtgacaattgtccattatgtttttgtttcaagtttatgttttgagtgtcgcctattttgt

SEQ ID NO: 81165 - protein, 288 aa, Arabidopsis thaliana
  peptide (1)..(288): Ceres Seq. ID no. 12658623
  misc_feature: Pfam Name: HLH Pfam Description: Helix-loop-helix DNA-binding domain
  misc_feature (22)..(279): Homolog of NCBI NO: 18390573 NR Description: bHLH protein; protein id: At1g05805.1, supported cDNA: 21406. [Arabidopsis thaliana] >gi|24030386|gb|AAN41354.1|
  misc_feature (22)..(279): Homolog of NCBI NO: 21554238 NR Description: Contains similarity to bHLH transcription factor
  misc_feature (22)..(279): Homolog of NCBI NO: 25406865 NR Description: hypothetical protein [imported] - Arabidopsis >gi|6850309|gb|AAF29386.1|AC009999_6 Contains similarity to bHLH
  misc_feature (147)..(271): Homolog of NCBI NO: 15224227 NR Description: bHLH protein; protein id: At2g43140.1
IFLLETKLFRFLSLHLAIEEVMYQSSSSTSSSSQRSSLPGGGGLIRYGSAPGSFLNSVVDEVIGGGSSNARDFTGYQPSSDNFIGNFFTGAADSSSLRSDSTTCGVNNSSDGQKQLGNNNNNNSNKDIFLDRSYGGFNEISQQHKSNDIGGGNSSGSYSLARQRSSPADFFTYLASDKNNFSLNQPTSDYSPQGGSNGGRGHSRLKSQLSFTNHDSLARINEVNETPVHDGSGHSFSAASFGAATTDSWDDGSGSIGFTVTRPSKRSKDMDSGLFSQSSFRHFNELHG

SEQ ID NO: 81166 - protein, 267 aa, Arabidopsis thaliana
  peptide (1)..(267): Ceres Seq. ID no. 12658624
  misc_feature: Pfam Name: HLH Pfam Description: Helix-loop-helix DNA-binding domain
  misc_feature (1)..(258): Homolog of NCBI NO: 18390573 NR Description: bHLH protein; protein id: At1g05805.1, supported cDNA: 21406. [Arabidopsis thaliana] >gi|24030386|gb|AAN41354.1|
  misc_feature (1)..(258): Homolog of NCBI NO: 21554238 NR Description: Contains similarity to bHLH transcription factor
  misc_feature (1)..(258): Homolog of NCBI NO: 25406865 NR Description: hypothetical protein [imported] - Arabidopsis >gi|6850309|gb|AAF29386.1|AC009999_6 Contains similarity to bHLH
  misc_feature (126)..(250): Homolog of NCBI NO: 15224227 NR Description: bHLH protein; protein id: At2g43140.1
MYQSSSSTSSSSQRSSLPGGGGLIRYGSAPGSFLNSVVDEVIGGGSSNARDFTGYQPSSDNFIGNFFTGAADSSSLRSDSTTCGVNNSSDGQKQLGNNNNNNSNKDIFLDRSYGGFNEISQQHKSNDIGGGNSSGSYSLARQRSSPADFFTYLASDKNNFSLNQPTSDYSPQGGSNGGRGHSRLKSQLSFTNHDSLARINEVNETPVHDGSGHSFSAASFGAATTDSWDDGSGSIGFTVTRPSKRSKDMDSGLFSQSSFRHFNELHG

SEQ ID NO: 81167 - DNA, 844 bp, Arabidopsis thaliana
  misc_feature (1)..(844): Ceres Seq. ID no. 12658637
  misc_feature: MA Experiment ID: 20000184 Result: Down-regulated in Transcription
  misc_feature: MA Experiment 20000184 PARAMETER Experiment Name: At_Shoots__P Parameter: Age (day) Value: 7
  misc_feature: MA Experiment 20000184 PARAMETER Experiment Name: At_Shoots__P Parameter: Tissue Value: Shoots vs. Whole Plant
  misc_feature: MA Experiment ID: 20000794 Result: Up-regulated in Transcription
  misc_feature: MA Experiment 20000794 PARAMETER Experiment Name: At_Petals_P Parameter: Age (day) Value: 23-25 days
  misc_feature: MA Experiment 20000794 PARAMETER Experiment Name: At_Petals_P Parameter: Plant Line Value: WS
  misc_feature: MA Experiment 20000794 PARAMETER Experiment Name: At_Petals_P Parameter: Tissue Value: Petals vs. Whole plant
  misc_feature: MA Experiment ID: 20001247 Result: Up-regulated in Transcription
  misc_feature: MA Experiment 20001247 PARAMETER Experiment Name: At_Far-red-induction_P Parameter: Age (day) Value: 7
  misc_feature: MA Experiment 20001247 PARAMETER Experiment Name: At_Far-red-induction_P Parameter: Light Value: Far-red vs. White
  misc_feature: MA Experiment 20001247 PARAMETER Experiment Name: At_Far-red-induction_P Parameter: Organism Value: A. thaliana
  misc_feature: MA Experiment 20001247 PARAMETER Experiment Name: At_Far-red-induction_P Parameter: Plant Line Value: Columbia
  misc_feature: MA Experiment 20001247 PARAMETER Experiment Name: At_Far-red-induction_P Parameter: Timepoint (hr) Value: 1
  misc_feature: MA Experiment 20001247 PARAMETER Experiment Name: At_Far-red-induction_P Parameter: Tissue Value: Whole Plant
  misc_feature: MA Experiment ID: 20001450 Result: Up-regulated in Transcription
  misc_feature: MA Experiment 20001450 PARAMETER Experiment Name: At_Far-red-induction_P Parameter: Age (day) Value: 7
  misc_feature: MA Experiment 20001450 PARAMETER Experiment Name: At_Far-red-induction_P Parameter: Light Value: Far-red vs. White
  misc_feature: MA Experiment 20001450 PARAMETER Experiment Name: At_Far-red-induction_P Parameter: Organism Value: A. thaliana
  misc_feature: MA Experiment 20001450 PARAMETER Experiment Name: At_Far-red-induction_P Parameter: Plant Line Value: Columbia
  misc_feature: MA Experiment 20001450 PARAMETER Experiment Name: At_Far-red-induction_P Parameter: Timepoint (hr) Value: 8
  misc_feature: MA Experiment 20001450 PARAMETER Experiment Name: At_Far-red-induction_P Parameter: Tissue Value: Whole Plant
  misc_feature: MA Experiment ID: 20001451 Result: Up-regulated in Transcription
  misc_feature: MA Experiment 20001451 PARAMETER Experiment Name: At_Far-red-induction_P Parameter: Age (day) Value: 7
  misc_feature: MA Experiment 20001451 PARAMETER Experiment Name: At_Far-red-induction_P Parameter: Light Value: Far-red vs. White
  misc_feature: MA Experiment 20001451 PARAMETER Experiment Name: At_Far-red-induction_P Parameter: Organism Value: A. thaliana
  misc_feature: MA Experiment 20001451 PARAMETER Experiment Name: At_Far-red-induction_P Parameter: Plant Line Value: Columbia
  misc_feature: MA Experiment 20001451 PARAMETER Experiment Name: At_Far-red-induction_P Parameter: Timepoint (hr) Value: 24
  misc_feature: MA Experiment 20001451 PARAMETER Experiment Name: At_Far-red-induction_P Parameter: Tissue Value: Whole Plant
attccctaatcccaaaattcgatctctcatctgatggctggttacagagccgatgaagagtacgattacctcttcaagctcgtgttgatcggcgactctggtgtcggcaaatcgaatctgctctctcggttcaccaagaacgagttcaatctcgaatccaagtctactattggtgttgagttcgctaccaaaaccactaaagtcgaaggcaaagtcgtcaaagctcagatttgggatactgctggtcaagagagataccgagcaatcacaagcgcttattacagaggagctgttggtgctttgcttatttacgacgtgacaaggcacgcaacatttgagaatgcagcaagatggctaagggaactaagaggacacacagacccaaacatagtggtgatgcttatagggaacaagtgcgatctgcgtcacttggtggcagtcaaaacagaagaggctaaagcctttgctgagagagaatccctctatttcatggagacttcagctctagacgcaaccaatgttgaaaacgcattcacggaagtgctcactcagatccacaagatagtgagcaaaagaagtgttgatggaggaggagagtcggctgatttaccgggaaaaggagagacgataaacgttaaagaagacggatcggttcttaagagaatgggttgctgctctaactagagtggggggattgtagatttggcttgatttggttagggtgagacaacaaatgataatctctttgggtcttgcaatcaaaaaagaaataagaaacgattacttttaagatcatgtgtatgctttggtaactttggcctgtaaggtcctttaaaatttaagt

SEQ ID NO: 81168 - protein, 216 aa, Arabidopsis thaliana; identical to SEQ ID NO: 20728
  peptide (1)..(216): Ceres Seq. ID no. 12658638
  misc_feature (15)..(176): Pfam Name: Ras family Pfam Description: Ras family
  misc_feature (1)..(216): Homolog of NCBI NO: 15221477 NR Description: Ras-related GTP-binding protein (RAB11D); protein At1g06400.1, supported by cDNA: gi_12083263, supported by cDNA:
  misc_feature (1)..(215): Homolog of NCBI NO: 3024502 NR Description: RAS-RELATED PROTEIN RAB11D

SEQ ID NO: 81169 - DNA, 1107 bp, Arabidopsis thaliana
  misc_feature (1)..(1107): Ceres Seq. ID no. 12658639
  misc_feature: MA Experiment ID: 108488 Result: Down-regulated in Transcription
  misc_feature: MA Experiment ID: 108573 Result: Up-regulated in Transcription
  misc_feature: MA Experiment 108573 PARAMETER Experiment Name: At_Drought_cDNA_P Parameter: Timepoint (hr) Value: 6
  misc_feature: MA Experiment 108573 PARAMETER Experiment Name: At_Drought_cDNA_P Parameter: Tissue Value: Aerial
  misc_feature: MA Experiment 108573 PARAMETER Experiment Name: At_Drought_cDNA_P Parameter: Treatment Value: Drought vs. No Drought
  misc_feature: MA Experiment ID: 108577 Result: Down-regulated in Transcription
  misc_feature: MA Experiment 108577 PARAMETER Experiment Name: At_42deg_Heat_cDNA_P Parameter: Temperature (deg C) Value: 42 vs. 22
  misc_feature: MA Experiment 108577 PARAMETER Experiment Name: At_42deg_Heat_cDNA_P Parameter: Timepoint (hr) Value: 6
  misc_feature: MA Experiment 108577 PARAMETER Experiment Name: At_42deg_Heat_cDNA_P Parameter: Tissue Value: Aerial
  misc_feature: MA Experiment ID: 108595 Result: Down-regulated in Transcription
  misc_feature: MA Experiment 108595 PARAMETER Experiment Name: At_Ler-pi_Ovule_cDNA_P Parameter: Plant Line Value: null
atcgtaaactataatcggcgtctctccggactcacacctcatcgaaatttggccatctcatctggcttcttcccctccggcgttggataaccatcattacttctcgcgccggcttcgagtggaacaatatggatcctcgtcaattcgaacacaccgttgttgctgataatgatattcacagcattgttatgtcatatcttctgcacaactgcttcaacgaaactgcggactcacttgcttcttccactggagttaagcagcctgcaattgatcgtgataacatggagagaagaaaacaaataatacattttatactggagaggaaggcgttgaaggcttttgaactaactgaacaactagcacaagacttgcttgagaaaaacaaggatttgcaattcgatcttctatgccttcattttgtggagctaatctgtgctgggaactgcaccgaagctctcaaatttggtaagacaagattggctccttttgggaaggtcaaaaaatatgtagaaaagcttgaagacgtaatggcattgctcgcttatgaagaccctgagaaatccccaatgttccatcttttgagctctgaataccgccaacaagttgctgataatctgaaccgcacaattcttgaacacacaaaccacccgagctacacaccaatggaaaggatcatacaacaggtgacagttgtgagacaatacttgactgaggagaatggcaaagatgcgtttcctccattctctctgaaggattctctcaaaggctaagatcgcaggactactccaaagtttgctaggaggaggatatgctaagcattgtcatgtaaatacaaaaagaccttgctcctctctaaagtttgcaaggttagtcttccatggccacaggcggggtttcagtttgctgttacaggagatcaatattgtgaaggacagtttcggcttggtttggtttggtttggttcagttctctaccagaagattgtttcatcaactttgtgtgagtttagtcgataaatctgtaatccatatctttggaatacacatttctctttgtaactatcgtttatgttttgatagaatacttgcaaattcaaggttttatttt

SEQ ID NO: 81170 - protein, 213 aa, Arabidopsis thaliana; identical to SEQ ID NO: 43075
  peptide (1)..(213): Ceres Seq. ID no. 12658640
  misc_feature (1)..(213): Homolog of NCBI NO: 18390607 NR Description: expressed protein; protein id: At1g06060.1, by cDNA: 155315. [Arabidopsis thaliana] >gi|25406893|pir||G86195
  misc_feature (1)..(166): Homolog of NCBI NO: 34910006 NR Description: P0413G02.3 [Oryza sativa (japonica
  misc_feature (51)..(208): Homolog of NCBI NO: 34910006 NR Description: P0413G02.3 [Oryza sativa (japonica
  misc_feature (15)..(213): Homolog of NCBI NO: 8923557 NR Description: chromosome 20 open reading frame 11; two hybrid protein 1 [Homo sapiens] >gi|28201788|sp|Q9NWU2|CT11_HUMAN C20orf11 >gi|7020818|dbj|BAA91285.1| unnamed protein product
  misc_feature (15)..(213): Homolog of NCBI NO: 21594655 NR Description: chromosome 20 open reading frame 11 [Homo sapiens]
  misc_feature (1)..(199): Homolog of NCBI NO: 37748055 NR Description: Unknown (protein for MGC:73100) [Danio rerio]
  misc_feature (15)..(213): Homolog of NCBI NO: 20863687 NR Description: RIKEN cDNA 2310003C23 [Mus musculus] RIKEN cDNA 2310003C23 [Mus musculus] similar to RIKEN cDNA 2310003C23 [Mus musculus] [Rattus
  misc_feature (15)..(178): Homolog of NCBI NO: 24643081 NR Description: CG6617-PA [Drosophila melanogaster]
  misc_feature (15)..(196): Homolog of NCBI NO: 15219873 NR Description: hypothetical protein; protein id: At1g61150.1 thaliana] >gi|27808548|gb|AAO24554.1| At1g61150 [Arabidopsis
  misc_feature (15)..(196): Homolog of NCBI NO: 25404311 NR Description: hypothetical protein F11P17.12 [imported] - thaliana >gi|2443886|gb|AAB71479.1| Unknown protein [Arabidopsis

SEQ ID NO: 81171 - protein, 193 aa, Arabidopsis thaliana; identical to SEQ ID NO: 43076
  peptide (1)..(193): Ceres Seq. ID no. 12658641
  misc_feature (1)..(193): Homolog of NCBI NO: 18390607 NR Description: expressed protein; protein id: At1g06060.1, by cDNA: 155315. [Arabidopsis thaliana] >gi|25406893|pir||G86195
  misc_feature (1)..(146): Homolog of NCBI NO: 34910006 NR Description: P0413G02.3 [Oryza sativa (japonica
  misc_feature (31)..(188): Homolog of NCBI NO: 34910006 NR Description: P0413G02.3 [Oryza sativa (japonica
  misc_feature (1)..(193): Homolog of NCBI NO: 8923557 NR Description: chromosome 20 open reading frame 11; two hybrid protein 1 [Homo sapiens] >gi|28201788|sp|Q9NWU2|CT11_HUMAN C20orf11 >gi|7020818|dbj|BAA91285.1| unnamed protein product
  misc_feature (1)..(193): Homolog of NCBI NO: 21594655 NR Description: chromosome 20 open reading frame 11 [Homo sapiens]
  misc_feature (1)..(179): Homolog of NCBI NO: 37748055 NR Description: Unknown (protein for MGC:73100) [Danio rerio]
  misc_feature (1)..(193): Homolog of NCBI NO: 20863687 NR Description: RIKEN cDNA 2310003C23 [Mus musculus] RIKEN cDNA 2310003C23 [Mus musculus] similar to RIKEN cDNA 2310003C23 [Mus musculus] [Rattus
  misc_feature (1)..(158): Homolog of NCBI NO: 24643081 NR Description: CG6617-PA [Drosophila melanogaster]
  misc_feature (1)..(176): Homolog of NCBI NO: 15219873 NR Description: hypothetical protein; protein id: At1g61150.1 thaliana] >gi|27808548|gb|AAO24554.1| At1g61150 [Arabidopsis
  misc_feature (1)..(176): Homolog of NCBI NO: 25404311 NR Description: hypothetical protein F11P17.12 [imported] - thaliana >gi|2443886|gb|AAB71479.1| Unknown protein [Arabidopsis

SEQ ID NO: 81172 - protein, 162 aa, Arabidopsis thaliana; identical to SEQ ID NO: 43077
  peptide (1)..(162): Ceres Seq. ID no. 12658642
  misc_feature (1)..(162): Homolog of NCBI NO: 18390607 NR Description: expressed protein; protein id: At1g06060.1, by cDNA: 155315. [Arabidopsis thaliana] >gi|25406893|pir||G86195
  misc_feature (1)..(115): Homolog of NCBI NO: 34910006 NR Description: P0413G02.3 [Oryza sativa (japonica
  misc_feature (1)..(157): Homolog of NCBI NO: 34910006 NR Description: P0413G02.3 [Oryza sativa (japonica
  misc_feature (1)..(162): Homolog of NCBI NO: 8923557 NR Description: chromosome 20 open reading frame 11; two hybrid protein 1 [Homo sapiens] >gi|28201788|sp|Q9NWU2|CT11_HUMAN C20orf11 >gi|7020818|dbj|BAA91285.1| unnamed protein product
  misc_feature (1)..(162): Homolog of NCBI NO: 21594655 NR Description: chromosome 20 open reading frame 11 [Homo sapiens]
  misc_feature (1)..(148): Homolog of NCBI NO: 37748055 NR Description: Unknown (protein for MGC:73100) [Danio rerio]
  misc_feature (1)..(162): Homolog of NCBI NO: 20863687 NR Description: RIKEN cDNA 2310003C23 [Mus musculus] RIKEN cDNA 2310003C23 [Mus musculus] similar to RIKEN cDNA 2310003C23 [Mus musculus] [Rattus
  misc_feature (1)..(127): Homolog of NCBI NO: 24643081 NR Description: CG6617-PA [Drosophila melanogaster]
  misc_feature (1)..(145): Homolog of NCBI NO: 15219873 NR Description: hypothetical protein; protein id: At1g61150.1 thaliana] >gi|27808548|gb|AAO24554.1| At1g61150 [Arabidopsis
  misc_feature (1)..(145): Homolog of NCBI NO: 25404311 NR Description: hypothetical protein F11P17.12 [imported] - thaliana >gi|2443886|gb|AAB71479.1| Unknown protein [Arabidopsis

SEQ ID NO: 81173 - DNA, 1202 bp, Arabidopsis thaliana
  misc_feature (1)..(1202): Ceres Seq. ID no. 12658643
  misc_feature: MA Experiment ID: 108585 Result: Up-regulated in Transcription
  misc_feature: MA Experiment 108585 PARAMETER Experiment Name: At_5mM_NaNP_cDNA_P Parameter: Timepoint (hr) Value: 6
  misc_feature: MA Experiment 108585 PARAMETER Experiment Name: At_5mM_NaNP_cDNA_P Parameter: Tissue Value: Aerial
  misc_feature: MA Experiment 108585 PARAMETER Experiment Name: At_5mM_NaNP_cDNA_P Parameter: Treatment Value: null
  misc_feature: MA Experiment ID: 20000180 Result: Down-regulated in Transcription
  misc_feature: MA Experiment 20000180 PARAMETER Experiment Name: At_Germinating_Seeds_P Parameter: Age (hr) Value: 24 vs. 0
  misc_feature: MA Experiment 20000180 PARAMETER Experiment Name: At_Germinating_Seeds_P Parameter: Tissue Value: Germinating Seeds
  misc_feature: MA Experiment ID: 20000184 Result: Down-regulated in Transcription
  misc_feature: MA Experiment 20000184 PARAMETER Experiment Name: At_Shoots__P Parameter: Age (day) Value: 7
  misc_feature: MA Experiment 20000184 PARAMETER Experiment Name: At_Shoots__P Parameter: Tissue Value: Shoots vs. Whole Plant
  misc_feature: MA Experiment ID: 20000227 Result: Down-regulated in Transcription
  misc_feature: MA Experiment 20000227 PARAMETER Experiment Name: At_Root-Tips-vs-Tops_P Parameter: Tissue Value: Root Tips vs. Root Tops
  misc_feature: MA Experiment ID: 20001557 Result: Down-regulated in Transcription
  misc_feature: MA Experiment 20001557 PARAMETER Experiment Name: At_Drought_Soil_Dry_P Parameter: Age (day) Value: 27
  misc_feature: MA Experiment 20001557 PARAMETER Experiment Name: At_Drought_Soil_Dry_P Parameter: Organism Value: A. thaliana
  misc_feature: MA Experiment 20001557 PARAMETER Experiment Name: At_Drought_Soil_Dry_P Parameter: Plant Line Value: WS
  misc_feature: MA Experiment 20001557 PARAMETER Experiment Name: At_Drought_Soil_Dry_P Parameter: Post Timepoint (hr) Value: 3
  misc_feature: MA Experiment 20001557 PARAMETER Experiment Name: At_Drought_Soil_Dry_P Parameter: Post-Treatment Value: Re-Water vs. No Drought
  misc_feature: MA Experiment 20001557 PARAMETER Experiment Name: At_Drought_Soil_Dry_P Parameter: Timepoint (day) Value: 13
  misc_feature: MA Experiment 20001557 PARAMETER Experiment Name: At_Drought_Soil_Dry_P Parameter: Treatment Value: Drought vs. No Drought
agagaaagatgcaagccatctccaaagtttcttctgcagcatcattctttagatgttctaggctagttagtcagccatgtgtgaggccttgcgtgagacagcttcacgtcagaaagggtcttgtctctggtgtcatgaagctgttctcttcacctcttaggactttgcgtgatgctggtaaatccgttcgcatttcaagattctgcagtgtctccaatgtctcttcctcattgcaaattgaactggtgccatgtcttacggacaactatgcttatatcttacatgatgaggataccggtacagttggtgtggttgacccttctgaagctgtacctgttatggatgccctccagaagaatagtcgaaatctaacttatatattaaatacacatcaccattatgatcacactggtggcaatttggaattaaaagacaggtatggtgcaaaggtgatcggctcagctgcagatagggaccggattcctggaattgatgtagccttgaaagatgctgacaaatggatgtttgctggccatgaagtccatattatggaaactcctggccacaccagaggccatattagtttctactttccaggggcacgagcaattttcaccggggacaccttgtttagcttatcatgtggtaaactcttcgaaggtactccagagcagatgctagcttctctacagaggataattgcgttgccagatgacacaagcgtatactgtggccatgaatatacactgagtaattccaagtttgcattgtctatagaaccaacaaacgaagtgctccagtcttatgcagcctacgttgcagaactccgtgacaagaaattaccaacgattccaacgacgatgaagatggagaaagcttgtaacccgtttctccgcactgagaacacagatatccgtcgagctttaggtattccagagacagcagatgaagcagaagctctgggtattataagaagagcaaaggacaatttcaaagcttagctaaaatataataagaatggttcctctgtacagtgatgatgcgatcctggtttaatctgtaataaggtgttttgagttttgaccgtgacgttacgtctcctagtagttttcatggtcatactcgaaatgattttttttttccttttgatcaaacggtcctaagtacccaagtttctactttgatgaaccctcgaattttgt

SEQ ID NO: 81174 - protein, 332 aa, Arabidopsis thaliana
  peptide (1)..(332): Ceres Seq. ID no. 12658644
  misc_feature (87)..(245): Pfam Name: Metallo-beta-lactamase superfamily Pfam Description: Metallo-beta-lactamase superfamily
  misc_feature (3)..(332): Homolog of NCBI NO: 30679573 NR Description: glyoxalase II, putative (hydroxyacylglutathione [Arabidopsis thaliana] >gi|20466237|gb|AAM20436.1| glyoxalase II putative [Arabidopsis thaliana] >gi|22136310|gb|AAM91233.1|
  misc_feature (3)..(332): Homolog of NCBI NO: 18390616 NR Description: glyoxalase II, putative (hydroxyacylglutathione protein id: At1g06130.1, supported by cDNA: 17756. [Arabidopsis >gi|21553879|gb|AAM62972.1| glyoxalase II isozyme, putative
  misc_feature (20)..(332): Homolog of NCBI NO: 25406895 NR Description: hypothetical protein [imported] - Arabidopsis >gi|8810475|gb|AAF80136.1|AC024174_18 Contains similarity to II isozyme from Arabidopsis thaliana gb|U90927 and is a
  misc_feature (3)..(330): Homolog of NCBI NO: 30684920 NR Description: glyoxalase II, putative (hydroxyacylglutathione
  misc_feature (3)..(330): Homolog of NCBI NO: 15224661 NR Description: glyoxalase II, putative (hydroxyacylglutathione protein id: At2g31350.1, supported by cDNA: gi_18176313, by cDNA: gi_20465674 [Arabidopsis thaliana]
  misc_feature (3)..(330): Homolog of NCBI NO: 18406237 NR Description: glyoxalase II (hydroxyacylglutathione protein id: At2g43430.1, supported by cDNA: gi_17380663, by cDNA: gi_20259002, supported by cDNA: gi_2570339 [Arabidopsis
  misc_feature (3)..(330): Homolog of NCBI NO: 2570340 NR Description: glyoxalase II mitochondrial isozyme [Arabidopsis
  misc_feature (3)..(330): Homolog of NCBI NO: 16209608 NR Description: glyoxalase II [Oryza sativa]
  misc_feature (3)..(330): Homolog of NCBI NO: 21070362 NR Description: glyoxalase II [Pennisetum glaucum]
  misc_feature (6)..(330): Homolog of NCBI NO: 28143946 NR Description: glyoxalase II [Brassica juncea]
RKMQAISKVSSAASFFRCSRLVSQPCVRPCVRQLHVRKGLVSGVMKLFSSPLRTLRDAGKSVRISRFCSVSNVSSSLQIELVPCLTDNYAYILHDEDTGTVGVVDPSEAVPVMDALQKNSRNLTYILNTHHHYDHTGGNLELKDRYGAKVIGSAADRDRIPGIDVALKDADKWMFAGHEVHIMETPGHTRGHISFYFPGARAIFTGDTLFSLSCGKLFEGTPEQMLASLQRIIALPDDTSVYCGHEYTLSNSKFALSIEPTNEVLQSYAAYVAELRDKKLPTIPTTMKMEKACNPFLRTENTDIRRALGIPETADEAEALGIIRRAKDNFKA

SEQ ID NO: 81175 - protein, 330 aa, Arabidopsis thaliana; identical to SEQ ID NO: 30416
  peptide (1)..(330): Ceres Seq. ID no. 12658645
  misc_feature (85)..(243): Pfam Name: Metallo-beta-lactamase superfamily Pfam Description: Metallo-beta-lactamase superfamily
  misc_feature (1)..(330): Homolog of NCBI NO: 30679573 NR Description: glyoxalase II, putative (hydroxyacylglutathione [Arabidopsis thaliana] >gi|20466237|gb|AAM20436.1| glyoxalase II putative [Arabidopsis thaliana] >gi|22136310|gb|AAM91233.1|
  misc_feature (1)..(330): Homolog of NCBI NO: 18390616 NR Description: glyoxalase II, putative (hydroxyacylglutathione protein id: At1g06130.1, supported by cDNA: 17756. [Arabidopsis >gi|21553879|gb|AAM62972.1| glyoxalase II isozyme, putative
  misc_feature (18)..(330): Homolog of NCBI NO: 25406895 NR Description: hypothetical protein [imported] - Arabidopsis >gi|8810475|gb|AAF80136.1|AC024174_18 Contains similarity to II isozyme from Arabidopsis thaliana gb|U90927 and is a
  misc_feature (1)..(328): Homolog of NCBI NO: 30684920 NR Description: glyoxalase II, putative (hydroxyacylglutathione
  misc_feature (1)..(328): Homolog of NCBI NO: 15224661 NR Description: glyoxalase II, putative (hydroxyacylglutathione protein id: At2g31350.1, supported by cDNA: gi_18176313, by cDNA: gi_20465674 [Arabidopsis thaliana]
  misc_feature (1)..(328): Homolog of NCBI NO: 18406237 NR Description: glyoxalase II (hydroxyacylglutathione protein id: At2g43430.1, supported by cDNA: gi_17380663, by cDNA: gi_20259002, supported by cDNA: gi_2570339 [Arabidopsis
  misc_feature (1)..(328): Homolog of NCBI NO: 2570340 NR Description: glyoxalase II mitochondrial isozyme [Arabidopsis
  misc_feature (1)..(328): Homolog of NCBI NO: 16209608 NR Description: glyoxalase II [Oryza sativa]
  misc_feature (1)..(328): Homolog of NCBI NO: 21070362 NR Description: glyoxalase II [Pennisetum glaucum]
  misc_feature (4)..(328): Homolog of NCBI NO: 28143946 NR Description: glyoxalase II [Brassica juncea]

SEQ ID NO: 81176 - protein, 288 aa, Arabidopsis thaliana; identical to SEQ ID NO: 30417
  peptide (1)..(288): Ceres Seq. ID no. 12658646
  misc_feature (43)..(201): Pfam Name: Metallo-beta-lactamase superfamily Pfam Description: Metallo-beta-lactamase superfamily
  misc_feature (1)..(288): Homolog of NCBI NO: 30679573 NR Description: glyoxalase II, putative (hydroxyacylglutathione [Arabidopsis thaliana] >gi|20466237|gb|AAM20436.1| glyoxalase II putative [Arabidopsis thaliana] >gi|22136310|gb|AAM91233.1|
  misc_feature (1)..(288): Homolog of NCBI NO: 18390616 NR Description: glyoxalase II, putative (hydroxyacylglutathione protein id: At1g06130.1, supported by cDNA: 17756. [Arabidopsis >gi|21553879|gb|AAM62972.1| glyoxalase II isozyme, putative
  misc_feature (1)..(288): Homolog of NCBI NO: 25406895 NR Description: hypothetical protein [imported] - Arabidopsis >gi|8810475|gb|AAF80136.1|AC024174_18 Contains similarity to II isozyme from Arabidopsis thaliana gb|U90927 and is a
  misc_feature (1)..(286): Homolog of NCBI NO: 30684920 NR Description: glyoxalase II, putative (hydroxyacylglutathione
  misc_feature (1)..(286): Homolog of NCBI NO: 15224661 NR Description: glyoxalase II, putative (hydroxyacylglutathione protein id: At2g31350.1, supported by cDNA: gi_18176313, by cDNA: gi_20465674 [Arabidopsis thaliana]
  misc_feature (1)..(286): Homolog of NCBI NO: 18406237 NR Description: glyoxalase II (hydroxyacylglutathione protein id: At2g43430.1, supported by cDNA: gi_17380663, by cDNA: gi_20259002, supported by cDNA: gi_2570339 [Arabidopsis
  misc_feature (1)..(286): Homolog of NCBI NO: 2570340 NR Description: glyoxalase II mitochondrial isozyme [Arabidopsis
  misc_feature (1)..(286): Homolog of NCBI NO: 16209608 NR Description: glyoxalase II [Oryza sativa]
  misc_feature (1)..(286): Homolog of NCBI NO: 21070362 NR Description: glyoxalase II [Pennisetum glaucum]
  misc_feature (1)..(286): Homolog of NCBI NO: 28143946 NR Description: glyoxalase II [Brassica juncea]

SEQ ID NO: 81177 - DNA, 907 bp, Arabidopsis thaliana
  misc_feature (1)..(907): Ceres Seq. ID no. 12658685
  misc_feature: MA Experiment ID: 20000180 Result: Up-regulated in Transcription
  misc_feature: MA Experiment 20000180 PARAMETER Experiment Name: At_Germinating_Seeds_P Parameter: Age (hr) Value: 24 vs. 0
  misc_feature: MA Experiment 20000180 PARAMETER Experiment Name: At_Germinating_Seeds_P Parameter: Tissue Value: Germinating Seeds
  misc_feature: MA Experiment ID: 20000184 Result: Up-regulated in Transcription
  misc_feature: MA Experiment 20000184 PARAMETER Experiment Name: At_Shoots__P Parameter: Age (day) Value: 7
  misc_feature: MA Experiment 20000184 PARAMETER Experiment Name: At_Shoots__P Parameter: Tissue Value: Shoots vs. Whole Plant
  misc_feature: MA Experiment ID: 20000286 Result: Up-regulated in Transcription
  misc_feature: MA Experiment 20000286 PARAMETER Experiment Name: At_Open_Flower_P Parameter: Age (day) Value: 21
  misc_feature: MA Experiment 20000286 PARAMETER Experiment Name: At_Open_Flower_P Parameter: Plant Line Value: WS
  misc_feature: MA Experiment 20000286 PARAMETER Experiment Name: At_Open_Flower_P Parameter: Tissue Value: Half Open vs. Whole Plant
  misc_feature: MA Experiment ID: 20000439 Result: Up-regulated in Transcription
  misc_feature: MA Experiment 20000439 PARAMETER Experiment Name: At_Roots__P Parameter: Age (day) Value: 14 vs. 21
  misc_feature: MA Experiment 20000439 PARAMETER Experiment Name: At_Roots__P Parameter: Organism Value: A. thaliana
  misc_feature: MA Experiment 20000439 PARAMETER Experiment Name: At_Roots__P Parameter: Tissue Value: Roots vs. Whole Plant
  misc_feature: MA Experiment ID: 20001247 Result: Up-regulated in Transcription
  misc_feature: MA Experiment 20001247 PARAMETER Experiment Name: At_Far-red-induction_P Parameter: Age (day) Value: 7
  misc_feature: MA Experiment 20001247 PARAMETER Experiment Name: At_Far-red-induction_P Parameter: Light Value: Far-red vs. White
  misc_feature: MA Experiment 20001247 PARAMETER Experiment Name: At_Far-red-induction_P Parameter: Organism Value: A. thaliana
  misc_feature: MA Experiment 20001247 PARAMETER Experiment Name: At_Far-red-induction_P Parameter: Plant Line Value: Columbia
  misc_feature: MA Experiment 20001247 PARAMETER Experiment Name: At_Far-red-induction_P Parameter: Timepoint (hr) Value: 1
  misc_feature: MA Experiment 20001247 PARAMETER Experiment Name: At_Far-red-induction_P Parameter: Tissue Value: Whole Plant
  misc_feature: MA Experiment ID: 20001248 Result: Up-regulated in Transcription
  misc_feature: MA Experiment 20001248 PARAMETER Experiment Name: At_Far-red-induction_P Parameter: Age (day) Value: 7
  misc_feature: MA Experiment 20001248 PARAMETER Experiment Name: At_Far-red-induction_P Parameter: Light Value: Far-red vs. White
  misc_feature: MA Experiment 20001248 PARAMETER Experiment Name: At_Far-red-induction_P Parameter: Organism Value: A. thaliana
  misc_feature: MA Experiment 20001248 PARAMETER Experiment Name: At_Far-red-induction_P Parameter: Plant Line Value: Columbia
  misc_feature: MA Experiment 20001248 PARAMETER Experiment Name: At_Far-red-induction_P Parameter: Timepoint (hr) Value: 4
  misc_feature: MA Experiment 20001248 PARAMETER Experiment Name: At_Far-red-induction_P Parameter: Tissue Value: Whole Plant
  misc_feature: MA Experiment ID: 20001911 Result: Down-regulated in Transcription
  misc_feature: MA Experiment 20001911 PARAMETER Experiment Name: At_Drought_Reproduction_P Parameter: Age (day) Value: 40
  misc_feature: MA Experiment 20001911 PARAMETER Experiment Name: At_Drought_Reproduction_P Parameter: Organism Value: A. thaliana
  misc_feature: MA Experiment 20001911 PARAMETER Experiment Name: At_Drought_Reproduction_P Parameter: Plant Line Value: WS
  misc_feature: MA Experiment 20001911 PARAMETER Experiment Name: At_Drought_Reproduction_P Parameter: Timepoint (day) Value: 10
  misc_feature: MA Experiment 20001911 PARAMETER Experiment Name: At_Drought_Reproduction_P Parameter: Tissue Value: Flowers
  misc_feature: MA Experiment 20001911 PARAMETER Experiment Name: At_Drought_Reproduction_P Parameter: Treatment Value: Drought vs. No Drought
atggagaaatcagatcctccaccagtcccaaagcccggcgccactattatcccctcctccgatccaattcctaatgccgatccgattccatcttcttccttccaccgccgatctcgctccgacgatatgtccatgttcatgttcatggatcccctctcctccgccgcaccaccttcctccgacgaccttccctccgacgacgatctcttctcttctttcatcgatgtcgatagcctcacctctaatcccaatccctttcaaaatccttccctctcctccaactccgtttccggcgctgctaatcctcctcctcctccttcctctcgtcctcgccaccgtcacagcaattccgttgacgctggatgcgccatgtatgccggtgatatcatggacgctaagaaagctatgcctcctgaaaaactctctgagctttggaacatcgatcccaaacgcgccaaaaggattctagcgaatcgacaatctgcagctcgatccaaagagagaaaagctcgatacattcaagaacttgagcgcaaagttcaatctcttcaaaccgaagctaccactctctctgctcagcttactctctaccagagagacacaaatggactagcaaacgaaaacacagagctgaaacttaggttgcaagcaatggaacaacaagctcagcttcgtaatgctttaaacgaagcgttgaggaaagaagttgaaaggatgaagatggagacaggagaaatctctgatgcattctagtttcaatcctatggagatgtccaattctcaaagcgtgtcggactttctacagaacggccgaatgcaagggctggagattagtagcaatagctcaagcttagtcaaatctgaaggaccttctctctctgctagtgagagtagctctgcctattga

SEQ ID NO: 81178 - protein, 250 aa, Arabidopsis thaliana
  peptide (1)..(250): Ceres Seq. ID no. 12658686
  misc_feature (146)..(210): Pfam Name: bZIP transcription factor Pfam Description: bZIP transcription factor
  misc_feature (1)..(247): Homolog of NCBI NO: 15222213 NR Description: bZIP protein; protein id: At1g06850.1, supported cDNA: gi_17064795 [Arabidopsis thaliana] Similar to bZIP transcription factors [Arabidopsis thaliana]
  misc_feature (1)..(247): Homolog of NCBI NO: 25406943 NR Description: hypothetical protein [imported] - Arabidopsis >gi|7523698|gb|AAF63137.1|AC011001_7 Similar to bZIP
  misc_feature (1)..(250): Homolog of NCBI NO: 17065884 NR Description: AtbZIP transcription factor [Arabidopsis thaliana]
  misc_feature (5)..(249): Homolog of NCBI NO: 15226727 NR Description: bZip DNA binding protein; protein id: supported by cDNA: gi_18377631, supported by cDNA: gi_20465782 thaliana] >gi|25408715|pir||G84831 probable bZIP transcription
  misc_feature (5)..(249): Homolog of NCBI NO: 25453519 NR Description: b-Zip DNA binding protein [imported] -
  misc_feature (25)..(249): Homolog of NCBI NO: 39579226 NR Description: bZIP transcription factor RF2b [Oryza sativa
  misc_feature (35)..(248): Homolog of NCBI NO: 7489564 NR Description: probable transcription activator RF2a - rice
  misc_feature (128)..(247): Homolog of NCBI NO: 34394739 NR Description: putative transcription activator RF2a [Oryza
  misc_feature (100)..(247): Homolog of NCBI NO: 21740783 NR Description: OSJNBa0067K08.24 [Oryza sativa (japonica
  misc_feature (32)..(250): Homolog of NCBI NO: 15224665 NR Description: bZIP transcription factor (POSF21); protein id: supported by cDNA: gi_15982853 [Arabidopsis thaliana] Possible transcription factor PosF21 >gi|99685|pir||S21883 bZIP
MEKSDPPPVPKPGATIIPSSDPIPNADPIPSSSFHRRSRSDDMSMFMFMDPLSSAAPPSSDDLPSDDDLFSSFIDVDSLTSNPNPFQNPSLSSNSVSGAANPPPPPSSRPRHRHSNSVDAGCAMYAGDIMDAKKAMPPEKLSELWNIDPKRAKRILANRQSAARSKERKARYIQELERKVQSLQTEATTLSAQLTLYQRDTNGLANENTELKLRLQAMEQQAQLRNALNEALRKEVERMKMETGEISDAF

SEQ ID NO: 81179 - protein, 208 aa, Arabidopsis thaliana
  peptide (1)..(208): Ceres Seq. ID no. 12658687
  misc_feature (104)..(168): Pfam Name: bZIP transcription factor Pfam Description: bZIP transcription factor
  misc_feature (1)..(205): Homolog of NCBI NO: 15222213 NR Description: bZIP protein; protein id: At1g06850.1, supported cDNA: gi_17064795 [Arabidopsis thaliana] Similar to bZIP transcription factors [Arabidopsis thaliana]
  misc_feature (1)..(205): Homolog of NCBI NO: 25406943 NR Description: hypothetical protein [imported] - Arabidopsis >gi|7523698|gb|AAF63137.1|AC011001_7 Similar to bZIP
  misc_feature (1)..(208): Homolog of NCBI NO: 17065884 NR Description: AtbZIP transcription factor [Arabidopsis thaliana]
  misc_feature (1)..(207): Homolog of NCBI NO: 15226727 NR Description: bZip DNA binding protein; protein id: supported by cDNA: gi_18377631, supported by cDNA: gi_20465782 thaliana] >gi|25408715|pir||G84831 probable bZIP transcription
  misc_feature (1)..(207): Homolog of NCBI NO: 25453519 NR Description: b-Zip DNA binding protein [imported] -
  misc_feature (1)..(207): Homolog of NCBI NO: 39579226 NR Description: bZIP transcription factor RF2b [Oryza sativa
  misc_feature (1)..(206): Homolog of NCBI NO: 7489564 NR Description: probable transcription activator RF2a - rice
  misc_feature (86)..(205): Homolog of NCBI NO: 34394739 NR Description: putative transcription activator RF2a [Oryza
  misc_feature (58)..(205): Homolog of NCBI NO: 21740783 NR Description: OSJNBa0067K08.24 [Oryza sativa (japonica
  misc_feature (1)..(208): Homolog of NCBI NO: 15224665 NR Description: bZIP transcription factor (POSF21); protein id: supported by cDNA: gi_15982853 [Arabidopsis thaliana] Possible transcription factor PosF21 >gi|99685|pir||S21883 bZIP
MSMFMFMDPLSSAAPPSSDDLPSDDDLFSSFIDVDSLTSNPNPFQNPSLSSNSVSGAANPPPPPSSRPRHRHSNSVDAGCAMYAGDIMDAKKAMPPEKLSELWNIDPKRAKRILANRQSAARSKERKARYIQELERKVQSLQTEATTLSAQLTLYQRDTNGLANENTELKLRLQAMEQQAQLRNALNEALRKEVERMKMETGEISDAF

SEQ ID NO: 81180 - protein, 206 aa, Arabidopsis thaliana
  peptide (1)..(206): Ceres Seq. ID no. 12658688
  misc_feature (102)..(166): Pfam Name: bZIP transcription factor Pfam Description: bZIP transcription factor
  misc_feature (1)..(203): Homolog of NCBI NO: 15222213 NR Description: bZIP protein; protein id: At1g06850.1, supported cDNA: gi_17064795 [Arabidopsis thaliana] Similar to bZIP transcription factors [Arabidopsis thaliana]
  misc_feature (1)..(203): Homolog of NCBI NO: 25406943 NR Description: hypothetical protein [imported] - Arabidopsis >gi|7523698|gb|AAF63137.1|AC011001_7 Similar to bZIP
  misc_feature (1)..(206): Homolog of NCBI NO: 17065884 NR Description: AtbZIP transcription factor [Arabidopsis thaliana]
  misc_feature (1)..(205): Homolog of NCBI NO: 15226727 NR Description: bZip DNA binding protein; protein id: supported by cDNA: gi_18377631, supported by cDNA: gi_20465782 thaliana] >gi|25408715|pir||G84831 probable bZIP transcription
  misc_feature (1)..(205): Homolog of NCBI NO: 25453519 NR Description: b-Zip DNA binding protein [imported] -
  misc_feature (1)..(205): Homolog of NCBI NO: 39579226 NR Description: bZIP transcription factor RF2b [Oryza sativa
  misc_feature (1)..(204): Homolog of NCBI NO: 7489564 NR Description: probable transcription activator RF2a - rice
  misc_feature (84)..(203): Homolog of NCBI NO: 34394739 NR Description: putative transcription activator RF2a [Oryza
  misc_feature (56)..(203): Homolog of NCBI NO: 21740783 NR Description: OSJNBa0067K08.24 [Oryza sativa (japonica
  misc_feature (1)..(206): Homolog of NCBI NO: 15224665 NR Description: bZIP transcription factor (POSF21); protein id: supported by cDNA: gi_15982853 [Arabidopsis thaliana] Possible transcription factor PosF21 >gi|99685|pir||S21883 bZIP
MFMFMDPLSSAAPPSSDDLPSDDDLFSSFIDVDSLTSNPNPFQNPSLSSNSVSGAANPPPPPSSRPRHRHSNSVDAGCAMYAGDIMDAKKAMPPEKLSELWNIDPKRAKRILANRQSAARSKERKARYIQELERKVQSLQTEATTLSAQLTLYQRDTNGLANENTELKLRLQAMEQQAQLRNALNEALRKEVERMKMETGEISDAF

SEQ ID NO: 81181 - DNA, 2030 bp, Arabidopsis thaliana
  misc_feature (1)..(2030): Ceres Seq. ID no. 12658717
  misc_feature: MA Experiment ID: 20000171 Result: Down-regulated in Transcription
  misc_feature: MA Experiment 20000171 PARAMETER Experiment Name: At_42deg_Heat_P Parameter: Age (day) Value: 14
  misc_feature: MA Experiment 20000171 PARAMETER Experiment Name: At_42deg_Heat_P Parameter: Organism Value: A. thaliana
  misc_feature: MA Experiment 20000171 PARAMETER Experiment Name: At_42deg_Heat_P Parameter: Plant Line Value: WS
  misc_feature: MA Experiment 20000171 PARAMETER Experiment Name: At_42deg_Heat_P Parameter: Temperature (deg C) Value: 42 vs. 22
  misc_feature: MA Experiment 20000171 PARAMETER Experiment Name: At_42deg_Heat_P Parameter: Timepoint (hr) Value: 1
  misc_feature: MA Experiment 20000171 PARAMETER Experiment Name: At_42deg_Heat_P Parameter: Tissue Value: Aerial
  misc_feature: MA Experiment ID: 20000184 Result: Down-regulated in Transcription
  misc_feature: MA Experiment 20000184 PARAMETER Experiment Name: At_Shoots__P Parameter: Age (day) Value: 7
  misc_feature: MA Experiment 20000184 PARAMETER Experiment Name: At_Shoots__P Parameter: Tissue Value: Shoots vs. Whole Plant
  misc_feature: MA Experiment ID: 20000185 Result: Up-regulated in Transcription
  misc_feature: MA Experiment 20000185 PARAMETER Experiment Name: At_Roots__P Parameter: Age (day) Value: 7 vs. 21
  misc_feature: MA Experiment 20000185 PARAMETER Experiment Name: At_Roots__P Parameter: Organism Value: A. thaliana
  misc_feature: MA Experiment 20000185 PARAMETER Experiment Name: At_Roots__P Parameter: Tissue Value: Roots vs. Whole Plant
  misc_feature: MA Experiment ID: 20000794 Result: Up-regulated in Transcription
  misc_feature: MA Experiment 20000794 PARAMETER Experiment Name: At_Petals_P Parameter: Age (day) Value: 23-25 days
  misc_feature: MA Experiment 20000794 PARAMETER Experiment Name: At_Petals_P Parameter: Plant Line Value: WS
  misc_feature: MA Experiment 20000794 PARAMETER Experiment Name: At_Petals_P Parameter: Tissue Value: Petals vs. Whole plant
aatttcaatttcactgagaagttacaatccagaggaaaagattatctttttccttctgggttgagggaaaagatgaagaattctgagaagagaggacgtaaacacaaaaggcaagatgcttcatcggcggaaaacgccggcggcgaagttaaagaagcttcggctaatgaagcatcgttacctcaatcccctgagcctgtttcagcttctgaagccaacccatctccgtcgcgacgcagtcgtgggagaggtaaaaagcgtagattgaacaatgaatcagaagctggtaaccagaggacgtcgtcaccagagcgtagtagatctcgtcttcatcactctgatacgaagaatggtgattgtagcaatgggatgattgtttcaacaactactgaatcgattcccgctgctccgagttgggaaactgttgttaaagttgttccttcaatggatgctgttgttaaagtcttttgtgttcacactgagcctaatttctcgttgccatggcaaaggaaacgacagtatagttctggtagtagtggttttattattgggggaagaagagttttgactaatgcacattctgttgagcatcatactcaagttaaactcaagaagcgtggctctgatactaagtatttggctacagtcttggccattggaactgaatgtgacattgctttgttgacagttacggatgatgagttttgggaaggagtatctcctgtggagtttggtgatttaccagctttgcaagatgctgttactgttgttggttatccaattggtggtgatacaatctctgtcacaagcggtgttgtttcccggatggagatattgtcgtatgtgcatggatcaaccgagcttttgggattgcagattgatgcagctattaattctgggaattctggtggtcctgcatttaatgataaaggaaaatgtgttggtattgcatttcagtctttgaaacacgaagatgctgagaatattggttatgtcattcccacaccggtgattgtacatttcattcaagattatgagaagcatgataaatacacagggtttcctgttctcggaattgagtggcaaaagatggaaaatcctgatttgcggaagtcaatgggtatggaatctcatcaaaagggagtgcggattagaagaattgagccaaccgccccagaatcacaagttttgaagccgtctgatattatccttagttttgatggagttaatatcgctaatgatgggactgttccatttaggcatggagaacgaattggctttagctaccttatatcccaaaagtacactggagattctgctctcgtgaaggttctacgaaacaaagaaatattagagttcaacataaaacttgcaatccacaagaggctaatccctgctcacataagtggcaaacctccttcgtacttcatcgttgctggctttgtatttacaactgtctctgttccatatcttcgatctgagtatggaaaagaatatgaatttgacgcacctgtcaagctattggagaaacatcttcatgcaatggctcaatccgtggacgagcagcttgttgtagtttcacaggttcttgtttctgacattaacattggttatgaagagattgtcaacacccaggttgtcgcctttaatggcaaacctgtgaaaaacttgaaaggtttagctgggatggtggagaattgtgaggatgaatatatgaagtttaatctggattatgatcagattgttgttctggacactaagacagcaaaggaagcaacattagatattctgaccacacattgcataccttctgctatgtctgatgatctcaagactgaagaaagaaactgaaacagaaggaaccataaccagaaggagagaaagagagatttttgtccatggaaggacataaaagcaaatacagtcatggaaagacaaagagaagctcaaaccataatttgatttttcttgattctgttttgtatttggaaaaatatgcaagaagaaatacattggttattttttctctc

SEQ ID NO: 81182 - protein, 616 aa, Arabidopsis thaliana
  peptide (1)..(616): Ceres Seq. ID no. 12658718
  misc_feature (167)..(342): Pfam Name: Trypsin Pfam Description: Trypsin
  misc_feature (25)..(616): Homolog of NCBI NO: 18421957 NR Description: DegP protease; protein id: At5g40200.1, supported
  misc_feature (40)..(610): Homolog of NCBI NO: 18407488 NR Description: DegP2 protease; protein id: At2g47940.1, by cDNA: gi_11908035, supported by cDNA: gi_13172274, supported cDNA: gi_13194801, supported by cDNA: gi_18700189, supported by
  misc_feature (45)..(610): Homolog of NCBI NO: 25409077 NR Description: probable serine proteinase [imported] -
  misc_feature (64)..(614): Homolog of NCBI NO: 18421592 NR Description: DegP protease; protein id: At5g36950.1, supported
  misc_feature (148)..(616): Homolog of NCBI NO: 18408327 NR Description: DegP protease; protein id: At1g65630.1 thaliana] >gi|6686413|gb|AAF23847.1|AC007234_19 F1E22.1
  misc_feature (136)..(498): Homolog of NCBI NO: 9758082 NR Description: contains similarity to serine
  misc_feature (505)..(614): Homolog of NCBI NO: 9758082 NR Description: contains similarity to serine
  misc_feature (148)..(433): Homolog of NCBI NO: 2190559 NR Description: F5I14.16 [Arabidopsis thaliana]
  misc_feature (515)..(616): Homolog of NCBI NO: 2190559 NR Description: F5I14.16 [Arabidopsis thaliana]
  misc_feature (149)..(495): Homolog of NCBI NO: 18401167 NR Description: DegP protease; protein id: At3g16540.1
NFNFTEKLQSRGKDYLFPSGLREKMKNSEKRGRKHKRQDASSAENAGGEVKEASANEASLPQSPEPVSASEANPSPSRRSRGRGKKRRLNNESEAGNQRTSSPERSRSRLHHSDTKNGDCSNGMIVSTTTESIPAAPSWETVVKVVPSMDAVVKVFCVHTEPNFSLPWQRKRQYSSGSSGFIIGGRRVLTNAHSVEHHTQVKLKKRGSDTKYLATVLAIGTECDIALLTVTDDEFWEGVSPVEFGDLPALQDAVTVVGYPIGGDTISVTSGVVSRMEILSYVHGSTELLGLQIDAAINSGNSGGPAFNDKGKCVGIAFQSLKHEDAENIGYVIPTPVIVHFIQDYEKHDKYTGFPVLGIEWQKMENPDLRKSMGMESHQKGVRIRRIEPTAPESQVLKPSDIILSFDGVNIANDGTVPFRHGERIGFSYLISQKYTGDSALVKVLRNKEILEFNIKLAIHKRLIPAHISGKPPSYFIVAGFVFTTVSVPYLRSEYGKEYEFDAPVKLLEKHLHAMAQSVDEQLVVVSQVLVSDINIGYEEIVNTQVVAFNGKPVKNLKGLAGMVENCEDEYMKFNLDYDQIVVLDTKTAKEATLDILTTHCIPSAMSDDLKTEERN

SEQ ID NO: 81183 - protein, 592 aa, Arabidopsis thaliana
  peptide (1)..(592): Ceres Seq. ID no. 12658719
  misc_feature (143)..(318): Pfam Name: Trypsin Pfam Description: Trypsin
  misc_feature (1)..(592): Homolog of NCBI NO: 18421957 NR Description: DegP protease; protein id: At5g40200.1, supported
  misc_feature (16)..(586): Homolog of NCBI NO: 18407488 NR Description: DegP2 protease; protein id: At2g47940.1, by cDNA: gi_11908035, supported by cDNA: gi_13172274, supported cDNA: gi_13194801, supported by cDNA: gi_18700189, supported by
  misc_feature (21)..(586): Homolog of NCBI NO: 25409077 NR Description: probable serine proteinase [imported] -
  misc_feature (40)..(590): Homolog of NCBI NO: 18421592 NR Description: DegP protease; protein id: At5g36950.1, supported
  misc_feature (124)..(592): Homolog of NCBI NO: 18408327 NR Description: DegP protease; protein id: At1g65630.1 thaliana] >gi|6686413|gb|AAF23847.1|AC007234_19 F1E22.1
  misc_feature (112)..(474): Homolog of NCBI NO: 9758082 NR Description: contains similarity to serine
  misc_feature (481)..(590): Homolog of NCBI NO: 9758082 NR Description: contains similarity to serine
  misc_feature (124)..(409): Homolog of NCBI NO: 2190559 NR Description: F5I14.16 [Arabidopsis thaliana]
  misc_feature (491)..(592): Homolog of NCBI NO: 2190559 NR Description: F5I14.16 [Arabidopsis thaliana]
  misc_feature (125)..(471): Homolog of NCBI NO: 18401167 NR Description: DegP protease; protein id: At3g16540.1
MKNSEKRGRKHKRQDASSAENAGGEVKEASANEASLPQSPEPVSASEANPSPSRRSRGRGKKRRLNNESEAGNQRTSSPERSRSRLHHSDTKNGDCSNGMIVSTTTESIPAAPSWETVVKVVPSMDAVVKVFCVHTEPNFSLPWQRKRQYSSGSSGFIIGGRRVLTNAHSVEHHTQVKLKKRGSDTKYLATVLAIGTECDIALLTVTDDEFWEGVSPVEFGDLPALQDAVTVVGYPIGGDTISVTSGVVSRMEILSYVHGSTELLGLQIDAAINSGNSGGPAFNDKGKCVGIAFQSLKHEDAENIGYVIPTPVIVHFIQDYEKHDKYTGFPVLGIEWQKMENPDLRKSMGMESHQKGVRIRRIEPTAPESQVLKPSDIILSFDGVNIANDGTVPFRHGERIGFSYLISQKYTGDSALVKVLRNKEILEFNIKLAIHKRLIPAHISGKPPSYFIVAGFVFTTVSVPYLRSEYGKEYEFDAPVKLLEKHLHAMAQSVDEQLVVVSQVLVSDINIGYEEIVNTQVVAFNGKPVKNLKGLAGMVENCEDEYMKFNLDYDQIVVLDTKTAKEATLDILTTHCIPSAMSDDLKTEERN

SEQ ID NO: 81184 - protein, 493 aa, Arabidopsis thaliana
  peptide (1)..(493): Ceres Seq. ID no. 12658720
  misc_feature (44)..(219): Pfam Name: Trypsin Pfam Description: Trypsin
  misc_feature (1)..(493): Homolog of NCBI NO: 18421957 NR Description: DegP protease; protein id: At5g40200.1, supported
  misc_feature (1)..(487): Homolog of NCBI NO: 18407488 NR Description: DegP2 protease; protein id: At2g47940.1, by cDNA: gi_11908035, supported by cDNA: gi_13172274, supported cDNA: gi_13194801, supported by cDNA: gi_18700189, supported by
  misc_feature (1)..(487): Homolog of NCBI NO: 25409077 NR Description: probable serine proteinase [imported] -
  misc_feature (1)..(491): Homolog of NCBI NO: 18421592 NR Description: DegP protease; protein id: At5g36950.1, supported
  misc_feature (25)..(493): Homolog of NCBI NO: 18408327 NR Description: DegP protease; protein id: At1g65630.1 thaliana] >gi|6686413|gb|AAF23847.1|AC007234_19 F1E22.1
  misc_feature (13)..(375): Homolog of NCBI NO: 9758082 NR Description: contains similarity to serine
  misc_feature (382)..(491): Homolog of NCBI NO: 9758082 NR Description: contains similarity to serine
  misc_feature (25)..(310): Homolog of NCBI NO: 2190559 NR Description: F5I14.16 [Arabidopsis thaliana]
  misc_feature (392)..(493): Homolog of NCBI NO: 2190559 NR Description: F5I14.16 [Arabidopsis thaliana]
  misc_feature (26)..(372): Homolog of NCBI NO: 18401167 NR Description: DegP protease; protein id: At3g16540.1
MIVSTTTESIPAAPSWETVVKVVPSMDAVVKVFCVHTEPNFSLPWQRKRQYSSGSSGFIIGGRRVLTNAHSVEHHTQVKLKKRGSDTKYLATVLAIGTECDIALLTVTDDEFWEGVSPVEFGDLPALQDAVTVVGYPIGGDTISVTSGVVSRMEILSYVHGSTELLGLQIDAAINSGNSGGPAFNDKGKCVGIAFQSLKHEDAENIGYVIPTPVIVHFIQDYEKHDKYTGFPVLGIEWQKMENPDLRKSMGMESHQKGVRIRRIEPTAPESQVLKPSDIILSFDGVNIANDGTVPFRHGERIGFSYLISQKYTGDSALVKVLRNKEILEFNIKLAIHKRLIPAHISGKPPSYFIVAGFVFTTVSVPYLRSEYGKEYEFDAPVKLLEKHLHAMAQSVDEQLVVVSQVLVSDINIGYEEIVNTQVVAFNGKPVKNLKGLAGMVENCEDEYMKFNLDYDQIVVLDTKTAKEATLDILTTHCIPSAMSDDLKTEERN

SEQ ID NO: 81185 - DNA, 1087 bp, Arabidopsis thaliana
  misc_feature (1)..(1087): Ceres Seq. ID no. 12658721
  misc_feature: MA Experiment ID: 20000234 Result: Up-regulated in Transcription
  misc_feature: MA Experiment 20000234 PARAMETER Experiment Name: At_Siliques_P Parameter: Age (day) Value: 21
  misc_feature: MA Experiment 20000234 PARAMETER Experiment Name: At_Siliques_P Parameter: Organism Value: A. thaliana
  misc_feature: MA Experiment 20000234 PARAMETER Experiment Name: At_Siliques_P Parameter: Plant Line Value: WS
  misc_feature: MA Experiment 20000234 PARAMETER Experiment Name: At_Siliques_P Parameter: Tissue Value: Less Than 5mm Siliques vs. Whole Plant
  misc_feature: MA Experiment ID: 20000235 Result: Up-regulated in Transcription
  misc_feature: MA Experiment 20000235 PARAMETER Experiment Name: At_Siliques_P Parameter: Age (day) Value: 21
  misc_feature: MA Experiment 20000235 PARAMETER Experiment Name: At_Siliques_P Parameter: Organism Value: A. thaliana
  misc_feature: MA Experiment 20000235 PARAMETER Experiment Name: At_Siliques_P Parameter: Plant Line Value: WS
  misc_feature: MA Experiment 20000235 PARAMETER Experiment Name: At_Siliques_P Parameter: Tissue Value: 5-10mm Siliques vs. Whole Plant
  misc_feature: MA Experiment ID: 20000264 Result: Up-regulated in Transcription
  misc_feature: MA Experiment 20000264 PARAMETER Experiment Name: At_Open_Flower_P Parameter: Age (day) Value: 21
  misc_feature: MA Experiment 20000264 PARAMETER Experiment Name: At_Open_Flower_P Parameter: Plant Line Value: WS
  misc_feature: MA Experiment 20000264 PARAMETER Experiment Name: At_Open_Flower_P Parameter: Tissue Value: Open Flower vs. Whole Plant
  misc_feature: MA Experiment ID: 20000265 Result: Up-regulated in Transcription
  misc_feature: MA Experiment 20000265 PARAMETER Experiment Name: At_Open_Flower_P Parameter: Age (day) Value: 21
  misc_feature: MA Experiment 20000265 PARAMETER Experiment Name: At_Open_Flower_P Parameter: Plant Line Value: WS
  misc_feature: MA Experiment 20000265 PARAMETER Experiment Name: At_Open_Flower_P Parameter: Tissue Value: Closed Flower vs. Whole Plant
  misc_feature: MA Experiment ID: 20000451 Result: Up-regulated in Transcription
  misc_feature: MA Experiment 20000451 PARAMETER Experiment Name: At_CS6879_Shoots-Roots_P Parameter: Age (day) Value: 14
  misc_feature: MA Experiment 20000451 PARAMETER Experiment Name: At_CS6879_Shoots-Roots_P Parameter: Organism Value: A. thaliana
  misc_feature: MA Experiment 20000451 PARAMETER Experiment Name: At_CS6879_Shoots-Roots_P Parameter: Plant Line Value: CS6879 vs. WS
  misc_feature: MA Experiment 20000451 PARAMETER Experiment Name: At_CS6879_Shoots-Roots_P Parameter: Tissue Value: Roots
  misc_feature: MA Experiment ID: 20000794 Result: Up-regulated in Transcription
  misc_feature: MA Experiment 20000794 PARAMETER Experiment Name: At_Petals_P Parameter: Age (day) Value: 23-25 days
  misc_feature: MA Experiment 20000794 PARAMETER Experiment Name: At_Petals_P Parameter: Plant Line Value: WS
  misc_feature: MA Experiment 20000794 PARAMETER Experiment Name: At_Petals_P Parameter: Tissue Value: Petals vs. Whole plant
  misc_feature: MA Experiment ID: 20001556 Result: Up-regulated in Transcription
  misc_feature: MA Experiment 20001556 PARAMETER Experiment Name: At_Drought_Soil_Dry_P Parameter: Age (day) Value: 26
  misc_feature: MA Experiment 20001556 PARAMETER Experiment Name: At_Drought_Soil_Dry_P Parameter: Organism Value: A. thaliana
  misc_feature: MA Experiment 20001556 PARAMETER Experiment Name: At_Drought_Soil_Dry_P Parameter: Plant Line Value: WS
  misc_feature: MA Experiment 20001556 PARAMETER Experiment Name: At_Drought_Soil_Dry_P Parameter: Post Timepoint (hr) Value: None
  misc_feature: MA Experiment 20001556 PARAMETER Experiment Name: At_Drought_Soil_Dry_P Parameter: Post-Treatment Value: None
  misc_feature: MA Experiment 20001556 PARAMETER Experiment Name: At_Drought_Soil_Dry_P Parameter: Timepoint (day) Value: 12
  misc_feature: MA Experiment 20001556 PARAMETER Experiment Name: At_Drought_Soil_Dry_P Parameter: Treatment Value: Drought vs. No Drought
  misc_feature: MA Experiment ID: 20001904 Result: Up-regulated in Transcription
  misc_feature: MA Experiment 20001904 PARAMETER Experiment Name: At_Drought_Reproduction_P Parameter: Age (day) Value: 37
  misc_feature: MA Experiment 20001904 PARAMETER Experiment Name: At_Drought_Reproduction_P Parameter: Organism Value: A. thaliana
  misc_feature: MA Experiment 20001904 PARAMETER Experiment Name: At_Drought_Reproduction_P Parameter: Plant Line Value: WS
  misc_feature: MA Experiment 20001904 PARAMETER Experiment Name: At_Drought_Reproduction_P Parameter: Timepoint (day) Value: 7
  misc_feature: MA Experiment 20001904 PARAMETER Experiment Name: At_Drought_Reproduction_P Parameter: Tissue Value: Rosettes
  misc_feature: MA Experiment 20001904 PARAMETER Experiment Name: At_Drought_Reproduction_P Parameter: Treatment Value: Drought vs. No Drought
  misc_feature: MA Experiment ID: 20001905 Result: Up-regulated in Transcription
  misc_feature: MA Experiment 20001905 PARAMETER Experiment Name: At_Drought_Reproduction_P Parameter: Age (day) Value: 40
  misc_feature: MA Experiment 20001905 PARAMETER Experiment Name: At_Drought_Reproduction_P Parameter: Organism Value: A. thaliana
  misc_feature: MA Experiment 20001905 PARAMETER Experiment Name: At_Drought_Reproduction_P Parameter: Plant Line Value: WS
  misc_feature: MA Experiment 20001905 PARAMETER Experiment Name: At_Drought_Reproduction_P Parameter: Timepoint (day) Value: 10
  misc_feature: MA Experiment 20001905 PARAMETER Experiment Name: At_Drought_Reproduction_P Parameter: Tissue Value: Rosettes
  misc_feature: MA Experiment 20001905 PARAMETER Experiment Name: At_Drought_Reproduction_P Parameter: Treatment Value: Drought vs. No Drought
  misc_feature: MA Experiment ID: 20001906 Result: Up-regulated in Transcription
  misc_feature: MA Experiment 20001906 PARAMETER Experiment Name: At_Drought_Reproduction_P Parameter: Age (day) Value: 35
  misc_feature: MA Experiment 20001906 PARAMETER Experiment Name: At_Drought_Reproduction_P Parameter: Organism Value: A. thaliana
  misc_feature: MA Experiment 20001906 PARAMETER Experiment Name: At_Drought_Reproduction_P Parameter: Plant Line Value: WS
  misc_feature: MA Experiment 20001906 PARAMETER Experiment Name: At_Drought_Reproduction_P Parameter: Timepoint (day) Value: 5
  misc_feature: MA Experiment 20001906 PARAMETER Experiment Name: At_Drought_Reproduction_P Parameter: Tissue Value: Siliques
  misc_feature: MA Experiment 20001906 PARAMETER Experiment Name: At_Drought_Reproduction_P Parameter: Treatment Value: Drought vs. No Drought
agaagaaagaagaagccaagaactaaaaaatggttcatggaaggttatgtaacagagatggctggatcttgacggcgatggtggtgacagagttttctaacgtaggagtaaacactctggtcaaagcagcgacgtccaaaggacttagcccatttgtggttcttgtatactcttacacttttggatctcttcttcttcttcctcttacattcttctccttcagatcaagatctctccctccgttgacattttcaattctatgcaacatggggattcttggtctaattgcaagtgcgtttcaaatcttaggctacaatgggataaaatatagctcgccgactttatcttcggccatgagcaatgtcaatcctgcttttaccttcatcctcgccgttgtttttcgaatggaaaatatatctctagggaaaaagagtagtgtagccaaagtgttgggaacaatattgtcaataataggtgcacttgtggttactctctaccacggtccaatgctaatgtcttcacattcggattggatcatcggtggtggccttcttgctctccaatacatccttgtctccgtctcttaccttgttatggctcacacaatgggtcgatatccatctgccgtcgttgtgacgcttgtgcacaatgtttgcatagctgttgtgtgtgcatttgtgagccttttggcagagaaggacaatccgaaggcatgggtcataagattcgacataaccttaattaccgtagtagcaacggggattttgaattcgggatattatgttatacatacgtgggcagtgagtcacaagggacctgtgtatttgtctatgttcaaaccgttatctatattgatagcagccgtatcaactttcattttcctcggcgagtcgctctaccttggaagtgtgatgggaggaatattgatatcaataggattttacatggtgttgtggggtaaagccaaggaagacaaagttgacataataggagcaatagagtcctctccttcacataatgctcctctcttggataattttaaaagctaatcaatattcactttagtttttcatgagtgatttctgac

SEQ ID NO: 81186 - protein, 339 aa, Arabidopsis thaliana
  peptide (1)..(339): Ceres Seq. ID no. 12658722
  misc_feature (22)..(155): Pfam Name: Integral membrane protein DUF6 Pfam Description: Integral membrane protein DUF6
  misc_feature (1)..(339): Homolog of NCBI NO: 18421959 NR Description: putative protein; protein id: At5g40210.1, by cDNA: gi_15724297 [Arabidopsis thaliana] AT5g40210/MSN9_110 [Arabidopsis thaliana]
  misc_feature (30)..(339): Homolog of NCBI NO: 10177508 NR Description: nodulin-like protein [Arabidopsis thaliana]
  misc_feature (159)..(336): Homolog of NCBI NO: 11994130 NR Description: contains similarity to integral membrane protein
  misc_feature (6)..(166): Homolog of NCBI NO: 11994130 NR Description: contains similarity to integral membrane protein
  misc_feature (159)..(339): Homolog of NCBI NO: 22331380 NR Description: unknown protein; protein id: At3g28070.1, by cDNA: gi_17529267 [Arabidopsis thaliana] unknown protein [Arabidopsis thaliana]
  misc_feature (9)..(166): Homolog of NCBI NO: 22331380 NR Description: unknown protein; protein id: At3g28070.1, by cDNA: gi_17529267 [Arabidopsis thaliana] unknown protein [Arabidopsis thaliana]
  misc_feature (159)..(334): Homolog of NCBI NO: 21618226 NR Description: contains similarity to integral membrane protein
  misc_feature (6)..(166): Homolog of NCBI NO: 21618226 NR Description: contains similarity to integral membrane protein
  misc_feature (159)..(334): Homolog of NCBI NO: 18405642 NR Description: expressed protein; protein id: At3g28080.1,
  misc_feature (6)..(166): Homolog of NCBI NO: 18405642 NR Description: expressed protein; protein id: At3g28080.1,
MVHGRLCNRDGWILTAMVVTEFSNVGVNTLVKAATSKGLSPFVVLVYSYTFGSLLLLPLTFFSFRSRSLPPLTFSILCNMGILGLIASAFQILGYNGIKYSSPTLSSAMSNVNPAFTFILAVVFRMENISLGKKSSVAKVLGTILSIIGALVVTLYHGPMLMSSHSDWIIGGGLLALQYILVSVSYLVMAHTMGRYPSAVVVTLVHNVCIAVVCAFVSLLAEKDNPKAWVIRFDITLITVVATGILNSGYYVIHTWAVSHKGPVYLSMFKPLSILIAAVSTFIFLGESLYLGSVMGGILISIGFYMVLWGKAKEDKVDIIGAIESSPSHNAPLLDNFKS

SEQ ID NO: 81187 - protein, 323 aa, Arabidopsis thaliana
  peptide (1)..(323): Ceres Seq. ID no. 12658723
  misc_feature (6)..(139): Pfam Name: Integral membrane protein DUF6 Pfam Description: Integral membrane protein DUF6
  misc_feature (1)..(323): Homolog of NCBI NO: 18421959 NR Description: putative protein; protein id: At5g40210.1, by cDNA: gi_15724297 [Arabidopsis thaliana] AT5g40210/MSN9_110 [Arabidopsis thaliana]
  misc_feature (14)..(323): Homolog of NCBI NO: 10177508 NR Description: nodulin-like protein [Arabidopsis thaliana]
  misc_feature (143)..(320): Homolog of NCBI NO: 11994130 NR Description: contains similarity to integral membrane protein
  misc_feature (1)..(150): Homolog of NCBI NO: 11994130 NR Description: contains similarity to integral membrane protein
  misc_feature (143)..(323): Homolog of NCBI NO: 22331380 NR Description: unknown protein; protein id: At3g28070.1, by cDNA: gi_17529267 [Arabidopsis thaliana] unknown protein [Arabidopsis thaliana]
  misc_feature (1)..(150): Homolog of NCBI NO: 22331380 NR Description: unknown protein; protein id: At3g28070.1, by cDNA: gi_17529267 [Arabidopsis thaliana] unknown protein [Arabidopsis thaliana]
  misc_feature (143)..(318): Homolog of NCBI NO: 21618226 NR Description: contains similarity to integral membrane protein
  misc_feature (1)..(150): Homolog of NCBI NO: 21618226 NR Description: contains similarity to integral membrane protein
  misc_feature (143)..(318): Homolog of NCBI NO: 18405642 NR Description: expressed protein; protein id: At3g28080.1,
  misc_feature (1)..(150): Homolog of NCBI NO: 18405642 NR Description: expressed protein; protein id: At3g28080.1,
MVVTEFSNVGVNTLVKAATSKGLSPFVVLVYSYTFGSLLLLPLTFFSFRSRSLPPLTFSILCNMGILGLIASAFQILGYNGIKYSSPTLSSAMSNVNPAFTFILAVVFRMENISLGKKSSVAKVLGTILSIIGALVVTLYHGPMLMSSHSDWIIGGGLLALQYILVSVSYLVMAHTMGRYPSAVVVTLVHNVCIAVVCAFVSLLAEKDNPKAWVIRFDITLITVVATGILNSGYYVIHTWAVSHKGPVYLSMFKPLSILIAAVSTFIFLGESLYLGSVMGGILISIGFYMVLWGKAKEDKVDIIGAIESSPSHNAPLLDNFKS

SEQ ID NO: 81188 - protein, 260 aa, Arabidopsis thaliana
  peptide (1)..(260): Ceres Seq. ID no. 12658724
  misc_feature (1)..(76): Pfam Name: Integral membrane protein DUF6 Pfam Description: Integral membrane protein DUF6
  misc_feature (1)..(260): Homolog of NCBI NO: 18421959 NR Description: putative protein; protein id: At5g40210.1, by cDNA: gi_15724297 [Arabidopsis thaliana] AT5g40210/MSN9_110 [Arabidopsis thaliana]
  misc_feature (1)..(260): Homolog of NCBI NO: 10177508 NR Description: nodulin-like protein [Arabidopsis thaliana]
  misc_feature (80)..(257): Homolog of NCBI NO: 11994130 NR Description: contains similarity to integral membrane protein
  misc_feature (1)..(87): Homolog of NCBI NO: 11994130 NR Description: contains similarity to integral membrane protein
  misc_feature (80)..(260): Homolog of NCBI NO: 22331380 NR Description: unknown protein; protein id: At3g28070.1, by cDNA: gi_17529267 [Arabidopsis thaliana] unknown protein [Arabidopsis thaliana]
  misc_feature (1)..(87): Homolog of NCBI NO: 22331380 NR Description: unknown protein; protein id: At3g28070.1, by cDNA: gi_17529267 [Arabidopsis thaliana] unknown protein [Arabidopsis thaliana]
  misc_feature (80)..(255): Homolog of NCBI NO: 21618226 NR Description: contains similarity to integral membrane protein
  misc_feature (1)..(87): Homolog of NCBI NO: 21618226 NR Description: contains similarity to integral membrane protein
  misc_feature (80)..(255): Homolog of NCBI NO: 18405642 NR Description: expressed protein; protein id: At3g28080.1,
  misc_feature (1)..(87): Homolog of NCBI NO: 18405642 NR Description: expressed protein; protein id: At3g28080.1,
MGILGLIASAFQILGYNGIKYSSPTLSSAMSNVNPAFTFILAVVFRMENISLGKKSSVAKVLGTILSIIGALVVTLYHGPMLMSSHSDWIIGGGLLALQYILVSVSYLVMAHTMGRYPSAVVVTLVHNVCIAVVCAFVSLLAEKDNPKAWVIRFDITLITVVATGILNSGYYVIHTWAVSHKGPVYLSMFKPLSILIAAVSTFIFLGESLYLGSVMGGILISIGFYMVLWGKAKEDKVDIIGAIESSPSHNAPLLDNFKS

SEQ ID NO: 81189 - DNA, 1827 bp, Arabidopsis thaliana
  misc_feature (1)..(1827): Ceres Seq. ID no. 12658729
  misc_feature: MA Experiment ID: 108435 Result: Down-regulated in Transcription
  misc_feature: MA Experiment 108435 PARAMETER Experiment Name: At_stm_Mutants_cDNA_P Parameter: Plant Line Value: wt Landsburg vs stm
  misc_feature: MA Experiment 108435 PARAMETER Experiment Name: At_stm_Mutants_cDNA_P Parameter: Tissue Value: Shoot Apical Meristem Region
  misc_feature: MA Experiment ID: 108461 Result: Up-regulated in Transcription
  misc_feature: MA Experiment 108461 PARAMETER Experiment Name: At_Germinating_Seeds_cDNA_P Parameter: Age (day) Value: 1 vs. 0
  misc_feature: MA Experiment 108461 PARAMETER Experiment Name: At_Germinating_Seeds_cDNA_P Parameter: Tissue Value: Germinating Seeds
  misc_feature: MA Experiment ID: 108462 Result: Up-regulated in Transcription
  misc_feature: MA Experiment 108462 PARAMETER Experiment Name: At_Germinating_Seeds_cDNA_P Parameter: Age (day) Value: 2 vs. 0
  misc_feature: MA Experiment 108462 PARAMETER Experiment Name: At_Germinating_Seeds_cDNA_P Parameter: Tissue Value: Germinating Seeds
  misc_feature: MA Experiment ID: 108463 Result: Up-regulated in Transcription
  misc_feature: MA Experiment 108463 PARAMETER Experiment Name: At_Germinating_Seeds_cDNA_P Parameter: Age (day) Value: 3 vs. 0
  misc_feature: MA Experiment 108463 PARAMETER Experiment Name: At_Germinating_Seeds_cDNA_P Parameter: Tissue Value: Germinating Seeds
  misc_feature: MA Experiment ID: 108464 Result: Up-regulated in Transcription
  misc_feature: MA Experiment 108464 PARAMETER Experiment Name: At_Germinating_Seeds_cDNA_P Parameter: Age (day) Value: 4 vs. 0
  misc_feature: MA Experiment 108464 PARAMETER Experiment Name: At_Germinating_Seeds_cDNA_P Parameter: Tissue Value: Germinating Seeds
  misc_feature: MA Experiment ID: 108595 Result: Down-regulated in Transcription
  misc_feature: MA Experiment 108595 PARAMETER Experiment Name: At_Ler-pi_Ovule_cDNA_P Parameter: Plant Line Value: null
  misc_feature: MA Experiment ID: 20000087 Result: Down-regulated in Transcription
  misc_feature: MA Experiment 20000087 PARAMETER Experiment Name: At_100uM_ABA_Mutants_cDNA_P Parameter: Plant Line Value: WS
  misc_feature: MA Experiment 20000087 PARAMETER Experiment Name: At_100uM_ABA_Mutants_cDNA_P Parameter: Timepoint (hr) Value: 6
  misc_feature: MA Experiment 20000087 PARAMETER Experiment Name: At_100uM_ABA_Mutants_cDNA_P Parameter: Tissue Value: Aerial
  misc_feature: MA Experiment 20000087 PARAMETER Experiment Name: At_100uM_ABA_Mutants_cDNA_P Parameter: Treatment Value: 100uM ABA vs. No Treatment
  misc_feature: MA Experiment ID: 20000179 Result: Up-regulated in Transcription
  misc_feature: MA Experiment 20000179 PARAMETER Experiment Name: At_Germinating_Seeds_P Parameter: Age (hr) Value: 6 vs. 0
  misc_feature: MA Experiment 20000179 PARAMETER Experiment Name: At_Germinating_Seeds_P Parameter: Tissue Value: Germinating Seeds
  misc_feature: MA Experiment ID: 20000180 Result: Up-regulated in Transcription
  misc_feature: MA Experiment 20000180 PARAMETER Experiment Name: At_Germinating_Seeds_P Parameter: Age (hr) Value: 24 vs. 0
  misc_feature: MA Experiment 20000180 PARAMETER Experiment Name: At_Germinating_Seeds_P Parameter: Tissue Value: Germinating Seeds
  misc_feature: MA Experiment ID: 20000185 Result: Down-regulated in Transcription
  misc_feature: MA Experiment 20000185 PARAMETER Experiment Name: At_Roots__P Parameter: Age (day) Value: 7 vs. 21
  misc_feature: MA Experiment 20000185 PARAMETER Experiment Name: At_Roots__P Parameter: Organism Value: A. thaliana
  misc_feature: MA Experiment 20000185 PARAMETER Experiment Name: At_Roots__P Parameter: Tissue Value: Roots vs. Whole Plant
  misc_feature: MA Experiment ID: 20000439 Result: Down-regulated in Transcription
  misc_feature: MA Experiment 20000439 PARAMETER Experiment Name: At_Roots__P Parameter: Age (day) Value: 14 vs. 21
  misc_feature: MA Experiment 20000439 PARAMETER Experiment Name: At_Roots__P Parameter: Organism Value: A. thaliana
  misc_feature: MA Experiment 20000439 PARAMETER Experiment Name: At_Roots__P Parameter: Tissue Value: Roots vs. Whole Plant
  misc_feature: MA Experiment ID: 20000451 Result: Up-regulated in Transcription
  misc_feature: MA Experiment 20000451 PARAMETER Experiment Name: At_CS6879_Shoots-Roots_P Parameter: Age (day) Value: 14
  misc_feature: MA Experiment 20000451 PARAMETER Experiment Name: At_CS6879_Shoots-Roots_P Parameter: Organism Value: A. thaliana
  misc_feature: MA Experiment 20000451 PARAMETER Experiment Name: At_CS6879_Shoots-Roots_P Parameter: Plant Line Value: CS6879 vs. WS
  misc_feature: MA Experiment 20000451 PARAMETER Experiment Name: At_CS6879_Shoots-Roots_P Parameter: Tissue Value: Roots
  misc_feature: MA Experiment ID: 20000495 Result: Down-regulated in Transcription
  misc_feature: MA Experiment 20000495 PARAMETER Experiment Name: At_Guard_Cells_P Parameter: Harvest Date Value: 8/2/2002
  misc_feature: MA Experiment 20000495 PARAMETER Experiment Name: At_Guard_Cells_P Parameter: Organism Value: A. thaliana
  misc_feature: MA Experiment 20000495 PARAMETER Experiment Name: At_Guard_Cells_P Parameter: Tissue Value: Guard Cells vs. Leaves
  misc_feature: MA Experiment ID: 20000794 Result: Down-regulated in Transcription
  misc_feature: MA Experiment 20000794 PARAMETER Experiment Name: At_Petals_P Parameter: Age (day) Value: 23-25 days
  misc_feature: MA Experiment 20000794 PARAMETER Experiment Name: At_Petals_P Parameter: Plant Line Value: WS
  misc_feature: MA Experiment 20000794 PARAMETER Experiment Name: At_Petals_P Parameter: Tissue Value: Petals vs. Whole plant
  misc_feature: MA Experiment ID: 20001248 Result: Down-regulated in Transcription
  misc_feature: MA Experiment 20001248 PARAMETER Experiment Name: At_Far-red-induction_P Parameter: Age (day) Value: 7
  misc_feature: MA Experiment 20001248 PARAMETER Experiment Name: At_Far-red-induction_P Parameter: Light Value: Far-red vs. White
  misc_feature: MA Experiment 20001248 PARAMETER Experiment Name: At_Far-red-induction_P Parameter: Organism Value: A. thaliana
  misc_feature: MA Experiment 20001248 PARAMETER Experiment Name: At_Far-red-induction_P Parameter: Plant Line Value: Columbia
  misc_feature: MA Experiment 20001248 PARAMETER Experiment Name: At_Far-red-induction_P Parameter: Timepoint (hr) Value: 4
  misc_feature: MA Experiment 20001248 PARAMETER Experiment Name: At_Far-red-induction_P Parameter: Tissue Value: Whole Plant
  misc_feature: MA Experiment ID: 20001450 Result: Down-regulated in Transcription
  misc_feature: MA Experiment 20001450 PARAMETER Experiment Name: At_Far-red-induction_P Parameter: Age (day) Value: 7
  misc_feature: MA Experiment 20001450 PARAMETER Experiment Name: At_Far-red-induction_P Parameter: Light Value: Far-red vs. White
  misc_feature: MA Experiment 20001450 PARAMETER Experiment Name: At_Far-red-induction_P Parameter: Organism Value: A. thaliana
  misc_feature: MA Experiment 20001450 PARAMETER Experiment Name: At_Far-red-induction_P Parameter: Plant Line Value: Columbia
  misc_feature: MA Experiment 20001450 PARAMETER Experiment Name: At_Far-red-induction_P Parameter: Timepoint (hr) Value: 8
  misc_feature: MA Experiment 20001450 PARAMETER Experiment Name: At_Far-red-induction_P Parameter: Tissue Value: Whole Plant
  misc_feature: MA Experiment ID: 20001451 Result: Down-regulated in Transcription
  misc_feature: MA Experiment 20001451 PARAMETER Experiment Name: At_Far-red-induction_P Parameter: Age (day) Value: 7
  misc_feature: MA Experiment 20001451 PARAMETER Experiment Name: At_Far-red-induction_P Parameter: Light Value: Far-red vs. White
  misc_feature: MA Experiment 20001451 PARAMETER Experiment Name: At_Far-red-induction_P Parameter: Organism Value: A. thaliana
  misc_feature: MA Experiment 20001451 PARAMETER Experiment Name: At_Far-red-induction_P Parameter: Plant Line Value: Columbia
  misc_feature: MA Experiment 20001451 PARAMETER Experiment Name: At_Far-red-induction_P Parameter: Timepoint (hr) Value: 24
  misc_feature: MA Experiment 20001451 PARAMETER Experiment Name: At_Far-red-induction_P Parameter: Tissue Value: Whole Plant
aattttgccttcctttgatcgaatactacaatggcgtctgtatctgcaattggagttctcaaggtacctcctgcttcgacttccaattccaccggaaaagccacggaggcggttcccacgaggactctttctttctcctcctctgttacttcatccgacgacaagatttcactcaaatccaccgtctcccgtctttgtaaatctgttgttcgcaggaatccgatcatcgtctctcccaaagccgtctcagattctcaaaactctcaaacttgtctcgatcctgatgctagcagcagtgttttggggataatcttaggaggtggagctggaactcgtctttatccacttacgaagaagagagcgaaaccagctgtgcctcttggtgctaactataggcttattgatattcctgtgagcaactgtttgaatagcaacatatccaagatctatgttcttactcagttcaattccgcgtctttgaatcgtcatctttcacgagcttatgctagtaacatgggaggttataagaatgaaggattcgttgaagttctcgctgctcaacagagtcctgaaaaccccaactggttccaggggacagctgatgccgtcaggcaatacttgtggttgttcgaggagcataatgtcttggagtatctcattcttgctggggatcatttgtatagaatggactatgagaagtttattcaagcacatagggagactgatgctgatatcacagtagctgcattaccaatggacgagcaacgagccactgcttttgggctgatgaagattgatgaggaaggacgtattattgaatttgctgaaaaaccaaaaggggagcacctaaaggccatgaaggttgacacaacaattctaggtcttgatgatcagagagccaaggagatgcctttcattgctagtatgggtatttatgttgtaagcagagatgtaatgctagacttactacggaatcagtttcctggagctaatgactttggaagtgaagtcattcccggtgccacttcccttggactgagggtgcaagcttacctatatgatggttactgggaagacattggtactatagaggcattttataacgctaatcttggaatcaccaagaaaccagttcctgattttagtttctatgaccgttctgctccgatctacacacagccgcgttatttaccaccgtctaagatgcttgatgctgatgttactgacagtgtcatcggagagggctgtgttatcaagaactgcaaaattcatcactctgtggttggactccgttcctgcatatcagaaggtgctattattgaagattcgttattaatgggagctgattattacgagactgctacggaaaagagcctcttaagcgcgaaaggaagtgtacccataggtattgggaaaaactcgcacatcaaaagggccatcatcgacaaaaacgcacgtatcggtgacaatgtcaagatcataaacagcgacaacgtgcaagaggcagcgagagagactgatggatatttcataaagagcggaattgtaacggttatcaaagacgccttaatcccaaccggcactgtcatctgaagtacacataatgctcctttgtttatttcttcatctttctaatgccctatcaataagttttctttatggctttttaagccccaataaatctactactagttgtaatgctgcttacgaaagagattacgaaatcatgttttcacaataccattgtctcttttgagaaaaaagaagaccctatgaatttcactaaatttatcttttgtagcttattatcaataaaattaagtttct

SEQ ID NO: 81190 - protein, 520 aa, Arabidopsis thaliana; identical to SEQ ID NO: 27025
  peptide (1)..(520): Ceres Seq. ID no. 12658730
  misc_feature (91)..(366): Pfam Name: Nucleotidyl transferase Pfam Description: Nucleotidyl transferase
  misc_feature (1)..(520): Homolog of NCBI NO: 15238933 NR Description: ADPG pyrophosphorylase small subunit (gb protein id: At5g48300.1, supported by cDNA: gi_15146247,
  misc_feature (1)..(520): Homolog of NCBI NO: 1575754 NR Description: ADP glucose pyrophosphorylase small subunit
  misc_feature (1)..(520): Homolog of NCBI NO: 17865468 NR Description: Glucose-1-phosphate adenylyltransferase small
  misc_feature (1)..(520): Homolog of NCBI NO: 13487787 NR Description: ADP-glucose pyrophosphorylase small subunit
  misc_feature (5)..(520): Homolog of NCBI NO: 1071859 NR Description: glucose-1-phosphate adenylyltransferase (EC
  misc_feature (1)..(520): Homolog of NCBI NO: 1237080 NR Description: ADP-glucose pyrophosphorylase [Pisum sativum]
  misc_feature (5)..(520): Homolog of NCBI NO: 232164 NR Description: Glucose-1-phosphate adenylyltransferase small
  misc_feature (4)..(520): Homolog of NCBI NO: 1707944 NR Description: Glucose-1-phosphate adenylyltransferase small
  misc_feature (1)..(520): Homolog of NCBI NO: 29421116 NR Description: ADP-glucose pyrophosphorylase small subunit
  misc_feature (5)..(520): Homolog of NCBI NO: 17865461 NR Description: Glucose-1-phosphate adenylyltransferase small

SEQ ID NO: 81191 - protein, 359 aa, Arabidopsis thaliana; identical to SEQ ID NO: 27026
  peptide (1)..(359): Ceres Seq. ID no. 12658731
  misc_feature (1)..(205): Pfam Name: Nucleotidyl transferase Pfam Description: Nucleotidyl transferase
  misc_feature (1)..(359): Homolog of NCBI NO: 15238933 NR Description: ADPG pyrophosphorylase small subunit (gb protein id: At5g48300.1, supported by cDNA: gi_15146247,
  misc_feature (1)..(359): Homolog of NCBI NO: 1575754 NR Description: ADP glucose pyrophosphorylase small subunit
  misc_feature (1)..(359): Homolog of NCBI NO: 17865468 NR Description: Glucose-1-phosphate adenylyltransferase small
  misc_feature (1)..(359): Homolog of NCBI NO: 13487787 NR Description: ADP-glucose pyrophosphorylase small subunit
  misc_feature (1)..(359): Homolog of NCBI NO: 1071859 NR Description: glucose-1-phosphate adenylyltransferase (EC
  misc_feature (1)..(359): Homolog of NCBI NO: 1237080 NR Description: ADP-glucose pyrophosphorylase [Pisum sativum]
  misc_feature (1)..(359): Homolog of NCBI NO: 232164 NR Description: Glucose-1-phosphate adenylyltransferase small
  misc_feature (1)..(359): Homolog of NCBI NO: 1707944 NR Description: Glucose-1-phosphate adenylyltransferase small
  misc_feature (1)..(359): Homolog of NCBI NO: 29421116 NR Description: ADP-glucose pyrophosphorylase small subunit
  misc_feature (1)..(359): Homolog of NCBI NO: 17865461 NR Description: Glucose-1-phosphate adenylyltransferase small

SEQ ID NO: 81192 - protein, 302 aa, Arabidopsis thaliana; identical to SEQ ID NO: 27027
  peptide (1)..(302): Ceres Seq. ID no. 12658732
  misc_feature (1)..(148): Pfam Name: Nucleotidyl transferase Pfam Description: Nucleotidyl transferase
  misc_feature (1)..(302): Homolog of NCBI NO: 15238933 NR Description: ADPG pyrophosphorylase small subunit (gb protein id: At5g48300.1, supported by cDNA: gi_15146247,
  misc_feature (1)..(302): Homolog of NCBI NO: 1575754 NR Description: ADP glucose pyrophosphorylase small subunit
  misc_feature (1)..(302): Homolog of NCBI NO: 17865468 NR Description: Glucose-1-phosphate adenylyltransferase small
  misc_feature (1)..(302): Homolog of NCBI NO: 13487787 NR Description: ADP-glucose pyrophosphorylase small subunit
  misc_feature (1)..(302): Homolog of NCBI NO: 1071859 NR Description: glucose-1-phosphate adenylyltransferase (EC
  misc_feature (1)..(302): Homolog of NCBI NO: 1237080 NR Description: ADP-glucose pyrophosphorylase [Pisum sativum]
  misc_feature (1)..(302): Homolog of NCBI NO: 232164 NR Description: Glucose-1-phosphate adenylyltransferase small
  misc_feature (1)..(302): Homolog of NCBI NO: 1707944 NR Description: Glucose-1-phosphate adenylyltransferase small
  misc_feature (1)..(302): Homolog of NCBI NO: 29421116 NR Description: ADP-glucose pyrophosphorylase small subunit
  misc_feature (1)..(302): Homolog of NCBI NO: 17865461 NR Description: Glucose-1-phosphate adenylyltransferase small

SEQ ID NO: 81193 - DNA, 1544 bp, Arabidopsis thaliana
  misc_feature (1)..(1544): Ceres Seq. ID no. 12658733
  misc_feature: MA Experiment ID: 20000088 Result: Down-regulated in Transcription
  misc_feature: MA Experiment 20000088 PARAMETER Experiment Name: At_100uM_ABA_Mutants_cDNA_P Parameter: Plant Line Value: Landsberg
  misc_feature: MA Experiment 20000088 PARAMETER Experiment Name: At_100uM_ABA_Mutants_cDNA_P Parameter: Timepoint (hr) Value: 6
  misc_feature: MA Experiment 20000088 PARAMETER Experiment Name: At_100uM_ABA_Mutants_cDNA_P Parameter: Tissue Value: Aerial
  misc_feature: MA Experiment 20000088 PARAMETER Experiment Name: At_100uM_ABA_Mutants_cDNA_P Parameter: Treatment Value: 100uM ABA vs. No Treatment
  misc_feature: MA Experiment ID: 20000227 Result: Down-regulated in Transcription
  misc_feature: MA Experiment 20000227 PARAMETER Experiment Name: At_Root-Tips-vs-Tops_P Parameter: Tissue Value: Root Tips vs. Root Tops
aggttaagattattcaaacttcaaaggcaaaaccaaatgagcttcgtgtggtccgctgcggtgtgggtcatagctgtagccgctgttgtgattagcaaatggttataccgatggtcgaacccgaagtgcaatggcaagttaccaccgggatcaatgggtttaccgatcatcggagagacatgcgacttctttgagccccatggattatacgagatctcaccctttgtcaagaagaggatgttaaagtacgggccattgtttcggacaaatattttcggatcgaacaccgtggttttgacagaacctgatatcatcttcgaagtttttcggcaagagaacaagtcttttgtgtttagctatccagaagcttttgtcaagccatttggaaaagaaaacgtgttcctcaaacatggaaacatccacaagcacgtcaagcaaatcagtcttcaacatcttggctctgaggctttaaaaaaaaagatgataggagaaatagacagagtaacctatgagcatcttagatcgaaggctaaccagggtagcttcgatgctaaggaggcagttgaaagtgttataatggcgcacttgaccccaaagataataagtaacctcaaaccagaaacacaagcaactcttgtggacaatataatggccctaggatctgaatggtttcagtcacccttgaagcttacgactttgatttctatctacaaagtctttattgcacgtagatacgccctccaggtgataaaggacgttttcacgaggaggaaagcgtccagagaaatgtgcggagacttcctcgacacaatggtagaagagggggagaaagaagacgtcatttttaatgaagaaagtgctataaatctcatattcgctattttggtcgtcgctaaagaatctacctcttccgttactagcttggccatcaaatttcttgccgaaaaccataaagctctcgcagagttgaagagggagcatgcggccatccttcaaaatagaaatggtaaaggagctggagttagctgggaagaatacagacaccaaatgactttcactaacatggtgataaatgagactcttcgaatggcaaacatggctcctataatgtatagaaaggctgtgaacgatgtcgaaatcaaaggttacacaattccagcgggctggattgtggcggttataccaccagctgtccatttcaatgatgctatttatgagaatcctttggagttcaatccatggagatgggaggggaaagagttgcggtctggatctaagacgttcatggtgtttggaggtggagtgagacagtgtgtcggcgcggagtttgcgagactacaaatttctatcttcattcatcatcttgtaacaacctacgatttctcattggcccaagaatcggagttcatccgtgcaccactcccatacttccccaaaggactgcctatcaagatttcccagtcactctagtatcttgtgtaatcatatatgtcactagtaaagaatccggggaagtattttcaatggggcaatactaaaataat

SEQ ID NO: 81194 - protein, 489 aa, Arabidopsis thaliana
  peptide (1)..(489): Ceres Seq. ID no. 12658734
  misc_feature (1)..(489): Homolog of NCBI NO: 30695347 NR Description: cytochrome p450 family [Arabidopsis thaliana]
  misc_feature (13)..(489): Homolog of NCBI NO: 30695352 NR Description: cytochrome p450 family [Arabidopsis thaliana]
  misc_feature (13)..(489): Homolog of NCBI NO: 22530982 NR Description: cytochrome P450-like protein [Arabidopsis
  misc_feature (13)..(488): Homolog of NCBI NO: 15218388 NR Description: cytochrome P450, putative; protein id: supported by cDNA: gi_17473540 [Arabidopsis thaliana]
  misc_feature (13)..(361): Homolog of NCBI NO: 15230572 NR Description: cytochrome P450 - like protein; protein id:
  misc_feature (371)..(487): Homolog of NCBI NO: 15230572 NR Description: cytochrome P450 - like protein; protein id:
  misc_feature (13)..(382): Homolog of NCBI NO: 25282639 NR Description: hypothetical protein T30F21.17 [imported] - thaliana >gi|4836883|gb|AAD30586.1|AC007260_17 Similar to
  misc_feature (414)..(488): Homolog of NCBI NO: 25282639 NR Description: hypothetical protein T30F21.17 [imported] - thaliana >gi|4836883|gb|AAD30586.1|AC007260_17 Similar to
  misc_feature (13)..(488): Homolog of NCBI NO: 15222806 NR Description: cytochrome P450, putative; protein id:
  misc_feature (6)..(278): Homolog of NCBI NO: 8778326 NR Description: F14J16.21 [Arabidopsis thaliana]
RLRLFKLQRQNQMSFVWSAAVWVIAVAAVVISKWLYRWSNPKCNGKLPPGSMGLPIIGETCDFFEPHGLYEISPFVKKRMLKYGPLFRTNIFGSNTVVLTEPDIIFEVFRQENKSFVFSYPEAFVKPFGKENVFLKHGNIHKHVKQISLQHLGSEALKKKMIGEIDRVTYEHLRSKANQGSFDAKEAVESVIMAHLTPKIISNLKPETQATLVDNIMALGSEWFQSPLKLTTLISIYKVFIARRYALQVIKDVFTRRKASREMCGDFLDTMVEEGEKEDVIFNEESAINLIFAILVVAKESTSSVTSLAIKFLAENHKALAELKREHAAILQNRNGKGAGVSWEEYRHQMTFTNMVINETLRMANMAPIMYRKAVNDVEIKGYTIPAGWIVAVIPPAVHFNDAIYENPLEFNPWRWEGKELRSGSKTFMVFGGGVRQCVGAEFARLQISIFIHHLVTTYDFSLAQESEFIRAPLPYFPKGLPIKISQSL

SEQ ID NO: 81195 - protein, 477 aa, Arabidopsis thaliana
  peptide (1)..(477): Ceres Seq. ID no. 12658735
  misc_feature (1)..(477): Homolog of NCBI NO: 30695347 NR Description: cytochrome p450 family [Arabidopsis thaliana]
  misc_feature (1)..(477): Homolog of NCBI NO: 30695352 NR Description: cytochrome p450 family [Arabidopsis thaliana]
  misc_feature (1)..(477): Homolog of NCBI NO: 22530982 NR Description: cytochrome P450-like protein [Arabidopsis
  misc_feature (1)..(476): Homolog of NCBI NO: 15218388 NR Description: cytochrome P450, putative; protein id: supported by cDNA: gi_17473540 [Arabidopsis thaliana]
  misc_feature (1)..(349): Homolog of NCBI NO: 15230572 NR Description: cytochrome P450 - like protein; protein id:
  misc_feature (359)..(475): Homolog of NCBI NO: 15230572 NR Description: cytochrome P450 - like protein; protein id:
  misc_feature (1)..(370): Homolog of NCBI NO: 25282639 NR Description: hypothetical protein T30F21.17 [imported] - thaliana >gi|4836883|gb|AAD30586.1|AC007260_17 Similar to
  misc_feature (402)..(476): Homolog of NCBI NO: 25282639 NR Description: hypothetical protein T30F21.17 [imported] - thaliana >gi|4836883|gb|AAD30586.1|AC007260_17 Similar to
  misc_feature (1)..(476): Homolog of NCBI NO: 15222806 NR Description: cytochrome P450, putative; protein id:
  misc_feature (1)..(266): Homolog of NCBI NO: 8778326 NR Description: F14J16.21 [Arabidopsis thaliana]
MSFVWSAAVWVIAVAAVVISKWLYRWSNPKCNGKLPPGSMGLPIIGETCDFFEPHGLYEISPFVKKRMLKYGPLFRTNIFGSNTVVLTEPDIIFEVFRQENKSFVFSYPEAFVKPFGKENVFLKHGNIHKHVKQISLQHLGSEALKKKMIGEIDRVTYEHLRSKANQGSFDAKEAVESVIMAHLTPKIISNLKPETQATLVDNIMALGSEWFQSPLKLTTLISIYKVFIARRYALQVIKDVFTRRKASREMCGDFLDTMVEEGEKEDVIFNEESAINLIFAILVVAKESTSSVTSLAIKFLAENHKALAELKREHAAILQNRNGKGAGVSWEEYRHQMTFTNMVINETLRMANMAPIMYRKAVNDVEIKGYTIPAGWIVAVIPPAVHFNDAIYENPLEFNPWRWEGKELRSGSKTFMVFGGGVRQCVGAEFARLQISIFIHHLVTTYDFSLAQESEFIRAPLPYFPKGLPIKISQSL

SEQ ID NO: 81196 - protein, 438 aa, Arabidopsis thaliana
  peptide (1)..(438): Ceres Seq. ID no. 12658736
  misc_feature (1)..(438): Homolog of NCBI NO: 30695347 NR Description: cytochrome p450 family [Arabidopsis thaliana]
  misc_feature (1)..(438): Homolog of NCBI NO: 30695352 NR Description: cytochrome p450 family [Arabidopsis thaliana]
  misc_feature (1)..(438): Homolog of NCBI NO: 22530982 NR Description: cytochrome P450-like protein [Arabidopsis
  misc_feature (1)..(437): Homolog of NCBI NO: 15218388 NR Description: cytochrome P450, putative; protein id: supported by cDNA: gi_17473540 [Arabidopsis thaliana]
  misc_feature (1)..(310): Homolog of NCBI NO: 15230572 NR Description: cytochrome P450 - like protein; protein id:
  misc_feature (320)..(436): Homolog of NCBI NO: 15230572 NR Description: cytochrome P450 - like protein; protein id:
  misc_feature (1)..(331): Homolog of NCBI NO: 25282639 NR Description: hypothetical protein T30F21.17 [imported] - thaliana >gi|4836883|gb|AAD30586.1|AC007260_17 Similar to
  misc_feature (363)..(437): Homolog of NCBI NO: 25282639 NR Description: hypothetical protein T30F21.17 [imported] - thaliana >gi|4836883|gb|AAD30586.1|AC007260_17 Similar to
  misc_feature (1)..(437): Homolog of NCBI NO: 15222806 NR Description: cytochrome P450, putative; protein id:
  misc_feature (1)..(227): Homolog of NCBI NO: 8778326 NR Description: F14J16.21 [Arabidopsis thaliana]
MGLPIIGETCDFFEPHGLYEISPFVKKRMLKYGPLFRTNIFGSNTVVLTEPDIIFEVFRQENKSFVFSYPEAFVKPFGKENVFLKHGNIHKHVKQISLQHLGSEALKKKMIGEIDRVTYEHLRSKANQGSFDAKEAVESVIMAHLTPKIISNLKPETQATLVDNIMALGSEWFQSPLKLTTLISIYKVFIARRYALQVIKDVFTRRKASREMCGDFLDTMVEEGEKEDVIFNEESAINLIFAILVVAKESTSSVTSLAIKFLAENHKALAELKREHAAILQNRNGKGAGVSWEEYRHQMTFTNMVINETLRMANMAPIMYRKAVNDVEIKGYTIPAGWIVAVIPPAVHFNDAIYENPLEFNPWRWEGKELRSGSKTFMVFGGGVRQCVGAEFARLQISIFIHHLVTTYDFSLAQESEFIRAPLPYFPKGLPIKISQSL

SEQ ID NO: 81197 - DNA, 952 bp, Arabidopsis thaliana
  misc_feature (1)..(952): Ceres Seq. ID no. 12658783
  misc_feature: MA Experiment ID: 20000112 Result: Up-regulated in Transcription
  misc_feature: MA Experiment 20000112 PARAMETER Experiment Name: At_42deg_Heat_cDNA_P Parameter: Temperature (deg C) Value: 42 vs. 22
  misc_feature: MA Experiment 20000112 PARAMETER Experiment Name: At_42deg_Heat_cDNA_P Parameter: Timepoint (hr) Value: 2
  misc_feature: MA Experiment 20000112 PARAMETER Experiment Name: At_42deg_Heat_cDNA_P Parameter: Tissue Value: Aerial
  misc_feature: MA Experiment ID: 20000264 Result: Up-regulated in Transcription
  misc_feature: MA Experiment 20000264 PARAMETER Experiment Name: At_Open_Flower_P Parameter: Age (day) Value: 21
  misc_feature: MA Experiment 20000264 PARAMETER Experiment Name: At_Open_Flower_P Parameter: Plant Line Value: WS
  misc_feature: MA Experiment 20000264 PARAMETER Experiment Name: At_Open_Flower_P Parameter: Tissue Value: Open Flower vs. Whole Plant
  misc_feature: MA Experiment ID: 20000286 Result: Up-regulated in Transcription
  misc_feature: MA Experiment 20000286 PARAMETER Experiment Name: At_Open_Flower_P Parameter: Age (day) Value: 21
  misc_feature: MA Experiment 20000286 PARAMETER Experiment Name: At_Open_Flower_P Parameter: Plant Line Value: WS
  misc_feature: MA Experiment 20000286 PARAMETER Experiment Name: At_Open_Flower_P Parameter: Tissue Value: Half Open vs. Whole Plant
acattccgaaaagtacttgtttattggtgttattcatcgctgctcaaggtggcaaaccaaggagaacaagaagagtccagggccaatgagcctgagggtatcaaatcagtgattgatgacatctacatttttgaagacgaccctgtggttgataggttcaataggtttggcacggagatgtctgccatggtctcggccttgacacaggtggtttctgctcgctctcagactgaggctgaaggtgctcactcttcttcctcttcggctggacataaaagaggatggcttggaatcgattctgctcctattccctcatcatttgctcgtgtagactcttcacataatccgatcgaagaatccatgagcaaggcatttccagaggaagcaagggagaaaaaaaggaggtacagaggagtaaggcagagaccatggggcaaatgggcagctgagatacgtgatccacatagagccgctagggtttggctcgggacgtttgatacagcggaggccgcggctagagcctacgacgaggctgcactccggttccgtggaaataaagcaaagctaaatttcccagaggatgtaaggattcttcctcctccccctcctcttcttcgttcaccagctgacacggtggcgaataaagcagaagaggatctgataaattattggagttatacaaagttgttgcaaagttcaggccaacggtcatttctcgagcgaggacaagaagagagtagtaacatatttgaacattcaccaatggaacaacctctgcctccttcaagttctggtccaagttcctctaattttcctgcaccttctctacctaatacatagtttcacttttattaaagctctacaaatacaattaaatacatagctaaatgaaaatgattttcttgtctgtataccttcttaagtgctaaacaatatattgtactctttgttt

SEQ ID NO: 81198 - protein, 279 aa, Arabidopsis thaliana
  peptide (1)..(279): Ceres Seq. ID no. 12658784
  misc_feature (133)..(197): Pfam Name: AP2 domain Pfam Description: AP2 domain
  misc_feature (60)..(279): Homolog of NCBI NO: 34221731 NR Description: putative AP2 domain transcription factor
  misc_feature (60)..(279): Homolog of NCBI NO: 15240610 NR Description: putative protein; protein id: At5g50080.1 thaliana] >gi|10177219|dbj|BAB10294.1| contains similarity to AP2
  misc_feature (105)..(231): Homolog of NCBI NO: 34908616 NR Description: P0677H08.8 [Oryza sativa (japonica
  misc_feature (63)..(195): Homolog of NCBI NO: 15218275 NR Description: AP2 domain protein RAP2.6; protein id: supported by cDNA: gi_17065541 [Arabidopsis thaliana]
  misc_feature (131)..(230): Homolog of NCBI NO: 15238232 NR Description: putative protein; protein id: At5g64750.1 thaliana] >gi|10177206|dbj|BAB10308.1| contains similarity to factor~gene_id:MVP7.8 [Arabidopsis thaliana]
  misc_feature (102)..(209): Homolog of NCBI NO: 15226153 NR Description: putative AP2 domain transcription factor; protein At2g33710.1 [Arabidopsis thaliana] >gi|25408300|pir||F84748
  misc_feature (63)..(196): Homolog of NCBI NO: 38347164 NR Description: OSJNBa0039C07.10 [Oryza sativa (japonica
  misc_feature (67)..(197): Homolog of NCBI NO: 15240379 NR Description: putative protein; protein id: At5g61890.1
  misc_feature (131)..(195): Homolog of NCBI NO: 2281637 NR Description: AP2 domain containing protein RAP2.6 [Arabidopsis
  misc_feature (130)..(222): Homolog of NCBI NO: 10798644 NR Description: AP2 domain-containing transcription factor
TFRKVLVYWCYSSLLKVANQGEQEESRANEPEGIKSVIDDIYIFEDDPVVDRFNRFGTEMSAMVSALTQVVSARSQTEAEGAHSSSSSAGHKRGWLGIDSAPIPSSFARVDSSHNPIEESMSKAFPEEAREKKRRYRGVRQRPWGKWAAEIRDPHRAARVWLGTFDTAEAAARAYDEAALRFRGNKAKLNFPEDVRILPPPPPLLRSPADTVANKAEEDLINYWSYTKLLQSSGQRSFLERGQEESSNIFEHSPMEQPLPPSSSGPSSSNFPAPSLPNT

SEQ ID NO: 81199 - protein, 220 aa, Arabidopsis thaliana
  peptide (1)..(220): Ceres Seq. ID no. 12658785
  misc_feature (74)..(138): Pfam Name: AP2 domain Pfam Description: AP2 domain
  misc_feature (1)..(220): Homolog of NCBI NO: 34221731 NR Description: putative AP2 domain transcription factor
  misc_feature (1)..(220): Homolog of NCBI NO: 15240610 NR Description: putative protein; protein id: At5g50080.1 thaliana] >gi|10177219|dbj|BAB10294.1| contains similarity to AP2
  misc_feature (46)..(172): Homolog of NCBI NO: 34908616 NR Description: P0677H08.8 [Oryza sativa (japonica
  misc_feature (4)..(136): Homolog of NCBI NO: 15218275 NR Description: AP2 domain protein RAP2.6; protein id: supported by cDNA: gi_17065541 [Arabidopsis thaliana]
  misc_feature (72)..(171): Homolog of NCBI NO: 15238232 NR Description: putative protein; protein id: At5g64750.1 thaliana] >gi|10177206|dbj|BAB10308.1| contains similarity to factor~gene_id:MVP7.8 [Arabidopsis thaliana]
  misc_feature (43)..(150): Homolog of NCBI NO: 15226153 NR Description: putative AP2 domain transcription factor; protein At2g33710.1 [Arabidopsis thaliana] >gi|25408300|pir||F84748
  misc_feature (4)..(137): Homolog of NCBI NO: 38347164 NR Description: OSJNBa0039C07.10 [Oryza sativa (japonica
  misc_feature (8)..(138): Homolog of NCBI NO: 15240379 NR Description: putative protein; protein id: At5g61890.1
  misc_feature (72)..(136): Homolog of NCBI NO: 2281637 NR Description: AP2 domain containing protein RAP2.6 [Arabidopsis
  misc_feature (71)..(163): Homolog of NCBI NO: 10798644 NR Description: AP2 domain-containing transcription factor
MSAMVSALTQVVSARSQTEAEGAHSSSSSAGHKRGWLGIDSAPIPSSFARVDSSHNPIEESMSKAFPEEAREKKRRYRGVRQRPWGKWAAEIRDPHRAARVWLGTFDTAEAAARAYDEAALRFRGNKAKLNFPEDVRILPPPPPLLRSPADTVANKAEEDLINYWSYTKLLQSSGQRSFLERGQEESSNIFEHSPMEQPLPPSSSGPSSSNFPAPSLPNT

SEQ ID NO: 81200 - protein, 217 aa, Arabidopsis thaliana
  peptide (1)..(217): Ceres Seq. ID no. 12658786
  misc_feature (71)..(135): Pfam Name: AP2 domain Pfam Description: AP2 domain
  misc_feature (1)..(217): Homolog of NCBI NO: 34221731 NR Description: putative AP2 domain transcription factor
  misc_feature (1)..(217): Homolog of NCBI NO: 15240610 NR Description: putative protein; protein id: At5g50080.1 thaliana] >gi|10177219|dbj|BAB10294.1| contains similarity to AP2
  misc_feature (43)..(169): Homolog of NCBI NO: 34908616 NR Description: P0677H08.8 [Oryza sativa (japonica
  misc_feature (1)..(133): Homolog of NCBI NO: 15218275 NR Description: AP2 domain protein RAP2.6; protein id: supported by cDNA: gi_17065541 [Arabidopsis thaliana]
  misc_feature (69)..(168): Homolog of NCBI NO: 15238232 NR Description: putative protein; protein id: At5g64750.1 thaliana] >gi|10177206|dbj|BAB10308.1| contains similarity to factor~gene_id:MVP7.8 [Arabidopsis thaliana]
  misc_feature (40)..(147): Homolog of NCBI NO: 15226153 NR Description: putative AP2 domain transcription factor; protein At2g33710.1 [Arabidopsis thaliana] >gi|25408300|pir||F84748
  misc_feature (1)..(134): Homolog of NCBI NO: 38347164 NR Description: OSJNBa0039C07.10 [Oryza sativa (japonica
  misc_feature (5)..(135): Homolog of NCBI NO: 15240379 NR Description: putative protein; protein id: At5g61890.1
  misc_feature (69)..(133): Homolog of NCBI NO: 2281637 NR Description: AP2 domain containing protein RAP2.6 [Arabidopsis
  misc_feature (68)..(160): Homolog of NCBI NO: 10798644 NR Description: AP2 domain-containing transcription factor
MVSALTQVVSARSQTEAEGAHSSSSSAGHKRGWLGIDSAPIPSSFARVDSSHNPIEESMSKAFPEEAREKKRRYRGVRQRPWGKWAAEIRDPHRAARVWLGTFDTAEAAARAYDEAALRFRGNKAKLNFPEDVRILPPPPPLLRSPADTVANKAEEDLINYWSYTKLLQSSGQRSFLERGQEESSNIFEHSPMEQPLPPSSSGPSSSNFPAPSLPNT

SEQ ID NO: 81201 - DNA, 1156 bp, Arabidopsis thaliana
  misc_feature (1)..(1156): Ceres Seq. ID no. 12658799
  misc_feature: MA Experiment ID: 108461 Result: Down-regulated in Transcription
  misc_feature: MA Experiment 108461 PARAMETER Experiment Name: At_Germinating_Seeds_cDNA_P Parameter: Age (day) Value: 1 vs. 0
  misc_feature: MA Experiment 108461 PARAMETER Experiment Name: At_Germinating_Seeds_cDNA_P Parameter: Tissue Value: Germinating Seeds
  misc_feature: MA Experiment ID: 108462 Result: Down-regulated in Transcription
  misc_feature: MA Experiment 108462 PARAMETER Experiment Name: At_Germinating_Seeds_cDNA_P Parameter: Age (day) Value: 2 vs. 0
  misc_feature: MA Experiment 108462 PARAMETER Experiment Name: At_Germinating_Seeds_cDNA_P Parameter: Tissue Value: Germinating Seeds
  misc_feature: MA Experiment ID: 108463 Result: Down-regulated in Transcription
  misc_feature: MA Experiment 108463 PARAMETER Experiment Name: At_Germinating_Seeds_cDNA_P Parameter: Age (day) Value: 3 vs. 0
  misc_feature: MA Experiment 108463 PARAMETER Experiment Name: At_Germinating_Seeds_cDNA_P Parameter: Tissue Value: Germinating Seeds
  misc_feature: MA Experiment ID: 108464 Result: Down-regulated in Transcription
  misc_feature: MA Experiment 108464 PARAMETER Experiment Name: At_Germinating_Seeds_cDNA_P Parameter: Age (day) Value: 4 vs. 0
  misc_feature: MA Experiment 108464 PARAMETER Experiment Name: At_Germinating_Seeds_cDNA_P Parameter: Tissue Value: Germinating Seeds
  misc_feature: MA Experiment ID: 108473 Result: Up-regulated in Transcription
  misc_feature: MA Experiment 108473 PARAMETER Experiment Name: At_Drought_Flowers_cDNA_P Parameter: Timepoint (hr) Value: 7 d
  misc_feature: MA Experiment 108473 PARAMETER Experiment Name: At_Drought_Flowers_cDNA_P Parameter: Tissue Value: Flower
  misc_feature: MA Experiment 108473 PARAMETER Experiment Name: At_Drought_Flowers_cDNA_P Parameter: Treatment Value: Drought vs. No Drought
  misc_feature: MA Experiment ID: 108488 Result: Down-regulated in Transcription
  misc_feature: MA Experiment ID: 108572 Result: Up-regulated in Transcription
  misc_feature: MA Experiment 108572 PARAMETER Experiment Name: At_Drought_cDNA_P Parameter: Timepoint (hr) Value: 1
  misc_feature: MA Experiment 108572 PARAMETER Experiment Name: At_Drought_cDNA_P Parameter: Tissue Value: Aerial
  misc_feature: MA Experiment 108572 PARAMETER Experiment Name: At_Drought_cDNA_P Parameter: Treatment Value: Drought vs. No Drought
  misc_feature: MA Experiment ID: 108573 Result: Up-regulated in Transcription
  misc_feature: MA Experiment 108573 PARAMETER Experiment Name: At_Drought_cDNA_P Parameter: Timepoint (hr) Value: 6
  misc_feature: MA Experiment 108573 PARAMETER Experiment Name: At_Drought_cDNA_P Parameter: Tissue Value: Aerial
  misc_feature: MA Experiment 108573 PARAMETER Experiment Name: At_Drought_cDNA_P Parameter: Treatment Value: Drought vs. No Drought
  misc_feature: MA Experiment ID: 108605 Result: Up-regulated in Transcription
  misc_feature: MA Experiment 108605 PARAMETER Experiment Name: At_100uM_ABA_cDNA_P Parameter: Timepoint (hr) Value: 6
  misc_feature: MA Experiment 108605 PARAMETER Experiment Name: At_100uM_ABA_cDNA_P Parameter: Tissue Value: Aerial
  misc_feature: MA Experiment 108605 PARAMETER Experiment Name: At_100uM_ABA_cDNA_P Parameter: Treatment Value: 100uM ABA vs. No Treatment
  misc_feature: MA Experiment ID: 108607 Result: Up-regulated in Transcription
  misc_feature: MA Experiment 108607 PARAMETER Experiment Name: At_100uM_ABA_cDNA_P Parameter: Timepoint (hr) Value: 4
  misc_feature: MA Experiment 108607 PARAMETER Experiment Name: At_100uM_ABA_cDNA_P Parameter: Tissue Value: Aerial
  misc_feature: MA Experiment 108607 PARAMETER Experiment Name: At_100uM_ABA_cDNA_P Parameter: Treatment Value: 100uM ABA vs. No Treatment
  misc_feature: MA Experiment ID: 108608 Result: Up-regulated in Transcription
  misc_feature: MA Experiment 108608 PARAMETER Experiment Name: At_100uM_ABA_cDNA_P Parameter: Timepoint (hr) Value: 1
  misc_feature: MA Experiment 108608 PARAMETER Experiment Name: At_100uM_ABA_cDNA_P Parameter: Tissue Value: Aerial
  misc_feature: MA Experiment 108608 PARAMETER Experiment Name: At_100uM_ABA_cDNA_P Parameter: Treatment Value: 100uM ABA vs. No Treatment
  misc_feature: MA Experiment ID: 108609 Result: Up-regulated in Transcription
  misc_feature: MA Experiment 108609 PARAMETER Experiment Name: At_100uM_ABA_cDNA_P Parameter: Timepoint (hr) Value: 24
  misc_feature: MA Experiment 108609 PARAMETER Experiment Name: At_100uM_ABA_cDNA_P Parameter: Tissue Value: Aerial
  misc_feature: MA Experiment 108609 PARAMETER Experiment Name: At_100uM_ABA_cDNA_P Parameter: Treatment Value: 100uM ABA vs. No Treatment
  misc_feature: MA Experiment ID: 108668 Result: Up-regulated in Transcription
  misc_feature: MA Experiment 108668 PARAMETER Experiment Name: At_2mM_SA_cDNA_P Parameter: Plant Line Value: WS
  misc_feature: MA Experiment 108668 PARAMETER Experiment Name: At_2mM_SA_cDNA_P Parameter: Timepoint (hr) Value: 6
  misc_feature: MA Experiment 108668 PARAMETER Experiment Name: At_2mM_SA_cDNA_P Parameter: Treatment Value: 2mM SA vs. No Treatment
  misc_feature: MA Experiment ID: 20000071 Result: Up-regulated in Transcription
  misc_feature: MA Experiment 20000071 PARAMETER Experiment Name: At_100uM_ABA_Mutants_cDNA_P Parameter: Plant Line Value: CS8104
  misc_feature: MA Experiment 20000071 PARAMETER Experiment Name: At_100uM_ABA_Mutants_cDNA_P Parameter: Timepoint (hr) Value: 6
  misc_feature: MA Experiment 20000071 PARAMETER Experiment Name: At_100uM_ABA_Mutants_cDNA_P Parameter: Tissue Value: Aerial
  misc_feature: MA Experiment 20000071 PARAMETER Experiment Name: At_100uM_ABA_Mutants_cDNA_P Parameter: Treatment Value: 100uM ABA vs. No Treatment
  misc_feature: MA Experiment ID: 20000072 Result: Up-regulated in Transcription
  misc_feature: MA Experiment 20000072 PARAMETER Experiment Name: At_100uM_ABA_Mutants_cDNA_P Parameter: Plant Line Value: CS8105
  misc_feature: MA Experiment 20000072 PARAMETER Experiment Name: At_100uM_ABA_Mutants_cDNA_P Parameter: Timepoint (hr) Value: 6
  misc_feature: MA Experiment 20000072 PARAMETER Experiment Name: At_100uM_ABA_Mutants_cDNA_P Parameter: Tissue Value: Aerial
  misc_feature: MA Experiment 20000072 PARAMETER Experiment Name: At_100uM_ABA_Mutants_cDNA_P Parameter: Treatment Value: 100uM ABA vs. No Treatment
  misc_feature: MA Experiment ID: 20000087 Result: Up-regulated in Transcription
  misc_feature: MA Experiment 20000087 PARAMETER Experiment Name: At_100uM_ABA_Mutants_cDNA_P Parameter: Plant Line Value: WS
  misc_feature: MA Experiment 20000087 PARAMETER Experiment Name: At_100uM_ABA_Mutants_cDNA_P Parameter: Timepoint (hr) Value: 6
  misc_feature: MA Experiment 20000087 PARAMETER Experiment Name: At_100uM_ABA_Mutants_cDNA_P Parameter: Tissue Value: Aerial
  misc_feature: MA Experiment 20000087 PARAMETER Experiment Name: At_100uM_ABA_Mutants_cDNA_P Parameter: Treatment Value: 100uM ABA vs. No Treatment
  misc_feature: MA Experiment ID: 20000088 Result: Up-regulated in Transcription
  misc_feature: MA Experiment 20000088 PARAMETER Experiment Name: At_100uM_ABA_Mutants_cDNA_P Parameter: Plant Line Value: Landsberg
  misc_feature: MA Experiment 20000088 PARAMETER Experiment Name: At_100uM_ABA_Mutants_cDNA_P Parameter: Timepoint (hr) Value: 6
  misc_feature: MA Experiment 20000088 PARAMETER Experiment Name: At_100uM_ABA_Mutants_cDNA_P Parameter: Tissue Value: Aerial
  misc_feature: MA Experiment 20000088 PARAMETER Experiment Name: At_100uM_ABA_Mutants_cDNA_P Parameter: Treatment Value: 100uM ABA vs. No Treatment
  misc_feature: MA Experiment ID: 20000166 Result: Up-regulated in Transcription
  misc_feature: MA Experiment 20000166 PARAMETER Experiment Name: At_100uM_ABA_P Parameter: Age (day) Value: 14
  misc_feature: MA Experiment 20000166 PARAMETER Experiment Name: At_100uM_ABA_P Parameter: Organism Value: A. thaliana
  misc_feature: MA Experiment 20000166 PARAMETER Experiment Name: At_100uM_ABA_P Parameter: Plant Line Value: WS
  misc_feature: MA Experiment 20000166 PARAMETER Experiment Name: At_100uM_ABA_P Parameter: Timepoint (hr) Value: 1
  misc_feature: MA Experiment 20000166 PARAMETER Experiment Name: At_100uM_ABA_P Parameter: Tissue Value: Aerial
  misc_feature: MA Experiment 20000166 PARAMETER Experiment Name: At_100uM_ABA_P Parameter: Treatment Value: 100uM ABA vs. No Treatment
  misc_feature: MA Experiment ID: 20000169 Result: Up-regulated in Transcription
  misc_feature: MA Experiment 20000169 PARAMETER Experiment Name: At_100uM_ABA_P Parameter: Age (day) Value: 14
  misc_feature: MA Experiment 20000169 PARAMETER Experiment Name: At_100uM_ABA_P Parameter: Organism Value: A. thaliana
  misc_feature: MA Experiment 20000169 PARAMETER Experiment Name: At_100uM_ABA_P Parameter: Plant Line Value: WS
  misc_feature: MA Experiment 20000169 PARAMETER Experiment Name: At_100uM_ABA_P Parameter: Timepoint (hr) Value: 6
  misc_feature: MA Experiment 20000169 PARAMETER Experiment Name: At_100uM_ABA_P Parameter: Tissue Value: Aerial
  misc_feature: MA Experiment 20000169 PARAMETER Experiment Name: At_100uM_ABA_P Parameter: Treatment Value: 100uM ABA vs. No Treatment
  misc_feature: MA Experiment ID: 20000180 Result: Down-regulated in Transcription
  misc_feature: MA Experiment 20000180 PARAMETER Experiment Name: At_Germinating_Seeds_P Parameter: Age (hr) Value: 24 vs. 0
  misc_feature: MA Experiment 20000180 PARAMETER Experiment Name: At_Germinating_Seeds_P Parameter: Tissue Value: Germinating Seeds
  misc_feature: MA Experiment ID: 20000185 Result: Down-regulated in Transcription
  misc_feature: MA Experiment 20000185 PARAMETER Experiment Name: At_Roots__P Parameter: Age (day) Value: 7 vs. 21
  misc_feature: MA Experiment 20000185 PARAMETER Experiment Name: At_Roots__P Parameter: Organism Value: A. thaliana
  misc_feature: MA Experiment 20000185 PARAMETER Experiment Name: At_Roots__P Parameter: Tissue Value: Roots vs. Whole Plant
  misc_feature: MA Experiment ID: 20000267 Result: Up-regulated in Transcription
  misc_feature: MA Experiment 20000267 PARAMETER Experiment Name: At_Drought_P Parameter: Age (day) Value: 7
  misc_feature: MA Experiment 20000267 PARAMETER Experiment Name: At_Drought_P Parameter: Organism Value: A. thaliana
  misc_feature: MA Experiment 20000267 PARAMETER Experiment Name: At_Drought_P Parameter: Plant Line Value: WS
  misc_feature: MA Experiment 20000267 PARAMETER Experiment Name: At_Drought_P Parameter: Timepoint (hr) Value: 6
  misc_feature: MA Experiment 20000267 PARAMETER Experiment Name: At_Drought_P Parameter: Tissue Value: Whole Plant
  misc_feature: MA Experiment 20000267 PARAMETER Experiment Name: At_Drought_P Parameter: Treatment Value: Drought vs. No Drought
  misc_feature: MA Experiment ID: 20000268 Result: Up-regulated in Transcription
  misc_feature: MA Experiment 20000268 PARAMETER Experiment Name: At_100mM_NaCl__P Parameter: Age (day) Value: 14
  misc_feature: MA Experiment 20000268 PARAMETER Experiment Name: At_100mM_NaCl__P Parameter: Organism Value: A. thaliana
  misc_feature: MA Experiment 20000268 PARAMETER Experiment Name: At_100mM_NaCl__P Parameter: Plant Line Value: WS
  misc_feature: MA Experiment 20000268 PARAMETER Experiment Name: At_100mM_NaCl__P Parameter: Timepoint (hr) Value: 6
  misc_feature: MA Experiment 20000268 PARAMETER Experiment Name: At_100mM_NaCl__P Parameter: Tissue Value: Whole Plant
  misc_feature: MA Experiment 20000268 PARAMETER Experiment Name: At_100mM_NaCl__P Parameter: Treatment Value: 100mM NaCl vs. No Treatment
  misc_feature: MA Experiment ID: 20000436 Result: Up-regulated in Transcription
  misc_feature: MA Experiment 20000436 PARAMETER Experiment Name: At_Drought_P Parameter: Age (day) Value: 7
  misc_feature: MA Experiment 20000436 PARAMETER Experiment Name: At_Drought_P Parameter: Organism Value: A. thaliana
  misc_feature: MA Experiment 20000436 PARAMETER Experiment Name: At_Drought_P Parameter: Plant Line Value: WS
  misc_feature: MA Experiment 20000436 PARAMETER Experiment Name: At_Drought_P Parameter: Timepoint (hr) Value: 12
  misc_feature: MA Experiment 20000436 PARAMETER Experiment Name: At_Drought_P Parameter: Tissue Value: Whole Plant
  misc_feature: MA Experiment 20000436 PARAMETER Experiment Name: At_Drought_P Parameter: Treatment Value: Drought vs. No Drought
  misc_feature: MA Experiment ID: 20000437 Result: Up-regulated in Transcription
  misc_feature: MA Experiment 20000437 PARAMETER Experiment Name: At_Drought_P Parameter: Age (day) Value: 8
  misc_feature: MA Experiment 20000437 PARAMETER Experiment Name: At_Drought_P Parameter: Organism Value: A. thaliana
  misc_feature: MA Experiment 20000437 PARAMETER Experiment Name: At_Drought_P Parameter: Plant Line Value: WS
  misc_feature: MA Experiment 20000437 PARAMETER Experiment Name: At_Drought_P Parameter: Timepoint (hr) Value: 24
  misc_feature: MA Experiment 20000437 PARAMETER Experiment Name: At_Drought_P Parameter: Tissue Value: Whole Plant
  misc_feature: MA Experiment 20000437 PARAMETER Experiment Name: At_Drought_P Parameter: Treatment Value: Drought vs. No Drought
  misc_feature: MA Experiment ID: 20000453 Result: Up-regulated in Transcription
  misc_feature: MA Experiment 20000453 PARAMETER Experiment Name: At_100uM_ABA_P Parameter: Age (day) Value: 15
  misc_feature: MA Experiment 20000453 PARAMETER Experiment Name: At_100uM_ABA_P Parameter: Organism Value: A. thaliana
  misc_feature: MA Experiment 20000453 PARAMETER Experiment Name: At_100uM_ABA_P Parameter: Plant Line Value: WS
  misc_feature: MA Experiment 20000453 PARAMETER Experiment Name: At_100uM_ABA_P Parameter: Timepoint (hr) Value: 24
  misc_feature: MA Experiment 20000453 PARAMETER Experiment Name: At_100uM_ABA_P Parameter: Tissue Value: Aerial
  misc_feature: MA Experiment 20000453 PARAMETER Experiment Name: At_100uM_ABA_P Parameter: Treatment Value: 100uM ABA vs. No Treatment
  misc_feature: MA Experiment ID: 20000455 Result: Up-regulated in Transcription
  misc_feature: MA Experiment 20000455 PARAMETER Experiment Name: At_100uM_ABA_P Parameter: Age (day) Value: 16
  misc_feature: MA Experiment 20000455 PARAMETER Experiment Name: At_100uM_ABA_P Parameter: Organism Value: A. thaliana
  misc_feature: MA Experiment 20000455 PARAMETER Experiment Name: At_100uM_ABA_P Parameter: Plant Line Value: WS
  misc_feature: MA Experiment 20000455 PARAMETER Experiment Name: At_100uM_ABA_P Parameter: Timepoint (hr) Value: 48
  misc_feature: MA Experiment 20000455 PARAMETER Experiment Name: At_100uM_ABA_P Parameter: Tissue Value: Aerial
  misc_feature: MA Experiment 20000455 PARAMETER Experiment Name: At_100uM_ABA_P Parameter: Treatment Value: 100uM ABA vs. No Treatment
  misc_feature: MA Experiment ID: 20001554 Result: Up-regulated in Transcription
  misc_feature: MA Experiment 20001554 PARAMETER Experiment Name: At_Drought_Soil_Dry_P Parameter: Age (day) Value: 21
  misc_feature: MA Experiment 20001554 PARAMETER Experiment Name: At_Drought_Soil_Dry_P Parameter: Organism Value: A. thaliana
  misc_feature: MA Experiment 20001554 PARAMETER Experiment Name: At_Drought_Soil_Dry_P Parameter: Plant Line Value: WS
  misc_feature: MA Experiment 20001554 PARAMETER Experiment Name: At_Drought_Soil_Dry_P Parameter: Post Timepoint (hr) Value: None
  misc_feature: MA Experiment 20001554 PARAMETER Experiment Name: At_Drought_Soil_Dry_P Parameter: Post-Treatment Value: None
  misc_feature: MA Experiment 20001554 PARAMETER Experiment Name: At_Drought_Soil_Dry_P Parameter: Timepoint (day) Value: 7
  misc_feature: MA Experiment 20001554 PARAMETER Experiment Name: At_Drought_Soil_Dry_P Parameter: Treatment Value: Drought vs. No Drought
  misc_feature: MA Experiment ID: 20001555 Result: Up-regulated in Transcription
  misc_feature: MA Experiment 20001555 PARAMETER Experiment Name: At_Drought_Soil_Dry_P Parameter: Age (day) Value: 24
  misc_feature: MA Experiment 20001555 PARAMETER Experiment Name: At_Drought_Soil_Dry_P Parameter: Organism Value: A. thaliana
  misc_feature: MA Experiment 20001555 PARAMETER Experiment Name: At_Drought_Soil_Dry_P Parameter: Plant Line Value: WS
  misc_feature: MA Experiment 20001555 PARAMETER Experiment Name: At_Drought_Soil_Dry_P Parameter: Post Timepoint (hr) Value: None
  misc_feature: MA Experiment 20001555 PARAMETER Experiment Name: At_Drought_Soil_Dry_P Parameter: Post-Treatment Value: None
  misc_feature: MA Experiment 20001555 PARAMETER Experiment Name: At_Drought_Soil_Dry_P Parameter: Timepoint (day) Value: 10
  misc_feature: MA Experiment 20001555 PARAMETER Experiment Name: At_Drought_Soil_Dry_P Parameter: Treatment Value: Drought vs. No Drought
  misc_feature: MA Experiment ID: 20001556 Result: Up-regulated in Transcription
  misc_feature: MA Experiment 20001556 PARAMETER Experiment Name: At_Drought_Soil_Dry_P Parameter: Age (day) Value: 26
  misc_feature: MA Experiment 20001556 PARAMETER Experiment Name: At_Drought_Soil_Dry_P Parameter: Organism Value: A. thaliana
  misc_feature: MA Experiment 20001556 PARAMETER Experiment Name: At_Drought_Soil_Dry_P Parameter: Plant Line Value: WS
  misc_feature: MA Experiment 20001556 PARAMETER Experiment Name: At_Drought_Soil_Dry_P Parameter: Post Timepoint (hr) Value: None
  misc_feature: MA Experiment 20001556 PARAMETER Experiment Name: At_Drought_Soil_Dry_P Parameter: Post-Treatment Value: None
  misc_feature: MA Experiment 20001556 PARAMETER Experiment Name: At_Drought_Soil_Dry_P Parameter: Timepoint (day) Value: 12
  misc_feature: MA Experiment 20001556 PARAMETER Experiment Name: At_Drought_Soil_Dry_P Parameter: Treatment Value: Drought vs. No Drought
  misc_feature: MA Experiment ID: 20001557 Result: Up-regulated in Transcription
  misc_feature: MA Experiment 20001557 PARAMETER Experiment Name: At_Drought_Soil_Dry_P Parameter: Age (day) Value: 27
  misc_feature: MA Experiment 20001557 PARAMETER Experiment Name: At_Drought_Soil_Dry_P Parameter: Organism Value: A. thaliana
  misc_feature: MA Experiment 20001557 PARAMETER Experiment Name: At_Drought_Soil_Dry_P Parameter: Plant Line Value: WS
  misc_feature: MA Experiment 20001557 PARAMETER Experiment Name: At_Drought_Soil_Dry_P Parameter: Post Timepoint (hr) Value: 3
  misc_feature: MA Experiment 20001557 PARAMETER Experiment Name: At_Drought_Soil_Dry_P Parameter: Post-Treatment Value: Re-Water vs. No Drought
  misc_feature: MA Experiment 20001557 PARAMETER Experiment Name: At_Drought_Soil_Dry_P Parameter: Timepoint (day) Value: 13
  misc_feature: MA Experiment 20001557 PARAMETER Experiment Name: At_Drought_Soil_Dry_P Parameter: Treatment Value: Drought vs. No Drought
  misc_feature: MA Experiment ID: 20001757 Result: Down-regulated in Transcription
  misc_feature: MA Experiment 20001757 PARAMETER Experiment Name: At_50mM_NH4NO3_L-to-H_P Parameter: Timepoint (hr) Value: 6
  misc_feature: MA Experiment 20001757 PARAMETER Experiment Name: At_50mM_NH4NO3_L-to-H_P Parameter: Tissue Value: Leaf
  misc_feature: MA Experiment 20001757 PARAMETER Experiment Name: At_50mM_NH4NO3_L-to-H_P Parameter: Treatment Value: 50mM NH4NO3 vs 100mM Mannitol
  misc_feature: MA Experiment ID: 20001773 Result: Down-regulated in Transcription
  misc_feature: MA Experiment 20001773 PARAMETER Experiment Name: At_Far-red-enriched-adult_P Parameter: Age (day) Value: 30
  misc_feature: MA Experiment 20001773 PARAMETER Experiment Name: At_Far-red-enriched-adult_P Parameter: Light Value: Far-red enriched vs. White
  misc_feature: MA Experiment 20001773 PARAMETER Experiment Name: At_Far-red-enriched-adult_P Parameter: Organism Value: A. thaliana
  misc_feature: MA Experiment 20001773 PARAMETER Experiment Name: At_Far-red-enriched-adult_P Parameter: Plant Line Value: Columbia
  misc_feature: MA Experiment 20001773 PARAMETER Experiment Name: At_Far-red-enriched-adult_P Parameter: Timepoint (hr) Value: 48
  misc_feature: MA Experiment 20001773 PARAMETER Experiment Name: At_Far-red-enriched-adult_P Parameter: Tissue Value: Aerial
  misc_feature: MA Experiment ID: 20001905 Result: Up-regulated in Transcription
  misc_feature: MA Experiment 20001905 PARAMETER Experiment Name: At_Drought_Reproduction_P Parameter: Age (day) Value: 40
  misc_feature: MA Experiment 20001905 PARAMETER Experiment Name: At_Drought_Reproduction_P Parameter: Organism Value: A. thaliana
  misc_feature: MA Experiment 20001905 PARAMETER Experiment Name: At_Drought_Reproduction_P Parameter: Plant Line Value: WS
  misc_feature: MA Experiment 20001905 PARAMETER Experiment Name: At_Drought_Reproduction_P Parameter: Timepoint (day) Value: 10
  misc_feature: MA Experiment 20001905 PARAMETER Experiment Name: At_Drought_Reproduction_P Parameter: Tissue Value: Rosettes
  misc_feature: MA Experiment 20001905 PARAMETER Experiment Name: At_Drought_Reproduction_P Parameter: Treatment Value: Drought vs. No Drought
  misc_feature: MA Experiment ID: 20001906 Result: Up-regulated in Transcription
  misc_feature: MA Experiment 20001906 PARAMETER Experiment Name: At_Drought_Reproduction_P Parameter: Age (day) Value: 35
  misc_feature: MA Experiment 20001906 PARAMETER Experiment Name: At_Drought_Reproduction_P Parameter: Organism Value: A. thaliana
  misc_feature: MA Experiment 20001906 PARAMETER Experiment Name: At_Drought_Reproduction_P Parameter: Plant Line Value: WS
  misc_feature: MA Experiment 20001906 PARAMETER Experiment Name: At_Drought_Reproduction_P Parameter: Timepoint (day) Value: 5
  misc_feature: MA Experiment 20001906 PARAMETER Experiment Name: At_Drought_Reproduction_P Parameter: Tissue Value: Siliques
  misc_feature: MA Experiment 20001906 PARAMETER Experiment Name: At_Drought_Reproduction_P Parameter: Treatment Value: Drought vs. No Drought
  misc_feature: MA Experiment ID: 20001907 Result: Up-regulated in Transcription
  misc_feature: MA Experiment 20001907 PARAMETER Experiment Name: At_Drought_Reproduction_P Parameter: Age (day) Value: 37
  misc_feature: MA Experiment 20001907 PARAMETER Experiment Name: At_Drought_Reproduction_P Parameter: Organism Value: A. thaliana
  misc_feature: MA Experiment 20001907 PARAMETER Experiment Name: At_Drought_Reproduction_P Parameter: Plant Line Value: WS
  misc_feature: MA Experiment 20001907 PARAMETER Experiment Name: At_Drought_Reproduction_P Parameter: Timepoint (day) Value: 7
  misc_feature: MA Experiment 20001907 PARAMETER Experiment Name: At_Drought_Reproduction_P Parameter: Tissue Value: Siliques
  misc_feature: MA Experiment 20001907 PARAMETER Experiment Name: At_Drought_Reproduction_P Parameter: Treatment Value: Drought vs. No Drought
  misc_feature: MA Experiment ID: 20001908 Result: Up-regulated in Transcription
  misc_feature: MA Experiment 20001908 PARAMETER Experiment Name: At_Drought_Reproduction_P Parameter: Age (day) Value: 40
  misc_feature: MA Experiment 20001908 PARAMETER Experiment Name: At_Drought_Reproduction_P Parameter: Organism Value: A. thaliana
  misc_feature: MA Experiment 20001908 PARAMETER Experiment Name: At_Drought_Reproduction_P Parameter: Plant Line Value: WS
  misc_feature: MA Experiment 20001908 PARAMETER Experiment Name: At_Drought_Reproduction_P Parameter: Timepoint (day) Value: 10
  misc_feature: MA Experiment 20001908 PARAMETER Experiment Name: At_Drought_Reproduction_P Parameter: Tissue Value: Siliques
  misc_feature: MA Experiment 20001908 PARAMETER Experiment Name: At_Drought_Reproduction_P Parameter: Treatment Value: Drought vs. No Drought
  misc_feature: MA Experiment ID: 20001909 Result: Up-regulated in Transcription
  misc_feature: MA Experiment 20001909 PARAMETER Experiment Name: At_Drought_Reproduction_P Parameter: Age (day) Value: 35
  misc_feature: MA Experiment 20001909 PARAMETER Experiment Name: At_Drought_Reproduction_P Parameter: Organism Value: A. thaliana
  misc_feature: MA Experiment 20001909 PARAMETER Experiment Name: At_Drought_Reproduction_P Parameter: Plant Line Value: WS
  misc_feature: MA Experiment 20001909 PARAMETER Experiment Name: At_Drought_Reproduction_P Parameter: Timepoint (day) Value: 5
  misc_feature: MA Experiment 20001909 PARAMETER Experiment Name: At_Drought_Reproduction_P Parameter: Tissue Value: Flowers
  misc_feature: MA Experiment 20001909 PARAMETER Experiment Name: At_Drought_Reproduction_P Parameter: Treatment Value: Drought vs. No Drought
  misc_feature: MA Experiment ID: 20001911 Result: Up-regulated in Transcription
  misc_feature: MA Experiment 20001911 PARAMETER Experiment Name: At_Drought_Reproduction_P Parameter: Age (day) Value: 40
  misc_feature: MA Experiment 20001911 PARAMETER Experiment Name: At_Drought_Reproduction_P Parameter: Organism Value: A. thaliana
  misc_feature: MA Experiment 20001911 PARAMETER Experiment Name: At_Drought_Reproduction_P Parameter: Plant Line Value: WS
  misc_feature: MA Experiment 20001911 PARAMETER Experiment Name: At_Drought_Reproduction_P Parameter: Timepoint (day) Value: 10
  misc_feature: MA Experiment 20001911 PARAMETER Experiment Name: At_Drought_Reproduction_P Parameter: Tissue Value: Flowers
  misc_feature: MA Experiment 20001911 PARAMETER Experiment Name: At_Drought_Reproduction_P Parameter: Treatment Value: Drought vs. No Drought
aaaacaaacttgtttgttagacaaaacatgaatttccggggaggttgttgtattgcgaggtacggtggtagtggtggtggaaatgatatgtcgaaggttgatcggattatgctccggtaccgtccgattgcaccgagacctgattctggtggatctcctgcttcaccgacggagaagaatggatcggtgataactaacgtttcgtcgagatcacggagaggtaagagaaaatattcaaaggagaataatagtagcagtaccggatccgttaatagtaacggtaacagcaaacgacagagaaacgatgagacgaagaacggatctggtggtggtagagagatcgtgacgttgcctcttcttccagagactcctgagaagaaagactcgccgttgaaggctaaggcggcgccggagttaggtgcggcggcgttgtggctgagttttaatgacggagctagttataacagacgttatcagacagagttaatgacggaaacggttgtgtcgtcgttgttgacggtggagtgtgtaacggagagattgatggagggagagtatgagttagggtgtacggacgaggagaggaagatgaatcttgagagagacacgtgtcctggttttatatcggacggtttagggagagtcatttggacgaacggttcttacagagagttggtggttgggaaagatcatgagcagtgtagtaagatgagtgtgtggcttgtgatgaaggagaagcctttggtaacgtaccggacttttacgtgtagaatgagattgcagtacacgtgtcgtgataaggaggtgagttcgattacttcgttctgtgatgtttggaggatgagtgacggtggctttgcgtggcggcttgatgttgatgctgcactttgccttggacggtgaggattgggccgttggattagagatgatgttagattgatgagatgaggatatttaataacgacatgcaagttagatagatatttggacttccaactttatgagtgtacatacatatttcgcaattttgtagcttttaagttttaacattttgatttcaatgttctgttttaatttgtagtgtttggtgttttattcttcttcttttttggggtttgtataaaaactcttggttagtcggtatctttcttttttc

SEQ ID NO: 81202 - protein, 300 aa, Arabidopsis thaliana
  peptide (1)..(300): Ceres Seq. ID no. 12658800
  misc_feature (10)..(300): Homolog of NCBI NO: 15240662 NR Description: putative protein; protein id: At5g50360.1, by cDNA: 103870., supported by cDNA: gi_13878116, supported by gi_17104788 [Arabidopsis thaliana] >gi|9758918|dbj|BAB09455.1|
  misc_feature (10)..(298): Homolog of NCBI NO: 15242729 NR Description: putative protein; protein id: At5g63350.1 thaliana] >gi|10177443|dbj|BAB10739.1| to unknown protein [Arabidopsis thaliana]
  misc_feature (10)..(298): Homolog of NCBI NO: 18408645 NR Description: expressed protein; protein id: At3g48510.1, by cDNA: 124275. [Arabidopsis thaliana] >gi|11280671|pir||T46195
  misc_feature (10)..(298): Homolog of NCBI NO: 21537225 NR Description: unknown [Arabidopsis thaliana]
  misc_feature (20)..(298): Homolog of NCBI NO: 15232126 NR Description: hypothetical protein; protein id: At3g27250.1 thaliana] >gi|9294218|dbj|BAB02120.1|
  misc_feature (56)..(298): Homolog of NCBI NO: 15237495 NR Description: putative protein; protein id: At5g40800.1 thaliana] >gi|10177959|dbj|BAB11342.1|
  misc_feature (10)..(299): Homolog of NCBI NO: 15237494 NR Description: putative protein; protein id: At5g40790.1 thaliana] >gi|10177958|dbj|BAB11341.1|
  misc_feature (24)..(173): Homolog of NCBI NO: 15237495 NR Description: putative protein; protein id: At5g40800.1 thaliana] >gi|10177959|dbj|BAB11342.1|
KTNLFVRQNMNFRGGCCIARYGGSGGGNDMSKVDRIMLRYRPIAPRPDSGGSPASPTEKNGSVITNVSSRSRRGKRKYSKENNSSSTGSVNSNGNSKRQRNDETKNGSGGGREIVTLPLLPETPEKKDSPLKAKAAPELGAAALWLSFNDGASYNRRYQTELMTETVVSSLLTVECVTERLMEGEYELGCTDEERKMNLERDTCPGFISDGLGRVIWTNGSYRELVVGKDHEQCSKMSVWLVMKEKPLVTYRTFTCRMRLQYTCRDKEVSSITSFCDVWRMSDGGFAWRLDVDAALCLGR

SEQ ID NO: 81203 - protein, 291 aa, Arabidopsis thaliana; identical to SEQ ID NO: 39113
  peptide (1)..(291): Ceres Seq. ID no. 12658801
  misc_feature (1)..(291): Homolog of NCBI NO: 15240662 NR Description: putative protein; protein id: At5g50360.1, by cDNA: 103870., supported by cDNA: gi_13878116, supported by gi_17104788 [Arabidopsis thaliana] >gi|9758918|dbj|BAB09455.1|
  misc_feature (1)..(289): Homolog of NCBI NO: 15242729 NR Description: putative protein; protein id: At5g63350.1 thaliana] >gi|10177443|dbj|BAB10739.1| to unknown protein [Arabidopsis thaliana]
  misc_feature (1)..(289): Homolog of NCBI NO: 18408645 NR Description: expressed protein; protein id: At3g48510.1, by cDNA: 124275. [Arabidopsis thaliana] >gi|11280671|pir||T46195
  misc_feature (1)..(289): Homolog of NCBI NO: 21537225 NR Description: unknown [Arabidopsis thaliana]
  misc_feature (11)..(289): Homolog of NCBI NO: 15232126 NR Description: hypothetical protein; protein id: At3g27250.1 thaliana] >gi|9294218|dbj|BAB02120.1|
  misc_feature (47)..(289): Homolog of NCBI NO: 15237495 NR Description: putative protein; protein id: At5g40800.1 thaliana] >gi|10177959|dbj|BAB11342.1|
  misc_feature (1)..(290): Homolog of NCBI NO: 15237494 NR Description: putative protein; protein id: At5g40790.1 thaliana] >gi|10177958|dbj|BAB11341.1|
  misc_feature (15)..(164): Homolog of NCBI NO: 15237495 NR Description: putative protein; protein id: At5g40800.1 thaliana] >gi|10177959|dbj|BAB11342.1|

SEQ ID NO: 81204 - protein, 271 aa, Arabidopsis thaliana; identical to SEQ ID NO: 39114
  peptide (1)..(271): Ceres Seq. ID no. 12658802
  misc_feature (1)..(271): Homolog of NCBI NO: 15240662 NR Description: putative protein; protein id: At5g50360.1, by cDNA: 103870., supported by cDNA: gi_13878116, supported by gi_17104788 [Arabidopsis thaliana] >gi|9758918|dbj|BAB09455.1|
  misc_feature (1)..(269): Homolog of NCBI NO: 15242729 NR Description: putative protein; protein id: At5g63350.1 thaliana] >gi|10177443|dbj|BAB10739.1| to unknown protein [Arabidopsis thaliana]
  misc_feature (1)..(269): Homolog of NCBI NO: 18408645 NR Description: expressed protein; protein id: At3g48510.1, by cDNA: 124275. [Arabidopsis thaliana] >gi|11280671|pir||T46195
  misc_feature (1)..(269): Homolog of NCBI NO: 21537225 NR Description: unknown [Arabidopsis thaliana]
  misc_feature (1)..(269): Homolog of NCBI NO: 15232126 NR Description: hypothetical protein; protein id: At3g27250.1 thaliana] >gi|9294218|dbj|BAB02120.1|
  misc_feature (27)..(269): Homolog of NCBI NO: 15237495 NR Description: putative protein; protein id: At5g40800.1 thaliana] >gi|10177959|dbj|BAB11342.1|
  misc_feature (1)..(270): Homolog of NCBI NO: 15237494 NR Description: putative protein; protein id: At5g40790.1 thaliana] >gi|10177958|dbj|BAB11341.1|
  misc_feature (1)..(144): Homolog of NCBI NO: 15237495 NR Description: putative protein; protein id: At5g40800.1 thaliana] >gi|10177959|dbj|BAB11342.1|

SEQ ID NO: 81205 - DNA, 1068 bp, Arabidopsis thaliana
  misc_feature (1)..(1068): Ceres Seq. ID no. 12658810
  misc_feature: MA Experiment ID: 20000315 Result: Down-regulated in Transcription
  misc_feature: MA Experiment 20000315 PARAMETER Experiment Name: At_14day_Shoots-Roots_Sub_P Parameter: Age (day) Value: 14
  misc_feature: MA Experiment 20000315 PARAMETER Experiment Name: At_14day_Shoots-Roots_Sub_P Parameter: Organism Value: A. thaliana
  misc_feature: MA Experiment 20000315 PARAMETER Experiment Name: At_14day_Shoots-Roots_Sub_P Parameter: Plant Line Value: WS
  misc_feature: MA Experiment 20000315 PARAMETER Experiment Name: At_14day_Shoots-Roots_Sub_P Parameter: Tissue Value: Shoots vs. Whole Plant
  misc_feature: MA Experiment ID: 20000328 Result: Down-regulated in Transcription
  misc_feature: MA Experiment 20000328 PARAMETER Experiment Name: At_42deg_Heat_Sub_P Parameter: Age (day) Value: 14
  misc_feature: MA Experiment 20000328 PARAMETER Experiment Name: At_42deg_Heat_Sub_P Parameter: Organism Value: A. thaliana
  misc_feature: MA Experiment 20000328 PARAMETER Experiment Name: At_42deg_Heat_Sub_P Parameter: Plant Line Value: WS
  misc_feature: MA Experiment 20000328 PARAMETER Experiment Name: At_42deg_Heat_Sub_P Parameter: Temperature (deg C) Value: 42 vs. 22
  misc_feature: MA Experiment 20000328 PARAMETER Experiment Name: At_42deg_Heat_Sub_P Parameter: Timepoint (hr) Value: 6
  misc_feature: MA Experiment 20000328 PARAMETER Experiment Name: At_42deg_Heat_Sub_P Parameter: Tissue Value: Aerial
  misc_feature: MA Experiment ID: 20000355 Result: Up-regulated in Transcription
  misc_feature: MA Experiment 20000355 PARAMETER Experiment Name: At_Siliques_Sub_P Parameter: Age (day) Value: 21
  misc_feature: MA Experiment 20000355 PARAMETER Experiment Name: At_Siliques_Sub_P Parameter: Organism Value: A. thaliana
  misc_feature: MA Experiment 20000355 PARAMETER Experiment Name: At_Siliques_Sub_P Parameter: Plant Line Value: WS
  misc_feature: MA Experiment 20000355 PARAMETER Experiment Name: At_Siliques_Sub_P Parameter: Tissue Value: Less Than 5mm Siliques vs. Whole Plant
  misc_feature: MA Experiment ID: 20000440 Result: Up-regulated in Transcription
  misc_feature: MA Experiment 20000440 PARAMETER Experiment Name: At_Closed-Flower__Sub_P Parameter: Tissue Value: Closed Flower vs. Whole Plant
atggccgacgaaaaagagaactgcgtgagaatgacaagagcagcaacaaaaagaaaagcttccatggaagcggcaatagacaaagaacgaatcaacaagaagagagtcgtactcggagagcttccaaacttgtccaacatcaagaaatctcgaaaagccactacaaaacagaagaagaaatcagtttcgattccgacaatcgaaaccttaaattcagacattgacacaagatctgatgatccacaaatgtgtggtccttatgttacatcaatcttcgagtatcttcgtcaattagaggtaaagtcaagacctttggttgattatatagagaagattcagaaagatgtaacttcgaatatgagaggagttttggttgattggttagtagaagttgctgaagaatacaaacttctctcagacactctttacctcgctgtttcttacattgatagattcttgtctctcaagactgttaataaacaaaggcttcagcttttgggagttacttcaatgcttattgcttcaaagtatgaagagattactcctccaaatgtggatgacttttgttatatcacagacaatacttacacgaaacaagagattgttaagatggaagctgatatacttcttgcgttgcaatttgaattaggaaaccctacaagcaacacgtttctaagacggtttacaagggttgcacaagaagatttcgaaatgtcacatttacagatggagtttctttgtagctatctttcggagttgagcatgttagactatcaatctgtgaagtttcttccgtctactgtggctgcttcagcggtgtttctcgctaggttcatcatccgtccaaaacaacatccctggaatgtgatgttggaagaatacacaagatacaaagcgggtgatttgaaagaatgtgtggctatgatacatgacttgtatctgagtagaaaatgtggagctttagaagctataagagagaaatacaagcagcataagttcaagtgtgtagcgacaatgcctgtatcaccagagctgcctcttacggtttttgaagatgtcaacatttag

SEQ ID NO: 81206 - protein, 355 aa, Arabidopsis thaliana
  peptide (1)..(355): Ceres Seq. ID no. 12658811
  misc_feature (219)..(346): Pfam Name: Cyclin, C-terminal domain Pfam Description: Cyclin, C-terminal domain
  misc_feature (1)..(355): Homolog of NCBI NO: 15239172 NR Description: Cyclin A3;1; protein id: At5g43080.1 [Arabidopsis
  misc_feature (4)..(355): Homolog of NCBI NO: 15220147 NR Description: Cyclin A3;4; protein id: At1g47230.1, supported
  misc_feature (29)..(355): Homolog of NCBI NO: 30694019 NR Description: cyclin family [Arabidopsis thaliana]
  misc_feature (72)..(353): Homolog of NCBI NO: 15220145 NR Description: Cyclin A3;3; protein id: At1g47220.1 [Arabidopsis
  misc_feature (1)..(351): Homolog of NCBI NO: 7242793 NR Description: cyclin A3.1 [Pisum sativum]
  misc_feature (49)..(353): Homolog of NCBI NO: 7438513 NR Description: cyclin A-type (clone 59) - common tobacco
  misc_feature (45)..(353): Homolog of NCBI NO: 7438516 NR Description: cyclin A-type - Madagascar periwinkle
  misc_feature (1)..(299): Homolog of NCBI NO: 7438512 NR Description: cyclin A-type (clone 13) - common tobacco
MADEKENCVRMTRAATKRKASMEAAIDKERINKKRVVLGELPNLSNIKKSRKATTKQKKKSVSIPTIETLNSDIDTRSDDPQMCGPYVTSIFEYLRQLEVKSRPLVDYIEKIQKDVTSNMRGVLVDWLVEVAEEYKLLSDTLYLAVSYIDRFLSLKTVNKQRLQLLGVTSMLIASKYEEITPPNVDDFCYITDNTYTKQEIVKMEADILLALQFELGNPTSNTFLRRFTRVAQEDFEMSHLQMEFLCSYLSELSMLDYQSVKFLPSTVAASAVFLARFIIRPKQHPWNVMLEEYTRYKAGDLKECVAMIHDLYLSRKCGALEAIREKYKQHKFKCVATMPVSPELPLTVFEDVNI

SEQ ID NO: 81207 - protein, 345 aa, Arabidopsis thaliana
  peptide (1)..(345): Ceres Seq. ID no. 12658812
  misc_feature (209)..(336): Pfam Name: Cyclin, C-terminal domain Pfam Description: Cyclin, C-terminal domain
  misc_feature (1)..(345): Homolog of NCBI NO: 15239172 NR Description: Cyclin A3;1; protein id: At5g43080.1 [Arabidopsis
  misc_feature (1)..(345): Homolog of NCBI NO: 15220147 NR Description: Cyclin A3;4; protein id: At1g47230.1, supported
  misc_feature (19)..(345): Homolog of NCBI NO: 30694019 NR Description: cyclin family [Arabidopsis thaliana]
  misc_feature (62)..(343): Homolog of NCBI NO: 15220145 NR Description: Cyclin A3;3; protein id: At1g47220.1 [Arabidopsis
  misc_feature (1)..(341): Homolog of NCBI NO: 7242793 NR Description: cyclin A3.1 [Pisum sativum]
  misc_feature (39)..(343): Homolog of NCBI NO: 7438513 NR Description: cyclin A-type (clone 59) - common tobacco
  misc_feature (35)..(343): Homolog of NCBI NO: 7438516 NR Description: cyclin A-type - Madagascar periwinkle
  misc_feature (1)..(289): Homolog of NCBI NO: 7438512 NR Description: cyclin A-type (clone 13) - common tobacco
MTRAATKRKASMEAAIDKERINKKRVVLGELPNLSNIKKSRKATTKQKKKSVSIPTIETLNSDIDTRSDDPQMCGPYVTSIFEYLRQLEVKSRPLVDYIEKIQKDVTSNMRGVLVDWLVEVAEEYKLLSDTLYLAVSYIDRFLSLKTVNKQRLQLLGVTSMLIASKYEEITPPNVDDFCYITDNTYTKQEIVKMEADILLALQFELGNPTSNTFLRRFTRVAQEDFEMSHLQMEFLCSYLSELSMLDYQSVKFLPSTVAASAVFLARFIIRPKQHPWNVMLEEYTRYKAGDLKECVAMIHDLYLSRKCGALEAIREKYKQHKFKCVATMPVSPELPLTVFEDVNI

SEQ ID NO: 81208 - protein, 334 aa, Arabidopsis thaliana
  peptide (1)..(334): Ceres Seq. ID no. 12658813
  misc_feature (198)..(325): Pfam Name: Cyclin, C-terminal domain Pfam Description: Cyclin, C-terminal domain
  misc_feature (1)..(334): Homolog of NCBI NO: 15239172 NR Description: Cyclin A3;1; protein id: At5g43080.1 [Arabidopsis
  misc_feature (1)..(334): Homolog of NCBI NO: 15220147 NR Description: Cyclin A3;4; protein id: At1g47230.1, supported
  misc_feature (8)..(334): Homolog of NCBI NO: 30694019 NR Description: cyclin family [Arabidopsis thaliana]
  misc_feature (51)..(332): Homolog of NCBI NO: 15220145 NR Description: Cyclin A3;3; protein id: At1g47220.1 [Arabidopsis
  misc_feature (1)..(330): Homolog of NCBI NO: 7242793 NR Description: cyclin A3.1 [Pisum sativum]
  misc_feature (28)..(332): Homolog of NCBI NO: 7438513 NR Description: cyclin A-type (clone 59) - common tobacco
  misc_feature (24)..(332): Homolog of NCBI NO: 7438516 NR Description: cyclin A-type - Madagascar periwinkle
  misc_feature (1)..(278): Homolog of NCBI NO: 7438512 NR Description: cyclin A-type (clone 13) - common tobacco
MEAAIDKERINKKRVVLGELPNLSNIKKSRKATTKQKKKSVSIPTIETLNSDIDTRSDDPQMCGPYVTSIFEYLRQLEVKSRPLVDYIEKIQKDVTSNMRGVLVDWLVEVAEEYKLLSDTLYLAVSYIDRFLSLKTVNKQRLQLLGVTSMLIASKYEEITPPNVDDFCYITDNTYTKQEIVKMEADILLALQFELGNPTSNTFLRRFTRVAQEDFEMSHLQMEFLCSYLSELSMLDYQSVKFLPSTVAASAVFLARFIIRPKQHPWNVMLEEYTRYKAGDLKECVAMIHDLYLSRKCGALEAIREKYKQHKFKCVATMPVSPELPLTVFEDVNI

SEQ ID NO: 81209 - DNA, 2181 bp, Arabidopsis thaliana
  misc_feature (1)..(2181): Ceres Seq. ID no. 12658830
  misc_feature: MA Experiment ID: 20000307 Result: Up-regulated in Transcription
  misc_feature: MA Experiment 20000307 PARAMETER Experiment Name: At_Germinating_Seeds_Sub_P Parameter: Age (hr) Value: 24 vs. 0
  misc_feature: MA Experiment 20000307 PARAMETER Experiment Name: At_Germinating_Seeds_Sub_P Parameter: Organism Value: A. thaliana
  misc_feature: MA Experiment 20000307 PARAMETER Experiment Name: At_Germinating_Seeds_Sub_P Parameter: Plant Line Value: WS
  misc_feature: MA Experiment 20000307 PARAMETER Experiment Name: At_Germinating_Seeds_Sub_P Parameter: Tissue Value: Germinating Seeds
  misc_feature: MA Experiment ID: 20000315 Result: Down-regulated in Transcription
  misc_feature: MA Experiment 20000315 PARAMETER Experiment Name: At_14day_Shoots-Roots_Sub_P Parameter: Age (day) Value: 14
  misc_feature: MA Experiment 20000315 PARAMETER Experiment Name: At_14day_Shoots-Roots_Sub_P Parameter: Organism Value: A. thaliana
  misc_feature: MA Experiment 20000315 PARAMETER Experiment Name: At_14day_Shoots-Roots_Sub_P Parameter: Plant Line Value: WS
  misc_feature: MA Experiment 20000315 PARAMETER Experiment Name: At_14day_Shoots-Roots_Sub_P Parameter: Tissue Value: Shoots vs. Whole Plant
  misc_feature: MA Experiment ID: 20000327 Result: Down-regulated in Transcription
  misc_feature: MA Experiment 20000327 PARAMETER Experiment Name: At_42deg_Heat_Sub_P Parameter: Age (day) Value: 14
  misc_feature: MA Experiment 20000327 PARAMETER Experiment Name: At_42deg_Heat_Sub_P Parameter: Organism Value: A. thaliana
  misc_feature: MA Experiment 20000327 PARAMETER Experiment Name: At_42deg_Heat_Sub_P Parameter: Plant Line Value: WS
  misc_feature: MA Experiment 20000327 PARAMETER Experiment Name: At_42deg_Heat_Sub_P Parameter: Temperature (deg C) Value: 42 vs. 22
  misc_feature: MA Experiment 20000327 PARAMETER Experiment Name: At_42deg_Heat_Sub_P Parameter: Timepoint (hr) Value: 1
  misc_feature: MA Experiment 20000327 PARAMETER Experiment Name: At_42deg_Heat_Sub_P Parameter: Tissue Value: Aerial
  misc_feature: MA Experiment ID: 20000328 Result: Down-regulated in Transcription
  misc_feature: MA Experiment 20000328 PARAMETER Experiment Name: At_42deg_Heat_Sub_P Parameter: Age (day) Value: 14
  misc_feature: MA Experiment 20000328 PARAMETER Experiment Name: At_42deg_Heat_Sub_P Parameter: Organism Value: A. thaliana
  misc_feature: MA Experiment 20000328 PARAMETER Experiment Name: At_42deg_Heat_Sub_P Parameter: Plant Line Value: WS
  misc_feature: MA Experiment 20000328 PARAMETER Experiment Name: At_42deg_Heat_Sub_P Parameter: Temperature (deg C) Value: 42 vs. 22
  misc_feature: MA Experiment 20000328 PARAMETER Experiment Name: At_42deg_Heat_Sub_P Parameter: Timepoint (hr) Value: 6
  misc_feature: MA Experiment 20000328 PARAMETER Experiment Name: At_42deg_Heat_Sub_P Parameter: Tissue Value: Aerial
atggagcagaagagcgtgttgttttccgcgttaggggttggtgttgggttagggattggtctagcgtcgggtcagagtttgggtaaatgggcaaacgggtctatttctgcggaggatggactaaccggagaaaagattgagcaagagttggttaggcagatcgttgatggcagagagagtagtgtcactttcgacgagtttccttattacctaagtgagaaaactcggcttttattgacaagtgcagcttatgttcacctaaagcaatctgatatctcgaagcacacgcgtaatcttgcacctggaagtaaggccattcttctgtctggacctgctgatacagagcaagtatggatgcgtcaagaaagaacctggaccttgcgtaggcacacaagtggcaacgatcttcattcaaggggctttgacgttacaagtcagcctccacgactcaagcggaatgcttctgctgcttctgatatgagtagcatatcatcccgttctgcaacttctgtttcagcttcaagcaaacgcagtgctaacttgtgctttgatgagagacttttccttcagtcactttacaaggtcttggtttcgatttcagaaaccaatcctataataatatacctgagggatgttgagaagctttgtcagtcagaaaggttctacaagttgttccagaggctcttgacgaagctttctggccctgttttggttctcggctcaagactattggaacccgaagatgactgtcaagaagtaggagagggcatttctgctttgtttccttacaacatcgagatcagaccgccagaggatgaaaatcaactcatgagctggaaaacgagatttgaagatgacatgaaagtgatacagtttcaagacaacaagaaccacatagccgaggttctagcggctaatgatcttgagtgtgatgacttaggttccatatgccatgcagatacaatgttcctaagcagtcacattgaggaaattgttgtttctgcaatctcctaccatctgatgaacaacaaagaacccgaatacaaaaacgggaggcttgtaatatcttctaatagcttgtcccatggactgaatatattacaggaaggtcaaggatgctttgaggactccttgaagctggacacaaacatcgactccaaggaggtggctcctgataatgaattcgagaagcgcataagaccagaggttatcccagcaaatgagattggtgtgacttttgctgatataggttcactggatgaaaccaaagaatcacttcaagagcttgtcatgcttcctcttcgtaggcctgacctgttcaaaggtggtcttctaaagccctgcagaggaatcctcctctttggaccacctggtactggaaaaactatgatggcaaaagccattgcgaacgaagctggggctagtttcataaatgtgtcgatgtccacaatcacttcaaaatggtttggagaagatgagaagaacgtgagagctttgttcaccctcgcggccaaagtgtctccaactattatatttgtggatgaagtggatagtatgctgggacagaggacaagagttggcgagcatgaagctatgaggaagatcaaaaatgagttcatgacacactgggatgggcttatgtcaaatgcgggtgaccgtattctcgttcttgcagcaacaaacagaccatttgatctcgatgaagctatcatcaggaggtttgagcgaagaatcatggtgggtcttccatcggtcgagagcagagagaagatcttgagaaccttattgtcaaaagagaaaacagagaatcttgatttccaagagcttgcgcagatgacagatggctatagtggaagtgatctcaagaacttttgcacaacagcagcatatcgaccagtgagggagctgataaagcaagagtgcttgaaagaccaggagaggaggaagagagaggaagcagagaagaatagtgaagaaggatctgaagcaaaagaagaagtatctgaagagagaggcataacgttgagacctttgagcatggaagacatgaaagtagctaaaagccaggttgctgctagttttgcagcagaaggagcaggaatgaacgaactcaagcagtggaatgatttgtatggagaaggaggctccaggaaaaaggaacagctctcttacttcctttaa

SEQ ID NO: 81210 - protein, 726 aa, Arabidopsis thaliana
  peptide (1)..(726): Ceres Seq. ID no. 12658831
  misc_feature (450)..(634): Pfam Name: ATPase family associated with various cellular Pfam Description: ATPase family associated with various cellular
  misc_feature (388)..(726): Homolog of NCBI NO: 30696968 NR Description: expressed protein [Arabidopsis thaliana]
  misc_feature (100)..(402): Homolog of NCBI NO: 30696968 NR Description: expressed protein [Arabidopsis thaliana]
  misc_feature (1)..(116): Homolog of NCBI NO: 30696968 NR Description: expressed protein [Arabidopsis thaliana]
  misc_feature (388)..(726): Homolog of NCBI NO: 18407974 NR Description: expressed protein; protein id: At1g64110.1, by cDNA: gi_15810166 [Arabidopsis thaliana]
  misc_feature (100)..(402): Homolog of NCBI NO: 18407974 NR Description: expressed protein; protein id: At1g64110.1, by cDNA: gi_15810166 [Arabidopsis thaliana]
  misc_feature (6)..(116): Homolog of NCBI NO: 18407974 NR Description: expressed protein; protein id: At1g64110.1, by cDNA: gi_15810166 [Arabidopsis thaliana]
  misc_feature (126)..(402): Homolog of NCBI NO: 25404926 NR Description: protein F22C12.12 [imported] - Arabidopsis >gi|6692099|gb|AAF24564.1|AC007764_6 F22C12.12 [Arabidopsis
  misc_feature (388)..(647): Homolog of NCBI NO: 25404926 NR Description: protein F22C12.12 [imported] - Arabidopsis >gi|6692099|gb|AAF24564.1|AC007764_6 F22C12.12 [Arabidopsis
  misc_feature (1)..(116): Homolog of NCBI NO: 25404926 NR Description: protein F22C12.12 [imported] - Arabidopsis >gi|6692099|gb|AAF24564.1|AC007764_6 F22C12.12 [Arabidopsis
  misc_feature (642)..(726): Homolog of NCBI NO: 25404926 NR Description: protein F22C12.12 [imported] - Arabidopsis >gi|6692099|gb|AAF24564.1|AC007764_6 F22C12.12 [Arabidopsis
MEQKSVLFSALGVGVGLGIGLASGQSLGKWANGSISAEDGLTGEKIEQELVRQIVDGRESSVTFDEFPYYLSEKTRLLLTSAAYVHLKQSDISKHTRNLAPGSKAILLSGPADTEQVWMRQERTWTLRRHTSGNDLHSRGFDVTSQPPRLKRNASAASDMSSISSRSATSVSASSKRSANLCFDERLFLQSLYKVLVSISETNPIIIYLRDVEKLCQSERFYKLFQRLLTKLSGPVLVLGSRLLEPEDDCQEVGEGISALFPYNIEIRPPEDENQLMSWKTRFEDDMKVIQFQDNKNHIAEVLAANDLECDDLGSICHADTMFLSSHIEEIVVSAISYHLMNNKEPEYKNGRLVISSNSLSHGLNILQEGQGCFEDSLKLDTNIDSKEVAPDNEFEKRIRPEVIPANEIGVTFADIGSLDETKESLQELVMLPLRRPDLFKGGLLKPCRGILLFGPPGTGKTMMAKAIANEAGASFINVSMSTITSKWFGEDEKNVRALFTLAAKVSPTIIFVDEVDSMLGQRTRVGEHEAMRKIKNEFMTHWDGLMSNAGDRILVLAATNRPFDLDEAIIRRFERRIMVGLPSVESREKILRTLLSKEKTENLDFQELAQMTDGYSGSDLKNFCTTAAYRPVRELIKQECLKDQERRKREEAEKNSEEGSEAKEEVSEERGITLRPLSMEDMKVAKSQVAASFAAEGAGMNELKQWNDLYGEGGSRKKEQLSYFL

SEQ ID NO: 81211 - protein, 608 aa, Arabidopsis thaliana
  peptide (1)..(608): Ceres Seq. ID no. 12658832
  misc_feature (332)..(516): Pfam Name: ATPase family associated with various cellular Pfam Description: ATPase family associated with various cellular
  misc_feature (270)..(608): Homolog of NCBI NO: 30696968 NR Description: expressed protein [Arabidopsis thaliana]
  misc_feature (1)..(284): Homolog of NCBI NO: 30696968 NR Description: expressed protein [Arabidopsis thaliana]
  misc_feature (270)..(608): Homolog of NCBI NO: 18407974 NR Description: expressed protein; protein id: At1g64110.1, by cDNA: gi_15810166 [Arabidopsis thaliana]
  misc_feature (1)..(284): Homolog of NCBI NO: 18407974 NR Description: expressed protein; protein id: At1g64110.1, by cDNA: gi_15810166 [Arabidopsis thaliana]
  misc_feature (8)..(284): Homolog of NCBI NO: 25404926 NR Description: protein F22C12.12 [imported] - Arabidopsis >gi|6692099|gb|AAF24564.1|AC007764_6 F22C12.12 [Arabidopsis
  misc_feature (270)..(529): Homolog of NCBI NO: 25404926 NR Description: protein F22C12.12 [imported] - Arabidopsis >gi|6692099|gb|AAF24564.1|AC007764_6 F22C12.12 [Arabidopsis
  misc_feature (524)..(608): Homolog of NCBI NO: 25404926 NR Description: protein F22C12.12 [imported] - Arabidopsis >gi|6692099|gb|AAF24564.1|AC007764_6 F22C12.12 [Arabidopsis
  misc_feature (8)..(272): Homolog of NCBI NO: 34904204 NR Description: P0492F05.26 [Oryza sativa (japonica
  misc_feature (270)..(504): Homolog of NCBI NO: 34904204 NR Description: P0492F05.26 [Oryza sativa (japonica
  misc_feature (526)..(608): Homolog of NCBI NO: 34904204 NR Description: P0492F05.26 [Oryza sativa (japonica
MRQERTWTLRRHTSGNDLHSRGFDVTSQPPRLKRNASAASDMSSISSRSATSVSASSKRSANLCFDERLFLQSLYKVLVSISETNPIIIYLRDVEKLCQSERFYKLFQRLLTKLSGPVLVLGSRLLEPEDDCQEVGEGISALFPYNIEIRPPEDENQLMSWKTRFEDDMKVIQFQDNKNHIAEVLAANDLECDDLGSICHADTMFLSSHIEEIVVSAISYHLMNNKEPEYKNGRLVISSNSLSHGLNILQEGQGCFEDSLKLDTNIDSKEVAPDNEFEKRIRPEVIPANEIGVTFADIGSLDETKESLQELVMLPLRRPDLFKGGLLKPCRGILLFGPPGTGKTMMAKAIANEAGASFINVSMSTITSKWFGEDEKNVRALFTLAAKVSPTIIFVDEVDSMLGQRTRVGEHEAMRKIKNEFMTHWDGLMSNAGDRILVLAATNRPFDLDEAIIRRFERRIMVGLPSVESREKILRTLLSKEKTENLDFQELAQMTDGYSGSDLKNFCTTAAYRPVRELIKQECLKDQERRKREEAEKNSEEGSEAKEEVSEERGITLRPLSMEDMKVAKSQVAASFAAEGAGMNELKQWNDLYGEGGSRKKEQLSYFL

SEQ ID NO: 81212 - protein, 567 aa, Arabidopsis thaliana
  peptide (1)..(567): Ceres Seq. ID no. 12658833
  misc_feature (291)..(475): Pfam Name: ATPase family associated with various cellular Pfam Description: ATPase family associated with various cellular
  misc_feature (229)..(567): Homolog of NCBI NO: 30696968 NR Description: expressed protein [Arabidopsis thaliana]
  misc_feature (1)..(243): Homolog of NCBI NO: 30696968 NR Description: expressed protein [Arabidopsis thaliana]
  misc_feature (229)..(567): Homolog of NCBI NO: 18407974 NR Description: expressed protein; protein id: At1g64110.1, by cDNA: gi_15810166 [Arabidopsis thaliana]
  misc_feature (1)..(243): Homolog of NCBI NO: 18407974 NR Description: expressed protein; protein id: At1g64110.1, by cDNA: gi_15810166 [Arabidopsis thaliana]
  misc_feature (1)..(243): Homolog of NCBI NO: 25404926 NR Description: protein F22C12.12 [imported] - Arabidopsis >gi|6692099|gb|AAF24564.1|AC007764_6 F22C12.12 [Arabidopsis
  misc_feature (229)..(488): Homolog of NCBI NO: 25404926 NR Description: protein F22C12.12 [imported] - Arabidopsis >gi|6692099|gb|AAF24564.1|AC007764_6 F22C12.12 [Arabidopsis
  misc_feature (483)..(567): Homolog of NCBI NO: 25404926 NR Description: protein F22C12.12 [imported] - Arabidopsis >gi|6692099|gb|AAF24564.1|AC007764_6 F22C12.12 [Arabidopsis
  misc_feature (1)..(231): Homolog of NCBI NO: 34904204 NR Description: P0492F05.26 [Oryza sativa (japonica
  misc_feature (229)..(463): Homolog of NCBI NO: 34904204 NR Description: P0492F05.26 [Oryza sativa (japonica
  misc_feature (485)..(567): Homolog of NCBI NO: 34904204 NR Description: P0492F05.26 [Oryza sativa (japonica
MSSISSRSATSVSASSKRSANLCFDERLFLQSLYKVLVSISETNPIIIYLRDVEKLCQSERFYKLFQRLLTKLSGPVLVLGSRLLEPEDDCQEVGEGISALFPYNIEIRPPEDENQLMSWKTRFEDDMKVIQFQDNKNHIAEVLAANDLECDDLGSICHADTMFLSSHIEEIVVSAISYHLMNNKEPEYKNGRLVISSNSLSHGLNILQEGQGCFEDSLKLDTNIDSKEVAPDNEFEKRIRPEVIPANEIGVTFADIGSLDETKESLQELVMLPLRRPDLFKGGLLKPCRGILLFGPPGTGKTMMAKAIANEAGASFINVSMSTITSKWFGEDEKNVRALFTLAAKVSPTIIFVDEVDSMLGQRTRVGEHEAMRKIKNEFMTHWDGLMSNAGDRILVLAATNRPFDLDEAIIRRFERRIMVGLPSVESREKILRTLLSKEKTENLDFQELAQMTDGYSGSDLKNFCTTAAYRPVRELIKQECLKDQERRKREEAEKNSEEGSEAKEEVSEERGITLRPLSMEDMKVAKSQVAASFAAEGAGMNELKQWNDLYGEGGSRKKEQLSYFL

SEQ ID NO: 81213 - DNA, 1226 bp, Arabidopsis thaliana
  misc_feature (1)..(1226): Ceres Seq. ID no. 12658841
  misc_feature: MA Experiment ID: 20000169 Result: Up-regulated in Transcription
  misc_feature: MA Experiment 20000169 PARAMETER Experiment Name: At_100uM_ABA_P Parameter: Age (day) Value: 14
  misc_feature: MA Experiment 20000169 PARAMETER Experiment Name: At_100uM_ABA_P Parameter: Organism Value: A. thaliana
  misc_feature: MA Experiment 20000169 PARAMETER Experiment Name: At_100uM_ABA_P Parameter: Plant Line Value: WS
  misc_feature: MA Experiment 20000169 PARAMETER Experiment Name: At_100uM_ABA_P Parameter: Timepoint (hr) Value: 6
  misc_feature: MA Experiment 20000169 PARAMETER Experiment Name: At_100uM_ABA_P Parameter: Tissue Value: Aerial
  misc_feature: MA Experiment 20000169 PARAMETER Experiment Name: At_100uM_ABA_P Parameter: Treatment Value: 100uM ABA vs. No Treatment
  misc_feature: MA Experiment ID: 20000182 Result: Up-regulated in Transcription
  misc_feature: MA Experiment 20000182 PARAMETER Experiment Name: At_2mM_SA_P Parameter: Age (day) Value: 14
  misc_feature: MA Experiment 20000182 PARAMETER Experiment Name: At_2mM_SA_P Parameter: Organism Value: A. thaliana
  misc_feature: MA Experiment 20000182 PARAMETER Experiment Name: At_2mM_SA_P Parameter: Plant Line Value: WS
  misc_feature: MA Experiment 20000182 PARAMETER Experiment Name: At_2mM_SA_P Parameter: Timepoint (hr) Value: 6
  misc_feature: MA Experiment 20000182 PARAMETER Experiment Name: At_2mM_SA_P Parameter: Tissue Value: Aerial
  misc_feature: MA Experiment 20000182 PARAMETER Experiment Name: At_2mM_SA_P Parameter: Treatment Value: 2mM SA vs. No Treatment
  misc_feature: MA Experiment ID: 20000185 Result: Up-regulated in Transcription
  misc_feature: MA Experiment 20000185 PARAMETER Experiment Name: At_Roots__P Parameter: Age (day) Value: 7 vs. 21
  misc_feature: MA Experiment 20000185 PARAMETER Experiment Name: At_Roots__P Parameter: Organism Value: A. thaliana
  misc_feature: MA Experiment 20000185 PARAMETER Experiment Name: At_Roots__P Parameter: Tissue Value: Roots vs. Whole Plant
  misc_feature: MA Experiment ID: 20000234 Result: Down-regulated in Transcription
  misc_feature: MA Experiment 20000234 PARAMETER Experiment Name: At_Siliques_P Parameter: Age (day) Value: 21
  misc_feature: MA Experiment 20000234 PARAMETER Experiment Name: At_Siliques_P Parameter: Organism Value: A. thaliana
  misc_feature: MA Experiment 20000234 PARAMETER Experiment Name: At_Siliques_P Parameter: Plant Line Value: WS
  misc_feature: MA Experiment 20000234 PARAMETER Experiment Name: At_Siliques_P Parameter: Tissue Value: Less Than 5mm Siliques vs. Whole Plant
  misc_feature: MA Experiment ID: 20000235 Result: Down-regulated in Transcription
  misc_feature: MA Experiment 20000235 PARAMETER Experiment Name: At_Siliques_P Parameter: Age (day) Value: 21
  misc_feature: MA Experiment 20000235 PARAMETER Experiment Name: At_Siliques_P Parameter: Organism Value: A. thaliana
  misc_feature: MA Experiment 20000235 PARAMETER Experiment Name: At_Siliques_P Parameter: Plant Line Value: WS
  misc_feature: MA Experiment 20000235 PARAMETER Experiment Name: At_Siliques_P Parameter: Tissue Value: 5-10mm Siliques vs. Whole Plant
  misc_feature: MA Experiment ID: 20000267 Result: Up-regulated in Transcription
  misc_feature: MA Experiment 20000267 PARAMETER Experiment Name: At_Drought_P Parameter: Age (day) Value: 7
  misc_feature: MA Experiment 20000267 PARAMETER Experiment Name: At_Drought_P Parameter: Organism Value: A. thaliana
  misc_feature: MA Experiment 20000267 PARAMETER Experiment Name: At_Drought_P Parameter: Plant Line Value: WS
  misc_feature: MA Experiment 20000267 PARAMETER Experiment Name: At_Drought_P Parameter: Timepoint (hr) Value: 6
  misc_feature: MA Experiment 20000267 PARAMETER Experiment Name: At_Drought_P Parameter: Tissue Value: Whole Plant
  misc_feature: MA Experiment 20000267 PARAMETER Experiment Name: At_Drought_P Parameter: Treatment Value: Drought vs. No Drought
  misc_feature: MA Experiment ID: 20000268 Result: Up-regulated in Transcription
  misc_feature: MA Experiment 20000268 PARAMETER Experiment Name: At_100mM_NaCl__P Parameter: Age (day) Value: 14
  misc_feature: MA Experiment 20000268 PARAMETER Experiment Name: At_100mM_NaCl__P Parameter: Organism Value: A. thaliana
  misc_feature: MA Experiment 20000268 PARAMETER Experiment Name: At_100mM_NaCl__P Parameter: Plant Line Value: WS
  misc_feature: MA Experiment 20000268 PARAMETER Experiment Name: At_100mM_NaCl__P Parameter: Timepoint (hr) Value: 6
  misc_feature: MA Experiment 20000268 PARAMETER Experiment Name: At_100mM_NaCl__P Parameter: Tissue Value: Whole Plant
  misc_feature: MA Experiment 20000268 PARAMETER Experiment Name: At_100mM_NaCl__P Parameter: Treatment Value: 100mM NaCl vs. No Treatment
  misc_feature: MA Experiment ID: 20000286 Result: Down-regulated in Transcription
  misc_feature: MA Experiment 20000286 PARAMETER Experiment Name: At_Open_Flower_P Parameter: Age (day) Value: 21
  misc_feature: MA Experiment 20000286 PARAMETER Experiment Name: At_Open_Flower_P Parameter: Plant Line Value: WS
  misc_feature: MA Experiment 20000286 PARAMETER Experiment Name: At_Open_Flower_P Parameter: Tissue Value: Half Open vs. Whole Plant
  misc_feature: MA Experiment ID: 20000436 Result: Up-regulated in Transcription
  misc_feature: MA Experiment 20000436 PARAMETER Experiment Name: At_Drought_P Parameter: Age (day) Value: 7
  misc_feature: MA Experiment 20000436 PARAMETER Experiment Name: At_Drought_P Parameter: Organism Value: A. thaliana
  misc_feature: MA Experiment 20000436 PARAMETER Experiment Name: At_Drought_P Parameter: Plant Line Value: WS
  misc_feature: MA Experiment 20000436 PARAMETER Experiment Name: At_Drought_P Parameter: Timepoint (hr) Value: 12
  misc_feature: MA Experiment 20000436 PARAMETER Experiment Name: At_Drought_P Parameter: Tissue Value: Whole Plant
  misc_feature: MA Experiment 20000436 PARAMETER Experiment Name: At_Drought_P Parameter: Treatment Value: Drought vs. No Drought
  misc_feature: MA Experiment ID: 20000437 Result: Up-regulated in Transcription
  misc_feature: MA Experiment 20000437 PARAMETER Experiment Name: At_Drought_P Parameter: Age (day) Value: 8
  misc_feature: MA Experiment 20000437 PARAMETER Experiment Name: At_Drought_P Parameter: Organism Value: A. thaliana
  misc_feature: MA Experiment 20000437 PARAMETER Experiment Name: At_Drought_P Parameter: Plant Line Value: WS
  misc_feature: MA Experiment 20000437 PARAMETER Experiment Name: At_Drought_P Parameter: Timepoint (hr) Value: 24
  misc_feature: MA Experiment 20000437 PARAMETER Experiment Name: At_Drought_P Parameter: Tissue Value: Whole Plant
  misc_feature: MA Experiment 20000437 PARAMETER Experiment Name: At_Drought_P Parameter: Treatment Value: Drought vs. No Drought
  misc_feature: MA Experiment ID: 20000441 Result: Up-regulated in Transcription
  misc_feature: MA Experiment 20000441 PARAMETER Experiment Name: At_1uM_BR-BRZ__P Parameter: Tissue Value: Shoot Apices
  misc_feature: MA Experiment 20000441 PARAMETER Experiment Name: At_1uM_BR-BRZ__P Parameter: Treatment Value: 1uM BR vs. No Treatment
  misc_feature: MA Experiment ID: 20000452 Result: Down-regulated in Transcription
  misc_feature: MA Experiment 20000452 PARAMETER Experiment Name: At_CS6879_Shoots-Roots_P Parameter: Age (day) Value: 14
  misc_feature: MA Experiment 20000452 PARAMETER Experiment Name: At_CS6879_Shoots-Roots_P Parameter: Organism Value: A. thaliana
  misc_feature: MA Experiment 20000452 PARAMETER Experiment Name: At_CS6879_Shoots-Roots_P Parameter: Plant Line Value: CS6879 vs. WS
  misc_feature: MA Experiment 20000452 PARAMETER Experiment Name: At_CS6879_Shoots-Roots_P Parameter: Tissue Value: Shoots
  misc_feature: MA Experiment ID: 20000453 Result: Up-regulated in Transcription
  misc_feature: MA Experiment 20000453 PARAMETER Experiment Name: At_100uM_ABA_P Parameter: Age (day) Value: 15
  misc_feature: MA Experiment 20000453 PARAMETER Experiment Name: At_100uM_ABA_P Parameter: Organism Value: A. thaliana
  misc_feature: MA Experiment 20000453 PARAMETER Experiment Name: At_100uM_ABA_P Parameter: Plant Line Value: WS
  misc_feature: MA Experiment 20000453 PARAMETER Experiment Name: At_100uM_ABA_P Parameter: Timepoint (hr) Value: 24
  misc_feature: MA Experiment 20000453 PARAMETER Experiment Name: At_100uM_ABA_P Parameter: Tissue Value: Aerial
  misc_feature: MA Experiment 20000453 PARAMETER Experiment Name: At_100uM_ABA_P Parameter: Treatment Value: 100uM ABA vs. No Treatment
  misc_feature: MA Experiment ID: 20000573 Result: Up-regulated in Transcription
  misc_feature: MA Experiment 20000573 PARAMETER Experiment Name: At_100uM_ABA_Mutants__P Parameter: Organism Value: A. thaliana
  misc_feature: MA Experiment 20000573 PARAMETER Experiment Name: At_100uM_ABA_Mutants__P Parameter: Plant Line Value: CS22 vs. Ler wt
  misc_feature: MA Experiment 20000573 PARAMETER Experiment Name: At_100uM_ABA_Mutants__P Parameter: Timepoint (hr) Value: N/A
  misc_feature: MA Experiment 20000573 PARAMETER Experiment Name: At_100uM_ABA_Mutants__P Parameter: Tissue Value: Whole Plant
  misc_feature: MA Experiment 20000573 PARAMETER Experiment Name: At_100uM_ABA_Mutants__P Parameter: Treatment Value: None
  misc_feature: MA Experiment ID: 20000574 Result: Up-regulated in Transcription
  misc_feature: MA Experiment 20000574 PARAMETER Experiment Name: At_100uM_ABA_Mutants__P Parameter: Organism Value: A. thaliana
  misc_feature: MA Experiment 20000574 PARAMETER Experiment Name: At_100uM_ABA_Mutants__P Parameter: Plant Line Value: CS23 vs. Ler wt
  misc_feature: MA Experiment 20000574 PARAMETER Experiment Name: At_100uM_ABA_Mutants__P Parameter: Timepoint (hr) Value: N/A
  misc_feature: MA Experiment 20000574 PARAMETER Experiment Name: At_100uM_ABA_Mutants__P Parameter: Tissue Value: Whole Plant
  misc_feature: MA Experiment 20000574 PARAMETER Experiment Name: At_100uM_ABA_Mutants__P Parameter: Treatment Value: None
  misc_feature: MA Experiment ID: 20000794 Result: Down-regulated in Transcription
  misc_feature: MA Experiment 20000794 PARAMETER Experiment Name: At_Petals_P Parameter: Age (day) Value: 23-25 days
  misc_feature: MA Experiment 20000794 PARAMETER Experiment Name: At_Petals_P Parameter: Plant Line Value: WS
  misc_feature: MA Experiment 20000794 PARAMETER Experiment Name: At_Petals_P Parameter: Tissue Value: Petals vs. Whole plant
  misc_feature: MA Experiment ID: 20001247 Result: Up-regulated in Transcription
  misc_feature: MA Experiment 20001247 PARAMETER Experiment Name: At_Far-red-induction_P Parameter: Age (day) Value: 7
  misc_feature: MA Experiment 20001247 PARAMETER Experiment Name: At_Far-red-induction_P Parameter: Light Value: Far-red vs. White
  misc_feature: MA Experiment 20001247 PARAMETER Experiment Name: At_Far-red-induction_P Parameter: Organism Value: A. thaliana
  misc_feature: MA Experiment 20001247 PARAMETER Experiment Name: At_Far-red-induction_P Parameter: Plant Line Value: Columbia
  misc_feature: MA Experiment 20001247 PARAMETER Experiment Name: At_Far-red-induction_P Parameter: Timepoint (hr) Value: 1
  misc_feature: MA Experiment 20001247 PARAMETER Experiment Name: At_Far-red-induction_P Parameter: Tissue Value: Whole Plant
  misc_feature: MA Experiment ID: 20001248 Result: Up-regulated in Transcription
  misc_feature: MA Experiment 20001248 PARAMETER Experiment Name: At_Far-red-induction_P Parameter: Age (day) Value: 7
  misc_feature: MA Experiment 20001248 PARAMETER Experiment Name: At_Far-red-induction_P Parameter: Light Value: Far-red vs. White
  misc_feature: MA Experiment 20001248 PARAMETER Experiment Name: At_Far-red-induction_P Parameter: Organism Value: A. thaliana
  misc_feature: MA Experiment 20001248 PARAMETER Experiment Name: At_Far-red-induction_P Parameter: Plant Line Value: Columbia
  misc_feature: MA Experiment 20001248 PARAMETER Experiment Name: At_Far-red-induction_P Parameter: Timepoint (hr) Value: 4
  misc_feature: MA Experiment 20001248 PARAMETER Experiment Name: At_Far-red-induction_P Parameter: Tissue Value: Whole Plant
  misc_feature: MA Experiment ID: 20001450 Result: Up-regulated in Transcription
  misc_feature: MA Experiment 20001450 PARAMETER Experiment Name: At_Far-red-induction_P Parameter: Age (day) Value: 7
  misc_feature: MA Experiment 20001450 PARAMETER Experiment Name: At_Far-red-induction_P Parameter: Light Value: Far-red vs. White
  misc_feature: MA Experiment 20001450 PARAMETER Experiment Name: At_Far-red-induction_P Parameter: Organism Value: A. thaliana
  misc_feature: MA Experiment 20001450 PARAMETER Experiment Name: At_Far-red-induction_P Parameter: Plant Line Value: Columbia
  misc_feature: MA Experiment 20001450 PARAMETER Experiment Name: At_Far-red-induction_P Parameter: Timepoint (hr) Value: 8
  misc_feature: MA Experiment 20001450 PARAMETER Experiment Name: At_Far-red-induction_P Parameter: Tissue Value: Whole Plant
  misc_feature: MA Experiment ID: 20001451 Result: Up-regulated in Transcription
  misc_feature: MA Experiment 20001451 PARAMETER Experiment Name: At_Far-red-induction_P Parameter: Age (day) Value: 7
  misc_feature: MA Experiment 20001451 PARAMETER Experiment Name: At_Far-red-induction_P Parameter: Light Value: Far-red vs. White
  misc_feature: MA Experiment 20001451 PARAMETER Experiment Name: At_Far-red-induction_P Parameter: Organism Value: A. thaliana
  misc_feature: MA Experiment 20001451 PARAMETER Experiment Name: At_Far-red-induction_P Parameter: Plant Line Value: Columbia
  misc_feature: MA Experiment 20001451 PARAMETER Experiment Name: At_Far-red-induction_P Parameter: Timepoint (hr) Value: 24
  misc_feature: MA Experiment 20001451 PARAMETER Experiment Name: At_Far-red-induction_P Parameter: Tissue Value: Whole Plant
  misc_feature: MA Experiment ID: 20001557 Result: Down-regulated in Transcription
  misc_feature: MA Experiment 20001557 PARAMETER Experiment Name: At_Drought_Soil_Dry_P Parameter: Age (day) Value: 27
  misc_feature: MA Experiment 20001557 PARAMETER Experiment Name: At_Drought_Soil_Dry_P Parameter: Organism Value: A. thaliana
  misc_feature: MA Experiment 20001557 PARAMETER Experiment Name: At_Drought_Soil_Dry_P Parameter: Plant Line Value: WS
  misc_feature: MA Experiment 20001557 PARAMETER Experiment Name: At_Drought_Soil_Dry_P Parameter: Post Timepoint (hr) Value: 3
  misc_feature: MA Experiment 20001557 PARAMETER Experiment Name: At_Drought_Soil_Dry_P Parameter: Post-Treatment Value: Re-Water vs. No Drought
  misc_feature: MA Experiment 20001557 PARAMETER Experiment Name: At_Drought_Soil_Dry_P Parameter: Timepoint (day) Value: 13
  misc_feature: MA Experiment 20001557 PARAMETER Experiment Name: At_Drought_Soil_Dry_P Parameter: Treatment Value: Drought vs. No Drought
  misc_feature: MA Experiment ID: 20001904 Result: Up-regulated in Transcription
  misc_feature: MA Experiment 20001904 PARAMETER Experiment Name: At_Drought_Reproduction_P Parameter: Age (day) Value: 37
  misc_feature: MA Experiment 20001904 PARAMETER Experiment Name: At_Drought_Reproduction_P Parameter: Organism Value: A. thaliana
  misc_feature: MA Experiment 20001904 PARAMETER Experiment Name: At_Drought_Reproduction_P Parameter: Plant Line Value: WS
  misc_feature: MA Experiment 20001904 PARAMETER Experiment Name: At_Drought_Reproduction_P Parameter: Timepoint (day) Value: 7
  misc_feature: MA Experiment 20001904 PARAMETER Experiment Name: At_Drought_Reproduction_P Parameter: Tissue Value: Rosettes
  misc_feature: MA Experiment 20001904 PARAMETER Experiment Name: At_Drought_Reproduction_P Parameter: Treatment Value: Drought vs. No Drought
  misc_feature: MA Experiment ID: 20001910 Result: Up-regulated in Transcription
  misc_feature: MA Experiment 20001910 PARAMETER Experiment Name: At_Drought_Reproduction_P Parameter: Age (day) Value: 37
  misc_feature: MA Experiment 20001910 PARAMETER Experiment Name: At_Drought_Reproduction_P Parameter: Organism Value: A. thaliana
  misc_feature: MA Experiment 20001910 PARAMETER Experiment Name: At_Drought_Reproduction_P Parameter: Plant Line Value: WS
  misc_feature: MA Experiment 20001910 PARAMETER Experiment Name: At_Drought_Reproduction_P Parameter: Timepoint (day) Value: 7
  misc_feature: MA Experiment 20001910 PARAMETER Experiment Name: At_Drought_Reproduction_P Parameter: Tissue Value: Flowers
  misc_feature: MA Experiment 20001910 PARAMETER Experiment Name: At_Drought_Reproduction_P Parameter: Treatment Value: Drought vs. No Drought
cattttttagtgattgtagatcttaagagagagagagagagatggagatatcgaaatacaaggcggtgctagcgttagtgatgttgcagtttacgtccgccggagttgcactcttcacgaaagctgctttcatggaaggtctcaatcccaccgtcttcgttgtttaccgtcaagccatcgccactctcttcatctgccccatctctttcatttccgcttggaggaaagaaaacaaaccttctctgggagtaagaggcttttggtgggtggctttgacggctgttattggtgtgactgttaatcagaacgcttatttcaaagggattgacttgtcttcttcatccatggcttgtgccatgactaatcttattcctgccgtcaccttcattatctccatcattgttgggttcgagagtataaagaggagaagtatgaaaagtgttgcaaaagtaataggaactggtgtctgtgtgggaggagccatggcaatgacttttctcagaggtccaaaattgctcaatgccttgctcaaccaagacaacacagcttggttactcggctgcttcttccttcttattagcacatttgcttggtctctttggttgatccttcaggttcctattgcctctcactgtcctgaccacttgtacacttctgcctgcacatgtttcatcgctaccatagcttctttcctcgtggctctcgccttaggcaacactcatttaccgccctggaagcttgattccttcttgaagctctcttgctgcatatactctggattccagttggcgatatctttctttctacaagcttggatcgtatcacagaaaggacctgttttctctgccctcttcaaccctctttctgcagtcatcgtcactttcttcggcgctctgtatctaaaagaacagacttacctcgggagcttgttaggcgctttggctatcatccttggtctctacattgttctctggggcaaatctgaagactatcaagaagaatcaacagacctgaaattggaaaatgaacacaacacttcctctcaatctgacattgtttccattatgattggtgataaggcctttcgtagttcggagctattagaacctcttctcatgtgagttttattgaagtcagttctacatggtgtaagtggaaatttttgacaatggacacttaaagaatatgaaaatgataataacgcaaagtgaaatggaacttctttt

SEQ ID NO: 81214 - protein, 359 aa, Arabidopsis thaliana
  peptide (1)..(359): Ceres Seq. ID no. 12658842
  misc_feature (17)..(152): Pfam Name: Integral membrane protein DUF6 Pfam Description: Integral membrane protein DUF6
  misc_feature (1)..(359): Homolog of NCBI NO: 15234371 NR Description: Medicago nodulin N21-like protein; protein id: supported by cDNA: gi_13899060, supported by cDNA: gi_20148374 thaliana] >gi|7486954|pir||T02905 hypothetical protein
  misc_feature (10)..(358): Homolog of NCBI NO: 15234742 NR Description: nodulin-like protein; protein id: At4g30420.1
  misc_feature (167)..(329): Homolog of NCBI NO: 15238227 NR Description: nodulin-like protein; protein id: At5g64700.1
  misc_feature (1)..(158): Homolog of NCBI NO: 15238227 NR Description: nodulin-like protein; protein id: At5g64700.1
  misc_feature (7)..(319): Homolog of NCBI NO: 2598575 NR Description: MtN21 [Medicago truncatula]
  misc_feature (5)..(352): Homolog of NCBI NO: 34895316 NR Description: putative nodulin [Oryza sativa (japonica
  misc_feature (3)..(329): Homolog of NCBI NO: 15224291 NR Description: nodulin-like protein; protein id: At2g37460.1, by cDNA: 16393., supported by cDNA: gi_14334857, supported by
  misc_feature (3)..(316): Homolog of NCBI NO: 15219448 NR Description: nodulin protein, putative; protein id: supported by cDNA: 149985., supported by cDNA: gi_15146329
  misc_feature (1)..(327): Homolog of NCBI NO: 15225480 NR Description: nodulin-like protein; protein id: At2g39510.1
  misc_feature (161)..(345): Homolog of NCBI NO: 34908998 NR Description: nodulin-like protein [Oryza sativa (japonica
MEISKYKAVLALVMLQFTSAGVALFTKAAFMEGLNPTVFVVYRQAIATLFICPISFISAWRKENKPSLGVRGFWWVALTAVIGVTVNQNAYFKGIDLSSSSMACAMTNLIPAVTFIISIIVGFESIKRRSMKSVAKVIGTGVCVGGAMAMTFLRGPKLLNALLNQDNTAWLLGCFFLLISTFAWSLWLILQVPIASHCPDHLYTSACTCFIATIASFLVALALGNTHLPPWKLDSFLKLSCCIYSGFQLAISFFLQAWIVSQKGPVFSALFNPLSAVIVTFFGALYLKEQTYLGSLLGALAIILGLYIVLWGKSEDYQEESTDLKLENEHNTSSQSDIVSIMIGDKAFRSSELLEPLLM

SEQ ID NO: 81215 - protein, 346 aa, Arabidopsis thaliana
  peptide (1)..(346): Ceres Seq. ID no. 12658843
  misc_feature (4)..(139): Pfam Name: Integral membrane protein DUF6 Pfam Description: Integral membrane protein DUF6
  misc_feature (1)..(346): Homolog of NCBI NO: 15234371 NR Description: Medicago nodulin N21-like protein; protein id: supported by cDNA: gi_13899060, supported by cDNA: gi_20148374 thaliana] >gi|7486954|pir||T02905 hypothetical protein
  misc_feature (1)..(345): Homolog of NCBI NO: 15234742 NR Description: nodulin-like protein; protein id: At4g30420.1
  misc_feature (154)..(316): Homolog of NCBI NO: 15238227 NR Description: nodulin-like protein; protein id: At5g64700.1
  misc_feature (1)..(145): Homolog of NCBI NO: 15238227 NR Description: nodulin-like protein; protein id: At5g64700.1
  misc_feature (1)..(306): Homolog of NCBI NO: 2598575 NR Description: MtN21 [Medicago truncatula]
  misc_feature (1)..(339): Homolog of NCBI NO: 34895316 NR Description: putative nodulin [Oryza sativa (japonica
  misc_feature (1)..(316): Homolog of NCBI NO: 15224291 NR Description: nodulin-like protein; protein id: At2g37460.1, by cDNA: 16393., supported by cDNA: gi_14334857, supported by
  misc_feature (1)..(303): Homolog of NCBI NO: 15219448 NR Description: nodulin protein, putative; protein id: supported by cDNA: 149985., supported by cDNA: gi_15146329
  misc_feature (1)..(314): Homolog of NCBI NO: 15225480 NR Description: nodulin-like protein; protein id: At2g39510.1
  misc_feature (148)..(332): Homolog of NCBI NO: 34908998 NR Description: nodulin-like protein [Oryza sativa (japonica
MLQFTSAGVALFTKAAFMEGLNPTVFVVYRQAIATLFICPISFISAWRKENKPSLGVRGFWWVALTAVIGVTVNQNAYFKGIDLSSSSMACAMTNLIPAVTFIISIIVGFESIKRRSMKSVAKVIGTGVCVGGAMAMTFLRGPKLLNALLNQDNTAWLLGCFFLLISTFAWSLWLILQVPIASHCPDHLYTSACTCFIATIASFLVALALGNTHLPPWKLDSFLKLSCCIYSGFQLAISFFLQAWIVSQKGPVFSALFNPLSAVIVTFFGALYLKEQTYLGSLLGALAIILGLYIVLWGKSEDYQEESTDLKLENEHNTSSQSDIVSIMIGDKAFRSSELLEPLLM

SEQ ID NO: 81216 - protein, 329 aa, Arabidopsis thaliana
  peptide (1)..(329): Ceres Seq. ID no. 12658844
  misc_feature (1)..(122): Pfam Name: Integral membrane protein DUF6 Pfam Description: Integral membrane protein DUF6
  misc_feature (1)..(329): Homolog of NCBI NO: 15234371 NR Description: Medicago nodulin N21-like protein; protein id: supported by cDNA: gi_13899060, supported by cDNA: gi_20148374 thaliana] >gi|7486954|pir||T02905 hypothetical protein
  misc_feature (1)..(328): Homolog of NCBI NO: 15234742 NR Description: nodulin-like protein; protein id: At4g30420.1
  misc_feature (137)..(299): Homolog of NCBI NO: 15238227 NR Description: nodulin-like protein; protein id: At5g64700.1
  misc_feature (1)..(128): Homolog of NCBI NO: 15238227 NR Description: nodulin-like protein; protein id: At5g64700.1
  misc_feature (1)..(289): Homolog of NCBI NO: 2598575 NR Description: MtN21 [Medicago truncatula]
  misc_feature (1)..(322): Homolog of NCBI NO: 34895316 NR Description: putative nodulin [Oryza sativa (japonica
  misc_feature (1)..(299): Homolog of NCBI NO: 15224291 NR Description: nodulin-like protein; protein id: At2g37460.1, by cDNA: 16393., supported by cDNA: gi_14334857, supported by
  misc_feature (1)..(286): Homolog of NCBI NO: 15219448 NR Description: nodulin protein, putative; protein id: supported by cDNA: 149985., supported by cDNA: gi_15146329
  misc_feature (1)..(297): Homolog of NCBI NO: 15225480 NR Description: nodulin-like protein; protein id: At2g39510.1
  misc_feature (131)..(315): Homolog of NCBI NO: 34908998 NR Description: nodulin-like protein [Oryza sativa (japonica
MEGLNPTVFVVYRQAIATLFICPISFISAWRKENKPSLGVRGFWWVALTAVIGVTVNQNAYFKGIDLSSSSMACAMTNLIPAVTFIISIIVGFESIKRRSMKSVAKVIGTGVCVGGAMAMTFLRGPKLLNALLNQDNTAWLLGCFFLLISTFAWSLWLILQVPIASHCPDHLYTSACTCFIATIASFLVALALGNTHLPPWKLDSFLKLSCCIYSGFQLAISFFLQAWIVSQKGPVFSALFNPLSAVIVTFFGALYLKEQTYLGSLLGALAIILGLYIVLWGKSEDYQEESTDLKLENEHNTSSQSDIVSIMIGDKAFRSSELLEPLLM

SEQ ID NO: 81217 - DNA, 983 bp, Arabidopsis thaliana
  misc_feature (1)..(983): Ceres Seq. ID no. 12658849
  misc_feature: MA Experiment ID: 20000436 Result: Up-regulated in Transcription
  misc_feature: MA Experiment 20000436 PARAMETER Experiment Name: At_Drought_P Parameter: Age (day) Value: 7
  misc_feature: MA Experiment 20000436 PARAMETER Experiment Name: At_Drought_P Parameter: Organism Value: A. thaliana
  misc_feature: MA Experiment 20000436 PARAMETER Experiment Name: At_Drought_P Parameter: Plant Line Value: WS
  misc_feature: MA Experiment 20000436 PARAMETER Experiment Name: At_Drought_P Parameter: Timepoint (hr) Value: 12
  misc_feature: MA Experiment 20000436 PARAMETER Experiment Name: At_Drought_P Parameter: Tissue Value: Whole Plant
  misc_feature: MA Experiment 20000436 PARAMETER Experiment Name: At_Drought_P Parameter: Treatment Value: Drought vs. No Drought
  misc_feature: MA Experiment ID: 20000437 Result: Up-regulated in Transcription
  misc_feature: MA Experiment 20000437 PARAMETER Experiment Name: At_Drought_P Parameter: Age (day) Value: 8
  misc_feature: MA Experiment 20000437 PARAMETER Experiment Name: At_Drought_P Parameter: Organism Value: A. thaliana
  misc_feature: MA Experiment 20000437 PARAMETER Experiment Name: At_Drought_P Parameter: Plant Line Value: WS
  misc_feature: MA Experiment 20000437 PARAMETER Experiment Name: At_Drought_P Parameter: Timepoint (hr) Value: 24
  misc_feature: MA Experiment 20000437 PARAMETER Experiment Name: At_Drought_P Parameter: Tissue Value: Whole Plant
  misc_feature: MA Experiment 20000437 PARAMETER Experiment Name: At_Drought_P Parameter: Treatment Value: Drought vs. No Drought
  misc_feature: MA Experiment ID: 20001904 Result: Up-regulated in Transcription
  misc_feature: MA Experiment 20001904 PARAMETER Experiment Name: At_Drought_Reproduction_P Parameter: Age (day) Value: 37
  misc_feature: MA Experiment 20001904 PARAMETER Experiment Name: At_Drought_Reproduction_P Parameter: Organism Value: A. thaliana
  misc_feature: MA Experiment 20001904 PARAMETER Experiment Name: At_Drought_Reproduction_P Parameter: Plant Line Value: WS
  misc_feature: MA Experiment 20001904 PARAMETER Experiment Name: At_Drought_Reproduction_P Parameter: Timepoint (day) Value: 7
  misc_feature: MA Experiment 20001904 PARAMETER Experiment Name: At_Drought_Reproduction_P Parameter: Tissue Value: Rosettes
  misc_feature: MA Experiment 20001904 PARAMETER Experiment Name: At_Drought_Reproduction_P Parameter: Treatment Value: Drought vs. No Drought
atgggaagatcaccttgttgtgataaaaatggagtgaagaagggaccatggactgctgaggaggatcagaaactcatcgattatattcgatttcatggtcctggcaattggcgtacgctccccaaaaatgctggactccatagatgtggaaaaagctgccgtcttcgatggaccaattatctaagaccggacatcaagagaggaagattctcgttcgaggaagaagaaactatcattcagctacacagtgttatgggaaacaagtggtcagcaatagccgctcgtctaccagggaggaccgataacgaaataaaaaaccattggaacactcacatccgcaagagacttgtaaggagtggtatcgaccctgttactcattctccacgccttgatcttcttgatttgtcctcacttttgagtgcacttttcaaccagccaaacttttcagcagttgcaacacatgcgtcttctcttcttaatcctgatgtattgaggttggcctctctactactgccacttcaaaaccctaatccagtttacccatcgaacctcgaccaaaatcttcaaactccaaatacatcatcagaatcgtctcaaccacaagctgagactagtacagtcccaacaaactatgaaacttcatcattggagcctatgaacgcaagactcgacgacgttggtcttgcagatgtattaccacctttgtcagagagttttgacttagactcgctcatgtcaacgccaatgtcttctccacgacaaaatagcattgaagcagaaaccaactccagcactttcttcgactttggaattccggaagatttcatcttagatgactttatgttttaattttcaacatttgcatacacatgtcttgctttcacacatatgattctttgttgcattctttcttttgtttgatgtataaatttcttgtttttattctctcaaaagatattaagttattagtctataaaattttc

SEQ ID NO: 81218 - protein, 282 aa, Arabidopsis thaliana
  peptide (1)..(282): Ceres Seq. ID no. 12658850
  misc_feature (14)..(61): Pfam Name: Myb-like DNA-binding domain Pfam Description: Myb-like DNA-binding domain
  misc_feature (1)..(282): Homolog of NCBI NO: 15234385 NR Description: myb family transcription factor; protein id: [Arabidopsis thaliana] >gi|25294094|pir||B85327 probable
  misc_feature (65)..(282): Homolog of NCBI NO: 7446173 NR Description: probable transcription factor MYB41 [similarity] Arabidopsis thaliana (fragment) >gi|3941456|gb|AAC83604.1| transcription factor [Arabidopsis thaliana]
  misc_feature (1)..(233): Homolog of NCBI NO: 15234593 NR Description: myb DNA-binding protein; protein id: At4g05100.1,
  misc_feature (1)..(217): Homolog of NCBI NO: 18415694 NR Description: myb family protein; protein id: At4g21440.1, by cDNA: 33333., supported by cDNA: gi_17065085 [Arabidopsis >gi|7242487|emb|CAB77384.1| putative transcription factor
  misc_feature (1)..(217): Homolog of NCBI NO: 21592858 NR Description: myb-related protein M4 [Arabidopsis thaliana]
  misc_feature (1)..(217): Homolog of NCBI NO: 17065086 NR Description: myb-related protein M4 [Arabidopsis thaliana]
  misc_feature (1)..(217): Homolog of NCBI NO: 7428545 NR Description: myb-related protein M4 - Arabidopsis thaliana
  misc_feature (1)..(199): Homolog of NCBI NO: 22795039 NR Description: putative MYB transcription factor [Populus x
  misc_feature (1)..(172): Homolog of NCBI NO: 7438328 NR Description: myb protein - rice >gi|1946267|emb|CAA72218.1|
  misc_feature (1)..(172): Homolog of NCBI NO: 34394006 NR Description: myb protein [Oryza sativa (japonica
MGRSPCCDKNGVKKGPWTAEEDQKLIDYIRFHGPGNWRTLPKNAGLHRCGKSCRLRWTNYLRPDIKRGRFSFEEEETIIQLHSVMGNKWSAIAARLPGRTDNEIKNHWNTHIRKRLVRSGIDPVTHSPRLDLLDLSSLLSALFNQPNFSAVATHASSLLNPDVLRLASLLLPLQNPNPVYPSNLDQNLQTPNTSSESSQPQAETSTVPTNYETSSLEPMNARLDDVGLADVLPPLSESFDLDSLMSTPMSSPRQNSIEAETNSSTFFDFGIPEDFILDDFMF

SEQ ID NO: 81219 - protein, 198 aa, Arabidopsis thaliana
  peptide (1)..(198): Ceres Seq. ID no. 12658851
  misc_feature (1)..(198): Homolog of NCBI NO: 15234385 NR Description: myb family transcription factor; protein id: [Arabidopsis thaliana] >gi|25294094|pir||B85327 probable
  misc_feature (1)..(198): Homolog of NCBI NO: 7446173 NR Description: probable transcription factor MYB41 [similarity] Arabidopsis thaliana (fragment) >gi|3941456|gb|AAC83604.1| transcription factor [Arabidopsis thaliana]
  misc_feature (1)..(149): Homolog of NCBI NO: 15234593 NR Description: myb DNA-binding protein; protein id: At4g05100.1,
  misc_feature (1)..(133): Homolog of NCBI NO: 18415694 NR Description: myb family protein; protein id: At4g21440.1, by cDNA: 33333., supported by cDNA: gi_17065085 [Arabidopsis >gi|7242487|emb|CAB77384.1| putative transcription factor
  misc_feature (1)..(133): Homolog of NCBI NO: 21592858 NR Description: myb-related protein M4 [Arabidopsis thaliana]
  misc_feature (1)..(133): Homolog of NCBI NO: 17065086 NR Description: myb-related protein M4 [Arabidopsis thaliana]
  misc_feature (1)..(133): Homolog of NCBI NO: 7428545 NR Description: myb-related protein M4 - Arabidopsis thaliana
  misc_feature (1)..(115): Homolog of NCBI NO: 22795039 NR Description: putative MYB transcription factor [Populus x
  misc_feature (1)..(88): Homolog of NCBI NO: 7438328 NR Description: myb protein - rice >gi|1946267|emb|CAA72218.1|
  misc_feature (1)..(88): Homolog of NCBI NO: 34394006 NR Description: myb protein [Oryza sativa (japonica
MGNKWSAIAARLPGRTDNEIKNHWNTHIRKRLVRSGIDPVTHSPRLDLLDLSSLLSALFNQPNFSAVATHASSLLNPDVLRLASLLLPLQNPNPVYPSNLDQNLQTPNTSSESSQPQAETSTVPTNYETSSLEPMNARLDDVGLADVLPPLSESFDLDSLMSTPMSSPRQNSIEAETNSSTFFDFGIPEDFILDDFMF

SEQ ID NO: 81220 - DNA, 2181 bp, Arabidopsis thaliana
  misc_feature (1)..(2181): Ceres Seq. ID no. 12658856
  misc_feature: MA Experiment ID: 20000179 Result: Down-regulated in Transcription
  misc_feature: MA Experiment 20000179 PARAMETER Experiment Name: At_Germinating_Seeds_P Parameter: Age (hr) Value: 6 vs. 0
  misc_feature: MA Experiment 20000179 PARAMETER Experiment Name: At_Germinating_Seeds_P Parameter: Tissue Value: Germinating Seeds
  misc_feature: MA Experiment ID: 20000180 Result: Down-regulated in Transcription
  misc_feature: MA Experiment 20000180 PARAMETER Experiment Name: At_Germinating_Seeds_P Parameter: Age (hr) Value: 24 vs. 0
  misc_feature: MA Experiment 20000180 PARAMETER Experiment Name: At_Germinating_Seeds_P Parameter: Tissue Value: Germinating Seeds
  misc_feature: MA Experiment ID: 20000184 Result: Down-regulated in Transcription
  misc_feature: MA Experiment 20000184 PARAMETER Experiment Name: At_Shoots__P Parameter: Age (day) Value: 7
  misc_feature: MA Experiment 20000184 PARAMETER Experiment Name: At_Shoots__P Parameter: Tissue Value: Shoots vs. Whole Plant
  misc_feature: MA Experiment ID: 20001557 Result: Up-regulated in Transcription
  misc_feature: MA Experiment 20001557 PARAMETER Experiment Name: At_Drought_Soil_Dry_P Parameter: Age (day) Value: 27
  misc_feature: MA Experiment 20001557 PARAMETER Experiment Name: At_Drought_Soil_Dry_P Parameter: Organism Value: A. thaliana
  misc_feature: MA Experiment 20001557 PARAMETER Experiment Name: At_Drought_Soil_Dry_P Parameter: Plant Line Value: WS
  misc_feature: MA Experiment 20001557 PARAMETER Experiment Name: At_Drought_Soil_Dry_P Parameter: Post Timepoint (hr) Value: 3
  misc_feature: MA Experiment 20001557 PARAMETER Experiment Name: At_Drought_Soil_Dry_P Parameter: Post-Treatment Value: Re-Water vs. No Drought
  misc_feature: MA Experiment 20001557 PARAMETER Experiment Name: At_Drought_Soil_Dry_P Parameter: Timepoint (day) Value: 13
  misc_feature: MA Experiment 20001557 PARAMETER Experiment Name: At_Drought_Soil_Dry_P Parameter: Treatment Value: Drought vs. No Drought
ccccgccgagaatcgagaagcagcagccatggccgacgtagttcaataccgcctcgagcggatggttgacgagcttgatgatctagaacgaagagaaatcttcactcgtgctgagatagctgagatcgtgaagcagcggcgtaagtttgagtaccggctcaagcgtccaagcccactcaaagaagatttcatagcctatattgactatgaggttaagctcgatgagctccgtcagctacggaggaaatcggtggcgcgtgtgactaagaagagaaagaagaaatcagtatctgatttcgccggtgtggctaggattgttgagatttatagattggcgacgatgaggtataaaggtgatatcaatttgtggtttaggtatctcgagttttgtaaacagaagaggcatggaagaatgaaaaaggcattggctcaagcaataaggtttcatccaaaagtggctggagtgtggatatatgctgcatcttgggaatttgatagaaacttgaatgttacagcagctcgtgctcttatgctgaatgggctgagagtgtgttcaaactctgaagacctgtgggttgagtatctgcgaatggaacttacttttctaaataagctgaaagctcgtaaagttgcccttggtgaagataaaggaagtttggtgcgtgacacgaaaaccgttgaggatgagcaatggaaagatgagaacaaagagttatttatgtcgctagatgagaaagaaggaaatgaaaaagaagagaatgacgaggactctattgtcgaagatgttgaggatgtgactgagaaagttgatttcttaaaagagaaagggtccaatgttcttcagaccatctatagtggagccgttgaggctattccatctagttttgacttgaggaagcgttttttggagattctagaggcaacagacttagcgcattcagatgaaatgcgcaataccattctaagtgacctgaagcgtgatttttgcaatgaacctgaatactggaattggcttgcaagacatgaaatgagtggttgtattagcaatgaggcaggcctagagtttgcaaatcctcaaatgcaaaaggctattcaggtttttgaagaaggcttgcaaactgttacgtcaagttctatgtttgagatttatataaattttctgatggaggctattgtacagtcaaacggcgacgagaatgaaatctcctctttgtctaatccgatcatttcacatatcataaacgtgtaccaaaaggctgatgaaactggctgtttgactgaagagcttgctgatgaatatgtttctctgtacttgaaactggaaaagactcatgaagctcagaagctagcagaaaagctctgctctgaaaaatttgctggatcagctaagttgtggctttcaagagtttccattgaaataagatcactttcagagaactcatctcctagtaaagcagattttcagacagtctttgagctcctttcaaatgctttgaggaaagtaccgatctcagaatctgagagcttgtggctaatggcttttaatttctttgctcatcagcgaacttatttggacaaacttgtagagatgtccatcctatcagcaaccaaaagccatgggagcgaccatgtgttttctcttgcttccacagtggtgaaatttgttcttgaaacaaaaggggcccacagtgcgaggaagatatacaagaggttcttggctcttcctggtcccagtcttgttctatacaaaggttgcattgaaatagagaccaacctcatatcagtaggtgataaagatggtctcagtaatgcccggaagctgtatgattctgctgttgcaagttacggtcaagacgtggagctgtggaagaattactactcattggagacaaagctgggaacatcagagacagccaatggagtgtattggcgtgcgagaaagactctgaatgaatccgcggatttcatagtttgatctctgatttataggtagtctagtatgtatgatgaaggaaacactatgtttgcctcgtatttgtggatgcaggtttcagttatgtgatccttaagatatgaattttggttgtaacagaacaggagtcgatgtactactttatgagtctagttatactctaaaacacttttttgatacaaaaacatgttgaagttcatacatgcctc

SEQ ID NO: 81221 - protein, 657 aa, Arabidopsis thaliana
  peptide (1)..(657): Ceres Seq. ID no. 12658857
  misc_feature (80)..(653): Homolog of NCBI NO: 40363761 NR Description: putative hepatocellular carcinoma-associated
  misc_feature (10)..(88): Homolog of NCBI NO: 40363761 NR Description: putative hepatocellular carcinoma-associated
  misc_feature (10)..(283): Homolog of NCBI NO: 19113605 NR Description: hypothetical protein [Schizosaccharomyces pombe]
  misc_feature (10)..(209): Homolog of NCBI NO: 21450209 NR Description: RIKEN cDNA 4732497O03; DSCAM-interacting protein [Mus musculus] >gi|17390578|gb|AAH18250.1| Unknown (protein for [Mus musculus] >gi|19354159|gb|AAH24850.1| Unknown (protein for
  misc_feature (10)..(209): Homolog of NCBI NO: 27462213 NR Description: multiple hat domains [Mus musculus]
  misc_feature (15)..(267): Homolog of NCBI NO: 6320657 NR Description: part of small (ribosomal) subunit (SSU)
  misc_feature (10)..(234): Homolog of NCBI NO: 27462211 NR Description: multiple hat domains [Homo sapiens]
  misc_feature (10)..(234): Homolog of NCBI NO: 8923722 NR Description: hepatocellular carcinoma-associated antigen 66
  misc_feature (14)..(234): Homolog of NCBI NO: 15930028 NR Description: Unknown (protein for IMAGE:4430701) [Homo sapiens]
  misc_feature (10)..(209): Homolog of NCBI NO: 29476988 NR Description: Similar to RIKEN cDNA 4732497O03 gene [Xenopus
PAENREAAAMADVVQYRLERMVDELDDLERREIFTRAEIAEIVKQRRKFEYRLKRPSPLKEDFIAYIDYEVKLDELRQLRRKSVARVTKKRKKKSVSDFAGVARIVEIYRLATMRYKGDINLWFRYLEFCKQKRHGRMKKALAQAIRFHPKVAGVWIYAASWEFDRNLNVTAARALMLNGLRVCSNSEDLWVEYLRMELTFLNKLKARKVALGEDKGSLVRDTKTVEDEQWKDENKELFMSLDEKEGNEKEENDEDSIVEDVEDVTEKVDFLKEKGSNVLQTIYSGAVEAIPSSFDLRKRFLEILEATDLAHSDEMRNTILSDLKRDFCNEPEYWNWLARHEMSGCISNEAGLEFANPQMQKAIQVFEEGLQTVTSSSMFEIYINFLMEAIVQSNGDENEISSLSNPIISHIINVYQKADETGCLTEELADEYVSLYLKLEKTHEAQKLAEKLCSEKFAGSAKLWLSRVSIEIRSLSENSSPSKADFQTVFELLSNALRKVPISESESLWLMAFNFFAHQRTYLDKLVEMSILSATKSHGSDHVFSLASTVVKFVLETKGAHSARKIYKRFLALPGPSLVLYKGCIEIETNLISVGDKDGLSNARKLYDSAVASYGQDVELWKNYYSLETKLGTSETANGVYWRARKTLNESADFIV

SEQ ID NO: 81222 - protein, 648 aa, Arabidopsis thaliana
  peptide (1)..(648): Ceres Seq. ID no. 12658858
  misc_feature (71)..(644): Homolog of NCBI NO: 40363761 NR Description: putative hepatocellular carcinoma-associated
  misc_feature (1)..(79): Homolog of NCBI NO: 40363761 NR Description: putative hepatocellular carcinoma-associated
  misc_feature (1)..(274): Homolog of NCBI NO: 19113605 NR Description: hypothetical protein [Schizosaccharomyces pombe]
  misc_feature (1)..(200): Homolog of NCBI NO: 21450209 NR Description: RIKEN cDNA 4732497O03; DSCAM-interacting protein [Mus musculus] >gi|17390578|gb|AAH18250.1| Unknown (protein for [Mus musculus] >gi|19354159|gb|AAH24850.1| Unknown (protein for
  misc_feature (1)..(200): Homolog of NCBI NO: 27462213 NR Description: multiple hat domains [Mus musculus]
  misc_feature (6)..(258): Homolog of NCBI NO: 6320657 NR Description: part of small (ribosomal) subunit (SSU)
  misc_feature (1)..(225): Homolog of NCBI NO: 27462211 NR Description: multiple hat domains [Homo sapiens]
  misc_feature (1)..(225): Homolog of NCBI NO: 8923722 NR Description: hepatocellular carcinoma-associated antigen 66
  misc_feature (5)..(225): Homolog of NCBI NO: 15930028 NR Description: Unknown (protein for IMAGE:4430701) [Homo sapiens]
  misc_feature (1)..(200): Homolog of NCBI NO: 29476988 NR Description: Similar to RIKEN cDNA 4732497O03 gene [Xenopus
MADVVQYRLERMVDELDDLERREIFTRAEIAEIVKQRRKFEYRLKRPSPLKEDFIAYIDYEVKLDELRQLRRKSVARVTKKRKKKSVSDFAGVARIVEIYRLATMRYKGDINLWFRYLEFCKQKRHGRMKKALAQAIRFHPKVAGVWIYAASWEFDRNLNVTAARALMLNGLRVCSNSEDLWVEYLRMELTFLNKLKARKVALGEDKGSLVRDTKTVEDEQWKDENKELFMSLDEKEGNEKEENDEDSIVEDVEDVTEKVDFLKEKGSNVLQTIYSGAVEAIPSSFDLRKRFLEILEATDLAHSDEMRNTILSDLKRDFCNEPEYWNWLARHEMSGCISNEAGLEFANPQMQKAIQVFEEGLQTVTSSSMFEIYINFLMEAIVQSNGDENEISSLSNPIISHIINVYQKADETGCLTEELADEYVSLYLKLEKTHEAQKLAEKLCSEKFAGSAKLWLSRVSIEIRSLSENSSPSKADFQTVFELLSNALRKVPISESESLWLMAFNFFAHQRTYLDKLVEMSILSATKSHGSDHVFSLASTVVKFVLETKGAHSARKIYKRFLALPGPSLVLYKGCIEIETNLISVGDKDGLSNARKLYDSAVASYGQDVELWKNYYSLETKLGTSETANGVYWRARKTLNESADFIV

SEQ ID NO: 81223 - protein, 637 aa, Arabidopsis thaliana
  peptide (1)..(637): Ceres Seq. ID no. 12658859
  misc_feature (60)..(633): Homolog of NCBI NO: 40363761 NR Description: putative hepatocellular carcinoma-associated
  misc_feature (1)..(68): Homolog of NCBI NO: 40363761 NR Description: putative hepatocellular carcinoma-associated
  misc_feature (1)..(263): Homolog of NCBI NO: 19113605 NR Description: hypothetical protein [Schizosaccharomyces pombe]
  misc_feature (1)..(189): Homolog of NCBI NO: 21450209 NR Description: RIKEN cDNA 4732497O03; DSCAM-interacting protein [Mus musculus] >gi|17390578|gb|AAH18250.1| Unknown (protein for [Mus musculus] >gi|19354159|gb|AAH24850.1| Unknown (protein for
  misc_feature (1)..(189): Homolog of NCBI NO: 27462213 NR Description: multiple hat domains [Mus musculus]
  misc_feature (1)..(247): Homolog of NCBI NO: 6320657 NR Description: part of small (ribosomal) subunit (SSU)
  misc_feature (1)..(214): Homolog of NCBI NO: 27462211 NR Description: multiple hat domains [Homo sapiens]
  misc_feature (1)..(214): Homolog of NCBI NO: 8923722 NR Description: hepatocellular carcinoma-associated antigen 66
  misc_feature (1)..(214): Homolog of NCBI NO: 15930028 NR Description: Unknown (protein for IMAGE:4430701) [Homo sapiens]
  misc_feature (1)..(189): Homolog of NCBI NO: 29476988 NR Description: Similar to RIKEN cDNA 4732497O03 gene [Xenopus
MVDELDDLERREIFTRAEIAEIVKQRRKFEYRLKRPSPLKEDFIAYIDYEVKLDELRQLRRKSVARVTKKRKKKSVSDFAGVARIVEIYRLATMRYKGDINLWFRYLEFCKQKRHGRMKKALAQAIRFHPKVAGVWIYAASWEFDRNLNVTAARALMLNGLRVCSNSEDLWVEYLRMELTFLNKLKARKVALGEDKGSLVRDTKTVEDEQWKDENKELFMSLDEKEGNEKEENDEDSIVEDVEDVTEKVDFLKEKGSNVLQTIYSGAVEAIPSSFDLRKRFLEILEATDLAHSDEMRNTILSDLKRDFCNEPEYWNWLARHEMSGCISNEAGLEFANPQMQKAIQVFEEGLQTVTSSSMFEIYINFLMEAIVQSNGDENEISSLSNPIISHIINVYQKADETGCLTEELADEYVSLYLKLEKTHEAQKLAEKLCSEKFAGSAKLWLSRVSIEIRSLSENSSPSKADFQTVFELLSNALRKVPISESESLWLMAFNFFAHQRTYLDKLVEMSILSATKSHGSDHVFSLASTVVKFVLETKGAHSARKIYKRFLALPGPSLVLYKGCIEIETNLISVGDKDGLSNARKLYDSAVASYGQDVELWKNYYSLETKLGTSETANGVYWRARKTLNESADFIV

SEQ ID NO: 81224 - DNA, 582 bp, Arabidopsis thaliana
  misc_feature (1)..(582): Ceres Seq. ID no. 12658860
  misc_feature: MA Experiment ID: 20000179 Result: Up-regulated in Transcription
  misc_feature: MA Experiment 20000179 PARAMETER Experiment Name: At_Germinating_Seeds_P Parameter: Age (hr) Value: 6 vs. 0
  misc_feature: MA Experiment 20000179 PARAMETER Experiment Name: At_Germinating_Seeds_P Parameter: Tissue Value: Germinating Seeds
  misc_feature: MA Experiment ID: 20000180 Result: Up-regulated in Transcription
  misc_feature: MA Experiment 20000180 PARAMETER Experiment Name: At_Germinating_Seeds_P Parameter: Age (hr) Value: 24 vs. 0
  misc_feature: MA Experiment 20000180 PARAMETER Experiment Name: At_Germinating_Seeds_P Parameter: Tissue Value: Germinating Seeds
  misc_feature: MA Experiment ID: 20000213 Result: Down-regulated in Transcription
  misc_feature: MA Experiment 20000213 PARAMETER Experiment Name: At_4deg_Cold_P Parameter: Timepoint (hr) Value: 2
  misc_feature: MA Experiment ID: 20000214 Result: Down-regulated in Transcription
  misc_feature: MA Experiment 20000214 PARAMETER Experiment Name: At_4deg_Cold_P Parameter: Timepoint (hr) Value: 6
  misc_feature: MA Experiment ID: 20000234 Result: Down-regulated in Transcription
  misc_feature: MA Experiment 20000234 PARAMETER Experiment Name: At_Siliques_P Parameter: Age (day) Value: 21
  misc_feature: MA Experiment 20000234 PARAMETER Experiment Name: At_Siliques_P Parameter: Organism Value: A. thaliana
  misc_feature: MA Experiment 20000234 PARAMETER Experiment Name: At_Siliques_P Parameter: Plant Line Value: WS
  misc_feature: MA Experiment 20000234 PARAMETER Experiment Name: At_Siliques_P Parameter: Tissue Value: Less Than 5mm Siliques vs. Whole Plant
  misc_feature: MA Experiment ID: 20000264 Result: Down-regulated in Transcription
  misc_feature: MA Experiment 20000264 PARAMETER Experiment Name: At_Open_Flower_P Parameter: Age (day) Value: 21
  misc_feature: MA Experiment 20000264 PARAMETER Experiment Name: At_Open_Flower_P Parameter: Plant Line Value: WS
  misc_feature: MA Experiment 20000264 PARAMETER Experiment Name: At_Open_Flower_P Parameter: Tissue Value: Open Flower vs. Whole Plant
  misc_feature: MA Experiment ID: 20000265 Result: Down-regulated in Transcription
  misc_feature: MA Experiment 20000265 PARAMETER Experiment Name: At_Open_Flower_P Parameter: Age (day) Value: 21
  misc_feature: MA Experiment 20000265 PARAMETER Experiment Name: At_Open_Flower_P Parameter: Plant Line Value: WS
  misc_feature: MA Experiment 20000265 PARAMETER Experiment Name: At_Open_Flower_P Parameter: Tissue Value: Closed Flower vs. Whole Plant
  misc_feature: MA Experiment ID: 20000286 Result: Down-regulated in Transcription
  misc_feature: MA Experiment 20000286 PARAMETER Experiment Name: At_Open_Flower_P Parameter: Age (day) Value: 21
  misc_feature: MA Experiment 20000286 PARAMETER Experiment Name: At_Open_Flower_P Parameter: Plant Line Value: WS
  misc_feature: MA Experiment 20000286 PARAMETER Experiment Name: At_Open_Flower_P Parameter: Tissue Value: Half Open vs. Whole Plant
  misc_feature: MA Experiment ID: 20000451 Result: Down-regulated in Transcription
  misc_feature: MA Experiment 20000451 PARAMETER Experiment Name: At_CS6879_Shoots-Roots_P Parameter: Age (day) Value: 14
  misc_feature: MA Experiment 20000451 PARAMETER Experiment Name: At_CS6879_Shoots-Roots_P Parameter: Organism Value: A. thaliana
  misc_feature: MA Experiment 20000451 PARAMETER Experiment Name: At_CS6879_Shoots-Roots_P Parameter: Plant Line Value: CS6879 vs. WS
  misc_feature: MA Experiment 20000451 PARAMETER Experiment Name: At_CS6879_Shoots-Roots_P Parameter: Tissue Value: Roots
  misc_feature: MA Experiment ID: 20001450 Result: Up-regulated in Transcription
  misc_feature: MA Experiment 20001450 PARAMETER Experiment Name: At_Far-red-induction_P Parameter: Age (day) Value: 7
  misc_feature: MA Experiment 20001450 PARAMETER Experiment Name: At_Far-red-induction_P Parameter: Light Value: Far-red vs. White
  misc_feature: MA Experiment 20001450 PARAMETER Experiment Name: At_Far-red-induction_P Parameter: Organism Value: A. thaliana
  misc_feature: MA Experiment 20001450 PARAMETER Experiment Name: At_Far-red-induction_P Parameter: Plant Line Value: Columbia
  misc_feature: MA Experiment 20001450 PARAMETER Experiment Name: At_Far-red-induction_P Parameter: Timepoint (hr) Value: 8
  misc_feature: MA Experiment 20001450 PARAMETER Experiment Name: At_Far-red-induction_P Parameter: Tissue Value: Whole Plant
  misc_feature: MA Experiment ID: 20001451 Result: Up-regulated in Transcription
  misc_feature: MA Experiment 20001451 PARAMETER Experiment Name: At_Far-red-induction_P Parameter: Age (day) Value: 7
  misc_feature: MA Experiment 20001451 PARAMETER Experiment Name: At_Far-red-induction_P Parameter: Light Value: Far-red vs. White
  misc_feature: MA Experiment 20001451 PARAMETER Experiment Name: At_Far-red-induction_P Parameter: Organism Value: A. thaliana
  misc_feature: MA Experiment 20001451 PARAMETER Experiment Name: At_Far-red-induction_P Parameter: Plant Line Value: Columbia
  misc_feature: MA Experiment 20001451 PARAMETER Experiment Name: At_Far-red-induction_P Parameter: Timepoint (hr) Value: 24
  misc_feature: MA Experiment 20001451 PARAMETER Experiment Name: At_Far-red-induction_P Parameter: Tissue Value: Whole Plant
  misc_feature: MA Experiment ID: 20001557 Result: Down-regulated in Transcription
  misc_feature: MA Experiment 20001557 PARAMETER Experiment Name: At_Drought_Soil_Dry_P Parameter: Age (day) Value: 27
  misc_feature: MA Experiment 20001557 PARAMETER Experiment Name: At_Drought_Soil_Dry_P Parameter: Organism Value: A. thaliana
  misc_feature: MA Experiment 20001557 PARAMETER Experiment Name: At_Drought_Soil_Dry_P Parameter: Plant Line Value: WS
  misc_feature: MA Experiment 20001557 PARAMETER Experiment Name: At_Drought_Soil_Dry_P Parameter: Post Timepoint (hr) Value: 3
  misc_feature: MA Experiment 20001557 PARAMETER Experiment Name: At_Drought_Soil_Dry_P Parameter: Post-Treatment Value: Re-Water vs. No Drought
  misc_feature: MA Experiment 20001557 PARAMETER Experiment Name: At_Drought_Soil_Dry_P Parameter: Timepoint (day) Value: 13
  misc_feature: MA Experiment 20001557 PARAMETER Experiment Name: At_Drought_Soil_Dry_P Parameter: Treatment Value: Drought vs. No Drought
  misc_feature: MA Experiment ID: 20001558 Result: Down-regulated in Transcription
  misc_feature: MA Experiment 20001558 PARAMETER Experiment Name: At_Drought_Soil_Dry_P Parameter: Age (day) Value: 27
  misc_feature: MA Experiment 20001558 PARAMETER Experiment Name: At_Drought_Soil_Dry_P Parameter: Organism Value: A. thaliana
  misc_feature: MA Experiment 20001558 PARAMETER Experiment Name: At_Drought_Soil_Dry_P Parameter: Plant Line Value: WS
  misc_feature: MA Experiment 20001558 PARAMETER Experiment Name: At_Drought_Soil_Dry_P Parameter: Post Timepoint (hr) Value: 6
  misc_feature: MA Experiment 20001558 PARAMETER Experiment Name: At_Drought_Soil_Dry_P Parameter: Post-Treatment Value: Re-Water vs. No Drought
  misc_feature: MA Experiment 20001558 PARAMETER Experiment Name: At_Drought_Soil_Dry_P Parameter: Timepoint (day) Value: 13
  misc_feature: MA Experiment 20001558 PARAMETER Experiment Name: At_Drought_Soil_Dry_P Parameter: Treatment Value: Drought vs. No Drought
  misc_feature: MA Experiment ID: 20001560 Result: Down-regulated in Transcription
  misc_feature: MA Experiment 20001560 PARAMETER Experiment Name: At_Drought_Soil_Dry_P Parameter: Age (day) Value: 28
  misc_feature: MA Experiment 20001560 PARAMETER Experiment Name: At_Drought_Soil_Dry_P Parameter: Organism Value: A. thaliana
  misc_feature: MA Experiment 20001560 PARAMETER Experiment Name: At_Drought_Soil_Dry_P Parameter: Plant Line Value: WS
  misc_feature: MA Experiment 20001560 PARAMETER Experiment Name: At_Drought_Soil_Dry_P Parameter: Post Timepoint (hr) Value: None
  misc_feature: MA Experiment 20001560 PARAMETER Experiment Name: At_Drought_Soil_Dry_P Parameter: Post-Treatment Value: None
  misc_feature: MA Experiment 20001560 PARAMETER Experiment Name: At_Drought_Soil_Dry_P Parameter: Timepoint (day) Value: 14
  misc_feature: MA Experiment 20001560 PARAMETER Experiment Name: At_Drought_Soil_Dry_P Parameter: Treatment Value: Drought vs. No Drought
atggagattgagaaggatgaggacgacacaacattggttgattctggaggagacttcgactgcaacatatgtttggatcaggttcgagacccggtcgtgactttatgtggccacctgttttgttggccctgcattcacaagtggacttatgcgtccaacaattcaagacaacgagtcgatcaatacgatcataagagggaaccaccaaaatgtccggtatgcaaatctgatgtctccgaggctacgcttgtcccgatctacggacgaggacagaaagctccccagtccggttcaaatgtaccgagcagaccaactggtccggtttatgacttaagaggagttggtcaacgtttaggagaaggggagagtcaacgttacatgtatagaatgcctgatccggtgatgggtgtggtatgcgaaatggtataccggagactatttggagagtcttcgagcaacatggcaccttaccgcgatatgaatgtccggtctaggcgacgggcaatgcaggctgaggagtcattaagcagagtctacttgtttctactttgcttcatgtttatgtgtctatttctcttctaa

SEQ ID NO: 81225 - protein, 193 aa, Arabidopsis thaliana
  peptide (1)..(193): Ceres Seq. ID no. 12658861
  misc_feature (21)..(74): Pfam Name: Zinc finger, C3HC4 type (RING finger) Pfam Description: Zinc finger, C3HC4 type (RING finger)
  misc_feature (1)..(193): Homolog of NCBI NO: 15235242 NR Description: putative protein; protein id: At4g28270.1
  misc_feature (8)..(138): Homolog of NCBI NO: 15236326 NR Description: E3 ubiquitin ligase, RMA1; protein id: supported by cDNA: gi_3164221 [Arabidopsis thaliana]
  misc_feature (132)..(193): Homolog of NCBI NO: 15236326 NR Description: E3 ubiquitin ligase, RMA1; protein id: supported by cDNA: gi_3164221 [Arabidopsis thaliana]
  misc_feature (14)..(96): Homolog of NCBI NO: 30687607 NR Description: zinc finger (C3HC4-type RING finger) protein [Arabidopsis thaliana] >gi|27311647|gb|AAO00789.1| putative RING finger protein [Arabidopsis thaliana] >gi|30023720|gb|AAP13393.1|
  misc_feature (133)..(193): Homolog of NCBI NO: 30687607 NR Description: zinc finger (C3HC4-type RING finger) protein [Arabidopsis thaliana] >gi|27311647|gb|AAO00789.1| putative RING finger protein [Arabidopsis thaliana] >gi|30023720|gb|AAP13393.1|
  misc_feature (3)..(105): Homolog of NCBI NO: 38346627 NR Description: OSJNBa0074L08.21 [Oryza sativa (japonica
  misc_feature (159)..(193): Homolog of NCBI NO: 38346627 NR Description: OSJNBa0074L08.21 [Oryza sativa (japonica
  misc_feature (17)..(118): Homolog of NCBI NO: 22795037 NR Description: putative RING protein [Populus x canescens]
  misc_feature (14)..(96): Homolog of NCBI NO: 7488309 NR Description: RING zinc finger protein F27G19.70 - Arabidopsis >gi|4972072|emb|CAB43879.1| putative RING zinc finger protein thaliana] >gi|7269601|emb|CAB81397.1| putative RING zinc finger
  misc_feature (6)..(151): Homolog of NCBI NO: 21553849 NR Description: putative RING zinc finger protein [Arabidopsis
MEIEKDEDDTTLVDSGGDFDCNICLDQVRDPVVTLCGHLFCWPCIHKWTYASNNSRQRVDQYDHKREPPKCPVCKSDVSEATLVPIYGRGQKAPQSGSNVPSRPTGPVYDLRGVGQRLGEGESQRYMYRMPDPVMGVVCEMVYRRLFGESSSNMAPYRDMNVRSRRRAMQAEESLSRVYLFLLCFMFMCLFLF

SEQ ID NO: 81226 - DNA, 1296 bp, Arabidopsis thaliana
  misc_feature (1)..(1296): Ceres Seq. ID no. 12658864
  misc_feature: MA Experiment ID: 20000235 Result: Up-regulated in Transcription
  misc_feature: MA Experiment 20000235 PARAMETER Experiment Name: At_Siliques_P Parameter: Age (day) Value: 21
  misc_feature: MA Experiment 20000235 PARAMETER Experiment Name: At_Siliques_P Parameter: Organism Value: A. thaliana
  misc_feature: MA Experiment 20000235 PARAMETER Experiment Name: At_Siliques_P Parameter: Plant Line Value: WS
  misc_feature: MA Experiment 20000235 PARAMETER Experiment Name: At_Siliques_P Parameter: Tissue Value: 5-10mm Siliques vs. Whole Plant
  misc_feature: MA Experiment ID: 20000264 Result: Up-regulated in Transcription
  misc_feature: MA Experiment 20000264 PARAMETER Experiment Name: At_Open_Flower_P Parameter: Age (day) Value: 21
  misc_feature: MA Experiment 20000264 PARAMETER Experiment Name: At_Open_Flower_P Parameter: Plant Line Value: WS
  misc_feature: MA Experiment 20000264 PARAMETER Experiment Name: At_Open_Flower_P Parameter: Tissue Value: Open Flower vs. Whole Plant
  misc_feature: MA Experiment ID: 20000265 Result: Up-regulated in Transcription
  misc_feature: MA Experiment 20000265 PARAMETER Experiment Name: At_Open_Flower_P Parameter: Age (day) Value: 21
  misc_feature: MA Experiment 20000265 PARAMETER Experiment Name: At_Open_Flower_P Parameter: Plant Line Value: WS
  misc_feature: MA Experiment 20000265 PARAMETER Experiment Name: At_Open_Flower_P Parameter: Tissue Value: Closed Flower vs. Whole Plant
  misc_feature: MA Experiment ID: 20000286 Result: Up-regulated in Transcription
  misc_feature: MA Experiment 20000286 PARAMETER Experiment Name: At_Open_Flower_P Parameter: Age (day) Value: 21
  misc_feature: MA Experiment 20000286 PARAMETER Experiment Name: At_Open_Flower_P Parameter: Plant Line Value: WS
  misc_feature: MA Experiment 20000286 PARAMETER Experiment Name: At_Open_Flower_P Parameter: Tissue Value: Half Open vs. Whole Plant
  misc_feature: MA Experiment ID: 20001247 Result: Down-regulated in Transcription
  misc_feature: MA Experiment 20001247 PARAMETER Experiment Name: At_Far-red-induction_P Parameter: Age (day) Value: 7
  misc_feature: MA Experiment 20001247 PARAMETER Experiment Name: At_Far-red-induction_P Parameter: Light Value: Far-red vs. White
  misc_feature: MA Experiment 20001247 PARAMETER Experiment Name: At_Far-red-induction_P Parameter: Organism Value: A. thaliana
  misc_feature: MA Experiment 20001247 PARAMETER Experiment Name: At_Far-red-induction_P Parameter: Plant Line Value: Columbia
  misc_feature: MA Experiment 20001247 PARAMETER Experiment Name: At_Far-red-induction_P Parameter: Timepoint (hr) Value: 1
  misc_feature: MA Experiment 20001247 PARAMETER Experiment Name: At_Far-red-induction_P Parameter: Tissue Value: Whole Plant
  misc_feature: MA Experiment ID: 20001911 Result: Down-regulated in Transcription
  misc_feature: MA Experiment 20001911 PARAMETER Experiment Name: At_Drought_Reproduction_P Parameter: Age (day) Value: 40
  misc_feature: MA Experiment 20001911 PARAMETER Experiment Name: At_Drought_Reproduction_P Parameter: Organism Value: A. thaliana
  misc_feature: MA Experiment 20001911 PARAMETER Experiment Name: At_Drought_Reproduction_P Parameter: Plant Line Value: WS
  misc_feature: MA Experiment 20001911 PARAMETER Experiment Name: At_Drought_Reproduction_P Parameter: Timepoint (day) Value: 10
  misc_feature: MA Experiment 20001911 PARAMETER Experiment Name: At_Drought_Reproduction_P Parameter: Tissue Value: Flowers
  misc_feature: MA Experiment 20001911 PARAMETER Experiment Name: At_Drought_Reproduction_P Parameter: Treatment Value: Drought vs. No Drought
atggttcccacaaggaacaggccaatgctacgaattctaggtttttttatatgtgcagctttcatctatctatcatttcgagatttgtggttgaatcacaaagggaaagcaaagttagggtttgtgaaaaggaacggaactcagtttgtggtggatgataagcctctttatgtaaatgggtggaactcgtattggttcatggaccatgcggttgatgaacatagcagaaaccttgtcggtgaaatgcttgaagctggagctaaaatgggtctcactgtttgtagaacttgggctttcaatgacggtggctacaatgctcttcagatctctcctggccgattcgatgagcgagtctttcaggctttggatcatgtaattgcagaagcgagaaagcatgatgttagattgttgcttagcttagtgaacaacttgcaagcttatggagggaagactcagtatgtgaaatgggcatggcaagaaggtgttggtcttagttcttccaatgattccttcttctttgatccatctatccgcaattacttcaagaattatctcaaggttctgctcaccaggaagaactctgtaacgggaatagagtacagaaacgatcctacgattttcgcttgggagttgataaacgagcctcgatgcacgactgatgtctctggcaaaactctccaagattggatagacgaaatgacgggattcattaagtcaatcgatgacaagcatctcctcacagtaggtctggaaggcttctatggtcctaatagcccgaaagggctcacagttaatccagaacagtgggcatcccagctcggaacagactttgttcaaaactctaactcctcaaacatagattttgcatccgttcatatctaccctgatcactggtttcataatcagacatttgaagagaagctaaagtttgtggtgaaatggatgcaatctcacatagaagatggattgaaagaactaaagaagccagttctcttcacagagtttggcctatcaaaccagaacaaggactacgaaccatcgcagcgagataagttctacagaatcatcttcgacgtggtttacaaatcagccaaaagaaagaagtcaggtgcaggcacattagtgtggcagctattcatggaaggcatggaaacattcaacgatgactttgggattgttccacatgaacaagattccatttacaaattgatgatagaacaatcttgcagattgggtaaagtcacaggacgtcttaaggaacaaaagttgaaagaactttgttctcacagacattga

SEQ ID NO: 81227 - protein, 431 aa, Arabidopsis thaliana
  peptide (1)..(431): Ceres Seq. ID no. 12658865
  misc_feature (46)..(372): Pfam Name: Cellulase (glycosyl hydrolase family 5) Pfam Description: Cellulase (glycosyl hydrolase family 5)
  misc_feature (1)..(431): Homolog of NCBI NO: 15235255 NR Description: glycosyl hydrolase family 5/cellulase
  misc_feature (3)..(430): Homolog of NCBI NO: 30681096 NR Description: glycosyl hydrolase family 5/cellulase endohydrolase) [Arabidopsis thaliana] >gi|30793940|gb|AAP40422.1|
  misc_feature (163)..(430): Homolog of NCBI NO: 25354515 NR Description: (1-4)-beta-mannan endohydrolase [imported] -
  misc_feature (3)..(134): Homolog of NCBI NO: 25354515 NR Description: (1-4)-beta-mannan endohydrolase [imported] -
  misc_feature (9)..(428): Homolog of NCBI NO: 34909462 NR Description: putative (1-4)-beta-mannan endohydrolase [Oryza
  misc_feature (32)..(415): Homolog of NCBI NO: 10178872 NR Description: (1-4)-beta-mannan endohydrolase [Coffea arabica]
  misc_feature (35)..(411): Homolog of NCBI NO: 15241093 NR Description: glycosyl hydrolase family 5/cellulase
  misc_feature (40)..(411): Homolog of NCBI NO: 34912090 NR Description: putative mannan endo-1,4-beta-mannosidase [Oryza
  misc_feature (10)..(411): Homolog of NCBI NO: 15239973 NR Description: glycosyl hydrolase family 5/cellulase
  misc_feature (10)..(424): Homolog of NCBI NO: 15228393 NR Description: glycosyl hydrolase family 5/cellulase
MVPTRNRPMLRILGFFICAAFIYLSFRDLWLNHKGKAKLGFVKRNGTQFVVDDKPLYVNGWNSYWFMDHAVDEHSRNLVGEMLEAGAKMGLTVCRTWAFNDGGYNALQISPGRFDERVFQALDHVIAEARKHDVRLLLSLVNNLQAYGGKTQYVKWAWQEGVGLSSSNDSFFFDPSIRNYFKNYLKVLLTRKNSVTGIEYRNDPTIFAWELINEPRCTTDVSGKTLQDWIDEMTGFIKSIDDKHLLTVGLEGFYGPNSPKGLTVNPEQWASQLGTDFVQNSNSSNIDFASVHIYPDHWFHNQTFEEKLKFVVKWMQSHIEDGLKELKKPVLFTEFGLSNQNKDYEPSQRDKFYRIIFDVVYKSAKRKKSGAGTLVWQLFMEGMETFNDDFGIVPHEQDSIYKLMIEQSCRLGKVTGRLKEQKLKELCSHRH

SEQ ID NO: 81228 - protein, 423 aa, Arabidopsis thaliana
  peptide (1)..(423): Ceres Seq. ID no. 12658866
  misc_feature (38)..(364): Pfam Name: Cellulase (glycosyl hydrolase family 5) Pfam Description: Cellulase (glycosyl hydrolase family 5)
  misc_feature (1)..(423): Homolog of NCBI NO: 15235255 NR Description: glycosyl hydrolase family 5/cellulase
  misc_feature (1)..(422): Homolog of NCBI NO: 30681096 NR Description: glycosyl hydrolase family 5/cellulase endohydrolase) [Arabidopsis thaliana] >gi|30793940|gb|AAP40422.1|
  misc_feature (155)..(422): Homolog of NCBI NO: 25354515 NR Description: (1-4)-beta-mannan endohydrolase [imported] -
  misc_feature (1)..(126): Homolog of NCBI NO: 25354515 NR Description: (1-4)-beta-mannan endohydrolase [imported] -
  misc_feature (1)..(420): Homolog of NCBI NO: 34909462 NR Description: putative (1-4)-beta-mannan endohydrolase [Oryza
  misc_feature (24)..(407): Homolog of NCBI NO: 10178872 NR Description: (1-4)-beta-mannan endohydrolase [Coffea arabica]
  misc_feature (27)..(403): Homolog of NCBI NO: 15241093 NR Description: glycosyl hydrolase family 5/cellulase
  misc_feature (32)..(403): Homolog of NCBI NO: 34912090 NR Description: putative mannan endo-1,4-beta-mannosidase [Oryza
  misc_feature (2)..(403): Homolog of NCBI NO: 15239973 NR Description: glycosyl hydrolase family 5/cellulase
  misc_feature (2)..(416): Homolog of NCBI NO: 15228393 NR Description: glycosyl hydrolase family 5/cellulase
MLRILGFFICAAFIYLSFRDLWLNHKGKAKLGFVKRNGTQFVVDDKPLYVNGWNSYWFMDHAVDEHSRNLVGEMLEAGAKMGLTVCRTWAFNDGGYNALQISPGRFDERVFQALDHVIAEARKHDVRLLLSLVNNLQAYGGKTQYVKWAWQEGVGLSSSNDSFFFDPSIRNYFKNYLKVLLTRKNSVTGIEYRNDPTIFAWELINEPRCTTDVSGKTLQDWIDEMTGFIKSIDDKHLLTVGLEGFYGPNSPKGLTVNPEQWASQLGTDFVQNSNSSNIDFASVHIYPDHWFHNQTFEEKLKFVVKWMQSHIEDGLKELKKPVLFTEFGLSNQNKDYEPSQRDKFYRIIFDVVYKSAKRKKSGAGTLVWQLFMEGMETFNDDFGIVPHEQDSIYKLMIEQSCRLGKVTGRLKEQKLKELCSHRH

SEQ ID NO: 81229 - protein, 365 aa, Arabidopsis thaliana
  peptide (1)..(365): Ceres Seq. ID no. 12658867
  misc_feature (1)..(306): Pfam Name: Cellulase (glycosyl hydrolase family 5) Pfam Description: Cellulase (glycosyl hydrolase family 5)
  misc_feature (1)..(365): Homolog of NCBI NO: 15235255 NR Description: glycosyl hydrolase family 5/cellulase
  misc_feature (1)..(364): Homolog of NCBI NO: 30681096 NR Description: glycosyl hydrolase family 5/cellulase endohydrolase) [Arabidopsis thaliana] >gi|30793940|gb|AAP40422.1|
  misc_feature (97)..(364): Homolog of NCBI NO: 25354515 NR Description: (1-4)-beta-mannan endohydrolase [imported] -
  misc_feature (1)..(68): Homolog of NCBI NO: 25354515 NR Description: (1-4)-beta-mannan endohydrolase [imported] -
  misc_feature (1)..(362): Homolog of NCBI NO: 34909462 NR Description: putative (1-4)-beta-mannan endohydrolase [Oryza
  misc_feature (1)..(349): Homolog of NCBI NO: 10178872 NR Description: (1-4)-beta-mannan endohydrolase [Coffea arabica]
  misc_feature (1)..(345): Homolog of NCBI NO: 15241093 NR Description: glycosyl hydrolase family 5/cellulase
  misc_feature (1)..(345): Homolog of NCBI NO: 34912090 NR Description: putative mannan endo-1,4-beta-mannosidase [Oryza
  misc_feature (1)..(345): Homolog of NCBI NO: 15239973 NR Description: glycosyl hydrolase family 5/cellulase
  misc_feature (1)..(358): Homolog of NCBI NO: 15228393 NR Description: glycosyl hydrolase family 5/cellulase
MDHAVDEHSRNLVGEMLEAGAKMGLTVCRTWAFNDGGYNALQISPGRFDERVFQALDHVIAEARKHDVRLLLSLVNNLQAYGGKTQYVKWAWQEGVGLSSSNDSFFFDPSIRNYFKNYLKVLLTRKNSVTGIEYRNDPTIFAWELINEPRCTTDVSGKTLQDWIDEMTGFIKSIDDKHLLTVGLEGFYGPNSPKGLTVNPEQWASQLGTDFVQNSNSSNIDFASVHIYPDHWFHNQTFEEKLKFVVKWMQSHIEDGLKELKKPVLFTEFGLSNQNKDYEPSQRDKFYRIIFDVVYKSAKRKKSGAGTLVWQLFMEGMETFNDDFGIVPHEQDSIYKLMIEQSCRLGKVTGRLKEQKLKELCSHRH

SEQ ID NO: 81230 - DNA, 1713 bp, Arabidopsis thaliana
  misc_feature (1)..(1713): Ceres Seq. ID no. 12658884
  misc_feature: MA Experiment ID: 108434 Result: Up-regulated in Transcription
  misc_feature: MA Experiment 108434 PARAMETER Experiment Name: At_Root_Tips_cDNA_P Parameter: Tissue Value: Root Tips
  misc_feature: MA Experiment ID: 108461 Result: Down-regulated in Transcription
  misc_feature: MA Experiment 108461 PARAMETER Experiment Name: At_Germinating_Seeds_cDNA_P Parameter: Age (day) Value: 1 vs. 0
  misc_feature: MA Experiment 108461 PARAMETER Experiment Name: At_Germinating_Seeds_cDNA_P Parameter: Tissue Value: Germinating Seeds
  misc_feature: MA Experiment ID: 108462 Result: Down-regulated in Transcription
  misc_feature: MA Experiment 108462 PARAMETER Experiment Name: At_Germinating_Seeds_cDNA_P Parameter: Age (day) Value: 2 vs. 0
  misc_feature: MA Experiment 108462 PARAMETER Experiment Name: At_Germinating_Seeds_cDNA_P Parameter: Tissue Value: Germinating Seeds
  misc_feature: MA Experiment ID: 108463 Result: Down-regulated in Transcription
  misc_feature: MA Experiment 108463 PARAMETER Experiment Name: At_Germinating_Seeds_cDNA_P Parameter: Age (day) Value: 3 vs. 0
  misc_feature: MA Experiment 108463 PARAMETER Experiment Name: At_Germinating_Seeds_cDNA_P Parameter: Tissue Value: Germinating Seeds
  misc_feature: MA Experiment ID: 108464 Result: Down-regulated in Transcription
  misc_feature: MA Experiment 108464 PARAMETER Experiment Name: At_Germinating_Seeds_cDNA_P Parameter: Age (day) Value: 4 vs. 0
  misc_feature: MA Experiment 108464 PARAMETER Experiment Name: At_Germinating_Seeds_cDNA_P Parameter: Tissue Value: Germinating Seeds
  misc_feature: MA Experiment ID: 108572 Result: Down-regulated in Transcription
  misc_feature: MA Experiment 108572 PARAMETER Experiment Name: At_Drought_cDNA_P Parameter: Timepoint (hr) Value: 1
  misc_feature: MA Experiment 108572 PARAMETER Experiment Name: At_Drought_cDNA_P Parameter: Tissue Value: Aerial
  misc_feature: MA Experiment 108572 PARAMETER Experiment Name: At_Drought_cDNA_P Parameter: Treatment Value: Drought vs. No Drought
  misc_feature: MA Experiment ID: 108595 Result: Down-regulated in Transcription
  misc_feature: MA Experiment 108595 PARAMETER Experiment Name: At_Ler-pi_Ovule_cDNA_P Parameter: Plant Line Value: null
  misc_feature: MA Experiment ID: 20000180 Result: Down-regulated in Transcription
  misc_feature: MA Experiment 20000180 PARAMETER Experiment Name: At_Germinating_Seeds_P Parameter: Age (hr) Value: 24 vs. 0
  misc_feature: MA Experiment 20000180 PARAMETER Experiment Name: At_Germinating_Seeds_P Parameter: Tissue Value: Germinating Seeds
  misc_feature: MA Experiment ID: 20001247 Result: Down-regulated in Transcription
  misc_feature: MA Experiment 20001247 PARAMETER Experiment Name: At_Far-red-induction_P Parameter: Age (day) Value: 7
  misc_feature: MA Experiment 20001247 PARAMETER Experiment Name: At_Far-red-induction_P Parameter: Light Value: Far-red vs. White
  misc_feature: MA Experiment 20001247 PARAMETER Experiment Name: At_Far-red-induction_P Parameter: Organism Value: A. thaliana
  misc_feature: MA Experiment 20001247 PARAMETER Experiment Name: At_Far-red-induction_P Parameter: Plant Line Value: Columbia
  misc_feature: MA Experiment 20001247 PARAMETER Experiment Name: At_Far-red-induction_P Parameter: Timepoint (hr) Value: 1
  misc_feature: MA Experiment 20001247 PARAMETER Experiment Name: At_Far-red-induction_P Parameter: Tissue Value: Whole Plant
  misc_feature: MA Experiment ID: 20001458 Result: Up-regulated in Transcription
  misc_feature: MA Experiment 20001458 PARAMETER Experiment Name: At_50mM_NH4NO3_L-to-H_P Parameter: Age (day) Value: Undefined
  misc_feature: MA Experiment 20001458 PARAMETER Experiment Name: At_50mM_NH4NO3_L-to-H_P Parameter: Organism Value: Undefined
  misc_feature: MA Experiment 20001458 PARAMETER Experiment Name: At_50mM_NH4NO3_L-to-H_P Parameter: Plant Line Value: Undefined
  misc_feature: MA Experiment 20001458 PARAMETER Experiment Name: At_50mM_NH4NO3_L-to-H_P Parameter: Timepoint (hr) Value: 2
  misc_feature: MA Experiment 20001458 PARAMETER Experiment Name: At_50mM_NH4NO3_L-to-H_P Parameter: Tissue Value: Siliques
  misc_feature: MA Experiment 20001458 PARAMETER Experiment Name: At_50mM_NH4NO3_L-to-H_P Parameter: Treatment Value: 50mM NH4NO3 vs. 100mM Manitol
  misc_feature: MA Experiment ID: 20001556 Result: Up-regulated in Transcription
  misc_feature: MA Experiment 20001556 PARAMETER Experiment Name: At_Drought_Soil_Dry_P Parameter: Age (day) Value: 26
  misc_feature: MA Experiment 20001556 PARAMETER Experiment Name: At_Drought_Soil_Dry_P Parameter: Organism Value: A. thaliana
  misc_feature: MA Experiment 20001556 PARAMETER Experiment Name: At_Drought_Soil_Dry_P Parameter: Plant Line Value: WS
  misc_feature: MA Experiment 20001556 PARAMETER Experiment Name: At_Drought_Soil_Dry_P Parameter: Post Timepoint (hr) Value: None
  misc_feature: MA Experiment 20001556 PARAMETER Experiment Name: At_Drought_Soil_Dry_P Parameter: Post-Treatment Value: None
  misc_feature: MA Experiment 20001556 PARAMETER Experiment Name: At_Drought_Soil_Dry_P Parameter: Timepoint (day) Value: 12
  misc_feature: MA Experiment 20001556 PARAMETER Experiment Name: At_Drought_Soil_Dry_P Parameter: Treatment Value: Drought vs. No Drought
  misc_feature: MA Experiment ID: 20001557 Result: Up-regulated in Transcription
  misc_feature: MA Experiment 20001557 PARAMETER Experiment Name: At_Drought_Soil_Dry_P Parameter: Age (day) Value: 27
  misc_feature: MA Experiment 20001557 PARAMETER Experiment Name: At_Drought_Soil_Dry_P Parameter: Organism Value: A. thaliana
  misc_feature: MA Experiment 20001557 PARAMETER Experiment Name: At_Drought_Soil_Dry_P Parameter: Plant Line Value: WS
  misc_feature: MA Experiment 20001557 PARAMETER Experiment Name: At_Drought_Soil_Dry_P Parameter: Post Timepoint (hr) Value: 3
  misc_feature: MA Experiment 20001557 PARAMETER Experiment Name: At_Drought_Soil_Dry_P Parameter: Post-Treatment Value: Re-Water vs. No Drought
  misc_feature: MA Experiment 20001557 PARAMETER Experiment Name: At_Drought_Soil_Dry_P Parameter: Timepoint (day) Value: 13
  misc_feature: MA Experiment 20001557 PARAMETER Experiment Name: At_Drought_Soil_Dry_P Parameter: Treatment Value: Drought vs. No Drought
  misc_feature: MA Experiment ID: 20001558 Result: Up-regulated in Transcription
  misc_feature: MA Experiment 20001558 PARAMETER Experiment Name: At_Drought_Soil_Dry_P Parameter: Age (day) Value: 27
  misc_feature: MA Experiment 20001558 PARAMETER Experiment Name: At_Drought_Soil_Dry_P Parameter: Organism Value: A. thaliana
  misc_feature: MA Experiment 20001558 PARAMETER Experiment Name: At_Drought_Soil_Dry_P Parameter: Plant Line Value: WS
  misc_feature: MA Experiment 20001558 PARAMETER Experiment Name: At_Drought_Soil_Dry_P Parameter: Post Timepoint (hr) Value: 6
  misc_feature: MA Experiment 20001558 PARAMETER Experiment Name: At_Drought_Soil_Dry_P Parameter: Post-Treatment Value: Re-Water vs. No Drought
  misc_feature: MA Experiment 20001558 PARAMETER Experiment Name: At_Drought_Soil_Dry_P Parameter: Timepoint (day) Value: 13
  misc_feature: MA Experiment 20001558 PARAMETER Experiment Name: At_Drought_Soil_Dry_P Parameter: Treatment Value: Drought vs. No Drought
  misc_feature: MA Experiment ID: 20001757 Result: Up-regulated in Transcription
  misc_feature: MA Experiment 20001757 PARAMETER Experiment Name: At_50mM_NH4NO3_L-to-H_P Parameter: Timepoint (hr) Value: 6
  misc_feature: MA Experiment 20001757 PARAMETER Experiment Name: At_50mM_NH4NO3_L-to-H_P Parameter: Tissue Value: Leaf
  misc_feature: MA Experiment 20001757 PARAMETER Experiment Name: At_50mM_NH4NO3_L-to-H_P Parameter: Treatment Value: 50mM NH4NO3 vs 100mM Mannitol
ctggagaacttagctcacttttgactctgtatctctctgtgtctctcttccccgttagtcttcgtcgtgacctttttgtagtattaagcaatgaagattaagacgttatcaagatcggttgatgaatacactcgagaaagaagtcaggatcttcagaggggtctttcacaacttcgacccaagtcttcgacctatggagaaggccgtggaataccagagagctcttacagctgccaaattagaaaagatatttgcaaggccgtttgttggagcaatggatggtcatcgtgatggagtctcatgtatggcgaagaacccaaattacctcaaaggaatcttctctgcttctatggatggagatattcgcctttgggatatctcttcaaggcgtacagtttgccaattccctggtcatcaaggtgctgtgcgtggtcttactgcatcaaccgatggaaatgtattggtttcatgcggaactgattgcactgttcgtttgtggaatgttcctcgtccttcacttgaagattctagcatttcatctgagaatttcattgagccatctgcaacctatgtctggaagaatgctttctgggctgttgatcatcagtttgaaggtgacctttttgctacggccggagctcaacttgatatatggaatcataataggtctcagccagttcagagtttccagtggggaactgactctgtaatatctgttcggtttaatcctggagagcctaatttattggctacatcagctagtgaccggagcataaccatatatgatctccgcttgtcttctgcggcaaggaaaattatcatgatgacaaaaacaaattcaattgcatggaaccccatggagcctatgaacctgacagctgctaatgaagatggaagttgctatagctttgatggtagaaagttggacgaagccaagtgcgtgcataaagatcatgtttctgcagtgatggatattgacttttcaccgactggtcgtgagtttgttacgggttcttatgatcgatctgtgagaatcttcccatacaatggaggacacagcagggaaatctaccatacaaagaggatgcagagagtattctgtgtcaaatatagctgtgatgctacatatgtaatatcgggcagtgatgacaccaatctcaggctatggaaggcaaaggcatcagagcaattgggagttattcttccaagggaacaaaagaagcatgagtacaacgaggctgtgaagaaccggtacaagcatctttctgaggttaagcgcattgtgagacacaggcacttgccaaaaccaatatacaaagcgatgggtatcattcgaactgtgaacgattcgaagagaagaaaagaagcacgaaggaaagctcacagtgctccaggaacagtggtcacagcacctctgcgcaaaagaaagatcatcaaagaagtggagtgactctactctttctccgtttgttcctttcaaggatgatgatacgtggagaggattgtattggtatagtgagggtaagattaggaacatgaacatttttgctgtgttgtaagcctttctttatgccattaagttattacccatttcgttttcttttttctcttcactacgtattgtgttcattaactattcgtttttggtgttacaaagctgatcttcaaagtaacattctgatttcaaagatttataaagtttggaattagacc

SEQ ID NO: 81231 - protein, 442 aa, Arabidopsis thaliana
  peptide (1)..(442): Ceres Seq. ID no. 12658885
  misc_feature (3)..(442): Homolog of NCBI NO: 13937179 NR Description: AT4g28450/F20O9_130 [Arabidopsis thaliana] AT4g28450/F20O9_130 [Arabidopsis thaliana]
  misc_feature (3)..(442): Homolog of NCBI NO: 17065094 NR Description: SOF1 protein-like protein [Arabidopsis thaliana]
  misc_feature (1)..(442): Homolog of NCBI NO: 30687972 NR Description: transducin / WD-40 repeat protein family
  misc_feature (14)..(442): Homolog of NCBI NO: 34904476 NR Description: putative DKFZP564O0463 protein [Oryza sativa
  misc_feature (280)..(442): Homolog of NCBI NO: 7488344 NR Description: SOF1 protein homolog F20O9.130 - Arabidopsis
  misc_feature (25)..(81): Homolog of NCBI NO: 7488344 NR Description: SOF1 protein homolog F20O9.130 - Arabidopsis
  misc_feature (165)..(213): Homolog of NCBI NO: 7488344 NR Description: SOF1 protein homolog F20O9.130 - Arabidopsis
  misc_feature (6)..(442): Homolog of NCBI NO: 38348458 NR Description: Unknown (protein for MGC:65348) [Mus musculus]
  misc_feature (6)..(442): Homolog of NCBI NO: 19913460 NR Description: DKFZP564O0463 protein [Homo sapiens]
  misc_feature (6)..(442): Homolog of NCBI NO: 22760354 NR Description: unnamed protein product [Homo sapiens]
MNTLEKEVRIFRGVFHNFDPSLRPMEKAVEYQRALTAAKLEKIFARPFVGAMDGHRDGVSCMAKNPNYLKGIFSASMDGDIRLWDISSRRTVCQFPGHQGAVRGLTASTDGNVLVSCGTDCTVRLWNVPRPSLEDSSISSENFIEPSATYVWKNAFWAVDHQFEGDLFATAGAQLDIWNHNRSQPVQSFQWGTDSVISVRFNPGEPNLLATSASDRSITIYDLRLSSAARKIIMMTKTNSIAWNPMEPMNLTAANEDGSCYSFDGRKLDEAKCVHKDHVSAVMDIDFSPTGREFVTGSYDRSVRIFPYNGGHSREIYHTKRMQRVFCVKYSCDATYVISGSDDTNLRLWKAKASEQLGVILPREQKKHEYNEAVKNRYKHLSEVKRIVRHRHLPKPIYKAMGIIRTVNDSKRRKEARRKAHSAPGTVVTAPLRKRKIIKEVE

SEQ ID NO: 81232 - protein, 418 aa, Arabidopsis thaliana
  peptide (1)..(418): Ceres Seq. ID no. 12658886
  misc_feature (1)..(418): Homolog of NCBI NO: 13937179 NR Description: AT4g28450/F20O9_130 [Arabidopsis thaliana] AT4g28450/F20O9_130 [Arabidopsis thaliana]
  misc_feature (1)..(418): Homolog of NCBI NO: 17065094 NR Description: SOF1 protein-like protein [Arabidopsis thaliana]
  misc_feature (1)..(418): Homolog of NCBI NO: 30687972 NR Description: transducin / WD-40 repeat protein family
  misc_feature (1)..(418): Homolog of NCBI NO: 34904476 NR Description: putative DKFZP564O0463 protein [Oryza sativa
  misc_feature (256)..(418): Homolog of NCBI NO: 7488344 NR Description: SOF1 protein homolog F20O9.130 - Arabidopsis
  misc_feature (1)..(57): Homolog of NCBI NO: 7488344 NR Description: SOF1 protein homolog F20O9.130 - Arabidopsis
  misc_feature (141)..(189): Homolog of NCBI NO: 7488344 NR Description: SOF1 protein homolog F20O9.130 - Arabidopsis
  misc_feature (1)..(418): Homolog of NCBI NO: 38348458 NR Description: Unknown (protein for MGC:65348) [Mus musculus]
  misc_feature (1)..(418): Homolog of NCBI NO: 19913460 NR Description: DKFZP564O0463 protein [Homo sapiens]
  misc_feature (1)..(418): Homolog of NCBI NO: 22760354 NR Description: unnamed protein product [Homo sapiens]
MEKAVEYQRALTAAKLEKIFARPFVGAMDGHRDGVSCMAKNPNYLKGIFSASMDGDIRLWDISSRRTVCQFPGHQGAVRGLTASTDGNVLVSCGTDCTVRLWNVPRPSLEDSSISSENFIEPSATYVWKNAFWAVDHQFEGDLFATAGAQLDIWNHNRSQPVQSFQWGTDSVISVRFNPGEPNLLATSASDRSITIYDLRLSSAARKIIMMTKTNSIAWNPMEPMNLTAANEDGSCYSFDGRKLDEAKCVHKDHVSAVMDIDFSPTGREFVTGSYDRSVRIFPYNGGHSREIYHTKRMQRVFCVKYSCDATYVISGSDDTNLRLWKAKASEQLGVILPREQKKHEYNEAVKNRYKHLSEVKRIVRHRHLPKPIYKAMGIIRTVNDSKRRKEARRKAHSAPGTVVTAPLRKRKIIKEVE

SEQ ID NO: 81233 - protein, 391 aa, Arabidopsis thaliana
  peptide (1)..(391): Ceres Seq. ID no. 12658887
  misc_feature (1)..(391): Homolog of NCBI NO: 13937179 NR Description: AT4g28450/F20O9_130 [Arabidopsis thaliana] AT4g28450/F20O9_130 [Arabidopsis thaliana]
  misc_feature (1)..(391): Homolog of NCBI NO: 17065094 NR Description: SOF1 protein-like protein [Arabidopsis thaliana]
  misc_feature (1)..(391): Homolog of NCBI NO: 30687972 NR Description: transducin / WD-40 repeat protein family
  misc_feature (1)..(391): Homolog of NCBI NO: 34904476 NR Description: putative DKFZP564O0463 protein [Oryza sativa
  misc_feature (229)..(391): Homolog of NCBI NO: 7488344 NR Description: SOF1 protein homolog F20O9.130 - Arabidopsis
  misc_feature (1)..(30): Homolog of NCBI NO: 7488344 NR Description: SOF1 protein homolog F20O9.130 - Arabidopsis
  misc_feature (114)..(162): Homolog of NCBI NO: 7488344 NR Description: SOF1 protein homolog F20O9.130 - Arabidopsis
  misc_feature (1)..(391): Homolog of NCBI NO: 38348458 NR Description: Unknown (protein for MGC:65348) [Mus musculus]
  misc_feature (1)..(391): Homolog of NCBI NO: 19913460 NR Description: DKFZP564O0463 protein [Homo sapiens]
  misc_feature (1)..(391): Homolog of NCBI NO: 22760354 NR Description: unnamed protein product [Homo sapiens]
MDGHRDGVSCMAKNPNYLKGIFSASMDGDIRLWDISSRRTVCQFPGHQGAVRGLTASTDGNVLVSCGTDCTVRLWNVPRPSLEDSSISSENFIEPSATYVWKNAFWAVDHQFEGDLFATAGAQLDIWNHNRSQPVQSFQWGTDSVISVRFNPGEPNLLATSASDRSITIYDLRLSSAARKIIMMTKTNSIAWNPMEPMNLTAANEDGSCYSFDGRKLDEAKCVHKDHVSAVMDIDFSPTGREFVTGSYDRSVRIFPYNGGHSREIYHTKRMQRVFCVKYSCDATYVISGSDDTNLRLWKAKASEQLGVILPREQKKHEYNEAVKNRYKHLSEVKRIVRHRHLPKPIYKAMGIIRTVNDSKRRKEARRKAHSAPGTVVTAPLRKRKIIKEVE

SEQ ID NO: 81234 - DNA, 2043 bp, Arabidopsis thaliana
  misc_feature (1)..(2043): Ceres Seq. ID no. 12658904
  misc_feature: MA Experiment ID: 20000307 Result: Up-regulated in Transcription
  misc_feature: MA Experiment 20000307 PARAMETER Experiment Name: At_Germinating_Seeds_Sub_P Parameter: Age (hr) Value: 24 vs. 0
  misc_feature: MA Experiment 20000307 PARAMETER Experiment Name: At_Germinating_Seeds_Sub_P Parameter: Organism Value: A. thaliana
  misc_feature: MA Experiment 20000307 PARAMETER Experiment Name: At_Germinating_Seeds_Sub_P Parameter: Plant Line Value: WS
  misc_feature: MA Experiment 20000307 PARAMETER Experiment Name: At_Germinating_Seeds_Sub_P Parameter: Tissue Value: Germinating Seeds
  misc_feature: MA Experiment ID: 20000315 Result: Down-regulated in Transcription
  misc_feature: MA Experiment 20000315 PARAMETER Experiment Name: At_14day_Shoots-Roots_Sub_P Parameter: Age (day) Value: 14
  misc_feature: MA Experiment 20000315 PARAMETER Experiment Name: At_14day_Shoots-Roots_Sub_P Parameter: Organism Value: A. thaliana
  misc_feature: MA Experiment 20000315 PARAMETER Experiment Name: At_14day_Shoots-Roots_Sub_P Parameter: Plant Line Value: WS
  misc_feature: MA Experiment 20000315 PARAMETER Experiment Name: At_14day_Shoots-Roots_Sub_P Parameter: Tissue Value: Shoots vs. Whole Plant
  misc_feature: MA Experiment ID: 20000328 Result: Down-regulated in Transcription
  misc_feature: MA Experiment 20000328 PARAMETER Experiment Name: At_42deg_Heat_Sub_P Parameter: Age (day) Value: 14
  misc_feature: MA Experiment 20000328 PARAMETER Experiment Name: At_42deg_Heat_Sub_P Parameter: Organism Value: A. thaliana
  misc_feature: MA Experiment 20000328 PARAMETER Experiment Name: At_42deg_Heat_Sub_P Parameter: Plant Line Value: WS
  misc_feature: MA Experiment 20000328 PARAMETER Experiment Name: At_42deg_Heat_Sub_P Parameter: Temperature (deg C) Value: 42 vs. 22
  misc_feature: MA Experiment 20000328 PARAMETER Experiment Name: At_42deg_Heat_Sub_P Parameter: Timepoint (hr) Value: 6
  misc_feature: MA Experiment 20000328 PARAMETER Experiment Name: At_42deg_Heat_Sub_P Parameter: Tissue Value: Aerial
atgatgagagtttctcaactccaactctgtcgcacttctctttcgtaccgtcttcgctctggttatcatcatcatcatcatcttcaccacagtttcttcaagctcatcaaacgtaactcaattcttgaatctccacctactaatgcatctcatcaatctccatccccgattactcctatggtcaacgcacgcgtcatgttcttctccacttcaacttcagctccacatccagagaaaatcaacaggacgtcgtcggagaatatccttcggatgatttcaagctatctatggatgaaagacaacccaaaactctgtttcagagtcatctctgcttttgcgtgtctcgtgggagctaagttcttgaatgttcaagttcctttcctcttcaaagtagctatagattggctctcttcatcttcattcgttgattcaaacccttacctagttgctgctttcgctactccttcctctgttctcattggttatggcattgctcgatctggttcttctgctttcaacgagcttcgtactagtgttttctccaaagtagctctccgcaccatacgaaccatctctagaaaagttctctcgcgtttacacgatctcgatcttcgttaccatctaaatagagacacaggtgctttgaacagaatcattgatcgtggaagccgcgctataaacacgattctctcagctatggttttcaacattatgcccacgatcttggagatatcaatggtctcatgtatattagcatacaaatttggagctgtttatgcattgattacttgtctttctgttggatcatatatagcattcacgttggctatgacgcagtggagaatcaagattagaaaagctatgaatgaagctgaaaacgatgctagcaccagagccattgactctctcataaactacgagactgttaagtatttcaacaacgaagattacgaagctcgaaagtacgatcagttacacgaaaattacgaagatgctgcattgcaaagtcggaaaagctttgccttattaaattttggacagagttttatatttagtacagctttgtcaacagcaatggtgttgtgttctcaggggattatgaatggtcagatgacagttggtgatttggtgatggtgaatggtctcctctttcaactgtctcttcctctttactttctcggggttgtttacagcgacaccgttcagggacttgtcgacatgaaatcgatgtttaagtttctagaggagagatctgatatcggagataaagatatagacaggaagctccctcctcttgttctgaaaggtggaagcattagttttgagaatgtacattttagttatctaccggagagaaagattttagatgggatttcatttgaggtaccggcagggaaaagtgtggcgattgtcggtagtagcggaagcggaaaatcgactattcttagaatgatattcaggttctttgatgtagattccggaaatgtaaaaattgatggtcaggatataaaggaagtgagactagagagtcttagaagctccattggagttgtccctcaagatactgtgctctttaacgacactatatttcacaacattcactatggaaacctttcagcaacagaggaagaggtgtacaatgcagctcgacgagcagcgattcacgatacgatcatgaaattccctgataaatattcgaccgcggtgggagaaagagggctgatgctgagtggtggagagaaacagagggtggcacttgctcgtgcatttctgaaatcaccagcaatcctattgtgtgacgaagcaacaagtgcactcgacagtaaaaccgaggcagagataatgaaaacgctgaggtcgctagcgagtaacaggacttgcattttcattgcacatagactgaccactgcaatgcaatgtgatgagatattagtaatggagaaaggaaaagtggtggaaaaagggacacacgaagtgttgttggggaaatctggcagatacgctaaattatggacacaacaaaacagtaaattggaggtgtga

SEQ ID NO: 81235 - protein, 680 aa, Arabidopsis thaliana
  peptide (1)..(680): Ceres Seq. ID no. 12658905
  misc_feature (108)..(390): Pfam Name: ABC transporter transmembrane region Pfam Description: ABC transporter transmembrane region
  misc_feature (1)..(680): Homolog of NCBI NO: 18417233 NR Description: ABC transporter family protein; protein id:
  misc_feature (2)..(680): Homolog of NCBI NO: 7445997 NR Description: probable ABC-type transport protein T5F17.80 -
  misc_feature (34)..(680): Homolog of NCBI NO: 15237155 NR Description: ABC transporter family protein; protein id: supported by cDNA: gi_9964120 [Arabidopsis thaliana]
  misc_feature (34)..(680): Homolog of NCBI NO: 9187883 NR Description: mitochondrial half-ABC transporter [Arabidopsis
  misc_feature (57)..(679): Homolog of NCBI NO: 8928549 NR Description: ATP-binding cassette, sub-family B, member 7,
  misc_feature (57)..(679): Homolog of NCBI NO: 13623447 NR Description: ATP-binding cassette, sub-family B (MDR/TAP),
  misc_feature (57)..(679): Homolog of NCBI NO: 30584297 NR Description: Homo sapiens ATP-binding cassette, sub-family B
  misc_feature (59)..(679): Homolog of NCBI NO: 5902709 NR Description: ATP-binding cassette, sub-family B, member 7,
  misc_feature (57)..(679): Homolog of NCBI NO: 5702098 NR Description: ABC transporter [Homo sapiens]
  misc_feature (57)..(679): Homolog of NCBI NO: 3228279 NR Description: ABC transporter 7 protein [Homo sapiens]
MMRVSQLQLCRTSLSYRLRSGYHHHHHLHHSFFKLIKRNSILESPPTNASHQSPSPITPMVNARVMFFSTSTSAPHPEKINRTSSENILRMISSYLWMKDNPKLCFRVISAFACLVGAKFLNVQVPFLFKVAIDWLSSSSFVDSNPYLVAAFATPSSVLIGYGIARSGSSAFNELRTSVFSKVALRTIRTISRKVLSRLHDLDLRYHLNRDTGALNRIIDRGSRAINTILSAMVFNIMPTILEISMVSCILAYKFGAVYALITCLSVGSYIAFTLAMTQWRIKIRKAMNEAENDASTRAIDSLINYETVKYFNNEDYEARKYDQLHENYEDAALQSRKSFALLNFGQSFIFSTALSTAMVLCSQGIMNGQMTVGDLVMVNGLLFQLSLPLYFLGVVYSDTVQGLVDMKSMFKFLEERSDIGDKDIDRKLPPLVLKGGSISFENVHFSYLPERKILDGISFEVPAGKSVAIVGSSGSGKSTILRMIFRFFDVDSGNVKIDGQDIKEVRLESLRSSIGVVPQDTVLFNDTIFHNIHYGNLSATEEEVYNAARRAAIHDTIMKFPDKYSTAVGERGLMLSGGEKQRVALARAFLKSPAILLCDEATSALDSKTEAEIMKTLRSLASNRTCIFIAHRLTTAMQCDEILVMEKGKVVEKGTHEVLLGKSGRYAKLWTQQNSKLEV

SEQ ID NO: 81236 - protein, 679 aa, Arabidopsis thaliana
  peptide (1)..(679): Ceres Seq. ID no. 12658906
  misc_feature (107)..(389): Pfam Name: ABC transporter transmembrane region Pfam Description: ABC transporter transmembrane region
  misc_feature (1)..(679): Homolog of NCBI NO: 18417233 NR Description: ABC transporter family protein; protein id:
  misc_feature (1)..(679): Homolog of NCBI NO: 7445997 NR Description: probable ABC-type transport protein T5F17.80 -
  misc_feature (33)..(679): Homolog of NCBI NO: 15237155 NR Description: ABC transporter family protein; protein id: supported by cDNA: gi_9964120 [Arabidopsis thaliana]
  misc_feature (33)..(679): Homolog of NCBI NO: 9187883 NR Description: mitochondrial half-ABC transporter [Arabidopsis
  misc_feature (56)..(678): Homolog of NCBI NO: 8928549 NR Description: ATP-binding cassette, sub-family B, member 7,
  misc_feature (56)..(678): Homolog of NCBI NO: 13623447 NR Description: ATP-binding cassette, sub-family B (MDR/TAP),
  misc_feature (56)..(678): Homolog of NCBI NO: 30584297 NR Description: Homo sapiens ATP-binding cassette, sub-family B
  misc_feature (58)..(678): Homolog of NCBI NO: 5902709 NR Description: ATP-binding cassette, sub-family B, member 7,
  misc_feature (56)..(678): Homolog of NCBI NO: 5702098 NR Description: ABC transporter [Homo sapiens]
  misc_feature (56)..(678): Homolog of NCBI NO: 3228279 NR Description: ABC transporter 7 protein [Homo sapiens]
MRVSQLQLCRTSLSYRLRSGYHHHHHLHHSFFKLIKRNSILESPPTNASHQSPSPITPMVNARVMFFSTSTSAPHPEKINRTSSENILRMISSYLWMKDNPKLCFRVISAFACLVGAKFLNVQVPFLFKVAIDWLSSSSFVDSNPYLVAAFATPSSVLIGYGIARSGSSAFNELRTSVFSKVALRTIRTISRKVLSRLHDLDLRYHLNRDTGALNRIIDRGSRAINTILSAMVFNIMPTILEISMVSCILAYKFGAVYALITCLSVGSYIAFTLAMTQWRIKIRKAMNEAENDASTRAIDSLINYETVKYFNNEDYEARKYDQLHENYEDAALQSRKSFALLNFGQSFIFSTALSTAMVLCSQGIMNGQMTVGDLVMVNGLLFQLSLPLYFLGVVYSDTVQGLVDMKSMFKFLEERSDIGDKDIDRKLPPLVLKGGSISFENVHFSYLPERKILDGISFEVPAGKSVAIVGSSGSGKSTILRMIFRFFDVDSGNVKIDGQDIKEVRLESLRSSIGVVPQDTVLFNDTIFHNIHYGNLSATEEEVYNAARRAAIHDTIMKFPDKYSTAVGERGLMLSGGEKQRVALARAFLKSPAILLCDEATSALDSKTEAEIMKTLRSLASNRTCIFIAHRLTTAMQCDEILVMEKGKVVEKGTHEVLLGKSGRYAKLWTQQNSKLEV

SEQ ID NO: 81237 - protein, 621 aa, Arabidopsis thaliana
  peptide (1)..(621): Ceres Seq. ID no. 12658907
  misc_feature (49)..(331): Pfam Name: ABC transporter transmembrane region Pfam Description: ABC transporter transmembrane region
  misc_feature (1)..(621): Homolog of NCBI NO: 18417233 NR Description: ABC transporter family protein; protein id:
  misc_feature (1)..(621): Homolog of NCBI NO: 7445997 NR Description: probable ABC-type transport protein T5F17.80 -
  misc_feature (1)..(621): Homolog of NCBI NO: 15237155 NR Description: ABC transporter family protein; protein id: supported by cDNA: gi_9964120 [Arabidopsis thaliana]
  misc_feature (1)..(621): Homolog of NCBI NO: 9187883 NR Description: mitochondrial half-ABC transporter [Arabidopsis
  misc_feature (1)..(620): Homolog of NCBI NO: 8928549 NR Description: ATP-binding cassette, sub-family B, member 7,
  misc_feature (1)..(620): Homolog of NCBI NO: 13623447 NR Description: ATP-binding cassette, sub-family B (MDR/TAP),
  misc_feature (1)..(620): Homolog of NCBI NO: 30584297 NR Description: Homo sapiens ATP-binding cassette, sub-family B
  misc_feature (1)..(620): Homolog of NCBI NO: 5902709 NR Description: ATP-binding cassette, sub-family B, member 7,
  misc_feature (1)..(620): Homolog of NCBI NO: 5702098 NR Description: ABC transporter [Homo sapiens]
  misc_feature (1)..(620): Homolog of NCBI NO: 3228279 NR Description: ABC transporter 7 protein [Homo sapiens]
MVNARVMFFSTSTSAPHPEKINRTSSENILRMISSYLWMKDNPKLCFRVISAFACLVGAKFLNVQVPFLFKVAIDWLSSSSFVDSNPYLVAAFATPSSVLIGYGIARSGSSAFNELRTSVFSKVALRTIRTISRKVLSRLHDLDLRYHLNRDTGALNRIIDRGSRAINTILSAMVFNIMPTILEISMVSCILAYKFGAVYALITCLSVGSYIAFTLAMTQWRIKIRKAMNEAENDASTRAIDSLINYETVKYFNNEDYEARKYDQLHENYEDAALQSRKSFALLNFGQSFIFSTALSTAMVLCSQGIMNGQMTVGDLVMVNGLLFQLSLPLYFLGVVYSDTVQGLVDMKSMFKFLEERSDIGDKDIDRKLPPLVLKGGSISFENVHFSYLPERKILDGISFEVPAGKSVAIVGSSGSGKSTILRMIFRFFDVDSGNVKIDGQDIKEVRLESLRSSIGVVPQDTVLFNDTIFHNIHYGNLSATEEEVYNAARRAAIHDTIMKFPDKYSTAVGERGLMLSGGEKQRVALARAFLKSPAILLCDEATSALDSKTEAEIMKTLRSLASNRTCIFIAHRLTTAMQCDEILVMEKGKVVEKGTHEVLLGKSGRYAKLWTQQNSKLEV

SEQ ID NO: 81238 - DNA, 1299 bp, Arabidopsis thaliana
  misc_feature (1)..(1299): Ceres Seq. ID no. 12658938
  misc_feature: MA Experiment ID: 20000185 Result: Up-regulated in Transcription
  misc_feature: MA Experiment 20000185 PARAMETER Experiment Name: At_Roots__P Parameter: Age (day) Value: 7 vs. 21
  misc_feature: MA Experiment 20000185 PARAMETER Experiment Name: At_Roots__P Parameter: Organism Value: A. thaliana
  misc_feature: MA Experiment 20000185 PARAMETER Experiment Name: At_Roots__P Parameter: Tissue Value: Roots vs. Whole Plant
  misc_feature: MA Experiment ID: 20000460 Result: Down-regulated in Transcription
  misc_feature: MA Experiment 20000460 PARAMETER Experiment Name: At_10percent_PEG_P Parameter: Age (day) Value: 12
  misc_feature: MA Experiment 20000460 PARAMETER Experiment Name: At_10percent_PEG_P Parameter: Organism Value: A. thaliana
  misc_feature: MA Experiment 20000460 PARAMETER Experiment Name: At_10percent_PEG_P Parameter: Plant Line Value: WS
  misc_feature: MA Experiment 20000460 PARAMETER Experiment Name: At_10percent_PEG_P Parameter: Timepoint (day) Value: 12
  misc_feature: MA Experiment 20000460 PARAMETER Experiment Name: At_10percent_PEG_P Parameter: Tissue Value: Whole Plant
  misc_feature: MA Experiment 20000460 PARAMETER Experiment Name: At_10percent_PEG_P Parameter: Treatment Value: 10percent PEG vs. No Treatment
atgtatcaaatcttctttttctttcttcctctcctccacagttatgcctctgcccagactcctcctccgttcagaaacggtgacctcgtcgcaaattttgagccgagtttagccgtcgtcaccggagttctcgccatcatgttcgcactcactttcgtcctcctcgtctacgctaagtgctgccacatcgatctccgatcaggttccggcgacagaagaaggcacgatcgccggctcagacaaggaatattctttaaccggtcaacggcatcatcggatcgattctctggtttagacaaaacagcaatcgagtctcttcctctgtttagattctctgctttgaaaggatcaaaacaaggtcttgattgttctgtctgtttgtctaaattcgaaagtgttgagattcttagattgttgcctaagtgtagacacgctttccacatcggatgtatcgatcagtggcttgagcaacacgcaacttgtcctctttgcagagatagagtctcaatggaagaagattcctctgttctcactaacggaaacagtttcaggttcttgaatcagtctgagattagagaagattcgagcttggagctttacatcgagagagaagaagaagaagaaagaatacacagagaagaacttagtgggtcgtcgagattcagcatcggagagagtttccggaagattctgaaattaggtaataaagaaaaaacgttacttgatgaacacgtgaacgataaagatgagaagaagcttatgcacaagttcaatcataggatcgttgtgtcggatgttgttttcaagaatcgttggagcaacgtgagttcatcagatttgatgtttttgaattccgagatggttaattcgatttctagcgagagattttcttcattggatcatgtgaagagaggagatgaagaggatcagataggtatcttgcgaatcaaggaagagatggaagcgaagagaatgttggagaacaagttaacttcgatgacaactatgttttcctcggaaaacggagactctggttcgaaatcaagaagcgttatgatcgaaccaggacgaagatcggtgtctgacatcactgcggttcctagactcagtatatcgattcatggagattgcagcggttcagccgcagagactgcgtctgcgttacaaaacggtgggaatgagacggaggagagaagacggcgtttgtggctgccgatcgctagaaaaactgctcaatggtttgctaacagagaaaaaagaagtcaaattaacacaacacaccaacactttgatgtttag

SEQ ID NO: 81239 - protein, 432 aa, Arabidopsis thaliana
  peptide (1)..(432): Ceres Seq. ID no. 12658939
  misc_feature (123)..(164): Pfam Name: Zinc finger, C3HC4 type (RING finger) Pfam Description: Zinc finger, C3HC4 type (RING finger)
  misc_feature (1)..(432): Homolog of NCBI NO: 15235482 NR Description: putative protein; protein id: At4g28890.1
  misc_feature (4)..(353): Homolog of NCBI NO: 15225285 NR Description: putative RING zinc finger protein; protein id: [Arabidopsis thaliana] >gi|25411956|pir||B84584 probable RING
  misc_feature (354)..(432): Homolog of NCBI NO: 15225285 NR Description: putative RING zinc finger protein; protein id: [Arabidopsis thaliana] >gi|25411956|pir||B84584 probable RING
  misc_feature (20)..(195): Homolog of NCBI NO: 15239252 NR Description: putative protein; protein id: At5g05810.1
  misc_feature (11)..(173): Homolog of NCBI NO: 7487705 NR Description: hypothetical protein T5J17.240 - Arabidopsis
  misc_feature (11)..(173): Homolog of NCBI NO: 25407810 NR Description: hypothetical protein AT4g40070 [imported] - thaliana >gi|5918310|emb|CAB38920.2| putative protein thaliana] >gi|7271062|emb|CAB80670.1| putative protein
  misc_feature (21)..(189): Homolog of NCBI NO: 15237991 NR Description: RING-H2 zinc finger protein-like; protein id:
  misc_feature (37)..(177): Homolog of NCBI NO: 20152976 NR Description: similar to A. thaliana C3HC4-type RING zinc
  misc_feature (31)..(229): Homolog of NCBI NO: 6017119 NR Description: unknown protein [Arabidopsis thaliana]
  misc_feature (19)..(229): Homolog of NCBI NO: 15228302 NR Description: putative RING zinc finger protein; protein id: supported by cDNA: 4581., supported by cDNA: gi_17065577, by cDNA: gi_20148584 [Arabidopsis thaliana]
MYQIFFFFLPLLHSYASAQTPPPFRNGDLVANFEPSLAVVTGVLAIMFALTFVLLVYAKCCHIDLRSGSGDRRRHDRRLRQGIFFNRSTASSDRFSGLDKTAIESLPLFRFSALKGSKQGLDCSVCLSKFESVEILRLLPKCRHAFHIGCIDQWLEQHATCPLCRDRVSMEEDSSVLTNGNSFRFLNQSEIREDSSLELYIEREEEEERIHREELSGSSRFSIGESFRKILKLGNKEKTLLDEHVNDKDEKKLMHKFNHRIVVSDVVFKNRWSNVSSSDLMFLNSEMVNSISSERFSSLDHVKRGDEEDQIGILRIKEEMEAKRMLENKLTSMTTMFSSENGDSGSKSRSVMIEPGRRSVSDITAVPRLSISIHGDCSGSAAETASALQNGGNETEERRRRLWLPIARKTAQWFANREKRSQINTTHQHFDV

SEQ ID NO: 81240 - protein, 386 aa, Arabidopsis thaliana
  peptide (1)..(386): Ceres Seq. ID no. 12658940
  misc_feature (77)..(118): Pfam Name: Zinc finger, C3HC4 type (RING finger) Pfam Description: Zinc finger, C3HC4 type (RING finger)
  misc_feature (1)..(386): Homolog of NCBI NO: 15235482 NR Description: putative protein; protein id: At4g28890.1
  misc_feature (1)..(307): Homolog of NCBI NO: 15225285 NR Description: putative RING zinc finger protein; protein id: [Arabidopsis thaliana] >gi|25411956|pir||B84584 probable RING
  misc_feature (308)..(386): Homolog of NCBI NO: 15225285 NR Description: putative RING zinc finger protein; protein id: [Arabidopsis thaliana] >gi|25411956|pir||B84584 probable RING
  misc_feature (1)..(149): Homolog of NCBI NO: 15239252 NR Description: putative protein; protein id: At5g05810.1
  misc_feature (1)..(127): Homolog of NCBI NO: 7487705 NR Description: hypothetical protein T5J17.240 - Arabidopsis
  misc_feature (1)..(127): Homolog of NCBI NO: 25407810 NR Description: hypothetical protein AT4g40070 [imported] - thaliana >gi|5918310|emb|CAB38920.2| putative protein thaliana] >gi|7271062|emb|CAB80670.1| putative protein
  misc_feature (1)..(143): Homolog of NCBI NO: 15237991 NR Description: RING-H2 zinc finger protein-like; protein id:
  misc_feature (1)..(131): Homolog of NCBI NO: 20152976 NR Description: similar to A. thaliana C3HC4-type RING zinc
  misc_feature (1)..(183): Homolog of NCBI NO: 6017119 NR Description: unknown protein [Arabidopsis thaliana]
  misc_feature (1)..(183): Homolog of NCBI NO: 15228302 NR Description: putative RING zinc finger protein; protein id: supported by cDNA: 4581., supported by cDNA: gi_17065577, by cDNA: gi_20148584 [Arabidopsis thaliana]
MFALTFVLLVYAKCCHIDLRSGSGDRRRHDRRLRQGIFFNRSTASSDRFSGLDKTAIESLPLFRFSALKGSKQGLDCSVCLSKFESVEILRLLPKCRHAFHIGCIDQWLEQHATCPLCRDRVSMEEDSSVLTNGNSFRFLNQSEIREDSSLELYIEREEEEERIHREELSGSSRFSIGESFRKILKLGNKEKTLLDEHVNDKDEKKLMHKFNHRIVVSDVVFKNRWSNVSSSDLMFLNSEMVNSISSERFSSLDHVKRGDEEDQIGILRIKEEMEAKRMLENKLTSMTTMFSSENGDSGSKSRSVMIEPGRRSVSDITAVPRLSISIHGDCSGSAAETASALQNGGNETEERRRRLWLPIARKTAQWFANREKRSQINTTHQHFDV

SEQ ID NO: 81241 - protein, 263 aa, Arabidopsis thaliana
  peptide (1)..(263): Ceres Seq. ID no. 12658941
  misc_feature (1)..(263): Homolog of NCBI NO: 15235482 NR Description: putative protein; protein id: At4g28890.1
  misc_feature (1)..(184): Homolog of NCBI NO: 15225285 NR Description: putative RING zinc finger protein; protein id: [Arabidopsis thaliana] >gi|25411956|pir||B84584 probable RING
  misc_feature (185)..(263): Homolog of NCBI NO: 15225285 NR Description: putative RING zinc finger protein; protein id: [Arabidopsis thaliana] >gi|25411956|pir||B84584 probable RING
  misc_feature (1)..(26): Homolog of NCBI NO: 15239252 NR Description: putative protein; protein id: At5g05810.1
  misc_feature (1)..(20): Homolog of NCBI NO: 15237991 NR Description: RING-H2 zinc finger protein-like; protein id:
  misc_feature (1)..(60): Homolog of NCBI NO: 6017119 NR Description: unknown protein [Arabidopsis thaliana]
  misc_feature (1)..(60): Homolog of NCBI NO: 15228302 NR Description: putative RING zinc finger protein; protein id: supported by cDNA: 4581., supported by cDNA: gi_17065577, by cDNA: gi_20148584 [Arabidopsis thaliana]
  misc_feature (1)..(60): Homolog of NCBI NO: 21593806 NR Description: putative RING zinc finger protein [Arabidopsis
  misc_feature (1)..(60): Homolog of NCBI NO: 25456278 NR Description: probable zinc finger protein [imported] - thaliana >gi|3873408|gb|AAC77829.1| putative zinc finger protein
  misc_feature (1)..(40): Homolog of NCBI NO: 18396583 NR Description: expressed protein; protein id: At3g03550.1, by cDNA: 152633. [Arabidopsis thaliana]
MEEDSSVLTNGNSFRFLNQSEIREDSSLELYIEREEEEERIHREELSGSSRFSIGESFRKILKLGNKEKTLLDEHVNDKDEKKLMHKFNHRIVVSDVVFKNRWSNVSSSDLMFLNSEMVNSISSERFSSLDHVKRGDEEDQIGILRIKEEMEAKRMLENKLTSMTTMFSSENGDSGSKSRSVMIEPGRRSVSDITAVPRLSISIHGDCSGSAAETASALQNGGNETEERRRRLWLPIARKTAQWFANREKRSQINTTHQHFDV

SEQ ID NO: 81242 - DNA, 2010 bp, Arabidopsis thaliana
  misc_feature (1)..(2010): Ceres Seq. ID no. 12658957
  misc_feature: MA Experiment ID: 20000171 Result: Down-regulated in Transcription
  misc_feature: MA Experiment 20000171 PARAMETER Experiment Name: At_42deg_Heat_P Parameter: Age (day) Value: 14
  misc_feature: MA Experiment 20000171 PARAMETER Experiment Name: At_42deg_Heat_P Parameter: Organism Value: A. thaliana
  misc_feature: MA Experiment 20000171 PARAMETER Experiment Name: At_42deg_Heat_P Parameter: Plant Line Value: WS
  misc_feature: MA Experiment 20000171 PARAMETER Experiment Name: At_42deg_Heat_P Parameter: Temperature (deg C) Value: 42 vs. 22
  misc_feature: MA Experiment 20000171 PARAMETER Experiment Name: At_42deg_Heat_P Parameter: Timepoint (hr) Value: 1
  misc_feature: MA Experiment 20000171 PARAMETER Experiment Name: At_42deg_Heat_P Parameter: Tissue Value: Aerial
  misc_feature: MA Experiment ID: 20000173 Result: Down-regulated in Transcription
  misc_feature: MA Experiment 20000173 PARAMETER Experiment Name: At_42deg_Heat_P Parameter: Age (day) Value: 14
  misc_feature: MA Experiment 20000173 PARAMETER Experiment Name: At_42deg_Heat_P Parameter: Organism Value: A. thaliana
  misc_feature: MA Experiment 20000173 PARAMETER Experiment Name: At_42deg_Heat_P Parameter: Plant Line Value: WS
  misc_feature: MA Experiment 20000173 PARAMETER Experiment Name: At_42deg_Heat_P Parameter: Temperature (deg C) Value: 42 vs. 22
  misc_feature: MA Experiment 20000173 PARAMETER Experiment Name: At_42deg_Heat_P Parameter: Timepoint (hr) Value: 6
  misc_feature: MA Experiment 20000173 PARAMETER Experiment Name: At_42deg_Heat_P Parameter: Tissue Value: Aerial
  misc_feature: MA Experiment ID: 20000182 Result: Up-regulated in Transcription
  misc_feature: MA Experiment 20000182 PARAMETER Experiment Name: At_2mM_SA_P Parameter: Age (day) Value: 14
  misc_feature: MA Experiment 20000182 PARAMETER Experiment Name: At_2mM_SA_P Parameter: Organism Value: A. thaliana
  misc_feature: MA Experiment 20000182 PARAMETER Experiment Name: At_2mM_SA_P Parameter: Plant Line Value: WS
  misc_feature: MA Experiment 20000182 PARAMETER Experiment Name: At_2mM_SA_P Parameter: Timepoint (hr) Value: 6
  misc_feature: MA Experiment 20000182 PARAMETER Experiment Name: At_2mM_SA_P Parameter: Tissue Value: Aerial
  misc_feature: MA Experiment 20000182 PARAMETER Experiment Name: At_2mM_SA_P Parameter: Treatment Value: 2mM SA vs. No Treatment
  misc_feature: MA Experiment ID: 20000184 Result: Down-regulated in Transcription
  misc_feature: MA Experiment 20000184 PARAMETER Experiment Name: At_Shoots__P Parameter: Age (day) Value: 7
  misc_feature: MA Experiment 20000184 PARAMETER Experiment Name: At_Shoots__P Parameter: Tissue Value: Shoots vs. Whole Plant
  misc_feature: MA Experiment ID: 20000185 Result: Down-regulated in Transcription
  misc_feature: MA Experiment 20000185 PARAMETER Experiment Name: At_Roots__P Parameter: Age (day) Value: 7 vs. 21
  misc_feature: MA Experiment 20000185 PARAMETER Experiment Name: At_Roots__P Parameter: Organism Value: A. thaliana
  misc_feature: MA Experiment 20000185 PARAMETER Experiment Name: At_Roots__P Parameter: Tissue Value: Roots vs. Whole Plant
  misc_feature: MA Experiment ID: 20000234 Result: Down-regulated in Transcription
  misc_feature: MA Experiment 20000234 PARAMETER Experiment Name: At_Siliques_P Parameter: Age (day) Value: 21
  misc_feature: MA Experiment 20000234 PARAMETER Experiment Name: At_Siliques_P Parameter: Organism Value: A. thaliana
  misc_feature: MA Experiment 20000234 PARAMETER Experiment Name: At_Siliques_P Parameter: Plant Line Value: WS
  misc_feature: MA Experiment 20000234 PARAMETER Experiment Name: At_Siliques_P Parameter: Tissue Value: Less Than 5mm Siliques vs. Whole Plant
  misc_feature: MA Experiment ID: 20000235 Result: Down-regulated in Transcription
  misc_feature: MA Experiment 20000235 PARAMETER Experiment Name: At_Siliques_P Parameter: Age (day) Value: 21
  misc_feature: MA Experiment 20000235 PARAMETER Experiment Name: At_Siliques_P Parameter: Organism Value: A. thaliana
  misc_feature: MA Experiment 20000235 PARAMETER Experiment Name: At_Siliques_P Parameter: Plant Line Value: WS
  misc_feature: MA Experiment 20000235 PARAMETER Experiment Name: At_Siliques_P Parameter: Tissue Value: 5-10mm Siliques vs. Whole Plant
  misc_feature: MA Experiment ID: 20000286 Result: Down-regulated in Transcription
  misc_feature: MA Experiment 20000286 PARAMETER Experiment Name: At_Open_Flower_P Parameter: Age (day) Value: 21
  misc_feature: MA Experiment 20000286 PARAMETER Experiment Name: At_Open_Flower_P Parameter: Plant Line Value: WS
  misc_feature: MA Experiment 20000286 PARAMETER Experiment Name: At_Open_Flower_P Parameter: Tissue Value: Half Open vs. Whole Plant
  misc_feature: MA Experiment ID: 20000438 Result: Down-regulated in Transcription
  misc_feature: MA Experiment 20000438 PARAMETER Experiment Name: At_Shoots__P Parameter: Age (day) Value: 14
  misc_feature: MA Experiment 20000438 PARAMETER Experiment Name: At_Shoots__P Parameter: Tissue Value: Shoots vs. Whole Plant
  misc_feature: MA Experiment ID: 20000439 Result: Down-regulated in Transcription
  misc_feature: MA Experiment 20000439 PARAMETER Experiment Name: At_Roots__P Parameter: Age (day) Value: 14 vs. 21
  misc_feature: MA Experiment 20000439 PARAMETER Experiment Name: At_Roots__P Parameter: Organism Value: A. thaliana
  misc_feature: MA Experiment 20000439 PARAMETER Experiment Name: At_Roots__P Parameter: Tissue Value: Roots vs. Whole Plant
  misc_feature: MA Experiment ID: 20000573 Result: Down-regulated in Transcription
  misc_feature: MA Experiment 20000573 PARAMETER Experiment Name: At_100uM_ABA_Mutants__P Parameter: Organism Value: A. thaliana
  misc_feature: MA Experiment 20000573 PARAMETER Experiment Name: At_100uM_ABA_Mutants__P Parameter: Plant Line Value: CS22 vs. Ler wt
  misc_feature: MA Experiment 20000573 PARAMETER Experiment Name: At_100uM_ABA_Mutants__P Parameter: Timepoint (hr) Value: N/A
  misc_feature: MA Experiment 20000573 PARAMETER Experiment Name: At_100uM_ABA_Mutants__P Parameter: Tissue Value: Whole Plant
  misc_feature: MA Experiment 20000573 PARAMETER Experiment Name: At_100uM_ABA_Mutants__P Parameter: Treatment Value: None
  misc_feature: MA Experiment ID: 20000574 Result: Down-regulated in Transcription
  misc_feature: MA Experiment 20000574 PARAMETER Experiment Name: At_100uM_ABA_Mutants__P Parameter: Organism Value: A. thaliana
  misc_feature: MA Experiment 20000574 PARAMETER Experiment Name: At_100uM_ABA_Mutants__P Parameter: Plant Line Value: CS23 vs. Ler wt
  misc_feature: MA Experiment 20000574 PARAMETER Experiment Name: At_100uM_ABA_Mutants__P Parameter: Timepoint (hr) Value: N/A
  misc_feature: MA Experiment 20000574 PARAMETER Experiment Name: At_100uM_ABA_Mutants__P Parameter: Tissue Value: Whole Plant
  misc_feature: MA Experiment 20000574 PARAMETER Experiment Name: At_100uM_ABA_Mutants__P Parameter: Treatment Value: None
  misc_feature: MA Experiment ID: 20000794 Result: Down-regulated in Transcription
  misc_feature: MA Experiment 20000794 PARAMETER Experiment Name: At_Petals_P Parameter: Age (day) Value: 23-25 days
  misc_feature: MA Experiment 20000794 PARAMETER Experiment Name: At_Petals_P Parameter: Plant Line Value: WS
  misc_feature: MA Experiment 20000794 PARAMETER Experiment Name: At_Petals_P Parameter: Tissue Value: Petals vs. Whole plant
  misc_feature: MA Experiment ID: 20001555 Result: Down-regulated in Transcription
  misc_feature: MA Experiment 20001555 PARAMETER Experiment Name: At_Drought_Soil_Dry_P Parameter: Age (day) Value: 24
  misc_feature: MA Experiment 20001555 PARAMETER Experiment Name: At_Drought_Soil_Dry_P Parameter: Organism Value: A. thaliana
  misc_feature: MA Experiment 20001555 PARAMETER Experiment Name: At_Drought_Soil_Dry_P Parameter: Plant Line Value: WS
  misc_feature: MA Experiment 20001555 PARAMETER Experiment Name: At_Drought_Soil_Dry_P Parameter: Post Timepoint (hr) Value: None
  misc_feature: MA Experiment 20001555 PARAMETER Experiment Name: At_Drought_Soil_Dry_P Parameter: Post-Treatment Value: None
  misc_feature: MA Experiment 20001555 PARAMETER Experiment Name: At_Drought_Soil_Dry_P Parameter: Timepoint (day) Value: 10
  misc_feature: MA Experiment 20001555 PARAMETER Experiment Name: At_Drought_Soil_Dry_P Parameter: Treatment Value: Drought vs. No Drought
  misc_feature: MA Experiment ID: 20001556 Result: Down-regulated in Transcription
  misc_feature: MA Experiment 20001556 PARAMETER Experiment Name: At_Drought_Soil_Dry_P Parameter: Age (day) Value: 26
  misc_feature: MA Experiment 20001556 PARAMETER Experiment Name: At_Drought_Soil_Dry_P Parameter: Organism Value: A. thaliana
  misc_feature: MA Experiment 20001556 PARAMETER Experiment Name: At_Drought_Soil_Dry_P Parameter: Plant Line Value: WS
  misc_feature: MA Experiment 20001556 PARAMETER Experiment Name: At_Drought_Soil_Dry_P Parameter: Post Timepoint (hr) Value: None
  misc_feature: MA Experiment 20001556 PARAMETER Experiment Name: At_Drought_Soil_Dry_P Parameter: Post-Treatment Value: None
  misc_feature: MA Experiment 20001556 PARAMETER Experiment Name: At_Drought_Soil_Dry_P Parameter: Timepoint (day) Value: 12
  misc_feature: MA Experiment 20001556 PARAMETER Experiment Name: At_Drought_Soil_Dry_P Parameter: Treatment Value: Drought vs. No Drought
  misc_feature: MA Experiment ID: 20001560 Result: Down-regulated in Transcription
  misc_feature: MA Experiment 20001560 PARAMETER Experiment Name: At_Drought_Soil_Dry_P Parameter: Age (day) Value: 28
  misc_feature: MA Experiment 20001560 PARAMETER Experiment Name: At_Drought_Soil_Dry_P Parameter: Organism Value: A. thaliana
  misc_feature: MA Experiment 20001560 PARAMETER Experiment Name: At_Drought_Soil_Dry_P Parameter: Plant Line Value: WS
  misc_feature: MA Experiment 20001560 PARAMETER Experiment Name: At_Drought_Soil_Dry_P Parameter: Post Timepoint (hr) Value: None
  misc_feature: MA Experiment 20001560 PARAMETER Experiment Name: At_Drought_Soil_Dry_P Parameter: Post-Treatment Value: None
  misc_feature: MA Experiment 20001560 PARAMETER Experiment Name: At_Drought_Soil_Dry_P Parameter: Timepoint (day) Value: 14
  misc_feature: MA Experiment 20001560 PARAMETER Experiment Name: At_Drought_Soil_Dry_P Parameter: Treatment Value: Drought vs. No Drought
atgaaattttttgtactagtgcttcttctggtgctgcaattcttctccaacaaagcactttctcagagtgaagaaggagagtttggttttaatggttacttgtacgacaactctggaattgcaattactaactccaaaggcttgatgaagctcacaaattcgtctgaattctcatatggtcacgttttctacaactctccagttagattcaagaactcaccaaacggtaccgtttcgtctttctccactacctttgttttcgctatagtctctaatgttaatgcacttgatggccatggacttgcatttgtcatctctcccaccaaaggcttgccctatagttcatcctcacaatatctagggctctttaatttgacaaacaatggagatccctctaatcatattgtagcagttgagtttgatacatttcaaaatcaagaatttgatgacatggataataaccatgttggtattgacatcaatagcttgagctcagagaaagcttctacagcaggttattacgaagacgatgatggtactttcaaaaacatccgcctcataaatcaaaaacctatacaagcctggattgaatatgattcctcaaggagacaacttaacgtcacaatccatcctattcatctccctaagccaaagattccattgctttctctaaccaaagatttatctccatatcttttcgactctatgtatgttggcttcacttcagccacaggccgtcttcgttcatctcactatattcttggttggaccttcaagctcaatgggacagcttcaaatatagatatttctcgtcttccaaaacttcctagagactctcggagtacaagtgtgaaaaagatcttggctattagtttgagtttaaccagcctcgccatcctcgtcttcttgaccataagctatatgcttttcttgaaaaggaagaagttaatggaagttcttgaagactgggaggttcagtttggtccacataggtttgcttacaaggatctttacattgccacaaagggtttcaggaacagcgagcttcttggtaaaggagggtttggaaaagtatataaaggtacattatcgacgtctaacatggacatcgcggtgaagaaagtttctcatgattcaagacaaggaatgagagagtttgtggcagagatcgcgaccattgggcgtctcagacatcctaatctagttcggcttcttggctactgtaggcgcaaaggagaactctatttggtttacgactgtatgccaaaaggcagtcttgataagtttctctaccaccaaccagaacagagtcttgattggtcacaaagattcaagatcatcaaagatgttgcttctggtctctgctatttacaccaccagtgggttcaagtcattattcacagagacattaagccagcaaacgttcttcttgatgattctatgaacggaaagctcggtgattttggtctcgcaaagctctgtgaacacgggtttgatcctcaaacctctaacgtggctggtacgtttggatacatctcaccagagctttcaagaacagggaaggcaagcacaagttctgatgtattcgcgtttggaatactaatgttagagattacttgcgggcgaagacccgtcttgccacgagcatcttcgccgagcgagatggttcttacggattgggtgctagattgttgggaagatgacatattgcaagtggttgatgagagggtaaagcaggatgataagtaccttgaggagcaagtagcactggttctgaagctcggcttgttctgttcgcatccggttgcagccgtcagaccaagcatgtcgagcgtcatccagttcttggacggtgtggctcagctaccaaacaacttgtttgacattgtgaaagctagggagaacgttggagccattgaaggcttcggtgaagcagctgagtcccttgcagagccctgttcggtggctacattgacgtttacagaaccatttgtctcgcatgggcgctaa

SEQ ID NO: 81243 - protein, 669 aa, Arabidopsis thaliana
  peptide (1)..(669): Ceres Seq. ID no. 12658958
  misc_feature (344)..(544): Pfam Name: Protein kinase domain Pfam Description: Protein kinase domain
  misc_feature (5)..(669): Homolog of NCBI NO: 15223040 NR Description: receptor-like kinase, putative; protein id: [Arabidopsis thaliana] >gi|25387054|pir||H96723 hypothetical
  misc_feature (1)..(669): Homolog of NCBI NO: 15223044 NR Description: receptor-like kinase, putative; protein id: [Arabidopsis thaliana] >gi|25387055|pir||A96724 hypothetical
  misc_feature (28)..(669): Homolog of NCBI NO: 15231734 NR Description: serine/threonine-specific kinase lecRK1
  misc_feature (46)..(669): Homolog of NCBI NO: 15224335 NR Description: putative receptor protein kinase; protein id: supported by cDNA: gi_18491244 [Arabidopsis thaliana]
  misc_feature (8)..(646): Homolog of NCBI NO: 15232332 NR Description: serine/threonine-specific kinase like protein;
  misc_feature (4)..(648): Homolog of NCBI NO: 15224347 NR Description: putative receptor-like protein kinase; protein At2g37710.1, supported by cDNA: gi_20259540 [Arabidopsis
  misc_feature (8)..(646): Homolog of NCBI NO: 28416699 NR Description: At3g53810 [Arabidopsis thaliana]
  misc_feature (7)..(669): Homolog of NCBI NO: 15224334 NR Description: putative receptor protein kinase; protein id: [Arabidopsis thaliana] >gi|25387039|pir||C84869 probable receptor
  misc_feature (1)..(662): Homolog of NCBI NO: 34395068 NR Description: putative receptor kinase Lecrk [Oryza sativa
  misc_feature (294)..(669): Homolog of NCBI NO: 34395078 NR Description: putative receptor kinase Lecrk [Oryza sativa
MKFFVLVLLLVLQFFSNKALSQSEEGEFGFNGYLYDNSGIAITNSKGLMKLTNSSEFSYGHVFYNSPVRFKNSPNGTVSSFSTTFVFAIVSNVNALDGHGLAFVISPTKGLPYSSSSQYLGLFNLTNNGDPSNHIVAVEFDTFQNQEFDDMDNNHVGIDINSLSSEKASTAGYYEDDDGTFKNIRLINQKPIQAWIEYDSSRRQLNVTIHPIHLPKPKIPLLSLTKDLSPYLFDSMYVGFTSATGRLRSSHYILGWTFKLNGTASNIDISRLPKLPRDSRSTSVKKILAISLSLTSLAILVFLTISYMLFLKRKKLMEVLEDWEVQFGPHRFAYKDLYIATKGFRNSELLGKGGFGKVYKGTLSTSNMDIAVKKVSHDSRQGMREFVAEIATIGRLRHPNLVRLLGYCRRKGELYLVYDCMPKGSLDKFLYHQPEQSLDWSQRFKIIKDVASGLCYLHHQWVQVIIHRDIKPANVLLDDSMNGKLGDFGLAKLCEHGFDPQTSNVAGTFGYISPELSRTGKASTSSDVFAFGILMLEITCGRRPVLPRASSPSEMVLTDWVLDCWEDDILQVVDERVKQDDKYLEEQVALVLKLGLFCSHPVAAVRPSMSSVIQFLDGVAQLPNNLFDIVKARENVGAIEGFGEAAESLAEPCSVATLTFTEPFVSHGR

SEQ ID NO: 81244 - protein, 621 aa, Arabidopsis thaliana
  peptide (1)..(621): Ceres Seq. ID no. 12658959
  misc_feature (296)..(496): Pfam Name: Protein kinase domain Pfam Description: Protein kinase domain
  misc_feature (1)..(621): Homolog of NCBI NO: 15223040 NR Description: receptor-like kinase, putative; protein id: [Arabidopsis thaliana] >gi|25387054|pir||H96723 hypothetical
  misc_feature (1)..(621): Homolog of NCBI NO: 15223044 NR Description: receptor-like kinase, putative; protein id: [Arabidopsis thaliana] >gi|25387055|pir||A96724 hypothetical
  misc_feature (1)..(621): Homolog of NCBI NO: 15231734 NR Description: serine/threonine-specific kinase lecRK1
  misc_feature (1)..(621): Homolog of NCBI NO: 15224335 NR Description: putative receptor protein kinase; protein id: supported by cDNA: gi_18491244 [Arabidopsis thaliana]
  misc_feature (1)..(598): Homolog of NCBI NO: 15232332 NR Description: serine/threonine-specific kinase like protein;
  misc_feature (1)..(600): Homolog of NCBI NO: 15224347 NR Description: putative receptor-like protein kinase; protein At2g37710.1, supported by cDNA: gi_20259540 [Arabidopsis
  misc_feature (1)..(598): Homolog of NCBI NO: 28416699 NR Description: At3g53810 [Arabidopsis thaliana]
  misc_feature (1)..(621): Homolog of NCBI NO: 15224334 NR Description: putative receptor protein kinase; protein id: [Arabidopsis thaliana] >gi|25387039|pir||C84869 probable receptor
  misc_feature (1)..(614): Homolog of NCBI NO: 34395068 NR Description: putative receptor kinase Lecrk [Oryza sativa
  misc_feature (246)..(621): Homolog of NCBI NO: 34395078 NR Description: putative receptor kinase Lecrk [Oryza sativa
MKLTNSSEFSYGHVFYNSPVRFKNSPNGTVSSFSTTFVFAIVSNVNALDGHGLAFVISPTKGLPYSSSSQYLGLFNLTNNGDPSNHIVAVEFDTFQNQEFDDMDNNHVGIDINSLSSEKASTAGYYEDDDGTFKNIRLINQKPIQAWIEYDSSRRQLNVTIHPIHLPKPKIPLLSLTKDLSPYLFDSMYVGFTSATGRLRSSHYILGWTFKLNGTASNIDISRLPKLPRDSRSTSVKKILAISLSLTSLAILVFLTISYMLFLKRKKLMEVLEDWEVQFGPHRFAYKDLYIATKGFRNSELLGKGGFGKVYKGTLSTSNMDIAVKKVSHDSRQGMREFVAEIATIGRLRHPNLVRLLGYCRRKGELYLVYDCMPKGSLDKFLYHQPEQSLDWSQRFKIIKDVASGLCYLHHQWVQVIIHRDIKPANVLLDDSMNGKLGDFGLAKLCEHGFDPQTSNVAGTFGYISPELSRTGKASTSSDVFAFGILMLEITCGRRPVLPRASSPSEMVLTDWVLDCWEDDILQVVDERVKQDDKYLEEQVALVLKLGLFCSHPVAAVRPSMSSVIQFLDGVAQLPNNLFDIVKARENVGAIEGFGEAAESLAEPCSVATLTFTEPFVSHGR

SEQ ID NO: 81245 - protein, 519 aa, Arabidopsis thaliana
  peptide (1)..(519): Ceres Seq. ID no. 12658960
  misc_feature (194)..(394): Pfam Name: Protein kinase domain Pfam Description: Protein kinase domain
  misc_feature (1)..(519): Homolog of NCBI NO: 15223040 NR Description: receptor-like kinase, putative; protein id: [Arabidopsis thaliana] >gi|25387054|pir||H96723 hypothetical
  misc_feature (1)..(519): Homolog of NCBI NO: 15223044 NR Description: receptor-like kinase, putative; protein id: [Arabidopsis thaliana] >gi|25387055|pir||A96724 hypothetical
  misc_feature (1)..(519): Homolog of NCBI NO: 15231734 NR Description: serine/threonine-specific kinase lecRK1
  misc_feature (1)..(519): Homolog of NCBI NO: 15224335 NR Description: putative receptor protein kinase; protein id: supported by cDNA: gi_18491244 [Arabidopsis thaliana]
  misc_feature (1)..(496): Homolog of NCBI NO: 15232332 NR Description: serine/threonine-specific kinase like protein;
  misc_feature (1)..(498): Homolog of NCBI NO: 15224347 NR Description: putative receptor-like protein kinase; protein At2g37710.1, supported by cDNA: gi_20259540 [Arabidopsis
  misc_feature (1)..(496): Homolog of NCBI NO: 28416699 NR Description: At3g53810 [Arabidopsis thaliana]
  misc_feature (1)..(519): Homolog of NCBI NO: 15224334 NR Description: putative receptor protein kinase; protein id: [Arabidopsis thaliana] >gi|25387039|pir||C84869 probable receptor
  misc_feature (1)..(512): Homolog of NCBI NO: 34395068 NR Description: putative receptor kinase Lecrk [Oryza sativa
  misc_feature (144)..(519): Homolog of NCBI NO: 34395078 NR Description: putative receptor kinase Lecrk [Oryza sativa
MDNNHVGIDINSLSSEKASTAGYYEDDDGTFKNIRLINQKPIQAWIEYDSSRRQLNVTIHPIHLPKPKIPLLSLTKDLSPYLFDSMYVGFTSATGRLRSSHYILGWTFKLNGTASNIDISRLPKLPRDSRSTSVKKILAISLSLTSLAILVFLTISYMLFLKRKKLMEVLEDWEVQFGPHRFAYKDLYIATKGFRNSELLGKGGFGKVYKGTLSTSNMDIAVKKVSHDSRQGMREFVAEIATIGRLRHPNLVRLLGYCRRKGELYLVYDCMPKGSLDKFLYHQPEQSLDWSQRFKIIKDVASGLCYLHHQWVQVIIHRDIKPANVLLDDSMNGKLGDFGLAKLCEHGFDPQTSNVAGTFGYISPELSRTGKASTSSDVFAFGILMLEITCGRRPVLPRASSPSEMVLTDWVLDCWEDDILQVVDERVKQDDKYLEEQVALVLKLGLFCSHPVAAVRPSMSSVIQFLDGVAQLPNNLFDIVKARENVGAIEGFGEAAESLAEPCSVATLTFTEPFVSHGR

SEQ ID NO: 81246 - DNA, 2223 bp, Arabidopsis thaliana
  misc_feature (1)..(2223): Ceres Seq. ID no. 12658997
  misc_feature: MA Experiment ID: 20001451 Result: Up-regulated in Transcription
  misc_feature: MA Experiment 20001451 PARAMETER Experiment Name: At_Far-red-induction_P Parameter: Age (day) Value: 7
  misc_feature: MA Experiment 20001451 PARAMETER Experiment Name: At_Far-red-induction_P Parameter: Light Value: Far-red vs. White
  misc_feature: MA Experiment 20001451 PARAMETER Experiment Name: At_Far-red-induction_P Parameter: Organism Value: A. thaliana
  misc_feature: MA Experiment 20001451 PARAMETER Experiment Name: At_Far-red-induction_P Parameter: Plant Line Value: Columbia
  misc_feature: MA Experiment 20001451 PARAMETER Experiment Name: At_Far-red-induction_P Parameter: Timepoint (hr) Value: 24
  misc_feature: MA Experiment 20001451 PARAMETER Experiment Name: At_Far-red-induction_P Parameter: Tissue Value: Whole Plant
atgggaatgaagagtgatacttatctatgtaatcgtttacttgatttgtatattgagtgtggtgatggggattatgcacggaaggtgtttgatgaaatgtctgtaagagatgtttattcttggaatgcttttttgacgtttagatgtaaagttggggatttgggggaagcgtgtgaggtgtttgatggaatgcctgagagagatgttgtgtcgtggaataatatgattagtgttttggtgaggaaagggtttgaagagaaggctttggttgtctataagaggatggtttgtgatgggtttttgccttctcggttcacgttagctagtgttttaagtgcgtgtagcaaggttttggatggtgtttttggtatgaggtgtcatggggttgctgttaaaacgggtcttgataagaatatttttgttgggaatgcgttgttgtctatgtatgcaaagtgtgggtttattgttgattatggtgttcgagtctttgaatctctctctcagcctaatgaagtctcttatacagcggtgattggcgggttagctcgggaaaataaagtgttggaggcagttcagatgttcagattgatgtgcgagaaaggcgtgcaggtggattctgtttgcttatctaatattcttagcatctctgctccaagagaaggatgtgatagcctgagtgaaatctatggcaatgagcttgggaaacagattcattgtcttgctttgagacttgggtttggaggagatcttcatctgaacaattcgttgcttgaaatatatgcaaagaataaagacatgaatggtgcagagctaatttttgctgagatgcctgaagtgaatgttgtctcttggaacataatgatagttgggtttggtcaggagtatcgaagtgacaaatctgttgaattcctaacgagaatgagagattctggttttcaaccaaatgaagttacttgcattagtgttcttggagcgtgctttcgttcaggggatgtcgaaaccggaaggagaatattcagtagcattccccagccaagtgttagcgcttggaatgctatgctttctggttattccaactatgaacactatgaggaagcaataagcaatttcagacaaatgcagtttcagaacctgaaacctgataaaaccactttgagtgtgatattaagttcgtgtgcgagattgagatttctggaaggagggaagcagatccatggggtagtgataaggaccgagatttcgaagaacagtcacatagttagtggtcttattgcagtgtactccgaatgcgagaagatggagatatctgaatgtatctttgatgattgtataaacgaattggatatcgcttgttggaactcgatgatctcaggttttagacacaacatgctggacacaaaagctctaatactctttagaaggatgcatcagactgccgtgttgtgtcctaatgaaacttcattcgctactgtactaagtagctgttcaaggttatgtagtttgctccatggaagacagtttcatggactggtagtgaagagtggatatgtaagtgattcctttgttgaaaccgctcttaccgacatgtactgcaagtgtggggaaatagattcagctcgacagttcttcgatgctgttttgaggaaaaacacggttatttggaatgagatgatacatgggtatggtcataatggacgaggtgatgaagctgttggtctctacagaaagatgatttcatcaggagagaagcctgatgggataaccttcgtttctgtcttgactgcttgtagccactcaggactggtggaaaccgggcttgagatacttagttcgatgcagagaattcatggaattgagccggagctggatcattacatctgtatagttgattgtcttggaagagctggccggcttgaagatgcagagaagcttgcagaagctacaccatacaaaagtagctctgttctatgggagattctactaagttcatgtagagtccatggagatgtgagcttggctagacgagttgcagaaaaactaatgcgtctggatcctcagagctcagcagcatatgtgctgctaagcaacacatatagttctttgagacagtgggatgattctgcagctcttcaaggattaatgaacaagaacagagttcataaaactccaggtcaaagctggaccacatatggcaatgatttggactcagggtttcgaaaatag

SEQ ID NO: 81247 - protein, 740 aa, Arabidopsis thaliana
  peptide (1)..(740): Ceres Seq. ID no. 12658998
  misc_feature (8)..(42): Pfam Name: PPR repeat Pfam Description: PPR repeat
  misc_feature (2)..(378): Homolog of NCBI NO: 34903762 NR Description: unnamed protein product [Oryza sativa (japonica group)] >gi|7340873|dbj|BAA92963.1| unnamed protein product
  misc_feature (331)..(727): Homolog of NCBI NO: 34903762 NR Description: unnamed protein product [Oryza sativa (japonica group)] >gi|7340873|dbj|BAA92963.1| unnamed protein product
  misc_feature (336)..(727): Homolog of NCBI NO: 15235115 NR Description: putative protein; protein id: At4g39530.1
  misc_feature (37)..(326): Homolog of NCBI NO: 15235115 NR Description: putative protein; protein id: At4g39530.1
  misc_feature (2)..(374): Homolog of NCBI NO: 15232885 NR Description: hypothetical protein; protein id: At3g02330.1
  misc_feature (433)..(734): Homolog of NCBI NO: 15232885 NR Description: hypothetical protein; protein id: At3g02330.1
  misc_feature (321)..(727): Homolog of NCBI NO: 15232006 NR Description: hypothetical protein; protein id: At3g09040.1 thaliana] >gi|5923669|gb|AAD56320.1|AC009326_7 hypothetical
  misc_feature (17)..(338): Homolog of NCBI NO: 15232006 NR Description: hypothetical protein; protein id: At3g09040.1 thaliana] >gi|5923669|gb|AAD56320.1|AC009326_7 hypothetical
  misc_feature (330)..(727): Homolog of NCBI NO: 15237421 NR Description: putative protein; protein id: At5g16860.1
  misc_feature (51)..(356): Homolog of NCBI NO: 15237421 NR Description: putative protein; protein id: At5g16860.1
MGMKSDTYLCNRLLDLYIECGDGDYARKVFDEMSVRDVYSWNAFLTFRCKVGDLGEACEVFDGMPERDVVSWNNMISVLVRKGFEEKALVVYKRMVCDGFLPSRFTLASVLSACSKVLDGVFGMRCHGVAVKTGLDKNIFVGNALLSMYAKCGFIVDYGVRVFESLSQPNEVSYTAVIGGLARENKVLEAVQMFRLMCEKGVQVDSVCLSNILSISAPREGCDSLSEIYGNELGKQIHCLALRLGFGGDLHLNNSLLEIYAKNKDMNGAELIFAEMPEVNVVSWNIMIVGFGQEYRSDKSVEFLTRMRDSGFQPNEVTCISVLGACFRSGDVETGRRIFSSIPQPSVSAWNAMLSGYSNYEHYEEAISNFRQMQFQNLKPDKTTLSVILSSCARLRFLEGGKQIHGVVIRTEISKNSHIVSGLIAVYSECEKMEISECIFDDCINELDIACWNSMISGFRHNMLDTKALILFRRMHQTAVLCPNETSFATVLSSCSRLCSLLHGRQFHGLVVKSGYVSDSFVETALTDMYCKCGEIDSARQFFDAVLRKNTVIWNEMIHGYGHNGRGDEAVGLYRKMISSGEKPDGITFVSVLTACSHSGLVETGLEILSSMQRIHGIEPELDHYICIVDCLGRAGRLEDAEKLAEATPYKSSSVLWEILLSSCRVHGDVSLARRVAEKLMRLDPQSSAAYVLLSNTYSSLRQWDDSAALQGLMNKNRVHKTPGQSWTTYGNDLDSGFRK

SEQ ID NO: 81248 - protein, 738 aa, Arabidopsis thaliana
  peptide (1)..(738): Ceres Seq. ID no. 12658999
  misc_feature (6)..(40): Pfam Name: PPR repeat Pfam Description: PPR repeat
  misc_feature (1)..(376): Homolog of NCBI NO: 34903762 NR Description: unnamed protein product [Oryza sativa (japonica group)] >gi|7340873|dbj|BAA92963.1| unnamed protein product
  misc_feature (329)..(725): Homolog of NCBI NO: 34903762 NR Description: unnamed protein product [Oryza sativa (japonica group)] >gi|7340873|dbj|BAA92963.1| unnamed protein product
  misc_feature (334)..(725): Homolog of NCBI NO: 15235115 NR Description: putative protein; protein id: At4g39530.1
  misc_feature (35)..(324): Homolog of NCBI NO: 15235115 NR Description: putative protein; protein id: At4g39530.1
  misc_feature (1)..(372): Homolog of NCBI NO: 15232885 NR Description: hypothetical protein; protein id: At3g02330.1
  misc_feature (431)..(732): Homolog of NCBI NO: 15232885 NR Description: hypothetical protein; protein id: At3g02330.1
  misc_feature (319)..(725): Homolog of NCBI NO: 15232006 NR Description: hypothetical protein; protein id: At3g09040.1 thaliana] >gi|5923669|gb|AAD56320.1|AC009326_7 hypothetical
  misc_feature (15)..(336): Homolog of NCBI NO: 15232006 NR Description: hypothetical protein; protein id: At3g09040.1 thaliana] >gi|5923669|gb|AAD56320.1|AC009326_7 hypothetical
  misc_feature (328)..(725): Homolog of NCBI NO: 15237421 NR Description: putative protein; protein id: At5g16860.1
  misc_feature (49)..(354): Homolog of NCBI NO: 15237421 NR Description: putative protein; protein id: At5g16860.1
MKSDTYLCNRLLDLYIECGDGDYARKVFDEMSVRDVYSWNAFLTFRCKVGDLGEACEVFDGMPERDVVSWNNMISVLVRKGFEEKALVVYKRMVCDGFLPSRFTLASVLSACSKVLDGVFGMRCHGVAVKTGLDKNIFVGNALLSMYAKCGFIVDYGVRVFESLSQPNEVSYTAVIGGLARENKVLEAVQMFRLMCEKGVQVDSVCLSNILSISAPREGCDSLSEIYGNELGKQIHCLALRLGFGGDLHLNNSLLEIYAKNKDMNGAELIFAEMPEVNVVSWNIMIVGFGQEYRSDKSVEFLTRMRDSGFQPNEVTCISVLGACFRSGDVETGRRIFSSIPQPSVSAWNAMLSGYSNYEHYEEAISNFRQMQFQNLKPDKTTLSVILSSCARLRFLEGGKQIHGVVIRTEISKNSHIVSGLIAVYSECEKMEISECIFDDCINELDIACWNSMISGFRHNMLDTKALILFRRMHQTAVLCPNETSFATVLSSCSRLCSLLHGRQFHGLVVKSGYVSDSFVETALTDMYCKCGEIDSARQFFDAVLRKNTVIWNEMIHGYGHNGRGDEAVGLYRKMISSGEKPDGITFVSVLTACSHSGLVETGLEILSSMQRIHGIEPELDHYICIVDCLGRAGRLEDAEKLAEATPYKSSSVLWEILLSSCRVHGDVSLARRVAEKLMRLDPQSSAAYVLLSNTYSSLRQWDDSAALQGLMNKNRVHKTPGQSWTTYGNDLDSGFRK

SEQ ID NO: 81249 - protein, 708 aa, Arabidopsis thaliana
  peptide (1)..(708): Ceres Seq. ID no. 12659000
  misc_feature (1)..(346): Homolog of NCBI NO: 34903762 NR Description: unnamed protein product [Oryza sativa (japonica group)] >gi|7340873|dbj|BAA92963.1| unnamed protein product
  misc_feature (299)..(695): Homolog of NCBI NO: 34903762 NR Description: unnamed protein product [Oryza sativa (japonica group)] >gi|7340873|dbj|BAA92963.1| unnamed protein product
  misc_feature (304)..(695): Homolog of NCBI NO: 15235115 NR Description: putative protein; protein id: At4g39530.1
  misc_feature (5)..(294): Homolog of NCBI NO: 15235115 NR Description: putative protein; protein id: At4g39530.1
  misc_feature (1)..(342): Homolog of NCBI NO: 15232885 NR Description: hypothetical protein; protein id: At3g02330.1
  misc_feature (401)..(702): Homolog of NCBI NO: 15232885 NR Description: hypothetical protein; protein id: At3g02330.1
  misc_feature (289)..(695): Homolog of NCBI NO: 15232006 NR Description: hypothetical protein; protein id: At3g09040.1 thaliana] >gi|5923669|gb|AAD56320.1|AC009326_7 hypothetical
  misc_feature (1)..(306): Homolog of NCBI NO: 15232006 NR Description: hypothetical protein; protein id: At3g09040.1 thaliana] >gi|5923669|gb|AAD56320.1|AC009326_7 hypothetical
  misc_feature (298)..(695): Homolog of NCBI NO: 15237421 NR Description: putative protein; protein id: At5g16860.1
  misc_feature (19)..(324): Homolog of NCBI NO: 15237421 NR Description: putative protein; protein id: At5g16860.1
MSVRDVYSWNAFLTFRCKVGDLGEACEVFDGMPERDVVSWNNMISVLVRKGFEEKALVVYKRMVCDGFLPSRFTLASVLSACSKVLDGVFGMRCHGVAVKTGLDKNIFVGNALLSMYAKCGFIVDYGVRVFESLSQPNEVSYTAVIGGLARENKVLEAVQMFRLMCEKGVQVDSVCLSNILSISAPREGCDSLSEIYGNELGKQIHCLALRLGFGGDLHLNNSLLEIYAKNKDMNGAELIFAEMPEVNVVSWNIMIVGFGQEYRSDKSVEFLTRMRDSGFQPNEVTCISVLGACFRSGDVETGRRIFSSIPQPSVSAWNAMLSGYSNYEHYEEAISNFRQMQFQNLKPDKTTLSVILSSCARLRFLEGGKQIHGVVIRTEISKNSHIVSGLIAVYSECEKMEISECIFDDCINELDIACWNSMISGFRHNMLDTKALILFRRMHQTAVLCPNETSFATVLSSCSRLCSLLHGRQFHGLVVKSGYVSDSFVETALTDMYCKCGEIDSARQFFDAVLRKNTVIWNEMIHGYGHNGRGDEAVGLYRKMISSGEKPDGITFVSVLTACSHSGLVETGLEILSSMQRIHGIEPELDHYICIVDCLGRAGRLEDAEKLAEATPYKSSSVLWEILLSSCRVHGDVSLARRVAEKLMRLDPQSSAAYVLLSNTYSSLRQWDDSAALQGLMNKNRVHKTPGQSWTTYGNDLDSGFRK

SEQ ID NO: 81250 - DNA, 1599 bp, Arabidopsis thaliana
  misc_feature (1)..(1599): Ceres Seq. ID no. 12659007
  misc_feature: MA Experiment ID: 20000171 Result: Down-regulated in Transcription
  misc_feature: MA Experiment 20000171 PARAMETER Experiment Name: At_42deg_Heat_P Parameter: Age (day) Value: 14
  misc_feature: MA Experiment 20000171 PARAMETER Experiment Name: At_42deg_Heat_P Parameter: Organism Value: A. thaliana
  misc_feature: MA Experiment 20000171 PARAMETER Experiment Name: At_42deg_Heat_P Parameter: Plant Line Value: WS
  misc_feature: MA Experiment 20000171 PARAMETER Experiment Name: At_42deg_Heat_P Parameter: Temperature (deg C) Value: 42 vs. 22
  misc_feature: MA Experiment 20000171 PARAMETER Experiment Name: At_42deg_Heat_P Parameter: Timepoint (hr) Value: 1
  misc_feature: MA Experiment 20000171 PARAMETER Experiment Name: At_42deg_Heat_P Parameter: Tissue Value: Aerial
  misc_feature: MA Experiment ID: 20000182 Result: Down-regulated in Transcription
  misc_feature: MA Experiment 20000182 PARAMETER Experiment Name: At_2mM_SA_P Parameter: Age (day) Value: 14
  misc_feature: MA Experiment 20000182 PARAMETER Experiment Name: At_2mM_SA_P Parameter: Organism Value: A. thaliana
  misc_feature: MA Experiment 20000182 PARAMETER Experiment Name: At_2mM_SA_P Parameter: Plant Line Value: WS
  misc_feature: MA Experiment 20000182 PARAMETER Experiment Name: At_2mM_SA_P Parameter: Timepoint (hr) Value: 6
  misc_feature: MA Experiment 20000182 PARAMETER Experiment Name: At_2mM_SA_P Parameter: Tissue Value: Aerial
  misc_feature: MA Experiment 20000182 PARAMETER Experiment Name: At_2mM_SA_P Parameter: Treatment Value: 2mM SA vs. No Treatment
  misc_feature: MA Experiment ID: 20000184 Result: Up-regulated in Transcription
  misc_feature: MA Experiment 20000184 PARAMETER Experiment Name: At_Shoots__P Parameter: Age (day) Value: 7
  misc_feature: MA Experiment 20000184 PARAMETER Experiment Name: At_Shoots__P Parameter: Tissue Value: Shoots vs. Whole Plant
  misc_feature: MA Experiment ID: 20000213 Result: Down-regulated in Transcription
  misc_feature: MA Experiment 20000213 PARAMETER Experiment Name: At_4deg_Cold_P Parameter: Timepoint (hr) Value: 2
  misc_feature: MA Experiment ID: 20000264 Result: Down-regulated in Transcription
  misc_feature: MA Experiment 20000264 PARAMETER Experiment Name: At_Open_Flower_P Parameter: Age (day) Value: 21
  misc_feature: MA Experiment 20000264 PARAMETER Experiment Name: At_Open_Flower_P Parameter: Plant Line Value: WS
  misc_feature: MA Experiment 20000264 PARAMETER Experiment Name: At_Open_Flower_P Parameter: Tissue Value: Open Flower vs. Whole Plant
  misc_feature: MA Experiment ID: 20000265 Result: Down-regulated in Transcription
  misc_feature: MA Experiment 20000265 PARAMETER Experiment Name: At_Open_Flower_P Parameter: Age (day) Value: 21
  misc_feature: MA Experiment 20000265 PARAMETER Experiment Name: At_Open_Flower_P Parameter: Plant Line Value: WS
  misc_feature: MA Experiment 20000265 PARAMETER Experiment Name: At_Open_Flower_P Parameter: Tissue Value: Closed Flower vs. Whole Plant
  misc_feature: MA Experiment ID: 20000286 Result: Down-regulated in Transcription
  misc_feature: MA Experiment 20000286 PARAMETER Experiment Name: At_Open_Flower_P Parameter: Age (day) Value: 21
  misc_feature: MA Experiment 20000286 PARAMETER Experiment Name: At_Open_Flower_P Parameter: Plant Line Value: WS
  misc_feature: MA Experiment 20000286 PARAMETER Experiment Name: At_Open_Flower_P Parameter: Tissue Value: Half Open vs. Whole Plant
  misc_feature: MA Experiment ID: 20000438 Result: Up-regulated in Transcription
  misc_feature: MA Experiment 20000438 PARAMETER Experiment Name: At_Shoots__P Parameter: Age (day) Value: 14
  misc_feature: MA Experiment 20000438 PARAMETER Experiment Name: At_Shoots__P Parameter: Tissue Value: Shoots vs. Whole Plant
  misc_feature: MA Experiment ID: 20000439 Result: Up-regulated in Transcription
  misc_feature: MA Experiment 20000439 PARAMETER Experiment Name: At_Roots__P Parameter: Age (day) Value: 14 vs. 21
  misc_feature: MA Experiment 20000439 PARAMETER Experiment Name: At_Roots__P Parameter: Organism Value: A. thaliana
  misc_feature: MA Experiment 20000439 PARAMETER Experiment Name: At_Roots__P Parameter: Tissue Value: Roots vs. Whole Plant
  misc_feature: MA Experiment ID: 20000452 Result: Down-regulated in Transcription
  misc_feature: MA Experiment 20000452 PARAMETER Experiment Name: At_CS6879_Shoots-Roots_P Parameter: Age (day) Value: 14
  misc_feature: MA Experiment 20000452 PARAMETER Experiment Name: At_CS6879_Shoots-Roots_P Parameter: Organism Value: A. thaliana
  misc_feature: MA Experiment 20000452 PARAMETER Experiment Name: At_CS6879_Shoots-Roots_P Parameter: Plant Line Value: CS6879 vs. WS
  misc_feature: MA Experiment 20000452 PARAMETER Experiment Name: At_CS6879_Shoots-Roots_P Parameter: Tissue Value: Shoots
  misc_feature: MA Experiment ID: 20000495 Result: Down-regulated in Transcription
  misc_feature: MA Experiment 20000495 PARAMETER Experiment Name: At_Guard_Cells_P Parameter: Harvest Date Value: 8/2/2002
  misc_feature: MA Experiment 20000495 PARAMETER Experiment Name: At_Guard_Cells_P Parameter: Organism Value: A. thaliana
  misc_feature: MA Experiment 20000495 PARAMETER Experiment Name: At_Guard_Cells_P Parameter: Tissue Value: Guard Cells vs. Leaves
  misc_feature: MA Experiment ID: 20000575 Result: Down-regulated in Transcription
  misc_feature: MA Experiment 20000575 PARAMETER Experiment Name: At_100uM_ABA_Mutants__P Parameter: Organism Value: A. thaliana
  misc_feature: MA Experiment 20000575 PARAMETER Experiment Name: At_100uM_ABA_Mutants__P Parameter: Plant Line Value: CS22
  misc_feature: MA Experiment 20000575 PARAMETER Experiment Name: At_100uM_ABA_Mutants__P Parameter: Timepoint (hr) Value: 6
  misc_feature: MA Experiment 20000575 PARAMETER Experiment Name: At_100uM_ABA_Mutants__P Parameter: Tissue Value: Whole Plant
  misc_feature: MA Experiment 20000575 PARAMETER Experiment Name: At_100uM_ABA_Mutants__P Parameter: Treatment Value: 1uM ABA vs. No Treatment
  misc_feature: MA Experiment ID: 20001451 Result: Up-regulated in Transcription
  misc_feature: MA Experiment 20001451 PARAMETER Experiment Name: At_Far-red-induction_P Parameter: Age (day) Value: 7
  misc_feature: MA Experiment 20001451 PARAMETER Experiment Name: At_Far-red-induction_P Parameter: Light Value: Far-red vs. White
  misc_feature: MA Experiment 20001451 PARAMETER Experiment Name: At_Far-red-induction_P Parameter: Organism Value: A. thaliana
  misc_feature: MA Experiment 20001451 PARAMETER Experiment Name: At_Far-red-induction_P Parameter: Plant Line Value: Columbia
  misc_feature: MA Experiment 20001451 PARAMETER Experiment Name: At_Far-red-induction_P Parameter: Timepoint (hr) Value: 24
  misc_feature: MA Experiment 20001451 PARAMETER Experiment Name: At_Far-red-induction_P Parameter: Tissue Value: Whole Plant
  misc_feature: MA Experiment ID: 20001554 Result: Up-regulated in Transcription
  misc_feature: MA Experiment 20001554 PARAMETER Experiment Name: At_Drought_Soil_Dry_P Parameter: Age (day) Value: 21
  misc_feature: MA Experiment 20001554 PARAMETER Experiment Name: At_Drought_Soil_Dry_P Parameter: Organism Value: A. thaliana
  misc_feature: MA Experiment 20001554 PARAMETER Experiment Name: At_Drought_Soil_Dry_P Parameter: Plant Line Value: WS
  misc_feature: MA Experiment 20001554 PARAMETER Experiment Name: At_Drought_Soil_Dry_P Parameter: Post Timepoint (hr) Value: None
  misc_feature: MA Experiment 20001554 PARAMETER Experiment Name: At_Drought_Soil_Dry_P Parameter: Post-Treatment Value: None
  misc_feature: MA Experiment 20001554 PARAMETER Experiment Name: At_Drought_Soil_Dry_P Parameter: Timepoint (day) Value: 7
  misc_feature: MA Experiment 20001554 PARAMETER Experiment Name: At_Drought_Soil_Dry_P Parameter: Treatment Value: Drought vs. No Drought
  misc_feature: MA Experiment ID: 20001555 Result: Up-regulated in Transcription
  misc_feature: MA Experiment 20001555 PARAMETER Experiment Name: At_Drought_Soil_Dry_P Parameter: Age (day) Value: 24
  misc_feature: MA Experiment 20001555 PARAMETER Experiment Name: At_Drought_Soil_Dry_P Parameter: Organism Value: A. thaliana
  misc_feature: MA Experiment 20001555 PARAMETER Experiment Name: At_Drought_Soil_Dry_P Parameter: Plant Line Value: WS
  misc_feature: MA Experiment 20001555 PARAMETER Experiment Name: At_Drought_Soil_Dry_P Parameter: Post Timepoint (hr) Value: None
  misc_feature: MA Experiment 20001555 PARAMETER Experiment Name: At_Drought_Soil_Dry_P Parameter: Post-Treatment Value: None
  misc_feature: MA Experiment 20001555 PARAMETER Experiment Name: At_Drought_Soil_Dry_P Parameter: Timepoint (day) Value: 10
  misc_feature: MA Experiment 20001555 PARAMETER Experiment Name: At_Drought_Soil_Dry_P Parameter: Treatment Value: Drought vs. No Drought
  misc_feature: MA Experiment ID: 20001556 Result: Up-regulated in Transcription
  misc_feature: MA Experiment 20001556 PARAMETER Experiment Name: At_Drought_Soil_Dry_P Parameter: Age (day) Value: 26
  misc_feature: MA Experiment 20001556 PARAMETER Experiment Name: At_Drought_Soil_Dry_P Parameter: Organism Value: A. thaliana
  misc_feature: MA Experiment 20001556 PARAMETER Experiment Name: At_Drought_Soil_Dry_P Parameter: Plant Line Value: WS
  misc_feature: MA Experiment 20001556 PARAMETER Experiment Name: At_Drought_Soil_Dry_P Parameter: Post Timepoint (hr) Value: None
  misc_feature: MA Experiment 20001556 PARAMETER Experiment Name: At_Drought_Soil_Dry_P Parameter: Post-Treatment Value: None
  misc_feature: MA Experiment 20001556 PARAMETER Experiment Name: At_Drought_Soil_Dry_P Parameter: Timepoint (day) Value: 12
  misc_feature: MA Experiment 20001556 PARAMETER Experiment Name: At_Drought_Soil_Dry_P Parameter: Treatment Value: Drought vs. No Drought
  misc_feature: MA Experiment ID: 20001558 Result: Down-regulated in Transcription
  misc_feature: MA Experiment 20001558 PARAMETER Experiment Name: At_Drought_Soil_Dry_P Parameter: Age (day) Value: 27
  misc_feature: MA Experiment 20001558 PARAMETER Experiment Name: At_Drought_Soil_Dry_P Parameter: Organism Value: A. thaliana
  misc_feature: MA Experiment 20001558 PARAMETER Experiment Name: At_Drought_Soil_Dry_P Parameter: Plant Line Value: WS
  misc_feature: MA Experiment 20001558 PARAMETER Experiment Name: At_Drought_Soil_Dry_P Parameter: Post Timepoint (hr) Value: 6
  misc_feature: MA Experiment 20001558 PARAMETER Experiment Name: At_Drought_Soil_Dry_P Parameter: Post-Treatment Value: Re-Water vs. No Drought
  misc_feature: MA Experiment 20001558 PARAMETER Experiment Name: At_Drought_Soil_Dry_P Parameter: Timepoint (day) Value: 13
  misc_feature: MA Experiment 20001558 PARAMETER Experiment Name: At_Drought_Soil_Dry_P Parameter: Treatment Value: Drought vs. No Drought
  misc_feature: MA Experiment ID: 20001560 Result: Down-regulated in Transcription
  misc_feature: MA Experiment 20001560 PARAMETER Experiment Name: At_Drought_Soil_Dry_P Parameter: Age (day) Value: 28
  misc_feature: MA Experiment 20001560 PARAMETER Experiment Name: At_Drought_Soil_Dry_P Parameter: Organism Value: A. thaliana
  misc_feature: MA Experiment 20001560 PARAMETER Experiment Name: At_Drought_Soil_Dry_P Parameter: Plant Line Value: WS
  misc_feature: MA Experiment 20001560 PARAMETER Experiment Name: At_Drought_Soil_Dry_P Parameter: Post Timepoint (hr) Value: None
  misc_feature: MA Experiment 20001560 PARAMETER Experiment Name: At_Drought_Soil_Dry_P Parameter: Post-Treatment Value: None
  misc_feature: MA Experiment 20001560 PARAMETER Experiment Name: At_Drought_Soil_Dry_P Parameter: Timepoint (day) Value: 14
  misc_feature: MA Experiment 20001560 PARAMETER Experiment Name: At_Drought_Soil_Dry_P Parameter: Treatment Value: Drought vs. No Drought
  misc_feature: MA Experiment ID: 20001756 Result: Up-regulated in Transcription
  misc_feature: MA Experiment 20001756 PARAMETER Experiment Name: At_50mM_NH4NO3_L-to-H_P Parameter: Timepoint (hr) Value: 4
  misc_feature: MA Experiment 20001756 PARAMETER Experiment Name: At_50mM_NH4NO3_L-to-H_P Parameter: Tissue Value: Leaf
  misc_feature: MA Experiment 20001756 PARAMETER Experiment Name: At_50mM_NH4NO3_L-to-H_P Parameter: Treatment Value: 50mM NH4NO3 vs 100mM Mannitol
  misc_feature: MA Experiment ID: 20001757 Result: Up-regulated in Transcription
  misc_feature: MA Experiment 20001757 PARAMETER Experiment Name: At_50mM_NH4NO3_L-to-H_P Parameter: Timepoint (hr) Value: 6
  misc_feature: MA Experiment 20001757 PARAMETER Experiment Name: At_50mM_NH4NO3_L-to-H_P Parameter: Tissue Value: Leaf
  misc_feature: MA Experiment 20001757 PARAMETER Experiment Name: At_50mM_NH4NO3_L-to-H_P Parameter: Treatment Value: 50mM NH4NO3 vs 100mM Mannitol
atgaaattccaaagcttctttagctctgttctgatcttcttcactactagtactttacttctatcaattcctcatccggtttcagctaaccggtctaatcaatccagtttcctccaatgtctatctctccagttaaacgactccaacatcgtctcaaaagtcatacacacaccaaacgacacttctttctcctcagtcttagcttcatcaatacaaaatcaaagattctctgctcctgatgtacctaaaccggttttaatcctaactccggttcaaccttctgatgttcaatcagcggttaaatgcgcacgccggttcggtatccacatcagaacccgaagcggaggacacgactacgaaggcctctcttacgttacacacaaacccttcgtaatcctcgatttaagaaacctccggtctatcacagttgacgtcgataaccggtcggtttgggtccaaaccggagccacgatcggtgaactatattacgaaatcggtaaaaagaatcgtactttagcgtttcccgccggagtttgccccaccgtcggcgtcggaggacattttagcggcggaggatacggtactttactgagaaaacacggtttagcagctgatcacgtgatagacgcacgtgttgtcgacgcaagaggaaggattcttgagagacgagagatgggtgaagatttcttctgggcgattcgtggaggtggtggatcaagcttttgcgttgttctttcatggaagatcggtttaatcaatgttccatcaacagtaactgtcttcaacgtcacgaaattctcagaacagagtgctttaaagatcattcatcgttggcaattcgtggctgataaagtctctgatgatttattcataagagttatgttgcagagatacaagaacatggttcgagcttcgtttccgggtttgtatcttggttcggttaagaatctgttgaaaatggtaaacaaagaatttcctgaattgggtttggaggaagatgattgtacagagatgagttggattgagtcagtaatttggtttgctgagttaggagaagaaccaatcaatgttcttactaaacgtacacgagcatcgttggctttcaaggctaaatctgattttgttcaagaaccgatgcctaaaaccgcgatttcgaagctttggagacggttgcaagaaccggaagcagagcatgctcagctaattttcactccatttggtggtaaaatgagtgagattgcagattacgaaacaccatttccgcataggaaggggaatatatatgagattcagtacttgaattactggagaggagacgtgaaagagaagtatatgagatgggtggagagagtttacgatgatatgagtgagtttgtggcgaagtctccgagaggagcttatataaatctgagagatcttgatttgggaatgtatgttggagttaagaggagtaagtacgaggaagggaagagttggggagtgaagtattttaagaataattttgagagattggtgagagttaagacaagtgttgatccttctgatttcttctgtgatgaacagagtattcctccttttacgtttgttgaagttatttga

SEQ ID NO: 81251 - protein, 532 aa, Arabidopsis thaliana
  peptide (1)..(532): Ceres Seq. ID no. 12659008
  misc_feature (84)..(239): Pfam Name: FAD binding domain Pfam Description: FAD binding domain
  misc_feature (1)..(532): Homolog of NCBI NO: 15233411 NR Description: FAD-linked oxidoreductase family; protein id: [Arabidopsis thaliana] >gi|7488294|pir||T10624 reticuline oxidase
  misc_feature (1)..(524): Homolog of NCBI NO: 15241498 NR Description: FAD-linked oxidoreductase family; protein id:
  misc_feature (1)..(532): Homolog of NCBI NO: 15241495 NR Description: FAD-linked oxidoreductase family; protein id:
  misc_feature (45)..(524): Homolog of NCBI NO: 28058799 NR Description: berberine bridge enzyme-like protein [Arabidopsis
  misc_feature (13)..(524): Homolog of NCBI NO: 13161397 NR Description: CPRD2 [Vigna unguiculata]
  misc_feature (14)..(525): Homolog of NCBI NO: 15241474 NR Description: FAD-linked oxidoreductase family; protein id: [Arabidopsis thaliana] >gi|10176891|dbj|BAB10121.1| berberine
  misc_feature (5)..(524): Homolog of NCBI NO: 18652400 NR Description: carbohydrate oxidase [Helianthus annuus]
  misc_feature (5)..(524): Homolog of NCBI NO: 18652398 NR Description: carbohydrate oxidase [Lactuca sativa]
  misc_feature (28)..(524): Homolog of NCBI NO: 15221473 NR Description: FAD-linked oxidoreductase family; protein id: supported by cDNA: gi_16930506 [Arabidopsis thaliana]
  misc_feature (14)..(524): Homolog of NCBI NO: 15226830 NR Description: FAD-linked oxidoreductase family; protein id: [Arabidopsis thaliana] >gi|7485805|pir||T00461 probable berberine
MKFQSFFSSVLIFFTTSTLLLSIPHPVSANRSNQSSFLQCLSLQLNDSNIVSKVIHTPNDTSFSSVLASSIQNQRFSAPDVPKPVLILTPVQPSDVQSAVKCARRFGIHIRTRSGGHDYEGLSYVTHKPFVILDLRNLRSITVDVDNRSVWVQTGATIGELYYEIGKKNRTLAFPAGVCPTVGVGGHFSGGGYGTLLRKHGLAADHVIDARVVDARGRILERREMGEDFFWAIRGGGGSSFCVVLSWKIGLINVPSTVTVFNVTKFSEQSALKIIHRWQFVADKVSDDLFIRVMLQRYKNMVRASFPGLYLGSVKNLLKMVNKEFPELGLEEDDCTEMSWIESVIWFAELGEEPINVLTKRTRASLAFKAKSDFVQEPMPKTAISKLWRRLQEPEAEHAQLIFTPFGGKMSEIADYETPFPHRKGNIYEIQYLNYWRGDVKEKYMRWVERVYDDMSEFVAKSPRGAYINLRDLDLGMYVGVKRSKYEEGKSWGVKYFKNNFERLVRVKTSVDPSDFFCDEQSIPPFTFVEVI

SEQ ID NO: 81252 - protein, 308 aa, Arabidopsis thaliana
  peptide (1)..(308): Ceres Seq. ID no. 12659009
  misc_feature (1)..(308): Homolog of NCBI NO: 15233411 NR Description: FAD-linked oxidoreductase family; protein id: [Arabidopsis thaliana] >gi|7488294|pir||T10624 reticuline oxidase
  misc_feature (1)..(300): Homolog of NCBI NO: 15241498 NR Description: FAD-linked oxidoreductase family; protein id:
  misc_feature (1)..(308): Homolog of NCBI NO: 15241495 NR Description: FAD-linked oxidoreductase family; protein id:
  misc_feature (1)..(300): Homolog of NCBI NO: 28058799 NR Description: berberine bridge enzyme-like protein [Arabidopsis
  misc_feature (1)..(300): Homolog of NCBI NO: 13161397 NR Description: CPRD2 [Vigna unguiculata]
  misc_feature (1)..(301): Homolog of NCBI NO: 15241474 NR Description: FAD-linked oxidoreductase family; protein id: [Arabidopsis thaliana] >gi|10176891|dbj|BAB10121.1| berberine
  misc_feature (1)..(300): Homolog of NCBI NO: 18652400 NR Description: carbohydrate oxidase [Helianthus annuus]
  misc_feature (1)..(300): Homolog of NCBI NO: 18652398 NR Description: carbohydrate oxidase [Lactuca sativa]
  misc_feature (1)..(300): Homolog of NCBI NO: 15221473 NR Description: FAD-linked oxidoreductase family; protein id: supported by cDNA: gi_16930506 [Arabidopsis thaliana]
  misc_feature (1)..(300): Homolog of NCBI NO: 15226830 NR Description: FAD-linked oxidoreductase family; protein id: [Arabidopsis thaliana] >gi|7485805|pir||T00461 probable berberine
MGEDFFWAIRGGGGSSFCVVLSWKIGLINVPSTVTVFNVTKFSEQSALKIIHRWQFVADKVSDDLFIRVMLQRYKNMVRASFPGLYLGSVKNLLKMVNKEFPELGLEEDDCTEMSWIESVIWFAELGEEPINVLTKRTRASLAFKAKSDFVQEPMPKTAISKLWRRLQEPEAEHAQLIFTPFGGKMSEIADYETPFPHRKGNIYEIQYLNYWRGDVKEKYMRWVERVYDDMSEFVAKSPRGAYINLRDLDLGMYVGVKRSKYEEGKSWGVKYFKNNFERLVRVKTSVDPSDFFCDEQSIPPFTFVEVI

SEQ ID NO: 81253 - DNA, 4572 bp, Arabidopsis thaliana
  misc_feature (1)..(4572): Ceres Seq. ID no. 12659029
  misc_feature: MA Experiment ID: 20001560 Result: Up-regulated in Transcription
  misc_feature: MA Experiment 20001560 PARAMETER Experiment Name: At_Drought_Soil_Dry_P Parameter: Age (day) Value: 28
  misc_feature: MA Experiment 20001560 PARAMETER Experiment Name: At_Drought_Soil_Dry_P Parameter: Organism Value: A. thaliana
  misc_feature: MA Experiment 20001560 PARAMETER Experiment Name: At_Drought_Soil_Dry_P Parameter: Plant Line Value: WS
  misc_feature: MA Experiment 20001560 PARAMETER Experiment Name: At_Drought_Soil_Dry_P Parameter: Post Timepoint (hr) Value: None
  misc_feature: MA Experiment 20001560 PARAMETER Experiment Name: At_Drought_Soil_Dry_P Parameter: Post-Treatment Value: None
  misc_feature: MA Experiment 20001560 PARAMETER Experiment Name: At_Drought_Soil_Dry_P Parameter: Timepoint (day) Value: 14
  misc_feature: MA Experiment 20001560 PARAMETER Experiment Name: At_Drought_Soil_Dry_P Parameter: Treatment Value: Drought vs. No Drought
atgtctccattctcagaaacctctgttctgctacttcccatggtcgagaaatgcataaacctcttgcaaacctacggcgtttcatcgataacgaaactcagacaaatccacgctttttcaatccgccatggagtctcaatctcagacgccgagcttgggaaacacctcatcttctaccttgtttctcttccttctccacctcccatgtcttacgctcacaaagtcttctccaagattgagaaacccatcaatgtctttatttggaacacattgatcagaggctacgccgagattggtaattccatctctgctttttctctataccgtgagatgagagtctctggtttggtcgagccagatactcatacttatccgtttcttattaaggctgtgacgacaatggcggatgttagattaggagagacgattcattcggttgttataagaagtggctttggttcgttgatctatgttcagaactctctgcttcatttatacgcaaattgtggagatgtagctagtgcgtacaaggtgtttgataaaatgcctgagaaagatttagtggcttggaactctgtgattaatgggtttgcggaaaacggtaaaccagaagaagctttagcgctttatactgagatgaattccaagggtatcaagcctgatgggttcacaattgttagcttgttgtctgcttgtgcaaagattggtgctttgacattgggtaagagagttcatgtctatatgatcaaagtaggtttgacacgaaacttgcattccagcaatgtgctcttggacttgtatgcgagatgtggaagagtggaagaagccaaaacacttttcgatgaaatggtggacaagaacagtgtctcgtggacttcgttgatagtcggtttagctgttaatggttttgggaaagaagccattgagcttttcaagtatatggaatcaacggagggattgttaccatgtgagatcacgtttgttgggatattatacgcttgtagccattgcgggatggtgaaggaaggttttgagtatttcaggagaatgagagaggagtataagattgaacctaggatcgagcattttggttgtatggtcgatttgttagctagagctggacaagtgaagaaagcatatgaatacatcaagagtatgccgatgcagcctaatgttgtaatctggagaacattgttaggagcttgtactgttcatggtgattcagatttagcagagtttgctagaatccagatcttacaactagaaccaaaccacagcggcgattatgttctcttgtcgaatatgtacgcatccgagcagcgttggtccgatgtgcaaaagatacggaaacaaatgttaagagacggtgtgaaaaaagtccccggtcacagcttagtagaagtaggaaacagagttcatgagtttcttatgggtgataagtctcacccacaaagcgatgctatttacgctaagctgaaagaaatgactggtagattgagatcagaaggttacgttccacaaatttctaatgtctatgtagatgttgaagaggaagagaaggagaatgctgtggtttatcacagtgagaagattgctattgcatttatgttaattagtacaccagaaagatcaccgattacagtcgtgaagaatcttagagtatgtgcagattgtcacttagcaatcaaacttgtgtcaaaggtttataaccgagagattgtagtcagagatcgtagcagatcgaaaatggcggacactagtcacctggagaggatgggaagagaactcaagtgccctatttgcttgagtctatataattctgcagtttcactttcgtgtaaccatgtattttgcaatgcgtgtatagtgaaatctatgaaaatggatgctacttgtcctgtttgtaaaatcccttaccatcgtagagagattcgaggtgctccacatatggatagcttggtgagcatttacaagaacatggaagatgcttctgggattaaattattcgttagccagaataatccgtcaccatcagataaagaaaagcaagtaagagatgcttccgttgaaaaggcaagtgataagaatcgtcagggatctaggaagggccgagcatccaagaggaacgagtatgggaaaaccaaggaaatagatgtagatgcacctgggcctattgttatgaaaccttcatcccaaaccaagaagagggtgcagctgctccagaatctgtctgctgaaagtttaactaaacctactgagtctgttgaaacagctgaaaaacccaaggactacactgaaaacactgtgattcgtttggatgagcatccatctctgaataaagaaggaaatctttcacccttcttttggttgagagatgaagatgatggggagaactcaagtcagcgtacagaaagtgatcaacttttagggactacaccagttaatgttccctctttcagcgatttgatggactcagatcatgagagcccatcgaaggaagacgagcaacaaaagcccaatccaggtgacatgtttgatagcgaaatgtttgaatggactcagaggccttgttctccggagattctacctagtcctgtgaaggccaaggtcctaggtagagatgagattgatcttactcaaaagaagctacctaaagttaaagttgcatcatccaaatgtaaaaaccgcaaagcaggaagtgcaagaaatacagttgctagacgaagcattggggtttcacaagaggacaacatggaatcatctgcagcagcaaccattagtgagcaacaagatagtcgtgggacttctggcacaattatcaggaatgatgtgaatactgatgaaaatgtgaaagctaaaagagctacaagaagcaaggctcagagtacacgagttcagtctgatctaaatgtatccaatgaagctgatgggaagcaggggacaaagaggaaaagatctagcattaaatcctctccagctcacccaatcgcaggacctaatgagctctcacttggaacagaaattgtgggaaagggggatcaggatcaagcccatggtccatctgatacacatcctgaaaaacgaagtcccaccgagaaaccctctctgaagaagaggggaagaaaatccaatgcaagctcctctttaaaagatctatctggaaaaacacaaaagaagacttcagagaagaaattgaaactagattcccatatgatctcaagcaaagctacacaaccgcatggaaatggtattctaactgctgggttgaatcaagggggtgataaacaagattcaagaaacaataggaaatccactgtgggtaaagacgatcataccatgcaagttatagagaaatgctcaacgataaacaagtcttcatctggaggcagtgcacatttgcgacgatgtaatggatctttaacgaagaaattcacatgtgccttttgtcagtgttcagaagacacagaggcttcaggagaaatgactcactactacagaggtgaacctgtctctgcggattttaatggtgggtctaaggtcatacatgttcacaaaaactgtgctgaatgggctccaaatgtatacttcaacgaccttaccatagtgaatcttgatgtggagttgacaagaagccggagaataagttgcagctgctgtgggcttaaaggcgcagcacttggttgttacaataagagttgcaagaatagttttcatgttacgtgtgcaaaactcataccagaatgcagatgggacaatgtaaaatttgtaatgctatgccctttggatgcatccattaagttgccctgtgaagaggctaattcaaaagacaggaaatgcaagcgtactcctaaagaaccactgcactctcagcctaaacaagtatctggaaaagctaacatccgtgagctccatatcaagcagttccatggattttccaagaaattggtcttatcttgctcagggctcacagttgaagagaagactgttattgcagaatttgcggaactgtctggagttacgatctcaaaaaactgggattcaactgttacacatgttattgcatcaatcaatgaaaacggagcctgcaaaaggaccctcaaattcatgatggcaatcttggaggggaaatggatactaaccattgattggattaaggcgtgtatgaaaaatacaaaatatgtaagcgaggagccatatgagatcactatggatgttcatggaatacgagaaggaccttatcttggaagacaaagagctttgaaaaagaagccaaaactttttactggacttaagttttacatcatgggagatttcgagcttgcttacaaaggatatcttcaagatctgattgtagcagcaggaggaacaatcttgcgtaggcggcctgtttcttctgatgataatgaagcttcaacaatcgtagtatttagtgttgagcctagcaagaagaaaactctgacccaaagaagatctgatgctgaagccttggctaaatctgctagagccagagctgcaagcagttcatgggttttggattctattgcaggttgccaaattttagtcttgatataa

SEQ ID NO: 81254 - protein, 1523 aa, Arabidopsis thaliana
  peptide (1)..(1523): Ceres Seq. ID no. 12659030
  misc_feature (598)..(635): Pfam Name: Zinc finger, C3HC4 type (RING finger) Pfam Description: Zinc finger, C3HC4 type (RING finger)
  misc_feature (117)..(302): Homolog of NCBI NO: 7486585 NR Description: hypothetical protein F7J7.10 - Arabidopsis (fragment) >gi|3377941|emb|CAA17526.1| putative protein
  misc_feature (13)..(580): Homolog of NCBI NO: 34393394 NR Description: putative pentatricopeptide (PPR)
  misc_feature (161)..(580): Homolog of NCBI NO: 15235537 NR Description: putative protein; protein id: At4g37380.1
  misc_feature (7)..(218): Homolog of NCBI NO: 15235537 NR Description: putative protein; protein id: At4g37380.1
  misc_feature (21)..(580): Homolog of NCBI NO: 25346319 NR Description: hypothetical protein F23H11.3 [imported] - thaliana >gi|5080805|gb|AAD39314.1|AC007258_3 Hypothetical
  misc_feature (16)..(580): Homolog of NCBI NO: 8778758 NR Description: T30E16.32 [Arabidopsis thaliana]
  misc_feature (16)..(580): Homolog of NCBI NO: 15218900 NR Description: hypothetical protein; protein id: At1g59720.1
  misc_feature (16)..(580): Homolog of NCBI NO: 29124127 NR Description: hypothetical protein [Oryza sativa (japonica
  misc_feature (13)..(580): Homolog of NCBI NO: 15226299 NR Description: hypothetical protein; protein id: At2g01510.1
  misc_feature (34)..(580): Homolog of NCBI NO: 30693150 NR Description: pentatricopeptide (PPR) repeat-containing protein
MSPFSETSVLLLPMVEKCINLLQTYGVSSITKLRQIHAFSIRHGVSISDAELGKHLIFYLVSLPSPPPMSYAHKVFSKIEKPINVFIWNTLIRGYAEIGNSISAFSLYREMRVSGLVEPDTHTYPFLIKAVTTMADVRLGETIHSVVIRSGFGSLIYVQNSLLHLYANCGDVASAYKVFDKMPEKDLVAWNSVINGFAENGKPEEALALYTEMNSKGIKPDGFTIVSLLSACAKIGALTLGKRVHVYMIKVGLTRNLHSSNVLLDLYARCGRVEEAKTLFDEMVDKNSVSWTSLIVGLAVNGFGKEAIELFKYMESTEGLLPCEITFVGILYACSHCGMVKEGFEYFRRMREEYKIEPRIEHFGCMVDLLARAGQVKKAYEYIKSMPMQPNVVIWRTLLGACTVHGDSDLAEFARIQILQLEPNHSGDYVLLSNMYASEQRWSDVQKIRKQMLRDGVKKVPGHSLVEVGNRVHEFLMGDKSHPQSDAIYAKLKEMTGRLRSEGYVPQISNVYVDVEEEEKENAVVYHSEKIAIAFMLISTPERSPITVVKNLRVCADCHLAIKLVSKVYNREIVVRDRSRSKMADTSHLERMGRELKCPICLSLYNSAVSLSCNHVFCNACIVKSMKMDATCPVCKIPYHRREIRGAPHMDSLVSIYKNMEDASGIKLFVSQNNPSPSDKEKQVRDASVEKASDKNRQGSRKGRASKRNEYGKTKEIDVDAPGPIVMKPSSQTKKRVQLLQNLSAESLTKPTESVETAEKPKDYTENTVIRLDEHPSLNKEGNLSPFFWLRDEDDGENSSQRTESDQLLGTTPVNVPSFSDLMDSDHESPSKEDEQQKPNPGDMFDSEMFEWTQRPCSPEILPSPVKAKVLGRDEIDLTQKKLPKVKVASSKCKNRKAGSARNTVARRSIGVSQEDNMESSAAATISEQQDSRGTSGTIIRNDVNTDENVKAKRATRSKAQSTRVQSDLNVSNEADGKQGTKRKRSSIKSSPAHPIAGPNELSLGTEIVGKGDQDQAHGPSDTHPEKRSPTEKPSLKKRGRKSNASSSLKDLSGKTQKKTSEKKLKLDSHMISSKATQPHGNGILTAGLNQGGDKQDSRNNRKSTVGKDDHTMQVIEKCSTINKSSSGGSAHLRRCNGSLTKKFTCAFCQCSEDTEASGEMTHYYRGEPVSADFNGGSKVIHVHKNCAEWAPNVYFNDLTIVNLDVELTRSRRISCSCCGLKGAALGCYNKSCKNSFHVTCAKLIPECRWDNVKFVMLCPLDASIKLPCEEANSKDRKCKRTPKEPLHSQPKQVSGKANIRELHIKQFHGFSKKLVLSCSGLTVEEKTVIAEFAELSGVTISKNWDSTVTHVIASINENGACKRTLKFMMAILEGKWILTIDWIKACMKNTKYVSEEPYEITMDVHGIREGPYLGRQRALKKKPKLFTGLKFYIMGDFELAYKGYLQDLIVAAGGTILRRRPVSSDDNEASTIVVFSVEPSKKKTLTQRRSDAEALAKSARARAASSSWVLDSIAGCQILVLI

SEQ ID NO: 81255 - protein, 1510 aa, Arabidopsis thaliana
  peptide (1)..(1510): Ceres Seq. ID no. 12659031
  misc_feature (585)..(622): Pfam Name: Zinc finger, C3HC4 type (RING finger) Pfam Description: Zinc finger, C3HC4 type (RING finger)
  misc_feature (104)..(289): Homolog of NCBI NO: 7486585 NR Description: hypothetical protein F7J7.10 - Arabidopsis (fragment) >gi|3377941|emb|CAA17526.1| putative protein
  misc_feature (1)..(567): Homolog of NCBI NO: 34393394 NR Description: putative pentatricopeptide (PPR)
  misc_feature (148)..(567): Homolog of NCBI NO: 15235537 NR Description: putative protein; protein id: At4g37380.1
  misc_feature (1)..(205): Homolog of NCBI NO: 15235537 NR Description: putative protein; protein id: At4g37380.1
  misc_feature (8)..(567): Homolog of NCBI NO: 25346319 NR Description: hypothetical protein F23H11.3 [imported] - thaliana >gi|5080805|gb|AAD39314.1|AC007258_3 Hypothetical
  misc_feature (3)..(567): Homolog of NCBI NO: 8778758 NR Description: T30E16.32 [Arabidopsis thaliana]
  misc_feature (3)..(567): Homolog of NCBI NO: 15218900 NR Description: hypothetical protein; protein id: At1g59720.1
  misc_feature (3)..(567): Homolog of NCBI NO: 29124127 NR Description: hypothetical protein [Oryza sativa (japonica
  misc_feature (1)..(567): Homolog of NCBI NO: 15226299 NR Description: hypothetical protein; protein id: At2g01510.1
  misc_feature (21)..(567): Homolog of NCBI NO: 30693150 NR Description: pentatricopeptide (PPR) repeat-containing protein
MVEKCINLLQTYGVSSITKLRQIHAFSIRHGVSISDAELGKHLIFYLVSLPSPPPMSYAHKVFSKIEKPINVFIWNTLIRGYAEIGNSISAFSLYREMRVSGLVEPDTHTYPFLIKAVTTMADVRLGETIHSVVIRSGFGSLIYVQNSLLHLYANCGDVASAYKVFDKMPEKDLVAWNSVINGFAENGKPEEALALYTEMNSKGIKPDGFTIVSLLSACAKIGALTLGKRVHVYMIKVGLTRNLHSSNVLLDLYARCGRVEEAKTLFDEMVDKNSVSWTSLIVGLAVNGFGKEAIELFKYMESTEGLLPCEITFVGILYACSHCGMVKEGFEYFRRMREEYKIEPRIEHFGCMVDLLARAGQVKKAYEYIKSMPMQPNVVIWRTLLGACTVHGDSDLAEFARIQILQLEPNHSGDYVLLSNMYASEQRWSDVQKIRKQMLRDGVKKVPGHSLVEVGNRVHEFLMGDKSHPQSDAIYAKLKEMTGRLRSEGYVPQISNVYVDVEEEEKENAVVYHSEKIAIAFMLISTPERSPITVVKNLRVCADCHLAIKLVSKVYNREIVVRDRSRSKMADTSHLERMGRELKCPICLSLYNSAVSLSCNHVFCNACIVKSMKMDATCPVCKIPYHRREIRGAPHMDSLVSIYKNMEDASGIKLFVSQNNPSPSDKEKQVRDASVEKASDKNRQGSRKGRASKRNEYGKTKEIDVDAPGPIVMKPSSQTKKRVQLLQNLSAESLTKPTESVETAEKPKDYTENTVIRLDEHPSLNKEGNLSPFFWLRDEDDGENSSQRTESDQLLGTTPVNVPSFSDLMDSDHESPSKEDEQQKPNPGDMFDSEMFEWTQRPCSPEILPSPVKAKVLGRDEIDLTQKKLPKVKVASSKCKNRKAGSARNTVARRSIGVSQEDNMESSAAATISEQQDSRGTSGTIIRNDVNTDENVKAKRATRSKAQSTRVQSDLNVSNEADGKQGTKRKRSSIKSSPAHPIAGPNELSLGTEIVGKGDQDQAHGPSDTHPEKRSPTEKPSLKKRGRKSNASSSLKDLSGKTQKKTSEKKLKLDSHMISSKATQPHGNGILTAGLNQGGDKQDSRNNRKSTVGKDDHTMQVIEKCSTINKSSSGGSAHLRRCNGSLTKKFTCAFCQCSEDTEASGEMTHYYRGEPVSADFNGGSKVIHVHKNCAEWAPNVYFNDLTIVNLDVELTRSRRISCSCCGLKGAALGCYNKSCKNSFHVTCAKLIPECRWDNVKFVMLCPLDASIKLPCEEANSKDRKCKRTPKEPLHSQPKQVSGKANIRELHIKQFHGFSKKLVLSCSGLTVEEKTVIAEFAELSGVTISKNWDSTVTHVIASINENGACKRTLKFMMAILEGKWILTIDWIKACMKNTKYVSEEPYEITMDVHGIREGPYLGRQRALKKKPKLFTGLKFYIMGDFELAYKGYLQDLIVAAGGTILRRRPVSSDDNEASTIVVFSVEPSKKKTLTQRRSDAEALAKSARARAASSSWVLDSIAGCQILVLI

SEQ ID NO: 81256 - protein, 1455 aa, Arabidopsis thaliana
  peptide (1)..(1455): Ceres Seq. ID no. 12659032
  misc_feature (530)..(567): Pfam Name: Zinc finger, C3HC4 type (RING finger) Pfam Description: Zinc finger, C3HC4 type (RING finger)
  misc_feature (49)..(234): Homolog of NCBI NO: 7486585 NR Description: hypothetical protein F7J7.10 - Arabidopsis (fragment) >gi|3377941|emb|CAA17526.1| putative protein
  misc_feature (1)..(512): Homolog of NCBI NO: 34393394 NR Description: putative pentatricopeptide (PPR)
  misc_feature (93)..(512): Homolog of NCBI NO: 15235537 NR Description: putative protein; protein id: At4g37380.1
  misc_feature (1)..(150): Homolog of NCBI NO: 15235537 NR Description: putative protein; protein id: At4g37380.1
  misc_feature (1)..(512): Homolog of NCBI NO: 25346319 NR Description: hypothetical protein F23H11.3 [imported] - thaliana >gi|5080805|gb|AAD39314.1|AC007258_3 Hypothetical
  misc_feature (1)..(512): Homolog of NCBI NO: 8778758 NR Description: T30E16.32 [Arabidopsis thaliana]
  misc_feature (1)..(512): Homolog of NCBI NO: 15218900 NR Description: hypothetical protein; protein id: At1g59720.1
  misc_feature (1)..(512): Homolog of NCBI NO: 29124127 NR Description: hypothetical protein [Oryza sativa (japonica
  misc_feature (1)..(512): Homolog of NCBI NO: 15226299 NR Description: hypothetical protein; protein id: At2g01510.1
  misc_feature (1)..(512): Homolog of NCBI NO: 30693150 NR Description: pentatricopeptide (PPR) repeat-containing protein
MSYAHKVFSKIEKPINVFIWNTLIRGYAEIGNSISAFSLYREMRVSGLVEPDTHTYPFLIKAVTTMADVRLGETIHSVVIRSGFGSLIYVQNSLLHLYANCGDVASAYKVFDKMPEKDLVAWNSVINGFAENGKPEEALALYTEMNSKGIKPDGFTIVSLLSACAKIGALTLGKRVHVYMIKVGLTRNLHSSNVLLDLYARCGRVEEAKTLFDEMVDKNSVSWTSLIVGLAVNGFGKEAIELFKYMESTEGLLPCEITFVGILYACSHCGMVKEGFEYFRRMREEYKIEPRIEHFGCMVDLLARAGQVKKAYEYIKSMPMQPNVVIWRTLLGACTVHGDSDLAEFARIQILQLEPNHSGDYVLLSNMYASEQRWSDVQKIRKQMLRDGVKKVPGHSLVEVGNRVHEFLMGDKSHPQSDAIYAKLKEMTGRLRSEGYVPQISNVYVDVEEEEKENAVVYHSEKIAIAFMLISTPERSPITVVKNLRVCADCHLAIKLVSKVYNREIVVRDRSRSKMADTSHLERMGRELKCPICLSLYNSAVSLSCNHVFCNACIVKSMKMDATCPVCKIPYHRREIRGAPHMDSLVSIYKNMEDASGIKLFVSQNNPSPSDKEKQVRDASVEKASDKNRQGSRKGRASKRNEYGKTKEIDVDAPGPIVMKPSSQTKKRVQLLQNLSAESLTKPTESVETAEKPKDYTENTVIRLDEHPSLNKEGNLSPFFWLRDEDDGENSSQRTESDQLLGTTPVNVPSFSDLMDSDHESPSKEDEQQKPNPGDMFDSEMFEWTQRPCSPEILPSPVKAKVLGRDEIDLTQKKLPKVKVASSKCKNRKAGSARNTVARRSIGVSQEDNMESSAAATISEQQDSRGTSGTIIRNDVNTDENVKAKRATRSKAQSTRVQSDLNVSNEADGKQGTKRKRSSIKSSPAHPIAGPNELSLGTEIVGKGDQDQAHGPSDTHPEKRSPTEKPSLKKRGRKSNASSSLKDLSGKTQKKTSEKKLKLDSHMISSKATQPHGNGILTAGLNQGGDKQDSRNNRKSTVGKDDHTMQVIEKCSTINKSSSGGSAHLRRCNGSLTKKFTCAFCQCSEDTEASGEMTHYYRGEPVSADFNGGSKVIHVHKNCAEWAPNVYFNDLTIVNLDVELTRSRRISCSCCGLKGAALGCYNKSCKNSFHVTCAKLIPECRWDNVKFVMLCPLDASIKLPCEEANSKDRKCKRTPKEPLHSQPKQVSGKANIRELHIKQFHGFSKKLVLSCSGLTVEEKTVIAEFAELSGVTISKNWDSTVTHVIASINENGACKRTLKFMMAILEGKWILTIDWIKACMKNTKYVSEEPYEITMDVHGIREGPYLGRQRALKKKPKLFTGLKFYIMGDFELAYKGYLQDLIVAAGGTILRRRPVSSDDNEASTIVVFSVEPSKKKTLTQRRSDAEALAKSARARAASSSWVLDSIAGCQILVLI

SEQ ID NO: 81257 - DNA, 1602 bp, Arabidopsis thaliana
  misc_feature (1)..(1602): Ceres Seq. ID no. 12659040
  misc_feature: MA Experiment ID: 20000182 Result: Up-regulated in Transcription
  misc_feature: MA Experiment 20000182 PARAMETER Experiment Name: At_2mM_SA_P Parameter: Age (day) Value: 14
  misc_feature: MA Experiment 20000182 PARAMETER Experiment Name: At_2mM_SA_P Parameter: Organism Value: A. thaliana
  misc_feature: MA Experiment 20000182 PARAMETER Experiment Name: At_2mM_SA_P Parameter: Plant Line Value: WS
  misc_feature: MA Experiment 20000182 PARAMETER Experiment Name: At_2mM_SA_P Parameter: Timepoint (hr) Value: 6
  misc_feature: MA Experiment 20000182 PARAMETER Experiment Name: At_2mM_SA_P Parameter: Tissue Value: Aerial
  misc_feature: MA Experiment 20000182 PARAMETER Experiment Name: At_2mM_SA_P Parameter: Treatment Value: 2mM SA vs. No Treatment
  misc_feature: MA Experiment ID: 20000185 Result: Down-regulated in Transcription
  misc_feature: MA Experiment 20000185 PARAMETER Experiment Name: At_Roots__P Parameter: Age (day) Value: 7 vs. 21
  misc_feature: MA Experiment 20000185 PARAMETER Experiment Name: At_Roots__P Parameter: Organism Value: A. thaliana
  misc_feature: MA Experiment 20000185 PARAMETER Experiment Name: At_Roots__P Parameter: Tissue Value: Roots vs. Whole Plant
  misc_feature: MA Experiment ID: 20000234 Result: Down-regulated in Transcription
  misc_feature: MA Experiment 20000234 PARAMETER Experiment Name: At_Siliques_P Parameter: Age (day) Value: 21
  misc_feature: MA Experiment 20000234 PARAMETER Experiment Name: At_Siliques_P Parameter: Organism Value: A. thaliana
  misc_feature: MA Experiment 20000234 PARAMETER Experiment Name: At_Siliques_P Parameter: Plant Line Value: WS
  misc_feature: MA Experiment 20000234 PARAMETER Experiment Name: At_Siliques_P Parameter: Tissue Value: Less Than 5mm Siliques vs. Whole Plant
  misc_feature: MA Experiment ID: 20000235 Result: Down-regulated in Transcription
  misc_feature: MA Experiment 20000235 PARAMETER Experiment Name: At_Siliques_P Parameter: Age (day) Value: 21
  misc_feature: MA Experiment 20000235 PARAMETER Experiment Name: At_Siliques_P Parameter: Organism Value: A. thaliana
  misc_feature: MA Experiment 20000235 PARAMETER Experiment Name: At_Siliques_P Parameter: Plant Line Value: WS
  misc_feature: MA Experiment 20000235 PARAMETER Experiment Name: At_Siliques_P Parameter: Tissue Value: 5-10mm Siliques vs. Whole Plant
  misc_feature: MA Experiment ID: 20000264 Result: Down-regulated in Transcription
  misc_feature: MA Experiment 20000264 PARAMETER Experiment Name: At_Open_Flower_P Parameter: Age (day) Value: 21
  misc_feature: MA Experiment 20000264 PARAMETER Experiment Name: At_Open_Flower_P Parameter: Plant Line Value: WS
  misc_feature: MA Experiment 20000264 PARAMETER Experiment Name: At_Open_Flower_P Parameter: Tissue Value: Open Flower vs. Whole Plant
  misc_feature: MA Experiment ID: 20000265 Result: Down-regulated in Transcription
  misc_feature: MA Experiment 20000265 PARAMETER Experiment Name: At_Open_Flower_P Parameter: Age (day) Value: 21
  misc_feature: MA Experiment 20000265 PARAMETER Experiment Name: At_Open_Flower_P Parameter: Plant Line Value: WS
  misc_feature: MA Experiment 20000265 PARAMETER Experiment Name: At_Open_Flower_P Parameter: Tissue Value: Closed Flower vs. Whole Plant
  misc_feature: MA Experiment ID: 20000438 Result: Down-regulated in Transcription
  misc_feature: MA Experiment 20000438 PARAMETER Experiment Name: At_Shoots__P Parameter: Age (day) Value: 14
  misc_feature: MA Experiment 20000438 PARAMETER Experiment Name: At_Shoots__P Parameter: Tissue Value: Shoots vs. Whole Plant
  misc_feature: MA Experiment ID: 20000456 Result: Up-regulated in Transcription
  misc_feature: MA Experiment 20000456 PARAMETER Experiment Name: At_100uM_BA_P Parameter: Age (day) Value: 14
  misc_feature: MA Experiment 20000456 PARAMETER Experiment Name: At_100uM_BA_P Parameter: Organism Value: A. thaliana
  misc_feature: MA Experiment 20000456 PARAMETER Experiment Name: At_100uM_BA_P Parameter: Plant Line Value: WS
  misc_feature: MA Experiment 20000456 PARAMETER Experiment Name: At_100uM_BA_P Parameter: Timepoint (hr) Value: 6
  misc_feature: MA Experiment 20000456 PARAMETER Experiment Name: At_100uM_BA_P Parameter: Tissue Value: Aerial
  misc_feature: MA Experiment 20000456 PARAMETER Experiment Name: At_100uM_BA_P Parameter: Treatment Value: 100uM BA vs. No Treatment
  misc_feature: MA Experiment ID: 20000709 Result: Down-regulated in Transcription
  misc_feature: MA Experiment 20000709 PARAMETER Experiment Name: At_15mM_NH4NO3_L-to-H_P Parameter: Age (hr) Value: 14
  misc_feature: MA Experiment 20000709 PARAMETER Experiment Name: At_15mM_NH4NO3_L-to-H_P Parameter: Organism Value: A. thaliana
  misc_feature: MA Experiment 20000709 PARAMETER Experiment Name: At_15mM_NH4NO3_L-to-H_P Parameter: Plant Line Value: WS
  misc_feature: MA Experiment 20000709 PARAMETER Experiment Name: At_15mM_NH4NO3_L-to-H_P Parameter: Timepoint (hr) Value: 4
  misc_feature: MA Experiment 20000709 PARAMETER Experiment Name: At_15mM_NH4NO3_L-to-H_P Parameter: Tissue Value: Aerial
  misc_feature: MA Experiment 20000709 PARAMETER Experiment Name: At_15mM_NH4NO3_L-to-H_P Parameter: Treatment Value: 15mM NH4NO3 vs. 30mM Mannitol
  misc_feature: MA Experiment ID: 20000794 Result: Down-regulated in Transcription
  misc_feature: MA Experiment 20000794 PARAMETER Experiment Name: At_Petals_P Parameter: Age (day) Value: 23-25 days
  misc_feature: MA Experiment 20000794 PARAMETER Experiment Name: At_Petals_P Parameter: Plant Line Value: WS
  misc_feature: MA Experiment 20000794 PARAMETER Experiment Name: At_Petals_P Parameter: Tissue Value: Petals vs. Whole plant
  misc_feature: MA Experiment ID: 20001557 Result: Up-regulated in Transcription
  misc_feature: MA Experiment 20001557 PARAMETER Experiment Name: At_Drought_Soil_Dry_P Parameter: Age (day) Value: 27
  misc_feature: MA Experiment 20001557 PARAMETER Experiment Name: At_Drought_Soil_Dry_P Parameter: Organism Value: A. thaliana
  misc_feature: MA Experiment 20001557 PARAMETER Experiment Name: At_Drought_Soil_Dry_P Parameter: Plant Line Value: WS
  misc_feature: MA Experiment 20001557 PARAMETER Experiment Name: At_Drought_Soil_Dry_P Parameter: Post Timepoint (hr) Value: 3
  misc_feature: MA Experiment 20001557 PARAMETER Experiment Name: At_Drought_Soil_Dry_P Parameter: Post-Treatment Value: Re-Water vs. No Drought
  misc_feature: MA Experiment 20001557 PARAMETER Experiment Name: At_Drought_Soil_Dry_P Parameter: Timepoint (day) Value: 13
  misc_feature: MA Experiment 20001557 PARAMETER Experiment Name: At_Drought_Soil_Dry_P Parameter: Treatment Value: Drought vs. No Drought
  misc_feature: MA Experiment ID: 20001560 Result: Down-regulated in Transcription
  misc_feature: MA Experiment 20001560 PARAMETER Experiment Name: At_Drought_Soil_Dry_P Parameter: Age (day) Value: 28
  misc_feature: MA Experiment 20001560 PARAMETER Experiment Name: At_Drought_Soil_Dry_P Parameter: Organism Value: A. thaliana
  misc_feature: MA Experiment 20001560 PARAMETER Experiment Name: At_Drought_Soil_Dry_P Parameter: Plant Line Value: WS
  misc_feature: MA Experiment 20001560 PARAMETER Experiment Name: At_Drought_Soil_Dry_P Parameter: Post Timepoint (hr) Value: None
  misc_feature: MA Experiment 20001560 PARAMETER Experiment Name: At_Drought_Soil_Dry_P Parameter: Post-Treatment Value: None
  misc_feature: MA Experiment 20001560 PARAMETER Experiment Name: At_Drought_Soil_Dry_P Parameter: Timepoint (day) Value: 14
  misc_feature: MA Experiment 20001560 PARAMETER Experiment Name: At_Drought_Soil_Dry_P Parameter: Treatment Value: Drought vs. No Drought
  misc_feature: MA Experiment ID: 20001905 Result: Up-regulated in Transcription
  misc_feature: MA Experiment 20001905 PARAMETER Experiment Name: At_Drought_Reproduction_P Parameter: Age (day) Value: 40
  misc_feature: MA Experiment 20001905 PARAMETER Experiment Name: At_Drought_Reproduction_P Parameter: Organism Value: A. thaliana
  misc_feature: MA Experiment 20001905 PARAMETER Experiment Name: At_Drought_Reproduction_P Parameter: Plant Line Value: WS
  misc_feature: MA Experiment 20001905 PARAMETER Experiment Name: At_Drought_Reproduction_P Parameter: Timepoint (day) Value: 10
  misc_feature: MA Experiment 20001905 PARAMETER Experiment Name: At_Drought_Reproduction_P Parameter: Tissue Value: Rosettes
  misc_feature: MA Experiment 20001905 PARAMETER Experiment Name: At_Drought_Reproduction_P Parameter: Treatment Value: Drought vs. No Drought
atgaaggctcgtagtggtcacgagatgaagaagacgttgacgtggtgggatctcatgtggtttggtatcggtgcagtcatcggctctgggatattcgttctcactggactcgaagcacgtaatcattccggtccagccgtcgtgttgtcttacgttgtctctggtgtctccgccatgctctccgtcttttgttacaccgagttcgccgttgagattcccgtcgcaggcggttcttttgcctacttaagagtggagctcggcgacttcatggccttcatcgccgcgggaaacataatcctcgaatacgttgtcggtggagctgccgtggctcgatcgtggacctcttacttcgccactctcttaaaccataaacctgaagacttccgcatcatagttcacaaactcggcgaagactatagccacttagatccaatagccgtcggcgtttgcgccatcatttgtgttttagctgtcgttggcacaaaaggctcctcaagattcaattacattgcttctataatccacatggtcgtgattctctttgttatcatcgccggatttactaaagccgatgtgaaaaactacagcgatttcactccttacggcgttagaggagtgtttaaatccgccgcggttcttttctttgcctatattggatttgatgcggtttcaacgatggctgaggagacaaagaatccagggagagatattcctattggtcttgttggatcgatggtggttactacggtttgttattgtctcatggcggttacgttgtgtcttatgcagccgtatcaacagattgatccggacgcgccattctcggttgcgttttctgccgttggatgggattgggctaagtacattgtcgcctttggggctcttaaaggtatgacgacggttttgttagttggggccattggtcaagctaggtacatgacacacatagcccgagcccatatgatgcctccatggctagctcaagtcaacgcaaagaccggaacaccaattaacgcgaccgtggtaatgcttgccgcgacagctctcatagcattcttcacaaaactgaaaattttagccgatctcttgtctgtttccacacttttcatcttcatgttcgttgctgtggctcttctcgttagaagatattacgtcaccggagaaacatcgacccgtgaccgtaacaagtttttagtgttcttaggtttgattcttgcgtcctctaccgcgactgctgtttattgggctttggaagaagaaggttggattgggtattgcattacggttcctatatggtttctgtctacggttgccatgaagtttcttgtaccgcaagctagggctccgaaaatttggggtgttcctttggttccgtggttgccttctgcttccatcgctattaatatcttccttcttggttccatcgatacaaaatcgttcgttaggtttgcaatctggacaggtattctgctcatatattacgtcttgtttgggttgcacgcaacgtatgatacagctaaggcgacgttgaaggagaagcaggcattgcagaaagctgaggaaggtggtgttgttgctgataattcttgttctgcaacttaa

SEQ ID NO: 81258 - protein, 533 aa, Arabidopsis thaliana
  peptide (1)..(533): Ceres Seq. ID no. 12659041
  misc_feature (1)..(533): Homolog of NCBI NO: 1076291 NR Description: amino acid transport protein AAT1 - Arabidopsis >gi|2911069|emb|CAA17531.1| amino acid transport protein AAT1 thaliana] >gi|7268909|emb|CAB79112.1| amino acid transport
  misc_feature (1)..(533): Homolog of NCBI NO: 30685317 NR Description: amino acid transport protein AAT1 [Arabidopsis
  misc_feature (1)..(506): Homolog of NCBI NO: 34903850 NR Description: unnamed protein product [Oryza sativa (japonica group)] >gi|8096566|dbj|BAA96139.1| unnamed protein product
  misc_feature (1)..(506): Homolog of NCBI NO: 15226868 NR Description: putative amino acid transporter; protein id: supported by cDNA: gi_19699364 [Arabidopsis thaliana]
  misc_feature (2)..(512): Homolog of NCBI NO: 15220035 NR Description: putative amino acid transporter; protein id: supported by cDNA: gi_18176203 [Arabidopsis thaliana] amino acid transporter homolog [imported] similar to amino acid
  misc_feature (59)..(506): Homolog of NCBI NO: 19699365 NR Description: At2g34960/F19I3.19 [Arabidopsis thaliana]
  misc_feature (1)..(521): Homolog of NCBI NO: 15238312 NR Description: amino acid transport - like protein; protein id: supported by cDNA: 158156., supported by cDNA: gi_13430547, by cDNA: gi_14532753 [Arabidopsis thaliana]
  misc_feature (1)..(518): Homolog of NCBI NO: 15228334 NR Description: putative amino acid transporter; protein id: [Arabidopsis thaliana] >gi|8567793|gb|AAF76365.1| amino acid putative [Arabidopsis thaliana]
  misc_feature (1)..(503): Homolog of NCBI NO: 38345948 NR Description: OSJNBb0103I08.20 [Oryza sativa (japonica
  misc_feature (8)..(383): Homolog of NCBI NO: 39586893 NR Description: Hypothetical protein CBG07007 [Caenorhabditis
MKARSGHEMKKTLTWWDLMWFGIGAVIGSGIFVLTGLEARNHSGPAVVLSYVVSGVSAMLSVFCYTEFAVEIPVAGGSFAYLRVELGDFMAFIAAGNIILEYVVGGAAVARSWTSYFATLLNHKPEDFRIIVHKLGEDYSHLDPIAVGVCAIICVLAVVGTKGSSRFNYIASIIHMVVILFVIIAGFTKADVKNYSDFTPYGVRGVFKSAAVLFFAYIGFDAVSTMAEETKNPGRDIPIGLVGSMVVTTVCYCLMAVTLCLMQPYQQIDPDAPFSVAFSAVGWDWAKYIVAFGALKGMTTVLLVGAIGQARYMTHIARAHMMPPWLAQVNAKTGTPINATVVMLAATALIAFFTKLKILADLLSVSTLFIFMFVAVALLVRRYYVTGETSTRDRNKFLVFLGLILASSTATAVYWALEEEGWIGYCITVPIWFLSTVAMKFLVPQARAPKIWGVPLVPWLPSASIAINIFLLGSIDTKSFVRFAIWTGILLIYYVLFGLHATYDTAKATLKEKQALQKAEEGGVVADNSCSAT

SEQ ID NO: 81259 - protein, 525 aa, Arabidopsis thaliana
  peptide (1)..(525): Ceres Seq. ID no. 12659042
  misc_feature (1)..(525): Homolog of NCBI NO: 1076291 NR Description: amino acid transport protein AAT1 - Arabidopsis >gi|2911069|emb|CAA17531.1| amino acid transport protein AAT1 thaliana] >gi|7268909|emb|CAB79112.1| amino acid transport
  misc_feature (1)..(525): Homolog of NCBI NO: 30685317 NR Description: amino acid transport protein AAT1 [Arabidopsis
  misc_feature (1)..(498): Homolog of NCBI NO: 34903850 NR Description: unnamed protein product [Oryza sativa (japonica group)] >gi|8096566|dbj|BAA96139.1| unnamed protein product
  misc_feature (1)..(498): Homolog of NCBI NO: 15226868 NR Description: putative amino acid transporter; protein id: supported by cDNA: gi_19699364 [Arabidopsis thaliana]
  misc_feature (1)..(504): Homolog of NCBI NO: 15220035 NR Description: putative amino acid transporter; protein id: supported by cDNA: gi_18176203 [Arabidopsis thaliana] amino acid transporter homolog [imported] similar to amino acid
  misc_feature (51)..(498): Homolog of NCBI NO: 19699365 NR Description: At2g34960/F19I3.19 [Arabidopsis thaliana]
  misc_feature (1)..(513): Homolog of NCBI NO: 15238312 NR Description: amino acid transport - like protein; protein id: supported by cDNA: 158156., supported by cDNA: gi_13430547, by cDNA: gi_14532753 [Arabidopsis thaliana]
  misc_feature (1)..(510): Homolog of NCBI NO: 15228334 NR Description: putative amino acid transporter; protein id: [Arabidopsis thaliana] >gi|8567793|gb|AAF76365.1| amino acid putative [Arabidopsis thaliana]
  misc_feature (1)..(495): Homolog of NCBI NO: 38345948 NR Description: OSJNBb0103I08.20 [Oryza sativa (japonica
  misc_feature (1)..(375): Homolog of NCBI NO: 39586893 NR Description: Hypothetical protein CBG07007 [Caenorhabditis
MKKTLTWWDLMWFGIGAVIGSGIFVLTGLEARNHSGPAVVLSYVVSGVSAMLSVFCYTEFAVEIPVAGGSFAYLRVELGDFMAFIAAGNIILEYVVGGAAVARSWTSYFATLLNHKPEDFRIIVHKLGEDYSHLDPIAVGVCAIICVLAVVGTKGSSRFNYIASIIHMVVILFVIIAGFTKADVKNYSDFTPYGVRGVFKSAAVLFFAYIGFDAVSTMAEETKNPGRDIPIGLVGSMVVTTVCYCLMAVTLCLMQPYQQIDPDAPFSVAFSAVGWDWAKYIVAFGALKGMTTVLLVGAIGQARYMTHIARAHMMPPWLAQVNAKTGTPINATVVMLAATALIAFFTKLKILADLLSVSTLFIFMFVAVALLVRRYYVTGETSTRDRNKFLVFLGLILASSTATAVYWALEEEGWIGYCITVPIWFLSTVAMKFLVPQARAPKIWGVPLVPWLPSASIAINIFLLGSIDTKSFVRFAIWTGILLIYYVLFGLHATYDTAKATLKEKQALQKAEEGGVVADNSCSAT

SEQ ID NO: 81260 - protein, 515 aa, Arabidopsis thaliana
  peptide (1)..(515): Ceres Seq. ID no. 12659043
  misc_feature (1)..(515): Homolog of NCBI NO: 1076291 NR Description: amino acid transport protein AAT1 - Arabidopsis >gi|2911069|emb|CAA17531.1| amino acid transport protein AAT1 thaliana] >gi|7268909|emb|CAB79112.1| amino acid transport
  misc_feature (1)..(515): Homolog of NCBI NO: 30685317 NR Description: amino acid transport protein AAT1 [Arabidopsis
  misc_feature (1)..(488): Homolog of NCBI NO: 34903850 NR Description: unnamed protein product [Oryza sativa (japonica group)] >gi|8096566|dbj|BAA96139.1| unnamed protein product
  misc_feature (1)..(488): Homolog of NCBI NO: 15226868 NR Description: putative amino acid transporter; protein id: supported by cDNA: gi_19699364 [Arabidopsis thaliana]
  misc_feature (1)..(494): Homolog of NCBI NO: 15220035 NR Description: putative amino acid transporter; protein id: supported by cDNA: gi_18176203 [Arabidopsis thaliana] amino acid transporter homolog [imported] similar to amino acid
  misc_feature (41)..(488): Homolog of NCBI NO: 19699365 NR Description: At2g34960/F19I3.19 [Arabidopsis thaliana]
  misc_feature (1)..(503): Homolog of NCBI NO: 15238312 NR Description: amino acid transport - like protein; protein id: supported by cDNA: 158156., supported by cDNA: gi_13430547, by cDNA: gi_14532753 [Arabidopsis thaliana]
  misc_feature (1)..(500): Homolog of NCBI NO: 15228334 NR Description: putative amino acid transporter; protein id: [Arabidopsis thaliana] >gi|8567793|gb|AAF76365.1| amino acid putative [Arabidopsis thaliana]
  misc_feature (1)..(485): Homolog of NCBI NO: 38345948 NR Description: OSJNBb0103I08.20 [Oryza sativa (japonica
  misc_feature (1)..(365): Homolog of NCBI NO: 39586893 NR Description: Hypothetical protein CBG07007 [Caenorhabditis
MWFGIGAVIGSGIFVLTGLEARNHSGPAVVLSYVVSGVSAMLSVFCYTEFAVEIPVAGGSFAYLRVELGDFMAFIAAGNIILEYVVGGAAVARSWTSYFATLLNHKPEDFRIIVHKLGEDYSHLDPIAVGVCAIICVLAVVGTKGSSRFNYIASIIHMVVILFVIIAGFTKADVKNYSDFTPYGVRGVFKSAAVLFFAYIGFDAVSTMAEETKNPGRDIPIGLVGSMVVTTVCYCLMAVTLCLMQPYQQIDPDAPFSVAFSAVGWDWAKYIVAFGALKGMTTVLLVGAIGQARYMTHIARAHMMPPWLAQVNAKTGTPINATVVMLAATALIAFFTKLKILADLLSVSTLFIFMFVAVALLVRRYYVTGETSTRDRNKFLVFLGLILASSTATAVYWALEEEGWIGYCITVPIWFLSTVAMKFLVPQARAPKIWGVPLVPWLPSASIAINIFLLGSIDTKSFVRFAIWTGILLIYYVLFGLHATYDTAKATLKEKQALQKAEEGGVVADNSCSAT

SEQ ID NO: 81261 - DNA, 2849 bp, Arabidopsis thaliana
  misc_feature (1)..(2849): Ceres Seq. ID no. 12659055
  misc_feature: MA Experiment ID: 20000179 Result: Down-regulated in Transcription
  misc_feature: MA Experiment 20000179 PARAMETER Experiment Name: At_Germinating_Seeds_P Parameter: Age (hr) Value: 6 vs. 0
  misc_feature: MA Experiment 20000179 PARAMETER Experiment Name: At_Germinating_Seeds_P Parameter: Tissue Value: Germinating Seeds
  misc_feature: MA Experiment ID: 20000234 Result: Up-regulated in Transcription
  misc_feature: MA Experiment 20000234 PARAMETER Experiment Name: At_Siliques_P Parameter: Age (day) Value: 21
  misc_feature: MA Experiment 20000234 PARAMETER Experiment Name: At_Siliques_P Parameter: Organism Value: A. thaliana
  misc_feature: MA Experiment 20000234 PARAMETER Experiment Name: At_Siliques_P Parameter: Plant Line Value: WS
  misc_feature: MA Experiment 20000234 PARAMETER Experiment Name: At_Siliques_P Parameter: Tissue Value: Less Than 5mm Siliques vs. Whole Plant
  misc_feature: MA Experiment ID: 20000264 Result: Up-regulated in Transcription
  misc_feature: MA Experiment 20000264 PARAMETER Experiment Name: At_Open_Flower_P Parameter: Age (day) Value: 21
  misc_feature: MA Experiment 20000264 PARAMETER Experiment Name: At_Open_Flower_P Parameter: Plant Line Value: WS
  misc_feature: MA Experiment 20000264 PARAMETER Experiment Name: At_Open_Flower_P Parameter: Tissue Value: Open Flower vs. Whole Plant
  misc_feature: MA Experiment ID: 20000286 Result: Up-regulated in Transcription
  misc_feature: MA Experiment 20000286 PARAMETER Experiment Name: At_Open_Flower_P Parameter: Age (day) Value: 21
  misc_feature: MA Experiment 20000286 PARAMETER Experiment Name: At_Open_Flower_P Parameter: Plant Line Value: WS
  misc_feature: MA Experiment 20000286 PARAMETER Experiment Name: At_Open_Flower_P Parameter: Tissue Value: Half Open vs. Whole Plant
gaaactacaggctcctgcttcagtcacacacttacacacacacaaaaatccccaaattaggaaaaagtaagaatcctagtttctcgacttcgattgagaaggttttcgatttgattctctaagatcttgagaatcaatcggagattttattgtcggtaacccgaatttagggagaagactaccattttgggatttttatgcacttgacgagcgaaaggagaagaaatttgtagcaattttgagtctcggagatggcttctcgcaaccagaatcgtcctcctcgcagtccaaacgccaaaaaggagggtctcggtggcatttcatttgacaagcgaaggaaagtggaaacgcaaggaggtactgggagaagacaagctttttcggctgtgaataaacaagatgtcacgatgaacagcgatgtagggagcattgaagaatgtggtaaagttgactttacaaaagatgaaatattggcgttgctcagtgagagagcaaaagctggaaagtttgatactaaggctaagattgagcaaatgacggatattatcaagaggctgaaggtttgtgtaaaatggttccaacaagctgatgaaacccatgtccaagagaaggaaaatttgaaggtttctttggaatcttcagaacaaaaatacaaccacaaagagttggaggctaggacaaaagaggaagagctacaggccactatctcaaagttggaagagaatgtagtgtcactacatgaaaagcttgcaaaggaggagtctagtacacaggacgccattgaatgtcatagaagagaaaaagaagctagagttgcagctgaaaaagtgcaggcttctctcggagaagaacttgataaagttaaggaagagaaaatggctgccaagcagaaggtgacgtcacttgaggatatgtacaaaaggctgcaagagtacaacacaagtttgcaacaatataacagcaaacttcagactgatcttgaaacagttcgagctgcactcacacgtgctgaaaaagagaagtcaagcatcctggagaatcttagtacacttaggggacacagcaagtcgctgcaggatcaactatcttcaagcagagtgttgcaagatgacgctataaaacagaaggattcattgctttcggaagttactaatcttcggaatgagctccaacaagtccgggatgaccgtgatcgccaagttgtacagtcacagaagctgtctgaggagatcaggaagtaccaggagaatgtcggaaagtcatcgcaagagctagacatcttgacagcaaaatcaggatcgttggaggagacatgttcgttgcagaaggagcgtttaaatatgttagagcagcaattagcaatcgccaatgaaaggcaaaagatggcagatgcatcagtatctcttactaggacagagtttgaggagcagaagcatctactgtgcgaactacaagaccggcttgcagacatggagcatcaactgtgtgagggagagttattgcggaagaagcttcataacactattcttgaattaaaaggaaatatacgtgtcttctgccgagtgcgtcccttgttaccagacgatggaggacgacatgaagcaactgtaatagcctatcctacttcaacagaagcccaaggaagaggtgttgatttggttcagagtgggaacaaacatcctttcacctttgacaaagttttcaaccacgaagcttcccaggaggaagtattctttgaaatatctcaacttgtacagagtgcattggatggctataaggtttgtatctttgcctacggtcagaccggttctggaaagacctacaccatgatgggccggcctgaggcgccagatcagaaaggactgatccctcgatcacttgaacagatattccaagccagtcaatcactcggtgcacaaggctggaagtacaagatgcaggtatcgatgttggagatatataatgagaccatcagagatttgctctctacaaatcgaacaacttctatggacttggtgcgagcagacagtggcacctcaggaaagcaatatacaatcactcatgacgtaaatggacacacccatgtcagcgacttgaccatatttgatgtgtgcagcgttggaaagatatcctcactcttgcagcaggctgctcagagcaggtcagtagggaagactcaaatgaatgagcaatcatctagaagtcatttcgtgtttactatgaggatttcaggtgttaatgagagcaccgaacagcaggtacaaggtgttctcaacctaatagatcttgctggaagcgagaggctatcgaagagtggggcaactggagatcgattaaaagagacacaggctataaacaaaagtttatcagctttgagtgatgtaatatttgcattggctaagaaagaagatcatgttcctttcagaaactcaaagctaacatatctgctccagccttgcctaggaggagattcaaagaccttgatgttcgtaaacatttcgcctgacccaacttctgctggagagtctctttgctcactccggtttgctgctagagtaaatgcgtgtgaaattggtatacctaggcgacaaacttcaacgaagctccttgactctcgcttaagctatggctaaaaatgttcagaagatctgccaattattgattcacaactcttctcttgtgggttttgacacatcaatctcttatcttgtaacctcttaaactcattactaacattttttccggatctttatgatagtagagcagcttgctgtcttagcaatgtggctttctctatgttgtatgagaaacataatcctctgctattcaatgtttaaatgtattttttc

SEQ ID NO: 81262 - protein, 793 aa, Arabidopsis thaliana
  peptide (1)..(793): Ceres Seq. ID no. 12659056
  misc_feature (41)..(501): Pfam Name: Myosin tail Pfam Description: Myosin tail
  misc_feature (31)..(793): Homolog of NCBI NO: 18423656 NR Description: kinesin-like protein C (katC); protein id:
  misc_feature (53)..(793): Homolog of NCBI NO: 18416938 NR Description: kinesin-like protein B (katB); protein id:
  misc_feature (49)..(793): Homolog of NCBI NO: 7446304 NR Description: kinesin-related protein katB - Arabidopsis
  misc_feature (1)..(397): Homolog of NCBI NO: 4455160 NR Description: kinesin-related protein katA (fragment)
  misc_feature (134)..(793): Homolog of NCBI NO: 10176794 NR Description: kinesin-like protein [Arabidopsis thaliana]
  misc_feature (386)..(786): Homolog of NCBI NO: 33354214 NR Description: kinesin-related protein KLPA-like protein [Oryza
  misc_feature (427)..(781): Homolog of NCBI NO: 15208457 NR Description: kinesin heavy chain [Zea mays]
  misc_feature (501)..(777): Homolog of NCBI NO: 15208463 NR Description: kinesin heavy chain [Zea mays]
  misc_feature (127)..(781): Homolog of NCBI NO: 19114370 NR Description: kinesin-like protein [Schizosaccharomyces pombe]
  misc_feature (225)..(780): Homolog of NCBI NO: 3133267 NR Description: kinesin-related protein K2 [Dictyostelium
MASRNQNRPPRSPNAKKEGLGGISFDKRRKVETQGGTGRRQAFSAVNKQDVTMNSDVGSIEECGKVDFTKDEILALLSERAKAGKFDTKAKIEQMTDIIKRLKVCVKWFQQADETHVQEKENLKVSLESSEQKYNHKELEARTKEEELQATISKLEENVVSLHEKLAKEESSTQDAIECHRREKEARVAAEKVQASLGEELDKVKEEKMAAKQKVTSLEDMYKRLQEYNTSLQQYNSKLQTDLETVRAALTRAEKEKSSILENLSTLRGHSKSLQDQLSSSRVLQDDAIKQKDSLLSEVTNLRNELQQVRDDRDRQVVQSQKLSEEIRKYQENVGKSSQELDILTAKSGSLEETCSLQKERLNMLEQQLAIANERQKMADASVSLTRTEFEEQKHLLCELQDRLADMEHQLCEGELLRKKLHNTILELKGNIRVFCRVRPLLPDDGGRHEATVIAYPTSTEAQGRGVDLVQSGNKHPFTFDKVFNHEASQEEVFFEISQLVQSALDGYKVCIFAYGQTGSGKTYTMMGRPEAPDQKGLIPRSLEQIFQASQSLGAQGWKYKMQVSMLEIYNETIRDLLSTNRTTSMDLVRADSGTSGKQYTITHDVNGHTHVSDLTIFDVCSVGKISSLLQQAAQSRSVGKTQMNEQSSRSHFVFTMRISGVNESTEQQVQGVLNLIDLAGSERLSKSGATGDRLKETQAINKSLSALSDVIFALAKKEDHVPFRNSKLTYLLQPCLGGDSKTLMFVNISPDPTSAGESLCSLRFAARVNACEIGIPRRQTSTKLLDSRLSYG

SEQ ID NO: 81263 - protein, 741 aa, Arabidopsis thaliana
  peptide (1)..(741): Ceres Seq. ID no. 12659057
  misc_feature (1)..(449): Pfam Name: Myosin tail Pfam Description: Myosin tail
  misc_feature (1)..(741): Homolog of NCBI NO: 18423656 NR Description: kinesin-like protein C (katC); protein id:
  misc_feature (1)..(741): Homolog of NCBI NO: 18416938 NR Description: kinesin-like protein B (katB); protein id:
  misc_feature (1)..(741): Homolog of NCBI NO: 7446304 NR Description: kinesin-related protein katB - Arabidopsis
  misc_feature (1)..(345): Homolog of NCBI NO: 4455160 NR Description: kinesin-related protein katA (fragment)
  misc_feature (82)..(741): Homolog of NCBI NO: 10176794 NR Description: kinesin-like protein [Arabidopsis thaliana]
  misc_feature (334)..(734): Homolog of NCBI NO: 33354214 NR Description: kinesin-related protein KLPA-like protein [Oryza
  misc_feature (375)..(729): Homolog of NCBI NO: 15208457 NR Description: kinesin heavy chain [Zea mays]
  misc_feature (449)..(725): Homolog of NCBI NO: 15208463 NR Description: kinesin heavy chain [Zea mays]
  misc_feature (75)..(729): Homolog of NCBI NO: 19114370 NR Description: kinesin-like protein [Schizosaccharomyces pombe]
  misc_feature (173)..(728): Homolog of NCBI NO: 3133267 NR Description: kinesin-related protein K2 [Dictyostelium
MNSDVGSIEECGKVDFTKDEILALLSERAKAGKFDTKAKIEQMTDIIKRLKVCVKWFQQADETHVQEKENLKVSLESSEQKYNHKELEARTKEEELQATISKLEENVVSLHEKLAKEESSTQDAIECHRREKEARVAAEKVQASLGEELDKVKEEKMAAKQKVTSLEDMYKRLQEYNTSLQQYNSKLQTDLETVRAALTRAEKEKSSILENLSTLRGHSKSLQDQLSSSRVLQDDAIKQKDSLLSEVTNLRNELQQVRDDRDRQVVQSQKLSEEIRKYQENVGKSSQELDILTAKSGSLEETCSLQKERLNMLEQQLAIANERQKMADASVSLTRTEFEEQKHLLCELQDRLADMEHQLCEGELLRKKLHNTILELKGNIRVFCRVRPLLPDDGGRHEATVIAYPTSTEAQGRGVDLVQSGNKHPFTFDKVFNHEASQEEVFFEISQLVQSALDGYKVCIFAYGQTGSGKTYTMMGRPEAPDQKGLIPRSLEQIFQASQSLGAQGWKYKMQVSMLEIYNETIRDLLSTNRTTSMDLVRADSGTSGKQYTITHDVNGHTHVSDLTIFDVCSVGKISSLLQQAAQSRSVGKTQMNEQSSRSHFVFTMRISGVNESTEQQVQGVLNLIDLAGSERLSKSGATGDRLKETQAINKSLSALSDVIFALAKKEDHVPFRNSKLTYLLQPCLGGDSKTLMFVNISPDPTSAGESLCSLRFAARVNACEIGIPRRQTSTKLLDSRLSYG

SEQ ID NO: 81264 - protein, 699 aa, Arabidopsis thaliana
  peptide (1)..(699): Ceres Seq. ID no. 12659058
  misc_feature (1)..(407): Pfam Name: Myosin tail Pfam Description: Myosin tail
  misc_feature (1)..(699): Homolog of NCBI NO: 18423656 NR Description: kinesin-like protein C (katC); protein id:
  misc_feature (1)..(699): Homolog of NCBI NO: 18416938 NR Description: kinesin-like protein B (katB); protein id:
  misc_feature (1)..(699): Homolog of NCBI NO: 7446304 NR Description: kinesin-related protein katB - Arabidopsis
  misc_feature (1)..(303): Homolog of NCBI NO: 4455160 NR Description: kinesin-related protein katA (fragment)
  misc_feature (40)..(699): Homolog of NCBI NO: 10176794 NR Description: kinesin-like protein [Arabidopsis thaliana]
  misc_feature (292)..(692): Homolog of NCBI NO: 33354214 NR Description: kinesin-related protein KLPA-like protein [Oryza
  misc_feature (333)..(687): Homolog of NCBI NO: 15208457 NR Description: kinesin heavy chain [Zea mays]
  misc_feature (407)..(683): Homolog of NCBI NO: 15208463 NR Description: kinesin heavy chain [Zea mays]
  misc_feature (33)..(687): Homolog of NCBI NO: 19114370 NR Description: kinesin-like protein [Schizosaccharomyces pombe]
  misc_feature (131)..(686): Homolog of NCBI NO: 3133267 NR Description: kinesin-related protein K2 [Dictyostelium
MTDIIKRLKVCVKWFQQADETHVQEKENLKVSLESSEQKYNHKELEARTKEEELQATISKLEENVVSLHEKLAKEESSTQDAIECHRREKEARVAAEKVQASLGEELDKVKEEKMAAKQKVTSLEDMYKRLQEYNTSLQQYNSKLQTDLETVRAALTRAEKEKSSILENLSTLRGHSKSLQDQLSSSRVLQDDAIKQKDSLLSEVTNLRNELQQVRDDRDRQVVQSQKLSEEIRKYQENVGKSSQELDILTAKSGSLEETCSLQKERLNMLEQQLAIANERQKMADASVSLTRTEFEEQKHLLCELQDRLADMEHQLCEGELLRKKLHNTILELKGNIRVFCRVRPLLPDDGGRHEATVIAYPTSTEAQGRGVDLVQSGNKHPFTFDKVFNHEASQEEVFFEISQLVQSALDGYKVCIFAYGQTGSGKTYTMMGRPEAPDQKGLIPRSLEQIFQASQSLGAQGWKYKMQVSMLEIYNETIRDLLSTNRTTSMDLVRADSGTSGKQYTITHDVNGHTHVSDLTIFDVCSVGKISSLLQQAAQSRSVGKTQMNEQSSRSHFVFTMRISGVNESTEQQVQGVLNLIDLAGSERLSKSGATGDRLKETQAINKSLSALSDVIFALAKKEDHVPFRNSKLTYLLQPCLGGDSKTLMFVNISPDPTSAGESLCSLRFAARVNACEIGIPRRQTSTKLLDSRLSYG

SEQ ID NO: 81265 - DNA, 507 bp, Arabidopsis thaliana
  misc_feature (1)..(507): Ceres Seq. ID no. 12659059
  misc_feature: MA Experiment ID: 20000327 Result: Up-regulated in Transcription
  misc_feature: MA Experiment 20000327 PARAMETER Experiment Name: At_42deg_Heat_Sub_P Parameter: Age (day) Value: 14
  misc_feature: MA Experiment 20000327 PARAMETER Experiment Name: At_42deg_Heat_Sub_P Parameter: Organism Value: A. thaliana
  misc_feature: MA Experiment 20000327 PARAMETER Experiment Name: At_42deg_Heat_Sub_P Parameter: Plant Line Value: WS
  misc_feature: MA Experiment 20000327 PARAMETER Experiment Name: At_42deg_Heat_Sub_P Parameter: Temperature (deg C) Value: 42 vs. 22
  misc_feature: MA Experiment 20000327 PARAMETER Experiment Name: At_42deg_Heat_Sub_P Parameter: Timepoint (hr) Value: 1
  misc_feature: MA Experiment 20000327 PARAMETER Experiment Name: At_42deg_Heat_Sub_P Parameter: Tissue Value: Aerial
atggcgaggaatgtagggttcttcatctgcatcttgatcctagccatggatgtttcggctggaattctcggcattgaagccgaaatagctcagaacaaggtgaagcatttgaagatgtggatattcgagtgtagagacccgagttacacagccttcaagtacggtttagctgcgtgcatccttttggtgttagcccatgtaacggctaattttcttggtgggtgtctctgtgttgcctcaagacaagaccttgaaaaatcctctgccaataaacagctcgctgtggcttctctgatattcacgtggatcatattggcgattgcattttcgatgttgatagtagggacgatggcaaactcaagatcgagaaaaaactgtgggatatcacaccatcgggttctgtccataggagggatcctctgtttcgttcacggcctctttgctgttgcttattacatctctgcaactgcttcaacacgagaacagacaagcgcaggccacgcttga

SEQ ID NO: 81266 - protein, 168 aa, Arabidopsis thaliana
  peptide (1)..(168): Ceres Seq. ID no. 12659060
  misc_feature (1)..(168): Homolog of NCBI NO: 15233592 NR Description: putative protein; protein id: At4g21310.1
  misc_feature (1)..(161): Homolog of NCBI NO: 15225221 NR Description: hypothetical protein; protein id: At2g32280.1
  misc_feature (1)..(162): Homolog of NCBI NO: 34393261 NR Description: unknown protein [Oryza sativa (japonica
  misc_feature (1)..(161): Homolog of NCBI NO: 15220395 NR Description: hypothetical protein; protein id: At1g11500.1
  misc_feature (9)..(155): Homolog of NCBI NO: 25406837 NR Description: YUP8H12.9 [imported] - Arabidopsis thaliana
  misc_feature (45)..(102): Homolog of NCBI NO: 26452012 NR Description: unknown protein [Arabidopsis thaliana]
MARNVGFFICILILAMDVSAGILGIEAEIAQNKVKHLKMWIFECRDPSYTAFKYGLAACILLVLAHVTANFLGGCLCVASRQDLEKSSANKQLAVASLIFTWIILAIAFSMLIVGTMANSRSRKNCGISHHRVLSIGGILCFVHGLFAVAYYISATASTREQTSAGHA

SEQ ID NO: 81267 - protein, 153 aa, Arabidopsis thaliana
  peptide (1)..(153): Ceres Seq. ID no. 12659061
  misc_feature (1)..(153): Homolog of NCBI NO: 15233592 NR Description: putative protein; protein id: At4g21310.1
  misc_feature (1)..(146): Homolog of NCBI NO: 15225221 NR Description: hypothetical protein; protein id: At2g32280.1
  misc_feature (1)..(147): Homolog of NCBI NO: 34393261 NR Description: unknown protein [Oryza sativa (japonica
  misc_feature (1)..(146): Homolog of NCBI NO: 15220395 NR Description: hypothetical protein; protein id: At1g11500.1
  misc_feature (1)..(140): Homolog of NCBI NO: 25406837 NR Description: YUP8H12.9 [imported] - Arabidopsis thaliana
  misc_feature (30)..(87): Homolog of NCBI NO: 26452012 NR Description: unknown protein [Arabidopsis thaliana]
MDVSAGILGIEAEIAQNKVKHLKMWIFECRDPSYTAFKYGLAACILLVLAHVTANFLGGCLCVASRQDLEKSSANKQLAVASLIFTWIILAIAFSMLIVGTMANSRSRKNCGISHHRVLSIGGILCFVHGLFAVAYYISATASTREQTSAGHA

SEQ ID NO: 81268 - protein, 130 aa, Arabidopsis thaliana
  peptide (1)..(130): Ceres Seq. ID no. 12659062
  misc_feature (1)..(130): Homolog of NCBI NO: 15233592 NR Description: putative protein; protein id: At4g21310.1
  misc_feature (1)..(123): Homolog of NCBI NO: 15225221 NR Description: hypothetical protein; protein id: At2g32280.1
  misc_feature (1)..(124): Homolog of NCBI NO: 34393261 NR Description: unknown protein [Oryza sativa (japonica
  misc_feature (1)..(123): Homolog of NCBI NO: 15220395 NR Description: hypothetical protein; protein id: At1g11500.1
  misc_feature (1)..(117): Homolog of NCBI NO: 25406837 NR Description: YUP8H12.9 [imported] - Arabidopsis thaliana
  misc_feature (7)..(64): Homolog of NCBI NO: 26452012 NR Description: unknown protein [Arabidopsis thaliana]
MWIFECRDPSYTAFKYGLAACILLVLAHVTANFLGGCLCVASRQDLEKSSANKQLAVASLIFTWIILAIAFSMLIVGTMANSRSRKNCGISHHRVLSIGGILCFVHGLFAVAYYISATASTREQTSAGHA

SEQ ID NO: 81269 - DNA, 2550 bp, Arabidopsis thaliana
  misc_feature (1)..(2550): Ceres Seq. ID no. 12659089
  misc_feature: MA Experiment ID: 20000182 Result: Up-regulated in Transcription
  misc_feature: MA Experiment 20000182 PARAMETER Experiment Name: At_2mM_SA_P Parameter: Age (day) Value: 14
  misc_feature: MA Experiment 20000182 PARAMETER Experiment Name: At_2mM_SA_P Parameter: Organism Value: A. thaliana
  misc_feature: MA Experiment 20000182 PARAMETER Experiment Name: At_2mM_SA_P Parameter: Plant Line Value: WS
  misc_feature: MA Experiment 20000182 PARAMETER Experiment Name: At_2mM_SA_P Parameter: Timepoint (hr) Value: 6
  misc_feature: MA Experiment 20000182 PARAMETER Experiment Name: At_2mM_SA_P Parameter: Tissue Value: Aerial
  misc_feature: MA Experiment 20000182 PARAMETER Experiment Name: At_2mM_SA_P Parameter: Treatment Value: 2mM SA vs. No Treatment
  misc_feature: MA Experiment ID: 20000234 Result: Down-regulated in Transcription
  misc_feature: MA Experiment 20000234 PARAMETER Experiment Name: At_Siliques_P Parameter: Age (day) Value: 21
  misc_feature: MA Experiment 20000234 PARAMETER Experiment Name: At_Siliques_P Parameter: Organism Value: A. thaliana
  misc_feature: MA Experiment 20000234 PARAMETER Experiment Name: At_Siliques_P Parameter: Plant Line Value: WS
  misc_feature: MA Experiment 20000234 PARAMETER Experiment Name: At_Siliques_P Parameter: Tissue Value: Less Than 5mm Siliques vs. Whole Plant
  misc_feature: MA Experiment ID: 20000235 Result: Down-regulated in Transcription
  misc_feature: MA Experiment 20000235 PARAMETER Experiment Name: At_Siliques_P Parameter: Age (day) Value: 21
  misc_feature: MA Experiment 20000235 PARAMETER Experiment Name: At_Siliques_P Parameter: Organism Value: A. thaliana
  misc_feature: MA Experiment 20000235 PARAMETER Experiment Name: At_Siliques_P Parameter: Plant Line Value: WS
  misc_feature: MA Experiment 20000235 PARAMETER Experiment Name: At_Siliques_P Parameter: Tissue Value: 5-10mm Siliques vs. Whole Plant
  misc_feature: MA Experiment ID: 20000264 Result: Down-regulated in Transcription
  misc_feature: MA Experiment 20000264 PARAMETER Experiment Name: At_Open_Flower_P Parameter: Age (day) Value: 21
  misc_feature: MA Experiment 20000264 PARAMETER Experiment Name: At_Open_Flower_P Parameter: Plant Line Value: WS
  misc_feature: MA Experiment 20000264 PARAMETER Experiment Name: At_Open_Flower_P Parameter: Tissue Value: Open Flower vs. Whole Plant
  misc_feature: MA Experiment ID: 20000265 Result: Down-regulated in Transcription
  misc_feature: MA Experiment 20000265 PARAMETER Experiment Name: At_Open_Flower_P Parameter: Age (day) Value: 21
  misc_feature: MA Experiment 20000265 PARAMETER Experiment Name: At_Open_Flower_P Parameter: Plant Line Value: WS
  misc_feature: MA Experiment 20000265 PARAMETER Experiment Name: At_Open_Flower_P Parameter: Tissue Value: Closed Flower vs. Whole Plant
  misc_feature: MA Experiment ID: 20000438 Result: Down-regulated in Transcription
  misc_feature: MA Experiment 20000438 PARAMETER Experiment Name: At_Shoots__P Parameter: Age (day) Value: 14
  misc_feature: MA Experiment 20000438 PARAMETER Experiment Name: At_Shoots__P Parameter: Tissue Value: Shoots vs. Whole Plant
  misc_feature: MA Experiment ID: 20000453 Result: Up-regulated in Transcription
  misc_feature: MA Experiment 20000453 PARAMETER Experiment Name: At_100uM_ABA_P Parameter: Age (day) Value: 15
  misc_feature: MA Experiment 20000453 PARAMETER Experiment Name: At_100uM_ABA_P Parameter: Organism Value: A. thaliana
  misc_feature: MA Experiment 20000453 PARAMETER Experiment Name: At_100uM_ABA_P Parameter: Plant Line Value: WS
  misc_feature: MA Experiment 20000453 PARAMETER Experiment Name: At_100uM_ABA_P Parameter: Timepoint (hr) Value: 24
  misc_feature: MA Experiment 20000453 PARAMETER Experiment Name: At_100uM_ABA_P Parameter: Tissue Value: Aerial
  misc_feature: MA Experiment 20000453 PARAMETER Experiment Name: At_100uM_ABA_P Parameter: Treatment Value: 100uM ABA vs. No Treatment
  misc_feature: MA Experiment ID: 20000456 Result: Up-regulated in Transcription
  misc_feature: MA Experiment 20000456 PARAMETER Experiment Name: At_100uM_BA_P Parameter: Age (day) Value: 14
  misc_feature: MA Experiment 20000456 PARAMETER Experiment Name: At_100uM_BA_P Parameter: Organism Value: A. thaliana
  misc_feature: MA Experiment 20000456 PARAMETER Experiment Name: At_100uM_BA_P Parameter: Plant Line Value: WS
  misc_feature: MA Experiment 20000456 PARAMETER Experiment Name: At_100uM_BA_P Parameter: Timepoint (hr) Value: 6
  misc_feature: MA Experiment 20000456 PARAMETER Experiment Name: At_100uM_BA_P Parameter: Tissue Value: Aerial
  misc_feature: MA Experiment 20000456 PARAMETER Experiment Name: At_100uM_BA_P Parameter: Treatment Value: 100uM BA vs. No Treatment
  misc_feature: MA Experiment ID: 20000709 Result: Up-regulated in Transcription
  misc_feature: MA Experiment 20000709 PARAMETER Experiment Name: At_15mM_NH4NO3_L-to-H_P Parameter: Age (hr) Value: 14
  misc_feature: MA Experiment 20000709 PARAMETER Experiment Name: At_15mM_NH4NO3_L-to-H_P Parameter: Organism Value: A. thaliana
  misc_feature: MA Experiment 20000709 PARAMETER Experiment Name: At_15mM_NH4NO3_L-to-H_P Parameter: Plant Line Value: WS
  misc_feature: MA Experiment 20000709 PARAMETER Experiment Name: At_15mM_NH4NO3_L-to-H_P Parameter: Timepoint (hr) Value: 4
  misc_feature: MA Experiment 20000709 PARAMETER Experiment Name: At_15mM_NH4NO3_L-to-H_P Parameter: Tissue Value: Aerial
  misc_feature: MA Experiment 20000709 PARAMETER Experiment Name: At_15mM_NH4NO3_L-to-H_P Parameter: Treatment Value: 15mM NH4NO3 vs. 30mM Mannitol
atgagattcttccgcaaaacctcactttatctttctctcttcttatacttctttctttatgaatcttccatggctgcaaatacaatcagaagaggcgaatctttaagagacggaatcaatcacaaacctttagtctctccacaaaagacattcgagctaggtttcttcagtcctggaagctctacgcatcgtttcctagggatttggtatgggaacatcgaggataaagctgtggtatgggtagcaaacagagcaactccaatttcagaccaatctggagttctcatgataagcaacgatggtaatctcgtgttattagacgggaagaacatcactgtctggtcttcaaacatcgagtcaagcactaccaacaacaacaacagagtcgtttctatacatgacactgggaactttgttttgtctgaaaccgacacagatagacctatttgggagagtttcaatcacccaacagataccttcttaccgcagatgagagttcgtgtgaatccacaaaccggagacaatcacgcttttgtctcatggagatctgagactgatccttcccctggtaattactcattaggggttgatccctctggagcaccagagattgtgctttgggaagggaacaagacgaggaaatggagaagcgggcaatggaactctgcgatttttaccgggattccgaatatgtctctgttgacgaattatctttacggattcaagctttcatctcctccagatgaaacaggtagcgtgtacttcacgtatgttccttcagatccatcagtgttacttaggtttaaggttctttataatggaaccgaagaggaattgagatggaatgagactttgaagaagtggactaagtttcagtctgagccagatagtgagtgtgatcagtataatcgttgtggcaagtttggtatttgtgatatgaagggctctaatggaatctgtagctgtattcatggttatgagcaagtttctgttgggaattggagtagaggttgtagaagaagaacaccgttgaagtgtgaaaggaacattagtgttggagaggatgagttcttgactttgaaatctgtgaagttgcctgattttgaaattcctgaacataatcttgttgatcctgaggattgcagagagaggtgtctgaggaattgttcttgcaatgcttattctcttgttggtggtattggatgcatgatttggaaccaagatttagtggatttacaacagtttgaagctggtggttcttcgcttcatatccgtcttgctgattccgaagtaggggagaacaggaaaacaaagattgcagtgattgtcgcggttcttgttggtgtgatcttgataggaatctttgctctgcttctatggagattcaagagaaagaaagatgtttcaggagcatattgtggtaagaacaccgatacatcggttgttgttgctgatctgaccaagagcaaagaaactacttcagcgttttcaggatcagtagacataatgattgaagggaaagctgttaacacatccgagttacctgtcttttctctgaatgctatagccatagctactaatgatttctgcaaagaaaatgagcttggaagaggtggattcggaccagtctacaagggtgttctcgaagatggacgtgagatagctgtgaagagattgtctggtaaatcaggacaaggagttgatgaattcaagaatgagattattctcatagcgaagcttcaacatcggaatcttgtgagattacttggatgttgcttcgagggagaagagaaaatgcttgtttatgagtatatgcctaacaagagcttggatttcttcctctttgatgaaacgaaacaagcgttgatagactggaaactgcggttttcgataattgaagggattgcgagaggattgctttatcttcatagagattcaagattgagaatcattcatagagacttgaaggttagcaatgtgttgttagatgcagagatgaatccaaagatctcagattttggtatggcaaggatctttggtggtaaccaaaatgaagctaacacggttcgcgttgttggaacttacggatacatgtctcctgaatacgcgatggaaggacttttctcggtgaaatccgatgtttacagcttcggtgtcttgttgctagagattgtaagtgggaagaggaacacaagtcttcgatcttctgaacatggaagtctcattggttatgcttggtatttgtatactcatgggagatcagaggagcttgtggatcctaagatcagggtcacatgcagtaagcgagaggccttgagatgcatacacgtagcgatgctatgtgttcaagattcggctgcggagagacccaacatggcttcagttttgcttatgttagagagtgacacagcgacgctcgctgcgcctagacaaccaacgtttacttccaccagaagaaactccattgatgtcaactttgctcttgattcgagccaacaatacatcgtttcttctaatgagatcacttcaacggttgttcttggacgataa

SEQ ID NO: 81270 - protein, 849 aa, Arabidopsis thaliana
  peptide (1)..(849): Ceres Seq. ID no. 12659090
  misc_feature (75)..(188): Pfam Name: D-mannose binding lectin Pfam Description: D-mannose binding lectin
  misc_feature (3)..(849): Homolog of NCBI NO: 15220540 NR Description: receptor-like kinase, putative; protein id: [Arabidopsis thaliana] >gi|25287702|pir||E96641 hypothetical
  misc_feature (5)..(849): Homolog of NCBI NO: 34898624 NR Description: putative S-receptor kinase [Oryza sativa
  misc_feature (1)..(466): Homolog of NCBI NO: 25287696 NR Description: hypothetical protein [imported] - Arabidopsis
  misc_feature (488)..(849): Homolog of NCBI NO: 25287696 NR Description: hypothetical protein [imported] - Arabidopsis
  misc_feature (9)..(849): Homolog of NCBI NO: 15220353 NR Description: serine/threonine kinase, putative; protein id:
  misc_feature (51)..(849): Homolog of NCBI NO: 15220348 NR Description: receptor-like protein kinase, putative; protein
  misc_feature (25)..(849): Homolog of NCBI NO: 34898618 NR Description: putative S-receptor kinase [Oryza sativa
  misc_feature (9)..(849): Homolog of NCBI NO: 4008010 NR Description: receptor-like protein kinase [Arabidopsis
  misc_feature (13)..(435): Homolog of NCBI NO: 15220351 NR Description: receptor kinase, putative; protein id:
  misc_feature (505)..(849): Homolog of NCBI NO: 15220351 NR Description: receptor kinase, putative; protein id:
MRFFRKTSLYLSLFLYFFLYESSMAANTIRRGESLRDGINHKPLVSPQKTFELGFFSPGSSTHRFLGIWYGNIEDKAVVWVANRATPISDQSGVLMISNDGNLVLLDGKNITVWSSNIESSTTNNNNRVVSIHDTGNFVLSETDTDRPIWESFNHPTDTFLPQMRVRVNPQTGDNHAFVSWRSETDPSPGNYSLGVDPSGAPEIVLWEGNKTRKWRSGQWNSAIFTGIPNMSLLTNYLYGFKLSSPPDETGSVYFTYVPSDPSVLLRFKVLYNGTEEELRWNETLKKWTKFQSEPDSECDQYNRCGKFGICDMKGSNGICSCIHGYEQVSVGNWSRGCRRRTPLKCERNISVGEDEFLTLKSVKLPDFEIPEHNLVDPEDCRERCLRNCSCNAYSLVGGIGCMIWNQDLVDLQQFEAGGSSLHIRLADSEVGENRKTKIAVIVAVLVGVILIGIFALLLWRFKRKKDVSGAYCGKNTDTSVVVADLTKSKETTSAFSGSVDIMIEGKAVNTSELPVFSLNAIAIATNDFCKENELGRGGFGPVYKGVLEDGREIAVKRLSGKSGQGVDEFKNEIILIAKLQHRNLVRLLGCCFEGEEKMLVYEYMPNKSLDFFLFDETKQALIDWKLRFSIIEGIARGLLYLHRDSRLRIIHRDLKVSNVLLDAEMNPKISDFGMARIFGGNQNEANTVRVVGTYGYMSPEYAMEGLFSVKSDVYSFGVLLLEIVSGKRNTSLRSSEHGSLIGYAWYLYTHGRSEELVDPKIRVTCSKREALRCIHVAMLCVQDSAAERPNMASVLLMLESDTATLAAPRQPTFTSTRRNSIDVNFALDSSQQYIVSSNEITSTVVLGR

SEQ ID NO: 81271 - protein, 826 aa, Arabidopsis thaliana
  peptide (1)..(826): Ceres Seq. ID no. 12659091
  misc_feature (52)..(165): Pfam Name: D-mannose binding lectin Pfam Description: D-mannose binding lectin
  misc_feature (1)..(826): Homolog of NCBI NO: 15220540 NR Description: receptor-like kinase, putative; protein id: [Arabidopsis thaliana] >gi|25287702|pir||E96641 hypothetical
  misc_feature (1)..(826): Homolog of NCBI NO: 34898624 NR Description: putative S-receptor kinase [Oryza sativa
  misc_feature (1)..(443): Homolog of NCBI NO: 25287696 NR Description: hypothetical protein [imported] - Arabidopsis
  misc_feature (465)..(826): Homolog of NCBI NO: 25287696 NR Description: hypothetical protein [imported] - Arabidopsis
  misc_feature (1)..(826): Homolog of NCBI NO: 15220353 NR Description: serine/threonine kinase, putative; protein id:
  misc_feature (28)..(826): Homolog of NCBI NO: 15220348 NR Description: receptor-like protein kinase, putative; protein
  misc_feature (2)..(826): Homolog of NCBI NO: 34898618 NR Description: putative S-receptor kinase [Oryza sativa
  misc_feature (1)..(826): Homolog of NCBI NO: 4008010 NR Description: receptor-like protein kinase [Arabidopsis
  misc_feature (1)..(412): Homolog of NCBI NO: 15220351 NR Description: receptor kinase, putative; protein id:
  misc_feature (482)..(826): Homolog of NCBI NO: 15220351 NR Description: receptor kinase, putative; protein id:
MAANTIRRGESLRDGINHKPLVSPQKTFELGFFSPGSSTHRFLGIWYGNIEDKAVVWVANRATPISDQSGVLMISNDGNLVLLDGKNITVWSSNIESSTTNNNNRVVSIHDTGNFVLSETDTDRPIWESFNHPTDTFLPQMRVRVNPQTGDNHAFVSWRSETDPSPGNYSLGVDPSGAPEIVLWEGNKTRKWRSGQWNSAIFTGIPNMSLLTNYLYGFKLSSPPDETGSVYFTYVPSDPSVLLRFKVLYNGTEEELRWNETLKKWTKFQSEPDSECDQYNRCGKFGICDMKGSNGICSCIHGYEQVSVGNWSRGCRRRTPLKCERNISVGEDEFLTLKSVKLPDFEIPEHNLVDPEDCRERCLRNCSCNAYSLVGGIGCMIWNQDLVDLQQFEAGGSSLHIRLADSEVGENRKTKIAVIVAVLVGVILIGIFALLLWRFKRKKDVSGAYCGKNTDTSVVVADLTKSKETTSAFSGSVDIMIEGKAVNTSELPVFSLNAIAIATNDFCKENELGRGGFGPVYKGVLEDGREIAVKRLSGKSGQGVDEFKNEIILIAKLQHRNLVRLLGCCFEGEEKMLVYEYMPNKSLDFFLFDETKQALIDWKLRFSIIEGIARGLLYLHRDSRLRIIHRDLKVSNVLLDAEMNPKISDFGMARIFGGNQNEANTVRVVGTYGYMSPEYAMEGLFSVKSDVYSFGVLLLEIVSGKRNTSLRSSEHGSLIGYAWYLYTHGRSEELVDPKIRVTCSKREALRCIHVAMLCVQDSAAERPNMASVLLMLESDTATLAAPRQPTFTSTRRNSIDVNFALDSSQQYIVSSNEITSTVVLGR

SEQ ID NO: 81272 - protein, 754 aa, Arabidopsis thaliana
  peptide (1)..(754): Ceres Seq. ID no. 12659092
  misc_feature (1)..(93): Pfam Name: D-mannose binding lectin Pfam Description: D-mannose binding lectin
  misc_feature (1)..(754): Homolog of NCBI NO: 15220540 NR Description: receptor-like kinase, putative; protein id: [Arabidopsis thaliana] >gi|25287702|pir||E96641 hypothetical
  misc_feature (1)..(754): Homolog of NCBI NO: 34898624 NR Description: putative S-receptor kinase [Oryza sativa
  misc_feature (1)..(371): Homolog of NCBI NO: 25287696 NR Description: hypothetical protein [imported] - Arabidopsis
  misc_feature (393)..(754): Homolog of NCBI NO: 25287696 NR Description: hypothetical protein [imported] - Arabidopsis
  misc_feature (1)..(754): Homolog of NCBI NO: 15220353 NR Description: serine/threonine kinase, putative; protein id:
  misc_feature (1)..(754): Homolog of NCBI NO: 15220348 NR Description: receptor-like protein kinase, putative; protein
  misc_feature (1)..(754): Homolog of NCBI NO: 34898618 NR Description: putative S-receptor kinase [Oryza sativa
  misc_feature (1)..(754): Homolog of NCBI NO: 4008010 NR Description: receptor-like protein kinase [Arabidopsis
  misc_feature (1)..(340): Homolog of NCBI NO: 15220351 NR Description: receptor kinase, putative; protein id:
  misc_feature (410)..(754): Homolog of NCBI NO: 15220351 NR Description: receptor kinase, putative; protein id:
MISNDGNLVLLDGKNITVWSSNIESSTTNNNNRVVSIHDTGNFVLSETDTDRPIWESFNHPTDTFLPQMRVRVNPQTGDNHAFVSWRSETDPSPGNYSLGVDPSGAPEIVLWEGNKTRKWRSGQWNSAIFTGIPNMSLLTNYLYGFKLSSPPDETGSVYFTYVPSDPSVLLRFKVLYNGTEEELRWNETLKKWTKFQSEPDSECDQYNRCGKFGICDMKGSNGICSCIHGYEQVSVGNWSRGCRRRTPLKCERNISVGEDEFLTLKSVKLPDFEIPEHNLVDPEDCRERCLRNCSCNAYSLVGGIGCMIWNQDLVDLQQFEAGGSSLHIRLADSEVGENRKTKIAVIVAVLVGVILIGIFALLLWRFKRKKDVSGAYCGKNTDTSVVVADLTKSKETTSAFSGSVDIMIEGKAVNTSELPVFSLNAIAIATNDFCKENELGRGGFGPVYKGVLEDGREIAVKRLSGKSGQGVDEFKNEIILIAKLQHRNLVRLLGCCFEGEEKMLVYEYMPNKSLDFFLFDETKQALIDWKLRFSIIEGIARGLLYLHRDSRLRIIHRDLKVSNVLLDAEMNPKISDFGMARIFGGNQNEANTVRVVGTYGYMSPEYAMEGLFSVKSDVYSFGVLLLEIVSGKRNTSLRSSEHGSLIGYAWYLYTHGRSEELVDPKIRVTCSKREALRCIHVAMLCVQDSAAERPNMASVLLMLESDTATLAAPRQPTFTSTRRNSIDVNFALDSSQQYIVSSNEITSTVVLGR

SEQ ID NO: 81273 - DNA, 2136 bp, Arabidopsis thaliana
  misc_feature (1)..(2136): Ceres Seq. ID no. 12659093
  misc_feature: MA Experiment ID: 20000307 Result: Down-regulated in Transcription
  misc_feature: MA Experiment 20000307 PARAMETER Experiment Name: At_Germinating_Seeds_Sub_P Parameter: Age (hr) Value: 24 vs. 0
  misc_feature: MA Experiment 20000307 PARAMETER Experiment Name: At_Germinating_Seeds_Sub_P Parameter: Organism Value: A. thaliana
  misc_feature: MA Experiment 20000307 PARAMETER Experiment Name: At_Germinating_Seeds_Sub_P Parameter: Plant Line Value: WS
  misc_feature: MA Experiment 20000307 PARAMETER Experiment Name: At_Germinating_Seeds_Sub_P Parameter: Tissue Value: Germinating Seeds
  misc_feature: MA Experiment ID: 20000314 Result: Up-regulated in Transcription
  misc_feature: MA Experiment 20000314 PARAMETER Experiment Name: At_14day_Shoots-Roots_Sub_P Parameter: Age (day) Value: 14
  misc_feature: MA Experiment 20000314 PARAMETER Experiment Name: At_14day_Shoots-Roots_Sub_P Parameter: Organism Value: A. thaliana
  misc_feature: MA Experiment 20000314 PARAMETER Experiment Name: At_14day_Shoots-Roots_Sub_P Parameter: Plant Line Value: WS
  misc_feature: MA Experiment 20000314 PARAMETER Experiment Name: At_14day_Shoots-Roots_Sub_P Parameter: Tissue Value: Roots vs. Whole Plant
  misc_feature: MA Experiment ID: 20000328 Result: Down-regulated in Transcription
  misc_feature: MA Experiment 20000328 PARAMETER Experiment Name: At_42deg_Heat_Sub_P Parameter: Age (day) Value: 14
  misc_feature: MA Experiment 20000328 PARAMETER Experiment Name: At_42deg_Heat_Sub_P Parameter: Organism Value: A. thaliana
  misc_feature: MA Experiment 20000328 PARAMETER Experiment Name: At_42deg_Heat_Sub_P Parameter: Plant Line Value: WS
  misc_feature: MA Experiment 20000328 PARAMETER Experiment Name: At_42deg_Heat_Sub_P Parameter: Temperature (deg C) Value: 42 vs. 22
  misc_feature: MA Experiment 20000328 PARAMETER Experiment Name: At_42deg_Heat_Sub_P Parameter: Timepoint (hr) Value: 6
  misc_feature: MA Experiment 20000328 PARAMETER Experiment Name: At_42deg_Heat_Sub_P Parameter: Tissue Value: Aerial
  misc_feature: MA Experiment ID: 20000355 Result: Down-regulated in Transcription
  misc_feature: MA Experiment 20000355 PARAMETER Experiment Name: At_Siliques_Sub_P Parameter: Age (day) Value: 21
  misc_feature: MA Experiment 20000355 PARAMETER Experiment Name: At_Siliques_Sub_P Parameter: Organism Value: A. thaliana
  misc_feature: MA Experiment 20000355 PARAMETER Experiment Name: At_Siliques_Sub_P Parameter: Plant Line Value: WS
  misc_feature: MA Experiment 20000355 PARAMETER Experiment Name: At_Siliques_Sub_P Parameter: Tissue Value: Less Than 5mm Siliques vs. Whole Plant
atggaacatgtcagagttatctttttcttctttgcttgtgtcctaaagattgtaccatttatctgcttagcacagaaggataaatatgagtttcctccaggtttcaactgtgtagctagtggaggcaatttcacggccaacagctctttcgctggtaatctcaacggccttgtctcctctctctcgtcactcacatccaaaccttatggcttctacaacctctcttctggagattcatctggagaaagagcttatgcaattggtctttgtagaagagaagtaaaaagagatgattgtctcagctgcattcagatagctgcaagaaacctcatcgagcagtgtccactgacaaatcaagctgttgtgtggtacacacactgtatgtttcgttactcgaacatgataatctatggaagaaaagagacgaccccaactctgtcttttcaagccggtaaaaatatatcagcaaacagagatgagtttgatcgtctgcagatagaactattggacagactcaaagggattgctgcagctggtgggccaaatagaaaatacgctcaagggagcggttcgggtgtggcagggtacccgcaattctacggaagtgcacactgtacgccggatttgtctgaacaggattgtaatgactgtctagtctttggttttgaaaagatcccaggttgttgtgctggtcaggttggtcttaggtggttttttcctagttgtagctacagatttgagacctggcgattctacgagttcgatgccgatctagagcctgatccacctgctattcagcctgctgactccccaacatcagctgcaagaactgagagaacaggaaagggcaaaggtggatctaaagtcattgttgcgatagtcatcccaatagtttttgttgcgttatttgcaatttgcctatgcttgctcttgaagtggaagaagaacaagtctgtaggtagagtcaaaggtaacaaacacaaccttcttcttttggttatcgttatcttgttacaaaaggatgagttctcagattcgttggtagttgactttgaaactctaaaggcagcaacagataacttttcaccagaaaatgaacttggacgtggtgggtttggctcagtttataagggtgtgttctcgggtgggcaagaaatcgcggtgaaaagattatcgtgtacttcaggacaaggagacagtgaattcaagaacgaaattttacttcttgcaaagcttcaacataggaacttggttaggctattaggtttttgcatagaaggacaagaacgaatccttgtctatgagttcatcaagaacgctagtcttgacaatttcatcttcggtaattgttttccgccgttttctccatatgatgatcctaccgttctgttttttctgctctgtgttgatctttacgctgttacagatcttaaaaagcgtcaacttttggattggggagtgcgatacaaaatgataggtggagttgctagaggacttctttatcttcatgaagactctcgttaccggataattcaccgtgatcttaaagctagcaacattcttttggaccaagaaatgaatccgaaaatcgcagattttggattagctaaactctatgacacagaccaaacttcgacacatcgatttacaagcaaaattgcaggaacttacgggtatatggctccagaatacgctatttacggtcaattctcggtgaaaacagacgttttcagcttcggtgtattagtcatagagatcattacgggtaagggaaacaataatggtcgatcaaatgatgacgaagaggcagaaaatctccttagttgggtgtggagatgttggagagaagacattatactaagcgttattgatccgagtctaaccacgggatcaagaagcgagatcttgagatgcatacacattggtcttttatgtgttcaagaaagtccagcgagtagaccaactatggattcggttgctctaatgctcaatagctattcctatactctcccaacgccttcaaggcccgcctttgcgttagagagtgtcatgccttcgatgaatgtttcttcttccacagaaccgttattaatgtccttgaatgatgtcactgtttctgagttatctcctcgttag

SEQ ID NO: 81274 - protein, 711 aa, Arabidopsis thaliana
  peptide (1)..(711): Ceres Seq. ID no. 12659094
  misc_feature (199)..(253): Pfam Name: Domain of unknown function DUF26 Pfam Description: Domain of unknown function DUF26
  misc_feature (1)..(447): Homolog of NCBI NO: 22328852 NR Description: serine threonine kinase - like protein; protein At4g21410.1, supported by cDNA: gi_18650593 [Arabidopsis >gi|18650594|gb|AAL75897.1| AT4g21410/T6K22_140 [Arabidopsis
  misc_feature (474)..(711): Homolog of NCBI NO: 22328852 NR Description: serine threonine kinase - like protein; protein At4g21410.1, supported by cDNA: gi_18650593 [Arabidopsis >gi|18650594|gb|AAL75897.1| AT4g21410/T6K22_140 [Arabidopsis
  misc_feature (1)..(447): Homolog of NCBI NO: 7488246 NR Description: protein kinase homolog F18E5.30 - Arabidopsis >gi|3080385|emb|CAA18705.1| serine/threonine protein kinase
  misc_feature (474)..(711): Homolog of NCBI NO: 7488246 NR Description: protein kinase homolog F18E5.30 - Arabidopsis >gi|3080385|emb|CAA18705.1| serine/threonine protein kinase
  misc_feature (12)..(447): Homolog of NCBI NO: 4530126 NR Description: receptor-like protein kinase homolog RK20-1
  misc_feature (472)..(692): Homolog of NCBI NO: 4530126 NR Description: receptor-like protein kinase homolog RK20-1
  misc_feature (32)..(447): Homolog of NCBI NO: 15234824 NR Description: receptor-like protein kinase - like protein; id: At4g38830.1 [Arabidopsis thaliana] >gi|7488277|pir||T06082
  misc_feature (483)..(711): Homolog of NCBI NO: 15234824 NR Description: receptor-like protein kinase - like protein; id: At4g38830.1 [Arabidopsis thaliana] >gi|7488277|pir||T06082
  misc_feature (35)..(447): Homolog of NCBI NO: 18076583 NR Description: putative receptor-like serine-threonine protein
  misc_feature (469)..(711): Homolog of NCBI NO: 18076583 NR Description: putative receptor-like serine-threonine protein
MEHVRVIFFFFACVLKIVPFICLAQKDKYEFPPGFNCVASGGNFTANSSFAGNLNGLVSSLSSLTSKPYGFYNLSSGDSSGERAYAIGLCRREVKRDDCLSCIQIAARNLIEQCPLTNQAVVWYTHCMFRYSNMIIYGRKETTPTLSFQAGKNISANRDEFDRLQIELLDRLKGIAAAGGPNRKYAQGSGSGVAGYPQFYGSAHCTPDLSEQDCNDCLVFGFEKIPGCCAGQVGLRWFFPSCSYRFETWRFYEFDADLEPDPPAIQPADSPTSAARTERTGKGKGGSKVIVAIVIPIVFVALFAICLCLLLKWKKNKSVGRVKGNKHNLLLLVIVILLQKDEFSDSLVVDFETLKAATDNFSPENELGRGGFGSVYKGVFSGGQEIAVKRLSCTSGQGDSEFKNEILLLAKLQHRNLVRLLGFCIEGQERILVYEFIKNASLDNFIFGNCFPPFSPYDDPTVLFFLLCVDLYAVTDLKKRQLLDWGVRYKMIGGVARGLLYLHEDSRYRIIHRDLKASNILLDQEMNPKIADFGLAKLYDTDQTSTHRFTSKIAGTYGYMAPEYAIYGQFSVKTDVFSFGVLVIEIITGKGNNNGRSNDDEEAENLLSWVWRCWREDIILSVIDPSLTTGSRSEILRCIHIGLLCVQESPASRPTMDSVALMLNSYSYTLPTPSRPAFALESVMPSMNVSSSTEPLLMSLNDVTVSELSPR

SEQ ID NO: 81275 - protein, 584 aa, Arabidopsis thaliana
  peptide (1)..(584): Ceres Seq. ID no. 12659095
  misc_feature (72)..(126): Pfam Name: Domain of unknown function DUF26 Pfam Description: Domain of unknown function DUF26
  misc_feature (1)..(320): Homolog of NCBI NO: 22328852 NR Description: serine threonine kinase - like protein; protein At4g21410.1, supported by cDNA: gi_18650593 [Arabidopsis >gi|18650594|gb|AAL75897.1| AT4g21410/T6K22_140 [Arabidopsis
  misc_feature (347)..(584): Homolog of NCBI NO: 22328852 NR Description: serine threonine kinase - like protein; protein At4g21410.1, supported by cDNA: gi_18650593 [Arabidopsis >gi|18650594|gb|AAL75897.1| AT4g21410/T6K22_140 [Arabidopsis
  misc_feature (1)..(320): Homolog of NCBI NO: 7488246 NR Description: protein kinase homolog F18E5.30 - Arabidopsis >gi|3080385|emb|CAA18705.1| serine/threonine protein kinase
  misc_feature (347)..(584): Homolog of NCBI NO: 7488246 NR Description: protein kinase homolog F18E5.30 - Arabidopsis >gi|3080385|emb|CAA18705.1| serine/threonine protein kinase
  misc_feature (1)..(320): Homolog of NCBI NO: 4530126 NR Description: receptor-like protein kinase homolog RK20-1
  misc_feature (345)..(565): Homolog of NCBI NO: 4530126 NR Description: receptor-like protein kinase homolog RK20-1
  misc_feature (1)..(320): Homolog of NCBI NO: 15234824 NR Description: receptor-like protein kinase - like protein; id: At4g38830.1 [Arabidopsis thaliana] >gi|7488277|pir||T06082
  misc_feature (356)..(584): Homolog of NCBI NO: 15234824 NR Description: receptor-like protein kinase - like protein; id: At4g38830.1 [Arabidopsis thaliana] >gi|7488277|pir||T06082
  misc_feature (1)..(320): Homolog of NCBI NO: 18076583 NR Description: putative receptor-like serine-threonine protein
  misc_feature (342)..(584): Homolog of NCBI NO: 18076583 NR Description: putative receptor-like serine-threonine protein
MFRYSNMIIYGRKETTPTLSFQAGKNISANRDEFDRLQIELLDRLKGIAAAGGPNRKYAQGSGSGVAGYPQFYGSAHCTPDLSEQDCNDCLVFGFEKIPGCCAGQVGLRWFFPSCSYRFETWRFYEFDADLEPDPPAIQPADSPTSAARTERTGKGKGGSKVIVAIVIPIVFVALFAICLCLLLKWKKNKSVGRVKGNKHNLLLLVIVILLQKDEFSDSLVVDFETLKAATDNFSPENELGRGGFGSVYKGVFSGGQEIAVKRLSCTSGQGDSEFKNEILLLAKLQHRNLVRLLGFCIEGQERILVYEFIKNASLDNFIFGNCFPPFSPYDDPTVLFFLLCVDLYAVTDLKKRQLLDWGVRYKMIGGVARGLLYLHEDSRYRIIHRDLKASNILLDQEMNPKIADFGLAKLYDTDQTSTHRFTSKIAGTYGYMAPEYAIYGQFSVKTDVFSFGVLVIEIITGKGNNNGRSNDDEEAENLLSWVWRCWREDIILSVIDPSLTTGSRSEILRCIHIGLLCVQESPASRPTMDSVALMLNSYSYTLPTPSRPAFALESVMPSMNVSSSTEPLLMSLNDVTVSELSPR

SEQ ID NO: 81276 - protein, 578 aa, Arabidopsis thaliana
  peptide (1)..(578): Ceres Seq. ID no. 12659096
  misc_feature (66)..(120): Pfam Name: Domain of unknown function DUF26 Pfam Description: Domain of unknown function DUF26
  misc_feature (1)..(314): Homolog of NCBI NO: 22328852 NR Description: serine threonine kinase - like protein; protein At4g21410.1, supported by cDNA: gi_18650593 [Arabidopsis >gi|18650594|gb|AAL75897.1| AT4g21410/T6K22_140 [Arabidopsis
  misc_feature (341)..(578): Homolog of NCBI NO: 22328852 NR Description: serine threonine kinase - like protein; protein At4g21410.1, supported by cDNA: gi_18650593 [Arabidopsis >gi|18650594|gb|AAL75897.1| AT4g21410/T6K22_140 [Arabidopsis
  misc_feature (1)..(314): Homolog of NCBI NO: 7488246 NR Description: protein kinase homolog F18E5.30 - Arabidopsis >gi|3080385|emb|CAA18705.1| serine/threonine protein kinase
  misc_feature (341)..(578): Homolog of NCBI NO: 7488246 NR Description: protein kinase homolog F18E5.30 - Arabidopsis >gi|3080385|emb|CAA18705.1| serine/threonine protein kinase
  misc_feature (1)..(314): Homolog of NCBI NO: 4530126 NR Description: receptor-like protein kinase homolog RK20-1
  misc_feature (339)..(559): Homolog of NCBI NO: 4530126 NR Description: receptor-like protein kinase homolog RK20-1
  misc_feature (1)..(314): Homolog of NCBI NO: 15234824 NR Description: receptor-like protein kinase - like protein; id: At4g38830.1 [Arabidopsis thaliana] >gi|7488277|pir||T06082
  misc_feature (350)..(578): Homolog of NCBI NO: 15234824 NR Description: receptor-like protein kinase - like protein; id: At4g38830.1 [Arabidopsis thaliana] >gi|7488277|pir||T06082
  misc_feature (1)..(314): Homolog of NCBI NO: 18076583 NR Description: putative receptor-like serine-threonine protein
  misc_feature (336)..(578): Homolog of NCBI NO: 18076583 NR Description: putative receptor-like serine-threonine protein
MIIYGRKETTPTLSFQAGKNISANRDEFDRLQIELLDRLKGIAAAGGPNRKYAQGSGSGVAGYPQFYGSAHCTPDLSEQDCNDCLVFGFEKIPGCCAGQVGLRWFFPSCSYRFETWRFYEFDADLEPDPPAIQPADSPTSAARTERTGKGKGGSKVIVAIVIPIVFVALFAICLCLLLKWKKNKSVGRVKGNKHNLLLLVIVILLQKDEFSDSLVVDFETLKAATDNFSPENELGRGGFGSVYKGVFSGGQEIAVKRLSCTSGQGDSEFKNEILLLAKLQHRNLVRLLGFCIEGQERILVYEFIKNASLDNFIFGNCFPPFSPYDDPTVLFFLLCVDLYAVTDLKKRQLLDWGVRYKMIGGVARGLLYLHEDSRYRIIHRDLKASNILLDQEMNPKIADFGLAKLYDTDQTSTHRFTSKIAGTYGYMAPEYAIYGQFSVKTDVFSFGVLVIEIITGKGNNNGRSNDDEEAENLLSWVWRCWREDIILSVIDPSLTTGSRSEILRCIHIGLLCVQESPASRPTMDSVALMLNSYSYTLPTPSRPAFALESVMPSMNVSSSTEPLLMSLNDVTVSELSPR

SEQ ID NO: 81277 - DNA, 900 bp, Arabidopsis thaliana
  misc_feature (1)..(900): Ceres Seq. ID no. 12659108
  misc_feature: MA Experiment ID: 20000307 Result: Up-regulated in Transcription
  misc_feature: MA Experiment 20000307 PARAMETER Experiment Name: At_Germinating_Seeds_Sub_P Parameter: Age (hr) Value: 24 vs. 0
  misc_feature: MA Experiment 20000307 PARAMETER Experiment Name: At_Germinating_Seeds_Sub_P Parameter: Organism Value: A. thaliana
  misc_feature: MA Experiment 20000307 PARAMETER Experiment Name: At_Germinating_Seeds_Sub_P Parameter: Plant Line Value: WS
  misc_feature: MA Experiment 20000307 PARAMETER Experiment Name: At_Germinating_Seeds_Sub_P Parameter: Tissue Value: Germinating Seeds
  misc_feature: Pfam Name: S1-P1_nuclease Pfam Description: S1/P1 Nuclease
atgagttcgtcgctgcgacagtggtttgctagagtactcgtgcttacacagctcatcaatggagctctgtgttggggaaaagaaggtcactacacagtctgcaaaatagccgagagctactttgaggaagaaactgtagctgcggtgaagaaacttctacctaaatcagctgatggagatctagcatctgtttgctcatggcctgatgagattaagcaccattggcaatggcgatggactagccctttgcactatgttgacacacctgattacagatgcaactacgagtattgtcgggattgccatgatactcataagaatcaagaccggtgtgtgacaggagctattttcaattacactatgcaacttatgtccgcttctgaaaactcggatactatagtccactacaacttgacagaggctctcatgttcttatcacattttattggagatattcaccagcccttgcatgttggttttctgggagatgaaggtggaaacacgataacagtccgctggtaccgtcgcaaaacaaatttacaccatgtctgggataacatgataattgagtctgctcttaaaacatactacaataaaagtcttccactcatgattgaagcacttcaagccaatcttacgaacgactggtcaaatgatgttccattgtgggagtcatgtcaacttaaccaaacggcctgtccaaatccgtacgcatctgaaagcataaatctagcctgcaagtatgcttataggaacgctaccccagggactactttaggagatgactatttcctctctcggttacccattgtggagaagagacttgcgcaaggtgggatacgcttggcagccactcttaaccgtatcttttcttcaaaacctaagcatgctggatcatga

SEQ ID NO: 81278 - protein, 299 aa, Arabidopsis thaliana
  peptide (1)..(299): Ceres Seq. ID no. 12659109
  misc_feature: Pfam Name: S1-P1_nuclease Pfam Description: S1/P1 Nuclease
  misc_feature (1)..(299): Homolog of NCBI NO: 22328857 NR Description: expressed protein; protein id: At4g21585.1
  misc_feature (5)..(298): Homolog of NCBI NO: 18415729 NR Description: endonuclease, putative; protein id: At4g21600.1,
  misc_feature (5)..(298): Homolog of NCBI NO: 21593575 NR Description: endonuclease, putative [Arabidopsis thaliana]
  misc_feature (1)..(297): Homolog of NCBI NO: 18415727 NR Description: putative bifunctional nuclease; protein id: supported by cDNA: 17760. [Arabidopsis thaliana]
  misc_feature (3)..(294): Homolog of NCBI NO: 4099835 NR Description: bifunctional nuclease [Zinnia elegans]
  misc_feature (136)..(297): Homolog of NCBI NO: 7485717 NR Description: hypothetical protein F18E5.210 - Arabidopsis >gi|3080403|emb|CAA18723.1| hypothetical protein [Arabidopsis >gi|4455267|emb|CAB36803.1| putative bifunctional nuclease
  misc_feature (36)..(97): Homolog of NCBI NO: 7485717 NR Description: hypothetical protein F18E5.210 - Arabidopsis >gi|3080403|emb|CAA18723.1| hypothetical protein [Arabidopsis >gi|4455267|emb|CAB36803.1| putative bifunctional nuclease
  misc_feature (9)..(294): Homolog of NCBI NO: 9558456 NR Description: unnamed protein product [Oryza sativa (japonica
  misc_feature (9)..(294): Homolog of NCBI NO: 34895514 NR Description: putative bifunctional nuclease [Oryza sativa
  misc_feature (13)..(296): Homolog of NCBI NO: 3551956 NR Description: senescence-associated protein 6 [Hemerocallis
MSSSLRQWFARVLVLTQLINGALCWGKEGHYTVCKIAESYFEEETVAAVKKLLPKSADGDLASVCSWPDEIKHHWQWRWTSPLHYVDTPDYRCNYEYCRDCHDTHKNQDRCVTGAIFNYTMQLMSASENSDTIVHYNLTEALMFLSHFIGDIHQPLHVGFLGDEGGNTITVRWYRRKTNLHHVWDNMIIESALKTYYNKSLPLMIEALQANLTNDWSNDVPLWESCQLNQTACPNPYASESINLACKYAYRNATPGTTLGDDYFLSRLPIVEKRLAQGGIRLAATLNRIFSSKPKHAGS

SEQ ID NO: 81279 - protein, 179 aa, Arabidopsis thaliana
  peptide (1)..(179): Ceres Seq. ID no. 12659110
  misc_feature: Pfam Name: S1-P1_nuclease Pfam Description: S1/P1 Nuclease
  misc_feature (1)..(179): Homolog of NCBI NO: 22328857 NR Description: expressed protein; protein id: At4g21585.1
  misc_feature (1)..(178): Homolog of NCBI NO: 18415729 NR Description: endonuclease, putative; protein id: At4g21600.1,
  misc_feature (1)..(178): Homolog of NCBI NO: 21593575 NR Description: endonuclease, putative [Arabidopsis thaliana]
  misc_feature (1)..(177): Homolog of NCBI NO: 18415727 NR Description: putative bifunctional nuclease; protein id: supported by cDNA: 17760. [Arabidopsis thaliana]
  misc_feature (1)..(174): Homolog of NCBI NO: 4099835 NR Description: bifunctional nuclease [Zinnia elegans]
  misc_feature (16)..(177): Homolog of NCBI NO: 7485717 NR Description: hypothetical protein F18E5.210 - Arabidopsis >gi|3080403|emb|CAA18723.1| hypothetical protein [Arabidopsis >gi|4455267|emb|CAB36803.1| putative bifunctional nuclease
  misc_feature (1)..(174): Homolog of NCBI NO: 9558456 NR Description: unnamed protein product [Oryza sativa (japonica
  misc_feature (1)..(174): Homolog of NCBI NO: 34895514 NR Description: putative bifunctional nuclease [Oryza sativa
  misc_feature (1)..(176): Homolog of NCBI NO: 3551956 NR Description: senescence-associated protein 6 [Hemerocallis
  misc_feature (1)..(170): Homolog of NCBI NO: 15221343 NR Description: putative bifunctional nuclease; protein id: supported by cDNA: 256130. [Arabidopsis thaliana]
MQLMSASENSDTIVHYNLTEALMFLSHFIGDIHQPLHVGFLGDEGGNTITVRWYRRKTNLHHVWDNMIIESALKTYYNKSLPLMIEALQANLTNDWSNDVPLWESCQLNQTACPNPYASESINLACKYAYRNATPGTTLGDDYFLSRLPIVEKRLAQGGIRLAATLNRIFSSKPKHAGS

SEQ ID NO: 81280 - protein, 176 aa, Arabidopsis thaliana
  peptide (1)..(176): Ceres Seq. ID no. 12659111
  misc_feature: Pfam Name: S1-P1_nuclease Pfam Description: S1/P1 Nuclease
  misc_feature (1)..(176): Homolog of NCBI NO: 22328857 NR Description: expressed protein; protein id: At4g21585.1
  misc_feature (1)..(175): Homolog of NCBI NO: 18415729 NR Description: endonuclease, putative; protein id: At4g21600.1,
  misc_feature (1)..(175): Homolog of NCBI NO: 21593575 NR Description: endonuclease, putative [Arabidopsis thaliana]
  misc_feature (1)..(174): Homolog of NCBI NO: 18415727 NR Description: putative bifunctional nuclease; protein id: supported by cDNA: 17760. [Arabidopsis thaliana]
  misc_feature (1)..(171): Homolog of NCBI NO: 4099835 NR Description: bifunctional nuclease [Zinnia elegans]
  misc_feature (13)..(174): Homolog of NCBI NO: 7485717 NR Description: hypothetical protein F18E5.210 - Arabidopsis >gi|3080403|emb|CAA18723.1| hypothetical protein [Arabidopsis >gi|4455267|emb|CAB36803.1| putative bifunctional nuclease
  misc_feature (1)..(171): Homolog of NCBI NO: 9558456 NR Description: unnamed protein product [Oryza sativa (japonica
  misc_feature (1)..(171): Homolog of NCBI NO: 34895514 NR Description: putative bifunctional nuclease [Oryza sativa
  misc_feature (1)..(173): Homolog of NCBI NO: 3551956 NR Description: senescence-associated protein 6 [Hemerocallis
  misc_feature (1)..(167): Homolog of NCBI NO: 15221343 NR Description: putative bifunctional nuclease; protein id: supported by cDNA: 256130. [Arabidopsis thaliana]
MSASENSDTIVHYNLTEALMFLSHFIGDIHQPLHVGFLGDEGGNTITVRWYRRKTNLHHVWDNMIIESALKTYYNKSLPLMIEALQANLTNDWSNDVPLWESCQLNQTACPNPYASESINLACKYAYRNATPGTTLGDDYFLSRLPIVEKRLAQGGIRLAATLNRIFSSKPKHAGS

SEQ ID NO: 81281 - DNA, 1050 bp, Arabidopsis thaliana
  misc_feature (1)..(1050): Ceres Seq. ID no. 12659112
atgagctctgtcacacagctattcaagaacaaccccgtgaaccgtgaccggatcatcccactagatttcaccaacaccaaaaccctacccgactcccacgtctggtccaaacccgaacccgaaaccacgagcggacccattcccgtcatcagcttgtccaacccggaggaacatgggctactacgacaagcctgtgaggaatggggtgtgtttcatatcacagaccatggagtctcacactcgttactccataacgttgattgccaaatgaagaggcttttctctttacccatgcatcgtaagatcttagccgttcgatctcccgacgagtccactggttacggtgtggttcggatctccatgttctatgataagctcatgtggtctgaaggattctccgtcatgggttcctctcttcgacgtcacgctacactcttatggcccgatgatcatgccgagttctgcaatgtgatggaagagtatcagaaggcaatggatgatttaagtcatagactaataagcatgttgatgggctcgttagggctaacacatgaagatttgggatggcttgtaccagacaaaactggttcaggaactgactcgatccaatcctttctgcagttgaactcctacccggtttgccctgaccctcatctagctatgggtttagcccctcacaccgactcctccctacttaccattctctaccaaggcaatattccaggtctagagattgaaagtccacaagaagaagggtcgagatggattggagtagagccaatagaaggtagtctcgttgttataatgggagatttatctcatatcatatccaatggacagttcagaagtacaatgcaccgtgcggtggtgaacaagacgcaccaccgtgtctcagccgcttatttcgctggccctcccaagaaccttcagatcggaccgttgaccagcgacaagaaccatcctcctatttacaggcgtttgatatgggaagagtaccttgcagccaaagcaacacactttaacaaagccttgactttgttccgttgctga

SEQ ID NO: 81282 - protein, 349 aa, Arabidopsis thaliana
  peptide (1)..(349): Ceres Seq. ID no. 12659113
  misc_feature (202)..(305): Pfam Name: 2OG-Fe(II) oxygenase superfamily Pfam Description: 2OG-Fe(II) oxygenase superfamily
  misc_feature (1)..(349): Homolog of NCBI NO: 15234567 NR Description: gibberellin 3 beta-hydroxylase - like protein;
  misc_feature (21)..(348): Homolog of NCBI NO: 20149245 NR Description: gibberellin 3-oxidase 2 [Nicotiana sylvestris]
  misc_feature (4)..(348): Homolog of NCBI NO: 4164145 NR Description: gibberelin 3beta-hydroxylase [Lactuca sativa]
  misc_feature (21)..(348): Homolog of NCBI NO: 6691485 NR Description: gibberellin 3beta-hydroxylase [Nicotiana tabacum]
  misc_feature (22)..(348): Homolog of NCBI NO: 3834350 NR Description: 3b-hydroxylase [Lycopersicon esculentum]
  misc_feature (21)..(348): Homolog of NCBI NO: 15418962 NR Description: gibberellin 3-beta-hydroxylase 2 [Solanum
  misc_feature (21)..(348): Homolog of NCBI NO: 3834352 NR Description: 3b-hydroxylase [Lycopersicon esculentum]
  misc_feature (21)..(348): Homolog of NCBI NO: 20149243 NR Description: gibberellin 3-oxidase 1 [Nicotiana sylvestris]
  misc_feature (21)..(348): Homolog of NCBI NO: 4164147 NR Description: gibberellin 3beta-hydroxylase [Lactuca sativa]
  misc_feature (22)..(348): Homolog of NCBI NO: 15418964 NR Description: gibberellin 3-beta-hydroxylase 1 [Solanum
MSSVTQLFKNNPVNRDRIIPLDFTNTKTLPDSHVWSKPEPETTSGPIPVISLSNPEEHGLLRQACEEWGVFHITDHGVSHSLLHNVDCQMKRLFSLPMHRKILAVRSPDESTGYGVVRISMFYDKLMWSEGFSVMGSSLRRHATLLWPDDHAEFCNVMEEYQKAMDDLSHRLISMLMGSLGLTHEDLGWLVPDKTGSGTDSIQSFLQLNSYPVCPDPHLAMGLAPHTDSSLLTILYQGNIPGLEIESPQEEGSRWIGVEPIEGSLVVIMGDLSHIISNGQFRSTMHRAVVNKTHHRVSAAYFAGPPKNLQIGPLTSDKNHPPIYRRLIWEEYLAAKATHFNKALTLFRC

SEQ ID NO: 81283 - protein, 260 aa, Arabidopsis thaliana
  peptide (1)..(260): Ceres Seq. ID no. 12659114
  misc_feature (113)..(216): Pfam Name: 2OG-Fe(II) oxygenase superfamily Pfam Description: 2OG-Fe(II) oxygenase superfamily
  misc_feature (1)..(260): Homolog of NCBI NO: 15234567 NR Description: gibberellin 3 beta-hydroxylase - like protein;
  misc_feature (1)..(259): Homolog of NCBI NO: 20149245 NR Description: gibberellin 3-oxidase 2 [Nicotiana sylvestris]
  misc_feature (1)..(259): Homolog of NCBI NO: 4164145 NR Description: gibberelin 3beta-hydroxylase [Lactuca sativa]
  misc_feature (1)..(259): Homolog of NCBI NO: 6691485 NR Description: gibberellin 3beta-hydroxylase [Nicotiana tabacum]
  misc_feature (1)..(259): Homolog of NCBI NO: 3834350 NR Description: 3b-hydroxylase [Lycopersicon esculentum]
  misc_feature (1)..(259): Homolog of NCBI NO: 15418962 NR Description: gibberellin 3-beta-hydroxylase 2 [Solanum
  misc_feature (1)..(259): Homolog of NCBI NO: 3834352 NR Description: 3b-hydroxylase [Lycopersicon esculentum]
  misc_feature (1)..(259): Homolog of NCBI NO: 20149243 NR Description: gibberellin 3-oxidase 1 [Nicotiana sylvestris]
  misc_feature (1)..(259): Homolog of NCBI NO: 4164147 NR Description: gibberellin 3beta-hydroxylase [Lactuca sativa]
  misc_feature (1)..(259): Homolog of NCBI NO: 15418964 NR Description: gibberellin 3-beta-hydroxylase 1 [Solanum
MKRLFSLPMHRKILAVRSPDESTGYGVVRISMFYDKLMWSEGFSVMGSSLRRHATLLWPDDHAEFCNVMEEYQKAMDDLSHRLISMLMGSLGLTHEDLGWLVPDKTGSGTDSIQSFLQLNSYPVCPDPHLAMGLAPHTDSSLLTILYQGNIPGLEIESPQEEGSRWIGVEPIEGSLVVIMGDLSHIISNGQFRSTMHRAVVNKTHHRVSAAYFAGPPKNLQIGPLTSDKNHPPIYRRLIWEEYLAAKATHFNKALTLFRC

SEQ ID NO: 81284 - protein, 252 aa, Arabidopsis thaliana
  peptide (1)..(252): Ceres Seq. ID no. 12659115
  misc_feature (105)..(208): Pfam Name: 2OG-Fe(II) oxygenase superfamily Pfam Description: 2OG-Fe(II) oxygenase superfamily
  misc_feature (1)..(252): Homolog of NCBI NO: 15234567 NR Description: gibberellin 3 beta-hydroxylase - like protein;
  misc_feature (1)..(251): Homolog of NCBI NO: 20149245 NR Description: gibberellin 3-oxidase 2 [Nicotiana sylvestris]
  misc_feature (1)..(251): Homolog of NCBI NO: 4164145 NR Description: gibberelin 3beta-hydroxylase [Lactuca sativa]
  misc_feature (1)..(251): Homolog of NCBI NO: 6691485 NR Description: gibberellin 3beta-hydroxylase [Nicotiana tabacum]
  misc_feature (1)..(251): Homolog of NCBI NO: 3834350 NR Description: 3b-hydroxylase [Lycopersicon esculentum]
  misc_feature (1)..(251): Homolog of NCBI NO: 15418962 NR Description: gibberellin 3-beta-hydroxylase 2 [Solanum
  misc_feature (1)..(251): Homolog of NCBI NO: 3834352 NR Description: 3b-hydroxylase [Lycopersicon esculentum]
  misc_feature (1)..(251): Homolog of NCBI NO: 20149243 NR Description: gibberellin 3-oxidase 1 [Nicotiana sylvestris]
  misc_feature (1)..(251): Homolog of NCBI NO: 4164147 NR Description: gibberellin 3beta-hydroxylase [Lactuca sativa]
  misc_feature (1)..(251): Homolog of NCBI NO: 15418964 NR Description: gibberellin 3-beta-hydroxylase 1 [Solanum
MHRKILAVRSPDESTGYGVVRISMFYDKLMWSEGFSVMGSSLRRHATLLWPDDHAEFCNVMEEYQKAMDDLSHRLISMLMGSLGLTHEDLGWLVPDKTGSGTDSIQSFLQLNSYPVCPDPHLAMGLAPHTDSSLLTILYQGNIPGLEIESPQEEGSRWIGVEPIEGSLVVIMGDLSHIISNGQFRSTMHRAVVNKTHHRVSAAYFAGPPKNLQIGPLTSDKNHPPIYRRLIWEEYLAAKATHFNKALTLFRC

SEQ ID NO: 81285 - DNA, 1608 bp, Arabidopsis thaliana
  misc_feature (1)..(1608): Ceres Seq. ID no. 12659130
  misc_feature: MA Experiment ID: 20000234 Result: Up-regulated in Transcription
  misc_feature: MA Experiment 20000234 PARAMETER Experiment Name: At_Siliques_P Parameter: Age (day) Value: 21
  misc_feature: MA Experiment 20000234 PARAMETER Experiment Name: At_Siliques_P Parameter: Organism Value: A. thaliana
  misc_feature: MA Experiment 20000234 PARAMETER Experiment Name: At_Siliques_P Parameter: Plant Line Value: WS
  misc_feature: MA Experiment 20000234 PARAMETER Experiment Name: At_Siliques_P Parameter: Tissue Value: Less Than 5mm Siliques vs. Whole Plant
  misc_feature: MA Experiment ID: 20000235 Result: Up-regulated in Transcription
  misc_feature: MA Experiment 20000235 PARAMETER Experiment Name: At_Siliques_P Parameter: Age (day) Value: 21
  misc_feature: MA Experiment 20000235 PARAMETER Experiment Name: At_Siliques_P Parameter: Organism Value: A. thaliana
  misc_feature: MA Experiment 20000235 PARAMETER Experiment Name: At_Siliques_P Parameter: Plant Line Value: WS
  misc_feature: MA Experiment 20000235 PARAMETER Experiment Name: At_Siliques_P Parameter: Tissue Value: 5-10mm Siliques vs. Whole Plant
  misc_feature: MA Experiment ID: 20000437 Result: Down-regulated in Transcription
  misc_feature: MA Experiment 20000437 PARAMETER Experiment Name: At_Drought_P Parameter: Age (day) Value: 8
  misc_feature: MA Experiment 20000437 PARAMETER Experiment Name: At_Drought_P Parameter: Organism Value: A. thaliana
  misc_feature: MA Experiment 20000437 PARAMETER Experiment Name: At_Drought_P Parameter: Plant Line Value: WS
  misc_feature: MA Experiment 20000437 PARAMETER Experiment Name: At_Drought_P Parameter: Timepoint (hr) Value: 24
  misc_feature: MA Experiment 20000437 PARAMETER Experiment Name: At_Drought_P Parameter: Tissue Value: Whole Plant
  misc_feature: MA Experiment 20000437 PARAMETER Experiment Name: At_Drought_P Parameter: Treatment Value: Drought vs. No Drought
  misc_feature: MA Experiment ID: 20000456 Result: Up-regulated in Transcription
  misc_feature: MA Experiment 20000456 PARAMETER Experiment Name: At_100uM_BA_P Parameter: Age (day) Value: 14
  misc_feature: MA Experiment 20000456 PARAMETER Experiment Name: At_100uM_BA_P Parameter: Organism Value: A. thaliana
  misc_feature: MA Experiment 20000456 PARAMETER Experiment Name: At_100uM_BA_P Parameter: Plant Line Value: WS
  misc_feature: MA Experiment 20000456 PARAMETER Experiment Name: At_100uM_BA_P Parameter: Timepoint (hr) Value: 6
  misc_feature: MA Experiment 20000456 PARAMETER Experiment Name: At_100uM_BA_P Parameter: Tissue Value: Aerial
  misc_feature: MA Experiment 20000456 PARAMETER Experiment Name: At_100uM_BA_P Parameter: Treatment Value: 100uM BA vs. No Treatment
  misc_feature: MA Experiment ID: 20001247 Result: Down-regulated in Transcription
  misc_feature: MA Experiment 20001247 PARAMETER Experiment Name: At_Far-red-induction_P Parameter: Age (day) Value: 7
  misc_feature: MA Experiment 20001247 PARAMETER Experiment Name: At_Far-red-induction_P Parameter: Light Value: Far-red vs. White
  misc_feature: MA Experiment 20001247 PARAMETER Experiment Name: At_Far-red-induction_P Parameter: Organism Value: A. thaliana
  misc_feature: MA Experiment 20001247 PARAMETER Experiment Name: At_Far-red-induction_P Parameter: Plant Line Value: Columbia
  misc_feature: MA Experiment 20001247 PARAMETER Experiment Name: At_Far-red-induction_P Parameter: Timepoint (hr) Value: 1
  misc_feature: MA Experiment 20001247 PARAMETER Experiment Name: At_Far-red-induction_P Parameter: Tissue Value: Whole Plant
  misc_feature: MA Experiment ID: 20001450 Result: Down-regulated in Transcription
  misc_feature: MA Experiment 20001450 PARAMETER Experiment Name: At_Far-red-induction_P Parameter: Age (day) Value: 7
  misc_feature: MA Experiment 20001450 PARAMETER Experiment Name: At_Far-red-induction_P Parameter: Light Value: Far-red vs. White
  misc_feature: MA Experiment 20001450 PARAMETER Experiment Name: At_Far-red-induction_P Parameter: Organism Value: A. thaliana
  misc_feature: MA Experiment 20001450 PARAMETER Experiment Name: At_Far-red-induction_P Parameter: Plant Line Value: Columbia
  misc_feature: MA Experiment 20001450 PARAMETER Experiment Name: At_Far-red-induction_P Parameter: Timepoint (hr) Value: 8
  misc_feature: MA Experiment 20001450 PARAMETER Experiment Name: At_Far-red-induction_P Parameter: Tissue Value: Whole Plant
  misc_feature: MA Experiment ID: 20001451 Result: Down-regulated in Transcription
  misc_feature: MA Experiment 20001451 PARAMETER Experiment Name: At_Far-red-induction_P Parameter: Age (day) Value: 7
  misc_feature: MA Experiment 20001451 PARAMETER Experiment Name: At_Far-red-induction_P Parameter: Light Value: Far-red vs. White
  misc_feature: MA Experiment 20001451 PARAMETER Experiment Name: At_Far-red-induction_P Parameter: Organism Value: A. thaliana
  misc_feature: MA Experiment 20001451 PARAMETER Experiment Name: At_Far-red-induction_P Parameter: Plant Line Value: Columbia
  misc_feature: MA Experiment 20001451 PARAMETER Experiment Name: At_Far-red-induction_P Parameter: Timepoint (hr) Value: 24
  misc_feature: MA Experiment 20001451 PARAMETER Experiment Name: At_Far-red-induction_P Parameter: Tissue Value: Whole Plant
  misc_feature: MA Experiment ID: 20001773 Result: Down-regulated in Transcription
  misc_feature: MA Experiment 20001773 PARAMETER Experiment Name: At_Far-red-enriched-adult_P Parameter: Age (day) Value: 30
  misc_feature: MA Experiment 20001773 PARAMETER Experiment Name: At_Far-red-enriched-adult_P Parameter: Light Value: Far-red enriched vs. White
  misc_feature: MA Experiment 20001773 PARAMETER Experiment Name: At_Far-red-enriched-adult_P Parameter: Organism Value: A. thaliana
  misc_feature: MA Experiment 20001773 PARAMETER Experiment Name: At_Far-red-enriched-adult_P Parameter: Plant Line Value: Columbia
  misc_feature: MA Experiment 20001773 PARAMETER Experiment Name: At_Far-red-enriched-adult_P Parameter: Timepoint (hr) Value: 48
  misc_feature: MA Experiment 20001773 PARAMETER Experiment Name: At_Far-red-enriched-adult_P Parameter: Tissue Value: Aerial
atgaaaaaatctatagtttatgaaataatggagactaagtcatcaatgtacctttctcagttccgactttggctctgcttcatcatcacaaccttggtctcattgtcatcttcaacaagatggtatgatgatcatatctcattgaaagagattcacgcagaagaaactttccattttccaaaaaactttctctttggcacagcttcttctgcttaccagtatgaaggagcttacttaactgacggcaaaaccctaagcaactgggacgttttcacaaacatctctggaaaaattgcggatggaagccatgggaaagtcgctgttgatcattaccatcgatatccgggagatttggatctgatggaagatcttggagttaatagctatcgactttctttatcatgggctcggattcttccaaagggaagatttggagatgtgaacatgggtggtatcgatcattacaacagaatgatcaatgatattctcaaaacaggaatcgagccatttgtcacgttgacacattacgacattcctcaagaactcgaatatagatacggaagttggctaaacccccaaatccgggaagatttcgaacattacgcaaatatttgcttccgacactttggagacagggttaaattctggtctactttcaacgaaccaaacgttcaagtgattttgggttaccggacaggaacttacccgccttcacgttgttccaagccttttggaaactgctcgtgtggcgattcttacatagagccacttgtagccgctcacaacattatcctttcacatttagccgccgtcaacttataccgtacaaaatttcaggaacaacaaagaggacagatcggtattgttatgaacacaatctggtttgaaccgattagtgattctttagcagatagattagctgctgacagagctcaagctttctatttgacttggttcttggatccggttgtgtttggaagatatccaagagaaatgcgagaaattcttggcgatgatcttcctgaattcacgaaggatgatcttaaaagctccaagaatgcattagacttcattgggattaatcagtacacaagcagatacgcgaaagattgtctgcattccgtatgtgaaccgggcaaaggaggttcgagagctgaaggttttgtctatgcaaacgccctcaaagacggtttacgtttaggagaaccagtaggaatggaggagatgttgatgtatgcaacagagcgatacaaaaacattacattgtatgtaacagaaaacggttttggtgagaacaataccggagtattgttaaacgattaccagagagtgaagttcatgagcaactacttagatgcactcaaaagagcaatgaggaaaggagcagatgtaagaggatacttcgcctggtctttactagacaacttcgagtggatatccggttataccataaggttcggtatgtaccatgtcgatttcagtactcaagagagaaccccgagactgtcagcttcttggtacaaaaacttcatcttccagcacagagctctatcaaaagatgattggtgcctgaaacaaaaggaagacacaaatttctttcttatttga

SEQ ID NO: 81286 - protein, 535 aa, Arabidopsis thaliana
  peptide (1)..(535): Ceres Seq. ID no. 12659131
  misc_feature (1)..(535): Homolog of NCBI NO: 22328863 NR Description: glycosyl hydrolase family 1; protein id:
  misc_feature (1)..(467): Homolog of NCBI NO: 7435447 NR Description: beta-glucosidase homolog F17L22.220 - Arabidopsis
  misc_feature (27)..(514): Homolog of NCBI NO: 15220627 NR Description: glycosyl hydrolase family 1; protein id:
  misc_feature (53)..(514): Homolog of NCBI NO: 7435450 NR Description: beta-glucosidase homolog F8K4.3 - Arabidopsis
  misc_feature (53)..(514): Homolog of NCBI NO: 30696622 NR Description: glycosyl hydrolase family 1 [Arabidopsis thaliana]
  misc_feature (59)..(511): Homolog of NCBI NO: 38345329 NR Description: OSJNBa0004N05.26 [Oryza sativa (japonica
  misc_feature (59)..(511): Homolog of NCBI NO: 38345327 NR Description: OSJNBa0004N05.24 [Oryza sativa (japonica
  misc_feature (46)..(511): Homolog of NCBI NO: 38345324 NR Description: OSJNBa0004N05.21 [Oryza sativa (japonica
  misc_feature (26)..(511): Homolog of NCBI NO: 17226270 NR Description: beta-mannosidase enzyme [Lycopersicon esculentum]
  misc_feature (59)..(428): Homolog of NCBI NO: 37532728 NR Description: putative beta-glucosidase [Oryza sativa (japonica
MKKSIVYEIMETKSSMYLSQFRLWLCFIITTLVSLSSSTRWYDDHISLKEIHAEETFHFPKNFLFGTASSAYQYEGAYLTDGKTLSNWDVFTNISGKIADGSHGKVAVDHYHRYPGDLDLMEDLGVNSYRLSLSWARILPKGRFGDVNMGGIDHYNRMINDILKTGIEPFVTLTHYDIPQELEYRYGSWLNPQIREDFEHYANICFRHFGDRVKFWSTFNEPNVQVILGYRTGTYPPSRCSKPFGNCSCGDSYIEPLVAAHNIILSHLAAVNLYRTKFQEQQRGQIGIVMNTIWFEPISDSLADRLAADRAQAFYLTWFLDPVVFGRYPREMREILGDDLPEFTKDDLKSSKNALDFIGINQYTSRYAKDCLHSVCEPGKGGSRAEGFVYANALKDGLRLGEPVGMEEMLMYATERYKNITLYVTENGFGENNTGVLLNDYQRVKFMSNYLDALKRAMRKGADVRGYFAWSLLDNFEWISGYTIRFGMYHVDFSTQERTPRLSASWYKNFIFQHRALSKDDWCLKQKEDTNFFLI

SEQ ID NO: 81287 - protein, 526 aa, Arabidopsis thaliana
  peptide (1)..(526): Ceres Seq. ID no. 12659132
  misc_feature (1)..(526): Homolog of NCBI NO: 22328863 NR Description: glycosyl hydrolase family 1; protein id:
  misc_feature (1)..(458): Homolog of NCBI NO: 7435447 NR Description: beta-glucosidase homolog F17L22.220 - Arabidopsis
  misc_feature (18)..(505): Homolog of NCBI NO: 15220627 NR Description: glycosyl hydrolase family 1; protein id:
  misc_feature (44)..(505): Homolog of NCBI NO: 7435450 NR Description: beta-glucosidase homolog F8K4.3 - Arabidopsis
  misc_feature (44)..(505): Homolog of NCBI NO: 30696622 NR Description: glycosyl hydrolase family 1 [Arabidopsis thaliana]
  misc_feature (50)..(502): Homolog of NCBI NO: 38345329 NR Description: OSJNBa0004N05.26 [Oryza sativa (japonica
  misc_feature (50)..(502): Homolog of NCBI NO: 38345327 NR Description: OSJNBa0004N05.24 [Oryza sativa (japonica
  misc_feature (37)..(502): Homolog of NCBI NO: 38345324 NR Description: OSJNBa0004N05.21 [Oryza sativa (japonica
  misc_feature (17)..(502): Homolog of NCBI NO: 17226270 NR Description: beta-mannosidase enzyme [Lycopersicon esculentum]
  misc_feature (50)..(419): Homolog of NCBI NO: 37532728 NR Description: putative beta-glucosidase [Oryza sativa (japonica
METKSSMYLSQFRLWLCFIITTLVSLSSSTRWYDDHISLKEIHAEETFHFPKNFLFGTASSAYQYEGAYLTDGKTLSNWDVFTNISGKIADGSHGKVAVDHYHRYPGDLDLMEDLGVNSYRLSLSWARILPKGRFGDVNMGGIDHYNRMINDILKTGIEPFVTLTHYDIPQELEYRYGSWLNPQIREDFEHYANICFRHFGDRVKFWSTFNEPNVQVILGYRTGTYPPSRCSKPFGNCSCGDSYIEPLVAAHNIILSHLAAVNLYRTKFQEQQRGQIGIVMNTIWFEPISDSLADRLAADRAQAFYLTWFLDPVVFGRYPREMREILGDDLPEFTKDDLKSSKNALDFIGINQYTSRYAKDCLHSVCEPGKGGSRAEGFVYANALKDGLRLGEPVGMEEMLMYATERYKNITLYVTENGFGENNTGVLLNDYQRVKFMSNYLDALKRAMRKGADVRGYFAWSLLDNFEWISGYTIRFGMYHVDFSTQERTPRLSASWYKNFIFQHRALSKDDWCLKQKEDTNFFLI

SEQ ID NO: 81288 - protein, 520 aa, Arabidopsis thaliana
  peptide (1)..(520): Ceres Seq. ID no. 12659133
  misc_feature (1)..(520): Homolog of NCBI NO: 22328863 NR Description: glycosyl hydrolase family 1; protein id:
  misc_feature (1)..(452): Homolog of NCBI NO: 7435447 NR Description: beta-glucosidase homolog F17L22.220 - Arabidopsis
  misc_feature (12)..(499): Homolog of NCBI NO: 15220627 NR Description: glycosyl hydrolase family 1; protein id:
  misc_feature (38)..(499): Homolog of NCBI NO: 7435450 NR Description: beta-glucosidase homolog F8K4.3 - Arabidopsis
  misc_feature (38)..(499): Homolog of NCBI NO: 30696622 NR Description: glycosyl hydrolase family 1 [Arabidopsis thaliana]
  misc_feature (44)..(496): Homolog of NCBI NO: 38345329 NR Description: OSJNBa0004N05.26 [Oryza sativa (japonica
  misc_feature (44)..(496): Homolog of NCBI NO: 38345327 NR Description: OSJNBa0004N05.24 [Oryza sativa (japonica
  misc_feature (31)..(496): Homolog of NCBI NO: 38345324 NR Description: OSJNBa0004N05.21 [Oryza sativa (japonica
  misc_feature (11)..(496): Homolog of NCBI NO: 17226270 NR Description: beta-mannosidase enzyme [Lycopersicon esculentum]
  misc_feature (44)..(413): Homolog of NCBI NO: 37532728 NR Description: putative beta-glucosidase [Oryza sativa (japonica
MYLSQFRLWLCFIITTLVSLSSSTRWYDDHISLKEIHAEETFHFPKNFLFGTASSAYQYEGAYLTDGKTLSNWDVFTNISGKIADGSHGKVAVDHYHRYPGDLDLMEDLGVNSYRLSLSWARILPKGRFGDVNMGGIDHYNRMINDILKTGIEPFVTLTHYDIPQELEYRYGSWLNPQIREDFEHYANICFRHFGDRVKFWSTFNEPNVQVILGYRTGTYPPSRCSKPFGNCSCGDSYIEPLVAAHNIILSHLAAVNLYRTKFQEQQRGQIGIVMNTIWFEPISDSLADRLAADRAQAFYLTWFLDPVVFGRYPREMREILGDDLPEFTKDDLKSSKNALDFIGINQYTSRYAKDCLHSVCEPGKGGSRAEGFVYANALKDGLRLGEPVGMEEMLMYATERYKNITLYVTENGFGENNTGVLLNDYQRVKFMSNYLDALKRAMRKGADVRGYFAWSLLDNFEWISGYTIRFGMYHVDFSTQERTPRLSASWYKNFIFQHRALSKDDWCLKQKEDTNFFLI

SEQ ID NO: 81289 - DNA, 1459 bp, Arabidopsis thaliana
  misc_feature (1)..(1459): Ceres Seq. ID no. 12659134
  misc_feature: MA Experiment ID: 20000495 Result: Up-regulated in Transcription
  misc_feature: MA Experiment 20000495 PARAMETER Experiment Name: At_Guard_Cells_P Parameter: Harvest Date Value: 8/2/2002
  misc_feature: MA Experiment 20000495 PARAMETER Experiment Name: At_Guard_Cells_P Parameter: Organism Value: A. thaliana
  misc_feature: MA Experiment 20000495 PARAMETER Experiment Name: At_Guard_Cells_P Parameter: Tissue Value: Guard Cells vs. Leaves
aattcacctgagaaaaacaatatcaatcggctcgttttctctcctcagtgtttcttcagtagtcctgcgagatcgtataagagattcgaaaccctaatctatcaatttgatcctgtccattctctgttattgtttgagaattgtgcaatccgatggggacgatgcaccggagtggtgctcccagaaggacaaatgaaaatgcgaagcttatcataacgacaatcgtgggagtggtgtttggtttttttgttggtatcacattaccattaggttcctttagaaagattagcttaccttcaggccttatgtcatctcttgatgtagccatgtcagatgggaaattgttttctggtggcagatcacctgaagatattggttcaagaaagtctcctaagatatatgttccaaccaatccgcatggtgcagaactacttcctcctgggattatagtggcagaaacagatttctacttgcgccgattatggggtgaacctagtgaagatttgaagaagaagccaaagtatctcgtaacttttacagttggatttgagcagagaaacaacattaatgcagctgttaagaagttttctgaagatttccaaatattgttattccattatgatggccgaacaactgagtgggaccagtttgagtggtctaaaaatgcaatacatatcagtgcaaaaaagcaaacaaaatggtggtatgcaaagagatttttgcatcctgatgttgtctcagcttatgagtatatatttatatgggatgaagatcttggagtcgagcacttcaatgcagataggtacgttgagttagttaagaagcatggtttggagatttctcaaccaggcttagagccaaacaacggacttacatgggaaatgacaaagaggagaggtgaccgagatgtccacaaagaaactaaggaaaaaccaggatggtgcagtgatccacatttacctccatgtgctgcgtttgttgagattatggcacctgtattttctagagaagcatggcgatgtgtatggcatatgattcagaatgatcttgttcatggatggggtctcgattttgctctcagacgatgcgttgagcctgctcatgagaagattggtgtggtagattcacagtggattatccatcaagtgattccttcccttggaagtcagggtgagtcggaggaggggaaatctccatggcaaggggtgagggagagatgcagaaacgaatggacgatgttccagaatcgcgtggcagaagctgataaagcatacatggaacaacacaaggtaaaagaataatttgggcctcttcttactctgtctctgtaaatgaagcttacgtttccctgatcaagtgagtgtgaggagagagatctatgtagtcccctatttagtttaaaacatctcagatatatctacattattagctttttacctaatatatttcttattccctg

SEQ ID NO: 81290 - protein, 382 aa, Arabidopsis thaliana
  peptide (1)..(382): Ceres Seq. ID no. 12659135
  misc_feature (81)..(381): Pfam Name: Protein of unknown function (DUF707) Pfam Description: Protein of unknown function (DUF707)
  misc_feature (1)..(382): Homolog of NCBI NO: 18390845 NR Description: storage protein, putative; protein id: supported by cDNA: gi_15810566, supported by cDNA: gi_20259568 thaliana] >gi|15810567|gb|AAL07171.1| putative storage protein
  misc_feature (81)..(382): Homolog of NCBI NO: 25407018 NR Description: protein T6D22.12 [imported] - Arabidopsis >gi|8778842|gb|AAF79841.1|AC026875_21 T6D22.12 [Arabidopsis
  misc_feature (44)..(84): Homolog of NCBI NO: 25407018 NR Description: protein T6D22.12 [imported] - Arabidopsis >gi|8778842|gb|AAF79841.1|AC026875_21 T6D22.12 [Arabidopsis
  misc_feature (7)..(45): Homolog of NCBI NO: 25407018 NR Description: protein T6D22.12 [imported] - Arabidopsis >gi|8778842|gb|AAF79841.1|AC026875_21 T6D22.12 [Arabidopsis
  misc_feature (1)..(375): Homolog of NCBI NO: 30683843 NR Description: expressed protein [Arabidopsis thaliana]
  misc_feature (1)..(348): Homolog of NCBI NO: 20466346 NR Description: unknown protein [Arabidopsis thaliana]
  misc_feature (1)..(255): Homolog of NCBI NO: 20197601 NR Description: unknown protein [Arabidopsis thaliana]
  misc_feature (275)..(375): Homolog of NCBI NO: 20197601 NR Description: unknown protein [Arabidopsis thaliana]
  misc_feature (11)..(374): Homolog of NCBI NO: 14719314 NR Description: putative protein [Oryza sativa]
  misc_feature (1)..(381): Homolog of NCBI NO: 18408876 NR Description: F12A21.2; protein id: At1g67850.1, supported by gi_14326581 [Arabidopsis thaliana] At1g67850/F12A21_2 [Arabidopsis thaliana]
MGTMHRSGAPRRTNENAKLIITTIVGVVFGFFVGITLPLGSFRKISLPSGLMSSLDVAMSDGKLFSGGRSPEDIGSRKSPKIYVPTNPHGAELLPPGIIVAETDFYLRRLWGEPSEDLKKKPKYLVTFTVGFEQRNNINAAVKKFSEDFQILLFHYDGRTTEWDQFEWSKNAIHISAKKQTKWWYAKRFLHPDVVSAYEYIFIWDEDLGVEHFNADRYVELVKKHGLEISQPGLEPNNGLTWEMTKRRGDRDVHKETKEKPGWCSDPHLPPCAAFVEIMAPVFSREAWRCVWHMIQNDLVHGWGLDFALRRCVEPAHEKIGVVDSQWIIHQVIPSLGSQGESEEGKSPWQGVRERCRNEWTMFQNRVAEADKAYMEQHKVKE

SEQ ID NO: 81291 - protein, 379 aa, Arabidopsis thaliana
  peptide (1)..(379): Ceres Seq. ID no. 12659136
  misc_feature (78)..(378): Pfam Name: Protein of unknown function (DUF707) Pfam Description: Protein of unknown function (DUF707)
  misc_feature (1)..(379): Homolog of NCBI NO: 18390845 NR Description: storage protein, putative; protein id: supported by cDNA: gi_15810566, supported by cDNA: gi_20259568 thaliana] >gi|15810567|gb|AAL07171.1| putative storage protein
  misc_feature (78)..(379): Homolog of NCBI NO: 25407018 NR Description: protein T6D22.12 [imported] - Arabidopsis >gi|8778842|gb|AAF79841.1|AC026875_21 T6D22.12 [Arabidopsis
  misc_feature (41)..(81): Homolog of NCBI NO: 25407018 NR Description: protein T6D22.12 [imported] - Arabidopsis >gi|8778842|gb|AAF79841.1|AC026875_21 T6D22.12 [Arabidopsis
  misc_feature (4)..(42): Homolog of NCBI NO: 25407018 NR Description: protein T6D22.12 [imported] - Arabidopsis >gi|8778842|gb|AAF79841.1|AC026875_21 T6D22.12 [Arabidopsis
  misc_feature (1)..(372): Homolog of NCBI NO: 30683843 NR Description: expressed protein [Arabidopsis thaliana]
  misc_feature (1)..(345): Homolog of NCBI NO: 20466346 NR Description: unknown protein [Arabidopsis thaliana]
  misc_feature (1)..(252): Homolog of NCBI NO: 20197601 NR Description: unknown protein [Arabidopsis thaliana]
  misc_feature (272)..(372): Homolog of NCBI NO: 20197601 NR Description: unknown protein [Arabidopsis thaliana]
  misc_feature (8)..(371): Homolog of NCBI NO: 14719314 NR Description: putative protein [Oryza sativa]
  misc_feature (1)..(378): Homolog of NCBI NO: 18408876 NR Description: F12A21.2; protein id: At1g67850.1, supported by gi_14326581 [Arabidopsis thaliana] At1g67850/F12A21_2 [Arabidopsis thaliana]
MHRSGAPRRTNENAKLIITTIVGVVFGFFVGITLPLGSFRKISLPSGLMSSLDVAMSDGKLFSGGRSPEDIGSRKSPKIYVPTNPHGAELLPPGIIVAETDFYLRRLWGEPSEDLKKKPKYLVTFTVGFEQRNNINAAVKKFSEDFQILLFHYDGRTTEWDQFEWSKNAIHISAKKQTKWWYAKRFLHPDVVSAYEYIFIWDEDLGVEHFNADRYVELVKKHGLEISQPGLEPNNGLTWEMTKRRGDRDVHKETKEKPGWCSDPHLPPCAAFVEIMAPVFSREAWRCVWHMIQNDLVHGWGLDFALRRCVEPAHEKIGVVDSQWIIHQVIPSLGSQGESEEGKSPWQGVRERCRNEWTMFQNRVAEADKAYMEQHKVKE

SEQ ID NO: 81292 - protein, 331 aa, Arabidopsis thaliana
  peptide (1)..(331): Ceres Seq. ID no. 12659137
  misc_feature (30)..(330): Pfam Name: Protein of unknown function (DUF707) Pfam Description: Protein of unknown function (DUF707)
  misc_feature (1)..(331): Homolog of NCBI NO: 18390845 NR Description: storage protein, putative; protein id: supported by cDNA: gi_15810566, supported by cDNA: gi_20259568 thaliana] >gi|15810567|gb|AAL07171.1| putative storage protein
  misc_feature (30)..(331): Homolog of NCBI NO: 25407018 NR Description: protein T6D22.12 [imported] - Arabidopsis >gi|8778842|gb|AAF79841.1|AC026875_21 T6D22.12 [Arabidopsis
  misc_feature (1)..(33): Homolog of NCBI NO: 25407018 NR Description: protein T6D22.12 [imported] - Arabidopsis >gi|8778842|gb|AAF79841.1|AC026875_21 T6D22.12 [Arabidopsis
  misc_feature (1)..(324): Homolog of NCBI NO: 30683843 NR Description: expressed protein [Arabidopsis thaliana]
  misc_feature (1)..(297): Homolog of NCBI NO: 20466346 NR Description: unknown protein [Arabidopsis thaliana]
  misc_feature (1)..(204): Homolog of NCBI NO: 20197601 NR Description: unknown protein [Arabidopsis thaliana]
  misc_feature (224)..(324): Homolog of NCBI NO: 20197601 NR Description: unknown protein [Arabidopsis thaliana]
  misc_feature (1)..(323): Homolog of NCBI NO: 14719314 NR Description: putative protein [Oryza sativa]
  misc_feature (1)..(330): Homolog of NCBI NO: 18408876 NR Description: F12A21.2; protein id: At1g67850.1, supported by gi_14326581 [Arabidopsis thaliana] At1g67850/F12A21_2 [Arabidopsis thaliana]
  misc_feature (1)..(323): Homolog of NCBI NO: 34906848 NR Description: P0470A12.1 [Oryza sativa (japonica
MSSLDVAMSDGKLFSGGRSPEDIGSRKSPKIYVPTNPHGAELLPPGIIVAETDFYLRRLWGEPSEDLKKKPKYLVTFTVGFEQRNNINAAVKKFSEDFQILLFHYDGRTTEWDQFEWSKNAIHISAKKQTKWWYAKRFLHPDVVSAYEYIFIWDEDLGVEHFNADRYVELVKKHGLEISQPGLEPNNGLTWEMTKRRGDRDVHKETKEKPGWCSDPHLPPCAAFVEIMAPVFSREAWRCVWHMIQNDLVHGWGLDFALRRCVEPAHEKIGVVDSQWIIHQVIPSLGSQGESEEGKSPWQGVRERCRNEWTMFQNRVAEADKAYMEQHKVKE

SEQ ID NO: 81293 - DNA, 1419 bp, Arabidopsis thaliana
  misc_feature (1)..(1419): Ceres Seq. ID no. 12659210
  misc_feature: MA Experiment ID: 20000794 Result: Down-regulated in Transcription
  misc_feature: MA Experiment 20000794 PARAMETER Experiment Name: At_Petals_P Parameter: Age (day) Value: 23-25 days
  misc_feature: MA Experiment 20000794 PARAMETER Experiment Name: At_Petals_P Parameter: Plant Line Value: WS
  misc_feature: MA Experiment 20000794 PARAMETER Experiment Name: At_Petals_P Parameter: Tissue Value: Petals vs. Whole plant
  misc_feature: MA Experiment ID: 20001451 Result: Down-regulated in Transcription
  misc_feature: MA Experiment 20001451 PARAMETER Experiment Name: At_Far-red-induction_P Parameter: Age (day) Value: 7
  misc_feature: MA Experiment 20001451 PARAMETER Experiment Name: At_Far-red-induction_P Parameter: Light Value: Far-red vs. White
  misc_feature: MA Experiment 20001451 PARAMETER Experiment Name: At_Far-red-induction_P Parameter: Organism Value: A. thaliana
  misc_feature: MA Experiment 20001451 PARAMETER Experiment Name: At_Far-red-induction_P Parameter: Plant Line Value: Columbia
  misc_feature: MA Experiment 20001451 PARAMETER Experiment Name: At_Far-red-induction_P Parameter: Timepoint (hr) Value: 24
  misc_feature: MA Experiment 20001451 PARAMETER Experiment Name: At_Far-red-induction_P Parameter: Tissue Value: Whole Plant
  misc_feature: MA Experiment ID: 20001911 Result: Down-regulated in Transcription
  misc_feature: MA Experiment 20001911 PARAMETER Experiment Name: At_Drought_Reproduction_P Parameter: Age (day) Value: 40
  misc_feature: MA Experiment 20001911 PARAMETER Experiment Name: At_Drought_Reproduction_P Parameter: Organism Value: A. thaliana
  misc_feature: MA Experiment 20001911 PARAMETER Experiment Name: At_Drought_Reproduction_P Parameter: Plant Line Value: WS
  misc_feature: MA Experiment 20001911 PARAMETER Experiment Name: At_Drought_Reproduction_P Parameter: Timepoint (day) Value: 10
  misc_feature: MA Experiment 20001911 PARAMETER Experiment Name: At_Drought_Reproduction_P Parameter: Tissue Value: Flowers
  misc_feature: MA Experiment 20001911 PARAMETER Experiment Name: At_Drought_Reproduction_P Parameter: Treatment Value: Drought vs. No Drought
aaccagaaaagtgtactctactgcaactacttcttctctacttctctaccttaaaacttccccaaccattttcttcttcaaatcatcatcatcatccctcgtacaaagaaaatggccatgagcatactcgcgaagatctttctcgtctttgccatctattgcgctatcgatcccttcagtcacagctccatttccaagttcccggatttcaaaacttacaagattgacatgcctccgttatcgtcacttccaaaggagagagaccgccagaatctgttgcagaattcagagatcaggtttcttaacgaggttcaaggtcccgagagcattgctttcgatccgcaaggtcgtggtccttataccggagtcgccgacggtcgaattctcttttggaatggcactcgttggacagatttcgcatatacttcgaacaatcggtcagagctatgtgatcctaagccatcgcttttggattacttaaaggatgaagatatctgtggtcggcctttaggtcttcgattcgacaagaaaaatggggatttgtacattgcagatgcgtatttggggataatgaaagttggtccggaaggaggtttagcaacttctgttacaaacgaggctgatggtgtgcctttgagatttaccaatgatcttgacattgatgatgaaggcaatgtttactttactgatagcagctctttcttccaacgaaggaaatttatgcttttgattgtctcgggggaagacagtgggagggtgttgaaatacaatccaaaaacaaaggagactaccactctcgtgagaaatctccagtttcctaacggattatccctcggcaaagacggctcctttttcatcttttgtgaaggatctattggaagattacggaaatactggttgaaaggggagaaagctggaacgtcagaagtggtagctctattacatgggttcccagacaacatccgcacaaacaaagatggagatttctgggtggcggtgcactgccacagaaacatattcacacacttgatggcgcattacccgagggtgaggaagttctttctgaagctgccgatatcagtgaagtttcagtacttgctgcaggtaggtggttggcctcatgctgtagctgtgaagtacagtgaagaagggaaagtgctaaaggtgttggaagatagtaaagggaaagtggtgaaggcagtgagtgaagtggaggagaaagatgggaagctttggatgggaagtgtattgatgtccttcattgccgtatatgacttgccttagttcgtttctttttctattcaaatttgtatatttctagtttggctatgggattgcaatatgcatctcgttatcaaactatatttgacgtaatcaattcaaacacaaacaattactaaatacagtatcctttttgcc

SEQ ID NO: 81294 - protein, 390 aa, Arabidopsis thaliana
  peptide (1)..(390): Ceres Seq. ID no. 12659211
  misc_feature (7)..(258): Pfam Name: Strictosidine synthase Pfam Description: Strictosidine synthase
  misc_feature (1)..(390): Homolog of NCBI NO: 18390900 NR Description: strictosidine synthase-related; protein id: supported by cDNA: gi_16930480, supported by cDNA: gi_17381181 thaliana] >gi|16930481|gb|AAL31926.1|AF419594_1 At1g08470/T27G7_9
  misc_feature (1)..(258): Homolog of NCBI NO: 25335889 NR Description: protein T27G7.16 [imported] - Arabidopsis >gi|6664319|gb|AAF22901.1|AC006932_18 T27G7.16 [Arabidopsis
  misc_feature (257)..(390): Homolog of NCBI NO: 25335889 NR Description: protein T27G7.16 [imported] - Arabidopsis >gi|6664319|gb|AAF22901.1|AC006932_18 T27G7.16 [Arabidopsis
  misc_feature (11)..(389): Homolog of NCBI NO: 22326950 NR Description: similar to strictosidine synthase-related; id: At5g22020.1 [Arabidopsis thaliana]
  misc_feature (14)..(388): Homolog of NCBI NO: 40538997 NR Description: putative strictosidine synthase [Oryza sativa
  misc_feature (47)..(389): Homolog of NCBI NO: 11280567 NR Description: hypothetical protein F24I3.110 - Arabidopsis >gi|6911873|emb|CAB72173.1| putative protein [Arabidopsis
  misc_feature (47)..(389): Homolog of NCBI NO: 30694556 NR Description: strictosidine synthase-related [Arabidopsis
  misc_feature (9)..(390): Homolog of NCBI NO: 28393615 NR Description: putative strictosidine synthase [Arabidopsis >gi|28973541|gb|AAO64095.1| putative strictosidine synthase
  misc_feature (53)..(388): Homolog of NCBI NO: 6759491 NR Description: hypothetical protein [Arabidopsis thaliana]
  misc_feature (53)..(389): Homolog of NCBI NO: 8489790 NR Description: putative strictosidine synthase [Lycopersicon
MAMSILAKIFLVFAIYCAIDPFSHSSISKFPDFKTYKIDMPPLSSLPKERDRQNLLQNSEIRFLNEVQGPESIAFDPQGRGPYTGVADGRILFWNGTRWTDFAYTSNNRSELCDPKPSLLDYLKDEDICGRPLGLRFDKKNGDLYIADAYLGIMKVGPEGGLATSVTNEADGVPLRFTNDLDIDDEGNVYFTDSSSFFQRRKFMLLIVSGEDSGRVLKYNPKTKETTTLVRNLQFPNGLSLGKDGSFFIFCEGSIGRLRKYWLKGEKAGTSEVVALLHGFPDNIRTNKDGDFWVAVHCHRNIFTHLMAHYPRVRKFFLKLPISVKFQYLLQVGGWPHAVAVKYSEEGKVLKVLEDSKGKVVKAVSEVEEKDGKLWMGSVLMSFIAVYDLP

SEQ ID NO: 81295 - protein, 388 aa, Arabidopsis thaliana
  peptide (1)..(388): Ceres Seq. ID no. 12659212
  misc_feature (5)..(256): Pfam Name: Strictosidine synthase Pfam Description: Strictosidine synthase
  misc_feature (1)..(388): Homolog of NCBI NO: 18390900 NR Description: strictosidine synthase-related; protein id: supported by cDNA: gi_16930480, supported by cDNA: gi_17381181 thaliana] >gi|16930481|gb|AAL31926.1|AF419594_1 At1g08470/T27G7_9
  misc_feature (1)..(256): Homolog of NCBI NO: 25335889 NR Description: protein T27G7.16 [imported] - Arabidopsis >gi|6664319|gb|AAF22901.1|AC006932_18 T27G7.16 [Arabidopsis
  misc_feature (255)..(388): Homolog of NCBI NO: 25335889 NR Description: protein T27G7.16 [imported] - Arabidopsis >gi|6664319|gb|AAF22901.1|AC006932_18 T27G7.16 [Arabidopsis
  misc_feature (9)..(387): Homolog of NCBI NO: 22326950 NR Description: similar to strictosidine synthase-related; id: At5g22020.1 [Arabidopsis thaliana]
  misc_feature (12)..(386): Homolog of NCBI NO: 40538997 NR Description: putative strictosidine synthase [Oryza sativa
  misc_feature (45)..(387): Homolog of NCBI NO: 11280567 NR Description: hypothetical protein F24I3.110 - Arabidopsis >gi|6911873|emb|CAB72173.1| putative protein [Arabidopsis
  misc_feature (45)..(387): Homolog of NCBI NO: 30694556 NR Description: strictosidine synthase-related [Arabidopsis
  misc_feature (7)..(388): Homolog of NCBI NO: 28393615 NR Description: putative strictosidine synthase [Arabidopsis >gi|28973541|gb|AAO64095.1| putative strictosidine synthase
  misc_feature (51)..(386): Homolog of NCBI NO: 6759491 NR Description: hypothetical protein [Arabidopsis thaliana]
  misc_feature (51)..(387): Homolog of NCBI NO: 8489790 NR Description: putative strictosidine synthase [Lycopersicon
MSILAKIFLVFAIYCAIDPFSHSSISKFPDFKTYKIDMPPLSSLPKERDRQNLLQNSEIRFLNEVQGPESIAFDPQGRGPYTGVADGRILFWNGTRWTDFAYTSNNRSELCDPKPSLLDYLKDEDICGRPLGLRFDKKNGDLYIADAYLGIMKVGPEGGLATSVTNEADGVPLRFTNDLDIDDEGNVYFTDSSSFFQRRKFMLLIVSGEDSGRVLKYNPKTKETTTLVRNLQFPNGLSLGKDGSFFIFCEGSIGRLRKYWLKGEKAGTSEVVALLHGFPDNIRTNKDGDFWVAVHCHRNIFTHLMAHYPRVRKFFLKLPISVKFQYLLQVGGWPHAVAVKYSEEGKVLKVLEDSKGKVVKAVSEVEEKDGKLWMGSVLMSFIAVYDLP

SEQ ID NO: 81296 - protein, 351 aa, Arabidopsis thaliana
  peptide (1)..(351): Ceres Seq. ID no. 12659213
  misc_feature (1)..(219): Pfam Name: Strictosidine synthase Pfam Description: Strictosidine synthase
  misc_feature (1)..(351): Homolog of NCBI NO: 18390900 NR Description: strictosidine synthase-related; protein id: supported by cDNA: gi_16930480, supported by cDNA: gi_17381181 thaliana] >gi|16930481|gb|AAL31926.1|AF419594_1 At1g08470/T27G7_9
  misc_feature (1)..(219): Homolog of NCBI NO: 25335889 NR Description: protein T27G7.16 [imported] - Arabidopsis >gi|6664319|gb|AAF22901.1|AC006932_18 T27G7.16 [Arabidopsis
  misc_feature (218)..(351): Homolog of NCBI NO: 25335889 NR Description: protein T27G7.16 [imported] - Arabidopsis >gi|6664319|gb|AAF22901.1|AC006932_18 T27G7.16 [Arabidopsis
  misc_feature (1)..(350): Homolog of NCBI NO: 22326950 NR Description: similar to strictosidine synthase-related; id: At5g22020.1 [Arabidopsis thaliana]
  misc_feature (1)..(349): Homolog of NCBI NO: 40538997 NR Description: putative strictosidine synthase [Oryza sativa
  misc_feature (8)..(350): Homolog of NCBI NO: 11280567 NR Description: hypothetical protein F24I3.110 - Arabidopsis >gi|6911873|emb|CAB72173.1| putative protein [Arabidopsis
  misc_feature (8)..(350): Homolog of NCBI NO: 30694556 NR Description: strictosidine synthase-related [Arabidopsis
  misc_feature (1)..(351): Homolog of NCBI NO: 28393615 NR Description: putative strictosidine synthase [Arabidopsis >gi|28973541|gb|AAO64095.1| putative strictosidine synthase
  misc_feature (14)..(349): Homolog of NCBI NO: 6759491 NR Description: hypothetical protein [Arabidopsis thaliana]
  misc_feature (14)..(350): Homolog of NCBI NO: 8489790 NR Description: putative strictosidine synthase [Lycopersicon
MPPLSSLPKERDRQNLLQNSEIRFLNEVQGPESIAFDPQGRGPYTGVADGRILFWNGTRWTDFAYTSNNRSELCDPKPSLLDYLKDEDICGRPLGLRFDKKNGDLYIADAYLGIMKVGPEGGLATSVTNEADGVPLRFTNDLDIDDEGNVYFTDSSSFFQRRKFMLLIVSGEDSGRVLKYNPKTKETTTLVRNLQFPNGLSLGKDGSFFIFCEGSIGRLRKYWLKGEKAGTSEVVALLHGFPDNIRTNKDGDFWVAVHCHRNIFTHLMAHYPRVRKFFLKLPISVKFQYLLQVGGWPHAVAVKYSEEGKVLKVLEDSKGKVVKAVSEVEEKDGKLWMGSVLMSFIAVYDLP

SEQ ID NO: 81297 - DNA, 3416 bp, Arabidopsis thaliana
  misc_feature (1)..(3416): Ceres Seq. ID no. 12659214
  misc_feature: MA Experiment ID: 20000185 Result: Up-regulated in Transcription
  misc_feature: MA Experiment 20000185 PARAMETER Experiment Name: At_Roots__P Parameter: Age (day) Value: 7 vs. 21
  misc_feature: MA Experiment 20000185 PARAMETER Experiment Name: At_Roots__P Parameter: Organism Value: A. thaliana
  misc_feature: MA Experiment 20000185 PARAMETER Experiment Name: At_Roots__P Parameter: Tissue Value: Roots vs. Whole Plant
  misc_feature: MA Experiment ID: 20000227 Result: Up-regulated in Transcription
  misc_feature: MA Experiment 20000227 PARAMETER Experiment Name: At_Root-Tips-vs-Tops_P Parameter: Tissue Value: Root Tips vs. Root Tops
  misc_feature: MA Experiment ID: 20000439 Result: Up-regulated in Transcription
  misc_feature: MA Experiment 20000439 PARAMETER Experiment Name: At_Roots__P Parameter: Age (day) Value: 14 vs. 21
  misc_feature: MA Experiment 20000439 PARAMETER Experiment Name: At_Roots__P Parameter: Organism Value: A. thaliana
  misc_feature: MA Experiment 20000439 PARAMETER Experiment Name: At_Roots__P Parameter: Tissue Value: Roots vs. Whole Plant
agttgcacaaaaatgccataaaactagccaaaaagtgaagaaatagaggagaaaaatggcgatccctcgacttttcttcctcttctattacattggtttcgctcttttcccttttgtttcttctgaaacatttcaaaactccgaacaagagatcttgttggccttcaagtcagacctttttgatccttcaaataatctccaagattggaagagacctgagaatgccacaacattttctgagttggttcattgtcattggacaggagttcactgtgatgcaaatggctatgtggctaagcttcttctctccaacatgaatctcagcggaaacgtgtcagatcagattcagagcttcccttctctgcaagcccttgatctcagcaataacgcatttgagtcttctcttcctaaatctctttctaatctcacgtctttgaaggtcattgatgtgagtgtgaacagcttctttggaaccttcccttatggtctaggaatggcaactggtcttacacacgtcaatgcctcaagcaacaatttttcggggtttctacctgaagatcttggcaacgcaactacacttgaggttttggactttcgaggaggttacttcgagggctcagtgccttcttctttcaagaatctcaagaatctgaagtttctcggtctttcgggtaacaactttggtggaaaggtaccgaaggtgattggtgagctctcttccttggagaccattattcttggttacaatggcttcatgggtgagattccagaagagtttgggaaattgacgcgccttcagtaccttgatttggctgttggaaaccttacaggccagattccatcttctttggggcagctgaaacaacttacaacagtttatctctaccagaaccgtctcacagggaaacttcctcgagaacttggtggtatgacttctcttgtgtttcttgatctgtctgataaccagatcacaggagaaatacctatggaagtaggtgagttgaagaatctgcagcttctaaatttgatgaggaatcaactcacgggaatcattccgtcaaaaattgctgaattaccaaaccttgaggttcttgagctgtggcagaactctctcatgggttcattaccggtgcatctcggcaaaaattccccattgaagtggttagacgtctcatcaaacaagctttcaggagatataccatcaggattgtgctattccagaaacctcacaaagctcattctcttcaacaactcattctcaggtcagattccggaggaaatcttctcatgtccgactttagttcgtgttcgaatccagaaaaatcacatttccggatctataccagctggttcaggtgacttaccaatgcttcagcatctagagctcgcaaaaaacaacctcaccggtaaaattccagatgatatagccttatccacatcactctcatttatagacatatcatttaatcatctctcatccctatcttcctccattttctcaagtcctaatcttcaaaccttcattgcctcacataacaactttgccggaaaaattcctaaccagattcaagatcgtccatctttgtctgtcctcgatctttccttcaaccatttctcaggtggaatcccagaaaggatcgcttcttttgaaaaacttgtgagtctaaatctcaagagcaaccaattggttggagaaatccctaaggcattagccgggatgcacatgttagctgttcttgatctctcaaacaactctttgacggggaatataccagcggacttgggagcttctccaacactggagatgttaaacgtgtcattcaacaaactcgacggacccattccttcaaacatgctgtttgcagccatagacccaaaagacctcgtgggaaacaatggcttatgcggtggagttctaccaccttgctctaagagcctagctttgtcagcaaaaggccgaaatccagggagaattcacgtgaatcacgcagtcttcgggttcattgttggaacttcagtcatcgtggctatggggatgatgttcttggcagggagatggatatacacaagatgggatctttacagcaactttgctagagagtatatattctgcaagaaacctcgggaggaatggccatggagactcgtggctttccagagactgtgcttcactgcaggagacatcttatcacatatcaaagaatcaaacatcattggaatgggagccatagggattgtttacaaagcagaagtcatgagacggccattactcactgtagctgtgaaaaaactgtggagatcaccatcaccacaaaatgatatcgaagatcatcatcaagaagaagatgaagaggacgacatactcagagaagtgaacctacttggtggtctacgacatagaaacattgtgaagattctaggttacgttcacaacgagagagaagtgatgatggtatacgagtacatgcccaatggaaacctaggaactgctttgcattccaaagatgagaaattcttactaagagattggctctcacgatacaatgtcgccgtcggagtcgttcaaggtctcaattacttgcacaacgattgctatcctccgatcattcacagagacatcaagtctaataacatcctcctcgattcaaaccttgaagcgaggatagcagatttcggattggcgaagatgatgcttcataagaacgagaccgtttctatggtggctggatcttacgggtatatagcgccggagtacggatacacactgaagattgacgaaaagagtgatatatacagtctaggcgttgtgcttctggaattggtgactgggaaaatgccgatagatccttcgtttgaggattcgattgacgtggttgagtggattcggaggaaggtgaagaagaacgagagcttggaagaagtgatcgacgcgagcatcgccggagattgtaaacacgtgatcgaagagatgctcctggcactgcgaatcgctcttctctgcaccgcgaagctaccgaaggatagaccatcgattagagacgtcatcacaatgctcgcggaggcgaagccacgccggaaaagtgtttgccaagtcgccggggatttgccgattttcagaaactcgccagtggtagggctgatttagatgacggaggcgataagggtagttttgtcatttcatcagctggggctaattttaacattgggctaacaagttaactttgggctgaatcaaaaacccatgttttcaaatctgatgggtgcactaaagcccattgaaccaaatgacatgattcaaaattgtaataggccccttgttgatggctgatccagcaaattgtagttaccagaggctaaaaaaataataaataaagattttaattagttttgttttaatggaatattaatctttcaat

SEQ ID NO: 81298 - protein, 1029 aa, Arabidopsis thaliana [sequence omitted]

SEQ ID NO: 81299 - protein, 943 aa, Arabidopsis thaliana
  peptide (1)..(943): Ceres Seq. ID no. 12659216
  misc_feature (1)..(923): Homolog of NCBI NO: 15235387 NR Description: leucine-rich repeat transmembrane protein kinase, protein id: At4g28650.1 [Arabidopsis thaliana]
  misc_feature (1)..(943): Homolog of NCBI NO: 27497207 NR Description: Hypothetical protein [Oryza sativa (japonica
  misc_feature (1)..(931): Homolog of NCBI NO: 15240263 NR Description: leucine-rich receptor-like protein kinase - like
MNLSGNVSDQIQSFPSLQALDLSNNAFESSLPKSLSNLTSLKVIDVSVNSFFGTFPYGLGMATGLTHVNASSNNFSGFLPEDLGNATTLEVLDFRGGYFEGSVPSSFKNLKNLKFLGLSGNNFGGKVPKVIGELSSLETIILGYNGFMGEIPEEFGKLTRLQYLDLAVGNLTGQIPSSLGQLKQLTTVYLYQNRLTGKLPRELGGMTSLVFLDLSDNQITGEIPMEVGELKNLQLLNLMRNQLTGIIPSKIAELPNLEVLELWQNSLMGSLPVHLGKNSPLKWLDVSSNKLSGDIPSGLCYSRNLTKLILFNNSFSGQIPEEIFSCPTLVRVRIQKNHISGSIPAGSGDLPMLQHLELAKNNLTGKIPDDIALSTSLSFIDISFNHLSSLSSSIFSSPNLQTFIASHNNFAGKIPNQIQDRPSLSVLDLSFNHFSGGIPERIASFEKLVSLNLKSNQLVGEIPKALAGMHMLAVLDLSNNSLTGNIPADLGASPTLEMLNVSFNKLDGPIPSNMLFAAIDPKDLVGNNGLCGGVLPPCSKSLALSAKGRNPGRIHVNHAVFGFIVGTSVIVAMGMMFLAGRWIYTRWDLYSNFAREYIFCKKPREEWPWRLVAFQRLCFTAGDILSHIKESNIIGMGAIGIVYKAEVMRRPLLTVAVKKLWRSPSPQNDIEDHHQEEDEEDDILREVNLLGGLRHRNIVKILGYVHNEREVMMVYEYMPNGNLGTALHSKDEKFLLRDWLSRYNVAVGVVQGLNYLHNDCYPPIIHRDIKSNNILLDSNLEARIADFGLAKMMLHKNETVSMVAGSYGYIAPEYGYTLKIDEKSDIYSLGVVLLELVTGKMPIDPSFEDSIDVVEWIRRKVKKNESLEEVIDASIAGDCKHVIEEMLLALRIALLCTAKLPKDRPSIRDVITMLAEAKPRRKSVCQVAGDLPIFRNSPVVGLI

SEQ ID NO: 81300 - protein, 883 aa, Arabidopsis thaliana
  peptide (1)..(883): Ceres Seq. ID no. 12659217
  misc_feature (1)..(863): Homolog of NCBI NO: 15235387 NR Description: leucine-rich repeat transmembrane protein kinase, protein id: At4g28650.1 [Arabidopsis thaliana]
  misc_feature (1)..(883): Homolog of NCBI NO: 27497207 NR Description: Hypothetical protein [Oryza sativa (japonica
  misc_feature (1)..(871): Homolog of NCBI NO: 15240263 NR Description: leucine-rich receptor-like protein kinase - like
MATGLTHVNASSNNFSGFLPEDLGNATTLEVLDFRGGYFEGSVPSSFKNLKNLKFLGLSGNNFGGKVPKVIGELSSLETIILGYNGFMGEIPEEFGKLTRLQYLDLAVGNLTGQIPSSLGQLKQLTTVYLYQNRLTGKLPRELGGMTSLVFLDLSDNQITGEIPMEVGELKNLQLLNLMRNQLTGIIPSKIAELPNLEVLELWQNSLMGSLPVHLGKNSPLKWLDVSSNKLSGDIPSGLCYSRNLTKLILFNNSFSGQIPEEIFSCPTLVRVRIQKNHISGSIPAGSGDLPMLQHLELAKNNLTGKIPDDIALSTSLSFIDISFNHLSSLSSSIFSSPNLQTFIASHNNFAGKIPNQIQDRPSLSVLDLSFNHFSGGIPERIASFEKLVSLNLKSNQLVGEIPKALAGMHMLAVLDLSNNSLTGNIPADLGASPTLEMLNVSFNKLDGPIPSNMLFAAIDPKDLVGNNGLCGGVLPPCSKSLALSAKGRNPGRIHVNHAVFGFIVGTSVIVAMGMMFLAGRWIYTRWDLYSNFAREYIFCKKPREEWPWRLVAFQRLCFTAGDILSHIKESNIIGMGAIGIVYKAEVMRRPLLTVAVKKLWRSPSPQNDIEDHHQEEDEEDDILREVNLLGGLRHRNIVKILGYVHNEREVMMVYEYMPNGNLGTALHSKDEKFLLRDWLSRYNVAVGVVQGLNYLHNDCYPPIIHRDIKSNNILLDSNLEARIADFGLAKMMLHKNETVSMVAGSYGYIAPEYGYTLKIDEKSDIYSLGVVLLELVTGKMPIDPSFEDSIDVVEWIRRKVKKNESLEEVIDASIAGDCKHVIEEMLLALRIALLCTAKLPKDRPSIRDVITMLAEAKPRRKSVCQVAGDLPIFRNSPVVGLI

SEQ ID NO: 81301 - DNA, 1680 bp, Arabidopsis thaliana
  misc_feature (1)..(1680): Ceres Seq. ID no. 12659222
  misc_feature: MA Experiment ID: 20000180 Result: Down-regulated in Transcription
  misc_feature: MA Experiment 20000180 PARAMETER Experiment Name: At_Germinating_Seeds_P Parameter: Age (hr) Value: 24 vs. 0
  misc_feature: MA Experiment 20000180 PARAMETER Experiment Name: At_Germinating_Seeds_P Parameter: Tissue Value: Germinating Seeds
  misc_feature: MA Experiment ID: 20000185 Result: Down-regulated in Transcription
  misc_feature: MA Experiment 20000185 PARAMETER Experiment Name: At_Roots__P Parameter: Age (day) Value: 7 vs. 21
  misc_feature: MA Experiment 20000185 PARAMETER Experiment Name: At_Roots__P Parameter: Organism Value: A. thaliana
  misc_feature: MA Experiment 20000185 PARAMETER Experiment Name: At_Roots__P Parameter: Tissue Value: Roots vs. Whole Plant
  misc_feature: MA Experiment ID: 20000437 Result: Down-regulated in Transcription
  misc_feature: MA Experiment 20000437 PARAMETER Experiment Name: At_Drought_P Parameter: Age (day) Value: 8
  misc_feature: MA Experiment 20000437 PARAMETER Experiment Name: At_Drought_P Parameter: Organism Value: A. thaliana
  misc_feature: MA Experiment 20000437 PARAMETER Experiment Name: At_Drought_P Parameter: Plant Line Value: WS
  misc_feature: MA Experiment 20000437 PARAMETER Experiment Name: At_Drought_P Parameter: Timepoint (hr) Value: 24
  misc_feature: MA Experiment 20000437 PARAMETER Experiment Name: At_Drought_P Parameter: Tissue Value: Whole Plant
  misc_feature: MA Experiment 20000437 PARAMETER Experiment Name: At_Drought_P Parameter: Treatment Value: Drought vs. No Drought
  misc_feature: MA Experiment ID: 20000794 Result: Down-regulated in Transcription
  misc_feature: MA Experiment 20000794 PARAMETER Experiment Name: At_Petals_P Parameter: Age (day) Value: 23-25 days
  misc_feature: MA Experiment 20000794 PARAMETER Experiment Name: At_Petals_P Parameter: Plant Line Value: WS
  misc_feature: MA Experiment 20000794 PARAMETER Experiment Name: At_Petals_P Parameter: Tissue Value: Petals vs. Whole plant
  misc_feature: MA Experiment ID: 20001458 Result: Up-regulated in Transcription
  misc_feature: MA Experiment 20001458 PARAMETER Experiment Name: At_50mM_NH4NO3_L-to-H_P Parameter: Age (day) Value: Undefined
  misc_feature: MA Experiment 20001458 PARAMETER Experiment Name: At_50mM_NH4NO3_L-to-H_P Parameter: Organism Value: Undefined
  misc_feature: MA Experiment 20001458 PARAMETER Experiment Name: At_50mM_NH4NO3_L-to-H_P Parameter: Plant Line Value: Undefined
  misc_feature: MA Experiment 20001458 PARAMETER Experiment Name: At_50mM_NH4NO3_L-to-H_P Parameter: Timepoint (hr) Value: 2
  misc_feature: MA Experiment 20001458 PARAMETER Experiment Name: At_50mM_NH4NO3_L-to-H_P Parameter: Tissue Value: Siliques
  misc_feature: MA Experiment 20001458 PARAMETER Experiment Name: At_50mM_NH4NO3_L-to-H_P Parameter: Treatment Value: 50mM NH4NO3 vs. 100mM Manitol
  misc_feature: MA Experiment ID: 20001556 Result: Up-regulated in Transcription
  misc_feature: MA Experiment 20001556 PARAMETER Experiment Name: At_Drought_Soil_Dry_P Parameter: Age (day) Value: 26
  misc_feature: MA Experiment 20001556 PARAMETER Experiment Name: At_Drought_Soil_Dry_P Parameter: Organism Value: A. thaliana
  misc_feature: MA Experiment 20001556 PARAMETER Experiment Name: At_Drought_Soil_Dry_P Parameter: Plant Line Value: WS
  misc_feature: MA Experiment 20001556 PARAMETER Experiment Name: At_Drought_Soil_Dry_P Parameter: Post Timepoint (hr) Value: None
  misc_feature: MA Experiment 20001556 PARAMETER Experiment Name: At_Drought_Soil_Dry_P Parameter: Post-Treatment Value: None
  misc_feature: MA Experiment 20001556 PARAMETER Experiment Name: At_Drought_Soil_Dry_P Parameter: Timepoint (day) Value: 12
  misc_feature: MA Experiment 20001556 PARAMETER Experiment Name: At_Drought_Soil_Dry_P Parameter: Treatment Value: Drought vs. No Drought
  misc_feature: MA Experiment ID: 20001557 Result: Up-regulated in Transcription
  misc_feature: MA Experiment 20001557 PARAMETER Experiment Name: At_Drought_Soil_Dry_P Parameter: Age (day) Value: 27
  misc_feature: MA Experiment 20001557 PARAMETER Experiment Name: At_Drought_Soil_Dry_P Parameter: Organism Value: A. thaliana
  misc_feature: MA Experiment 20001557 PARAMETER Experiment Name: At_Drought_Soil_Dry_P Parameter: Plant Line Value: WS
  misc_feature: MA Experiment 20001557 PARAMETER Experiment Name: At_Drought_Soil_Dry_P Parameter: Post Timepoint (hr) Value: 3
  misc_feature: MA Experiment 20001557 PARAMETER Experiment Name: At_Drought_Soil_Dry_P Parameter: Post-Treatment Value: Re-Water vs. No Drought
  misc_feature: MA Experiment 20001557 PARAMETER Experiment Name: At_Drought_Soil_Dry_P Parameter: Timepoint (day) Value: 13
  misc_feature: MA Experiment 20001557 PARAMETER Experiment Name: At_Drought_Soil_Dry_P Parameter: Treatment Value: Drought vs. No Drought
  misc_feature: MA Experiment ID: 20001558 Result: Up-regulated in Transcription
  misc_feature: MA Experiment 20001558 PARAMETER Experiment Name: At_Drought_Soil_Dry_P Parameter: Age (day) Value: 27
  misc_feature: MA Experiment 20001558 PARAMETER Experiment Name: At_Drought_Soil_Dry_P Parameter: Organism Value: A. thaliana
  misc_feature: MA Experiment 20001558 PARAMETER Experiment Name: At_Drought_Soil_Dry_P Parameter: Plant Line Value: WS
  misc_feature: MA Experiment 20001558 PARAMETER Experiment Name: At_Drought_Soil_Dry_P Parameter: Post Timepoint (hr) Value: 6
  misc_feature: MA Experiment 20001558 PARAMETER Experiment Name: At_Drought_Soil_Dry_P Parameter: Post-Treatment Value: Re-Water vs. No Drought
  misc_feature: MA Experiment 20001558 PARAMETER Experiment Name: At_Drought_Soil_Dry_P Parameter: Timepoint (day) Value: 13
  misc_feature: MA Experiment 20001558 PARAMETER Experiment Name: At_Drought_Soil_Dry_P Parameter: Treatment Value: Drought vs. No Drought
  misc_feature: MA Experiment ID: 20001757 Result: Up-regulated in Transcription
  misc_feature: MA Experiment 20001757 PARAMETER Experiment Name: At_50mM_NH4NO3_L-to-H_P Parameter: Timepoint (hr) Value: 6
  misc_feature: MA Experiment 20001757 PARAMETER Experiment Name: At_50mM_NH4NO3_L-to-H_P Parameter: Tissue Value: Leaf
  misc_feature: MA Experiment 20001757 PARAMETER Experiment Name: At_50mM_NH4NO3_L-to-H_P Parameter: Treatment Value: 50mM NH4NO3 vs 100mM Mannitol
atggcttcgtcgaatttgctacttgaggttcagttcttgcatattcctagtctgtctcaaaagcaggcgaatcctttatcttgcagaaagttttcttctttagattggaagcaagaaattgggctgaaaaaggatgttttttttagatgtcacggcttgttaagtagtgtgtgcattgacaatgtaaatgatcatgctgagagaagctcagagttccatcactatggtgtcggtactaacttgagagccagagtgaaacctatgaagcaatttggtttatcatctgatggaccaattacagagaacgacgaagagaccaacaatgagatccttcataacctgtgcagcaatgggaagttaacagatgcgtgcaaacttgtcgaggtgatggcacgacataatcaggttcctcattttccttcttgctcaaacttagtccgtggtctagccagaattgatcaactggataaagcaatgtgtatcttgagagtaatggtaatgtctggtggggttccagatactattacctataacatgatcatcggaaatctttgcaagaaagggcatataagaactgctttggtcctcttagaagatatgagtttgagtgggagccctcctgatgtgatcacgtataacacagtgattcggtgtatgtttgattatgggaatgctgagcaagccatcaggttttggaaggatcaactgcagaatggttgccctccatttatgattacatacacggttttggtcgaactcgtgtgcaggtactgtggaagcgctcgagctatagaagttttagaagacatggcagtggaaggttgctatcctgacattgtcacatataattctctggttaactataactgcaggcgagggaatttggaagaggtggcttcggttattcagcatatcttatctcatggattggaactgaacactgtaacttacaacactcttctacattccctctgttcccacgagtactgggatgaagtggaggagattctaaacatcatgtaccagacgtcctactgtccaactgttattacttacaacatcctgattaatggtttatgcaaagccaggcttttgagtcgtgcaattgatttcttctaccaaatgctggaacagaagtgtttgcctgatatagtcacttacaacacagttctcggagccatgtccaaagagggcatggtagatgatgcgattgagttgcttggattgctgaaaaacacatgttgtccgccgggcttgatcacttacaactctgtaatcgatggattggctaaaaagggcctgatgaagaaagcattggagctgtaccatcagatgctggatgctggaatctttccggatgatataactcgtcggtctttaatatatggtttctgccgggcaaacctagttgaagaagctggccaagttttaaaggagacgagcaatagagggaatgggatcagaggtagcacttacaggttggtgatccaagggctgtgcaagaagaaagagatagaaatggcgatagaggttgttgagataatgctaacaggtgggtgtaagccagatgagacaatatacaccgcaatagttaaaggcgtggaagagatgggaatgggaagcgaggctgttcagttgcagaagaaactgaagcaatggaaactcttgaaagaagtgtag

SEQ ID NO: 81302 - protein, 559 aa, Arabidopsis thaliana
  peptide (1)..(559): Ceres Seq. ID no. 12659223
  misc_feature (210)..(244): Pfam Name: PPR repeat Pfam Description: PPR repeat
  misc_feature (1)..(559): Homolog of NCBI NO: 15223266 NR Description: hypothetical protein; protein id: At1g08610.1
  misc_feature (21)..(534): Homolog of NCBI NO: 15218325 NR Description: hypothetical protein; protein id: At1g09900.1
  misc_feature (110)..(558): Homolog of NCBI NO: 15218325 NR Description: hypothetical protein; protein id: At1g09900.1
  misc_feature (123)..(558): Homolog of NCBI NO: 18397002 NR Description: expressed protein; protein id: At3g04760.1, by cDNA: gi_15810358 [Arabidopsis thaliana] hypothetical protein [Arabidopsis thaliana]
  misc_feature (108)..(548): Homolog of NCBI NO: 34910106 NR Description: B1100D10.28 [Oryza sativa (japonica
  misc_feature (93)..(551): Homolog of NCBI NO: 34896658 NR Description: putative membrane-associated salt-inducible
  misc_feature (106)..(550): Homolog of NCBI NO: 34910106 NR Description: B1100D10.28 [Oryza sativa (japonica
  misc_feature (108)..(550): Homolog of NCBI NO: 34896658 NR Description: putative membrane-associated salt-inducible
  misc_feature (103)..(484): Homolog of NCBI NO: 15218325 NR Description: hypothetical protein; protein id: At1g09900.1
  misc_feature (106)..(551): Homolog of NCBI NO: 15221674 NR Description: unknown protein; protein id: At1g63080.1
MASSNLLLEVQFLHIPSLSQKQANPLSCRKFSSLDWKQEIGLKKDVFFRCHGLLSSVCIDNVNDHAERSSEFHHYGVGTNLRARVKPMKQFGLSSDGPITENDEETNNEILHNLCSNGKLTDACKLVEVMARHNQVPHFPSCSNLVRGLARIDQLDKAMCILRVMVMSGGVPDTITYNMIIGNLCKKGHIRTALVLLEDMSLSGSPPDVITYNTVIRCMFDYGNAEQAIRFWKDQLQNGCPPFMITYTVLVELVCRYCGSARAIEVLEDMAVEGCYPDIVTYNSLVNYNCRRGNLEEVASVIQHILSHGLELNTVTYNTLLHSLCSHEYWDEVEEILNIMYQTSYCPTVITYNILINGLCKARLLSRAIDFFYQMLEQKCLPDIVTYNTVLGAMSKEGMVDDAIELLGLLKNTCCPPGLITYNSVIDGLAKKGLMKKALELYHQMLDAGIFPDDITRRSLIYGFCRANLVEEAGQVLKETSNRGNGIRGSTYRLVIQGLCKKKEIEMAIEVVEIMLTGGCKPDETIYTAIVKGVEEMGMGSEAVQLQKKLKQWKLLKEV

SEQ ID NO: 81303 - protein, 472 aa, Arabidopsis thaliana
  peptide (1)..(472): Ceres Seq. ID no. 12659224
  misc_feature (123)..(157): Pfam Name: PPR repeat Pfam Description: PPR repeat
  misc_feature (1)..(472): Homolog of NCBI NO: 15223266 NR Description: hypothetical protein; protein id: At1g08610.1
  misc_feature (1)..(447): Homolog of NCBI NO: 15218325 NR Description: hypothetical protein; protein id: At1g09900.1
  misc_feature (23)..(471): Homolog of NCBI NO: 15218325 NR Description: hypothetical protein; protein id: At1g09900.1
  misc_feature (36)..(471): Homolog of NCBI NO: 18397002 NR Description: expressed protein; protein id: At3g04760.1, by cDNA: gi_15810358 [Arabidopsis thaliana] hypothetical protein [Arabidopsis thaliana]
  misc_feature (21)..(461): Homolog of NCBI NO: 34910106 NR Description: B1100D10.28 [Oryza sativa (japonica
  misc_feature (6)..(464): Homolog of NCBI NO: 34896658 NR Description: putative membrane-associated salt-inducible
  misc_feature (19)..(463): Homolog of NCBI NO: 34910106 NR Description: B1100D10.28 [Oryza sativa (japonica
  misc_feature (21)..(463): Homolog of NCBI NO: 34896658 NR Description: putative membrane-associated salt-inducible
  misc_feature (16)..(397): Homolog of NCBI NO: 15218325 NR Description: hypothetical protein; protein id: At1g09900.1
  misc_feature (19)..(464): Homolog of NCBI NO: 15221674 NR Description: unknown protein; protein id: At1g63080.1
MKQFGLSSDGPITENDEETNNEILHNLCSNGKLTDACKLVEVMARHNQVPHFPSCSNLVRGLARIDQLDKAMCILRVMVMSGGVPDTITYNMIIGNLCKKGHIRTALVLLEDMSLSGSPPDVITYNTVIRCMFDYGNAEQAIRFWKDQLQNGCPPFMITYTVLVELVCRYCGSARAIEVLEDMAVEGCYPDIVTYNSLVNYNCRRGNLEEVASVIQHILSHGLELNTVTYNTLLHSLCSHEYWDEVEEILNIMYQTSYCPTVITYNILINGLCKARLLSRAIDFFYQMLEQKCLPDIVTYNTVLGAMSKEGMVDDAIELLGLLKNTCCPPGLITYNSVIDGLAKKGLMKKALELYHQMLDAGIFPDDITRRSLIYGFCRANLVEEAGQVLKETSNRGNGIRGSTYRLVIQGLCKKKEIEMAIEVVEIMLTGGCKPDETIYTAIVKGVEEMGMGSEAVQLQKKLKQWKLLKEV

SEQ ID NO: 81304 - protein, 430 aa, Arabidopsis thaliana
  peptide (1)..(430): Ceres Seq. ID no. 12659225
  misc_feature (81)..(115): Pfam Name: PPR repeat Pfam Description: PPR repeat
  misc_feature (1)..(430): Homolog of NCBI NO: 15223266 NR Description: hypothetical protein; protein id: At1g08610.1
  misc_feature (1)..(405): Homolog of NCBI NO: 15218325 NR Description: hypothetical protein; protein id: At1g09900.1
  misc_feature (1)..(429): Homolog of NCBI NO: 15218325 NR Description: hypothetical protein; protein id: At1g09900.1
  misc_feature (1)..(429): Homolog of NCBI NO: 18397002 NR Description: expressed protein; protein id: At3g04760.1, by cDNA: gi_15810358 [Arabidopsis thaliana] hypothetical protein [Arabidopsis thaliana]
  misc_feature (1)..(419): Homolog of NCBI NO: 34910106 NR Description: B1100D10.28 [Oryza sativa (japonica
  misc_feature (1)..(422): Homolog of NCBI NO: 34896658 NR Description: putative membrane-associated salt-inducible
  misc_feature (1)..(421): Homolog of NCBI NO: 34910106 NR Description: B1100D10.28 [Oryza sativa (japonica
  misc_feature (1)..(421): Homolog of NCBI NO: 34896658 NR Description: putative membrane-associated salt-inducible
  misc_feature (1)..(355): Homolog of NCBI NO: 15218325 NR Description: hypothetical protein; protein id: At1g09900.1
  misc_feature (1)..(422): Homolog of NCBI NO: 15221674 NR Description: unknown protein; protein id: At1g63080.1
MARHNQVPHFPSCSNLVRGLARIDQLDKAMCILRVMVMSGGVPDTITYNMIIGNLCKKGHIRTALVLLEDMSLSGSPPDVITYNTVIRCMFDYGNAEQAIRFWKDQLQNGCPPFMITYTVLVELVCRYCGSARAIEVLEDMAVEGCYPDIVTYNSLVNYNCRRGNLEEVASVIQHILSHGLELNTVTYNTLLHSLCSHEYWDEVEEILNIMYQTSYCPTVITYNILINGLCKARLLSRAIDFFYQMLEQKCLPDIVTYNTVLGAMSKEGMVDDAIELLGLLKNTCCPPGLITYNSVIDGLAKKGLMKKALELYHQMLDAGIFPDDITRRSLIYGFCRANLVEEAGQVLKETSNRGNGIRGSTYRLVIQGLCKKKEIEMAIEVVEIMLTGGCKPDETIYTAIVKGVEEMGMGSEAVQLQKKLKQWKLLKEV

SEQ ID NO: 81305 - DNA, 3081 bp, Arabidopsis thaliana
  misc_feature (1)..(3081): Ceres Seq. ID no. 12659241
  misc_feature: MA Experiment ID: 20000184 Result: Down-regulated in Transcription
  misc_feature: MA Experiment 20000184 PARAMETER Experiment Name: At_Shoots__P Parameter: Age (day) Value: 7
  misc_feature: MA Experiment 20000184 PARAMETER Experiment Name: At_Shoots__P Parameter: Tissue Value: Shoots vs. Whole Plant
ccacttttttgattgaccaaaggaagaagaagaagaagaagaagaatctgaagagagcgatgaagcatattttcaagaagctacacagaggtgggaatcaagagcagcagaatcgaaccaacgatgcagctcctccatcggatcaaaatcggattcacgtttctgctaatcctcctcaagcaaccccttcgtcagtcactgagacgcttccggtggccggagctacttcttctatggcctctcctgctccaaccgctgcttcgaaccgtgcggattacatgtcttctgaggaggagtatcaagtgcagttagccctagcgatcagtgcttcgaattcgcagtccagtgaggatccggagaagcatcagatccgagcggcgacgcttctgagcttaggaagccatcaacggatggattcaaggagggattcatcggaggtggtagcccagaggttatcgagacagtactgggaatatggcgtgcttgactatgaggagaaagttgtcgatagtttctacgacgtatacagtctatccacagactccgcaaagcagggagaaatgccatcgctggaagatcttgaaagcaatcatggcacacctggctttgaagctgtagttgtaaatcgacctattgattcttccctgcatgagttgctagaaatcgcagagtgtattgcactgggttgttctactaccagtgttagtgtgttggtacagaggctggctgagcttgtcaccgagcatatgggtggatctgcggaagattccagtatagtattggcaaggtggactgaaaaaagcagcgagttcaaggcagcattgaatacttgcgtattccctattggatttgtaaagattggtatctcaaggcatcgtgctctgcttttcaaggttttggcagatagtgtcaggttaccttgtaggttggtaaaaggtagccactacacaggcaatgaggatgatgctgtgaacacgataagactggaagatgaaagagagtacttggttgatcttatgacagatcctgggacgcttatacccgctgattttgcaagtgctagtaataacaccgttgagccatgtaactcaaatggaaacaaatttcctacagctcagttttcaaatgacgtgccaaagctctcagaaggtgaaggaagtagtcacagttctatggccaactatagttcttctttggatagaaggacagaggctgaaaggacagattcttcatacccaaaggtgggaccacttcggaacatagactatagttctccttctagcgtaactagttctactcagttggagaacaattcctcaacagcaattggaaaggggagtcgaggagccataattgaatgttcaagaacaaacatgaatatagttccttacaatcagaacagtgaggaagacccaaaaaaccttttcgcagaccttaatccatttcaaaataagggagctgacaagctgtatatgcccactaaatcaggtttgaataacgttgatgattttcatcaacagaaaaataatcctctggttggtagatcacctgcgccaatgatgtggaagaattacagttgcaatgaagccccaaagagaaaggagaatagttatatagaaaatcttctcccgaaactccaccgtgatcctcgttatggaaacactcaatcctcatatgctacctcaagctccaatggagctatttcctcaaatgtgcatggcagagacaatgtgacatttgtgtcaccggttgctgtaccatcatccttcacatccactgaaaatcagtttagaccaagtatagtggaggatatgaacagaaacaccaacaatgaactagatcttcagcctcatactgctgctgtggtacatggacaacagaatgatgaatctcacatccatgatcacagaaagtacacaagtgatgacatatccactggctgtgatccgaggcttaaggatcacgaaagtacaagttcatctcttgattctacatcctaccggaatgatcctcaagttcttgatgatgcagatgttggtgaatgtgaaattccttggaatgatctcgttattgcggagagaataggattagggtcctatggagaggtctatcatgctgactggcatggcacggaagttgctgtcaagaaatttttggaccaggacttctcaggtgctgctttagccgagttcagaagcgaagtacggattatgcgaagattgcgtcatccaaatgttgtattcttccttggggctgttactcgtcctccaaatctttccatcgtcacagagtttctgcctagaggaagcttgtatcgaatccttcatcggcccaaatctcacattgacgagcggcgccggattaaaatggcccttgacgtggcaatggggatgaactgcttacacaccagtacaccgacaattgttcatcgtgatctcaaaacaccaaaccttttggttgataacaactggaatgttaaggtcggtgattttgggttgtctcgcttaaagcacaatacttttttatcctccaaatcaactgctggaacgcctgaatggatggctccagaagttctacgcaatgagccctcaaatgaaaagtgtgatgtgtacagtttcggggtaatactttgggaactagcaacattgagattaccatggagaggaatgaacccaatgcaagtagttggagcagttgggttccagaatcggcggcttgagatccccaaggaacttgatcctgtggtgggaaggatcatcctggaatgttggcaaacggatccgaatctgcggccgtcatttgctcagctgacggaagtgctgaagcctttgaaccggcttgtacttcctacaccacaatagatgtcatctgtgtgaatatgtgaaagaaaatttggttaatgtatactatttgacctctggtgctgcgcagagttattatacataagccagcctagaattgaggaatgtaaatgaaatcaatgtacactatactacgttttgatgtattatttgttataggaaaagccgctatgctgtgcttattttatcagaaataatgctaataagttaaacgtctgtc

SEQ ID NO: 81306 - protein, 952 aa, Arabidopsis thaliana
  peptide (1)..(952): Ceres Seq. ID no. 12659242
  misc_feature (688)..(940): Pfam Name: Protein kinase domain Pfam Description: Protein kinase domain
  misc_feature (47)..(949): Homolog of NCBI NO: 7489058 NR Description: probable protein kinase TCTR2 - tomato
  misc_feature (47)..(949): Homolog of NCBI NO: 15485672 NR Description: TCTR2 protein [Lycopersicon esculentum]
  misc_feature (122)..(594): Homolog of NCBI NO: 11127921 NR Description: EDR1 [Oryza sativa]
  misc_feature (624)..(952): Homolog of NCBI NO: 11127921 NR Description: EDR1 [Oryza sativa]
  misc_feature (52)..(561): Homolog of NCBI NO: 11127923 NR Description: EDR1 [Hordeum vulgare]
  misc_feature (633)..(952): Homolog of NCBI NO: 11127923 NR Description: EDR1 [Hordeum vulgare]
  misc_feature (20)..(516): Homolog of NCBI NO: 22326737 NR Description: MAP3K delta-1 protein kinase; protein id: supported by cDNA: gi_18700074 [Arabidopsis thaliana]
  misc_feature (625)..(946): Homolog of NCBI NO: 22326737 NR Description: MAP3K delta-1 protein kinase; protein id: supported by cDNA: gi_18700074 [Arabidopsis thaliana]
  misc_feature (625)..(925): Homolog of NCBI NO: 11358502 NR Description: MAP3K delta-1 protein kinase - Arabidopsis
  misc_feature (160)..(353): Homolog of NCBI NO: 11358502 NR Description: MAP3K delta-1 protein kinase - Arabidopsis
TFLIDQRKKKKKKKNLKRAMKHIFKKLHRGGNQEQQNRTNDAAPPSDQNRIHVSANPPQATPSSVTETLPVAGATSSMASPAPTAASNRADYMSSEEEYQVQLALAISASNSQSSEDPEKHQIRAATLLSLGSHQRMDSRRDSSEVVAQRLSRQYWEYGVLDYEEKVVDSFYDVYSLSTDSAKQGEMPSLEDLESNHGTPGFEAVVVNRPIDSSLHELLEIAECIALGCSTTSVSVLVQRLAELVTEHMGGSAEDSSIVLARWTEKSSEFKAALNTCVFPIGFVKIGISRHRALLFKVLADSVRLPCRLVKGSHYTGNEDDAVNTIRLEDEREYLVDLMTDPGTLIPADFASASNNTVEPCNSNGNKFPTAQFSNDVPKLSEGEGSSHSSMANYSSSLDRRTEAERTDSSYPKVGPLRNIDYSSPSSVTSSTQLENNSSTAIGKGSRGAIIECSRTNMNIVPYNQNSEEDPKNLFADLNPFQNKGADKLYMPTKSGLNNVDDFHQQKNNPLVGRSPAPMMWKNYSCNEAPKRKENSYIENLLPKLHRDPRYGNTQSSYATSSSNGAISSNVHGRDNVTFVSPVAVPSSFTSTENQFRPSIVEDMNRNTNNELDLQPHTAAVVHGQQNDESHIHDHRKYTSDDISTGCDPRLKDHESTSSSLDSTSYRNDPQVLDDADVGECEIPWNDLVIAERIGLGSYGEVYHADWHGTEVAVKKFLDQDFSGAALAEFRSEVRIMRRLRHPNVVFFLGAVTRPPNLSIVTEFLPRGSLYRILHRPKSHIDERRRIKMALDVAMGMNCLHTSTPTIVHRDLKTPNLLVDNNWNVKVGDFGLSRLKHNTFLSSKSTAGTPEWMAPEVLRNEPSNEKCDVYSFGVILWELATLRLPWRGMNPMQVVGAVGFQNRRLEIPKELDPVVGRIILECWQTDPNLRPSFAQLTEVLKPLNRLVLPTPQ

SEQ ID NO: 81307 - protein, 933 aa, Arabidopsis thaliana
  peptide (1)..(933): Ceres Seq. ID no. 12659243
  misc_feature (669)..(921): Pfam Name: Protein kinase domain Pfam Description: Protein kinase domain
  misc_feature (28)..(930): Homolog of NCBI NO: 7489058 NR Description: probable protein kinase TCTR2 - tomato
  misc_feature (28)..(930): Homolog of NCBI NO: 15485672 NR Description: TCTR2 protein [Lycopersicon esculentum]
  misc_feature (103)..(575): Homolog of NCBI NO: 11127921 NR Description: EDR1 [Oryza sativa]
  misc_feature (605)..(933): Homolog of NCBI NO: 11127921 NR Description: EDR1 [Oryza sativa]
  misc_feature (33)..(542): Homolog of NCBI NO: 11127923 NR Description: EDR1 [Hordeum vulgare]
  misc_feature (614)..(933): Homolog of NCBI NO: 11127923 NR Description: EDR1 [Hordeum vulgare]
  misc_feature (1)..(497): Homolog of NCBI NO: 22326737 NR Description: MAP3K delta-1 protein kinase; protein id: supported by cDNA: gi_18700074 [Arabidopsis thaliana]
  misc_feature (606)..(927): Homolog of NCBI NO: 22326737 NR Description: MAP3K delta-1 protein kinase; protein id: supported by cDNA: gi_18700074 [Arabidopsis thaliana]
  misc_feature (606)..(906): Homolog of NCBI NO: 11358502 NR Description: MAP3K delta-1 protein kinase - Arabidopsis
  misc_feature (141)..(334): Homolog of NCBI NO: 11358502 NR Description: MAP3K delta-1 protein kinase - Arabidopsis
MKHIFKKLHRGGNQEQQNRTNDAAPPSDQNRIHVSANPPQATPSSVTETLPVAGATSSMASPAPTAASNRADYMSSEEEYQVQLALAISASNSQSSEDPEKHQIRAATLLSLGSHQRMDSRRDSSEVVAQRLSRQYWEYGVLDYEEKVVDSFYDVYSLSTDSAKQGEMPSLEDLESNHGTPGFEAVVVNRPIDSSLHELLEIAECIALGCSTTSVSVLVQRLAELVTEHMGGSAEDSSIVLARWTEKSSEFKAALNTCVFPIGFVKIGISRHRALLFKVLADSVRLPCRLVKGSHYTGNEDDAVNTIRLEDEREYLVDLMTDPGTLIPADFASASNNTVEPCNSNGNKFPTAQFSNDVPKLSEGEGSSHSSMANYSSSLDRRTEAERTDSSYPKVGPLRNIDYSSPSSVTSSTQLENNSSTAIGKGSRGAIIECSRTNMNIVPYNQNSEEDPKNLFADLNPFQNKGADKLYMPTKSGLNNVDDFHQQKNNPLVGRSPAPMMWKNYSCNEAPKRKENSYIENLLPKLHRDPRYGNTQSSYATSSSNGAISSNVHGRDNVTFVSPVAVPSSFTSTENQFRPSIVEDMNRNTNNELDLQPHTAAVVHGQQNDESHIHDHRKYTSDDISTGCDPRLKDHESTSSSLDSTSYRNDPQVLDDADVGECEIPWNDLVIAERIGLGSYGEVYHADWHGTEVAVKKFLDQDFSGAALAEFRSEVRIMRRLRHPNVVFFLGAVTRPPNLSIVTEFLPRGSLYRILHRPKSHIDERRRIKMALDVAMGMNCLHTSTPTIVHRDLKTPNLLVDNNWNVKVGDFGLSRLKHNTFLSSKSTAGTPEWMAPEVLRNEPSNEKCDVYSFGVILWELATLRLPWRGMNPMQVVGAVGFQNRRLEIPKELDPVVGRIILECWQTDPNLRPSFAQLTEVLKPLNRLVLPTPQ

SEQ ID NO: 81308 - protein, 875 aa, Arabidopsis thaliana
  peptide (1)..(875): Ceres Seq. ID no. 12659244
  misc_feature (611)..(863): Pfam Name: Protein kinase domain Pfam Description: Protein kinase domain
  misc_feature (1)..(872): Homolog of NCBI NO: 7489058 NR Description: probable protein kinase TCTR2 - tomato
  misc_feature (1)..(872): Homolog of NCBI NO: 15485672 NR Description: TCTR2 protein [Lycopersicon esculentum]
  misc_feature (45)..(517): Homolog of NCBI NO: 11127921 NR Description: EDR1 [Oryza sativa]
  misc_feature (547)..(875): Homolog of NCBI NO: 11127921 NR Description: EDR1 [Oryza sativa]
  misc_feature (1)..(484): Homolog of NCBI NO: 11127923 NR Description: EDR1 [Hordeum vulgare]
  misc_feature (556)..(875): Homolog of NCBI NO: 11127923 NR Description: EDR1 [Hordeum vulgare]
  misc_feature (1)..(439): Homolog of NCBI NO: 22326737 NR Description: MAP3K delta-1 protein kinase; protein id: supported by cDNA: gi_18700074 [Arabidopsis thaliana]
  misc_feature (548)..(869): Homolog of NCBI NO: 22326737 NR Description: MAP3K delta-1 protein kinase; protein id: supported by cDNA: gi_18700074 [Arabidopsis thaliana]
  misc_feature (548)..(848): Homolog of NCBI NO: 11358502 NR Description: MAP3K delta-1 protein kinase - Arabidopsis
  misc_feature (83)..(276): Homolog of NCBI NO: 11358502 NR Description: MAP3K delta-1 protein kinase - Arabidopsis
MASPAPTAASNRADYMSSEEEYQVQLALAISASNSQSSEDPEKHQIRAATLLSLGSHQRMDSRRDSSEVVAQRLSRQYWEYGVLDYEEKVVDSFYDVYSLSTDSAKQGEMPSLEDLESNHGTPGFEAVVVNRPIDSSLHELLEIAECIALGCSTTSVSVLVQRLAELVTEHMGGSAEDSSIVLARWTEKSSEFKAALNTCVFPIGFVKIGISRHRALLFKVLADSVRLPCRLVKGSHYTGNEDDAVNTIRLEDEREYLVDLMTDPGTLIPADFASASNNTVEPCNSNGNKFPTAQFSNDVPKLSEGEGSSHSSMANYSSSLDRRTEAERTDSSYPKVGPLRNIDYSSPSSVTSSTQLENNSSTAIGKGSRGAIIECSRTNMNIVPYNQNSEEDPKNLFADLNPFQNKGADKLYMPTKSGLNNVDDFHQQKNNPLVGRSPAPMMWKNYSCNEAPKRKENSYIENLLPKLHRDPRYGNTQSSYATSSSNGAISSNVHGRDNVTFVSPVAVPSSFTSTENQFRPSIVEDMNRNTNNELDLQPHTAAVVHGQQNDESHIHDHRKYTSDDISTGCDPRLKDHESTSSSLDSTSYRNDPQVLDDADVGECEIPWNDLVIAERIGLGSYGEVYHADWHGTEVAVKKFLDQDFSGAALAEFRSEVRIMRRLRHPNVVFFLGAVTRPPNLSIVTEFLPRGSLYRILHRPKSHIDERRRIKMALDVAMGMNCLHTSTPTIVHRDLKTPNLLVDNNWNVKVGDFGLSRLKHNTFLSSKSTAGTPEWMAPEVLRNEPSNEKCDVYSFGVILWELATLRLPWRGMNPMQVVGAVGFQNRRLEIPKELDPVVGRIILECWQTDPNLRPSFAQLTEVLKPLNRLVLPTPQ

SEQ ID NO: 81309 - DNA, 1326 bp, Arabidopsis thaliana
  misc_feature (1)..(1326): Ceres Seq. ID no. 12659261
  misc_feature: MA Experiment ID: 20000179 Result: Up-regulated in Transcription
  misc_feature: MA Experiment 20000179 PARAMETER Experiment Name: At_Germinating_Seeds_P Parameter: Age (hr) Value: 6 vs. 0
  misc_feature: MA Experiment 20000179 PARAMETER Experiment Name: At_Germinating_Seeds_P Parameter: Tissue Value: Germinating Seeds
atgaatatgccgctgttggatattcaaccacgaacgttgcagtttgcagttgacctgaagaagcaaacttcctgcgtggtacagctaaccaatactacccatcattatgttgcatttaaggttaaaaccacatcaccaaagaagtactgtgttcgtccaaatgttggtgttgttgcacctaaatcaacctgtgaattcactgtcattatgcaagcttttaaagaaccacctccagatatggtttgcaaagacaaattcttaatccagagtactgctgtatctgcggaaacaactgatgaagacatcacagctagcatgttttcgaaagccgaaggcaaacacatagaggagaacaaactcagggtcacgctcgtaccgccctctgactcacctgaactatctccaatcaatacaccgaagcagggagcagtatttgaagattccatcctcaaggatcgtttatatagccagtcagagaccctagctccgccacaatatgagggtgagattgtaaaagagcctaggatggttggacatgatgagttaaaggcagccgacaatgcaaaggagttaaagacaccaaaaatggccacagtggattttgtggaagatcgatatactgctaatgacttgaaggcaactaaagatagctacgattcatcgaggatggcaaaagaaactggattcgatccaattaggtctcataaggatgcggatgatggaagggcgattaaggcaacaactaatttggacgctcccatgaagaaggccatggatctacctagggatcaagggtttactaatggaatagctgttgacagtgaaccaaagatatctaaggagagagatgttgtccagctgcagaaaacagatggccagaatgtcagaggattggatgaacttaagttggttaaagacattgaggagatgaagctgaaagtggatgctcttgaatccaagttaaaacaggtctgcttatcaaattttaaaatccataacttccgtgctatatgtaactgtgctaaagagtttaaatctggcggaactgagaacgaagaagatagtgaaagaagtgcacaatgggttccctctgctgtatgtatgcgttgtggcattcattgcctatgttatcgggcactttctgcgcacttgactgctcgctcggtgtctatatcatatcaagtgtgcagtaagggatatatagacaaagaaggtaaaaggattagatttcgtctgtttgggtttgctttgtgggagaggatgaatgatttctccgacacatttaagatggaatatgatagactgtatagcattggtgttagttaa

SEQ ID NO: 81310 - protein, 441 aa, Arabidopsis thaliana
  peptide (1)..(441): Ceres Seq. ID no. 12659262
  misc_feature (1)..(441): Homolog of NCBI NO: 7485994 NR Description: hypothetical protein F22O13.33 - Arabidopsis
  misc_feature (1)..(441): Homolog of NCBI NO: 25407055 NR Description: protein F22O13.31 [imported] - Arabidopsis >gi|9802569|gb|AAF99771.1|AC003981_21 F22O13.31 [Arabidopsis
  misc_feature (1)..(337): Homolog of NCBI NO: 30680831 NR Description: VAMP (vesicle-associated membrane
  misc_feature (236)..(337): Homolog of NCBI NO: 18377967 NR Description: unknown protein [Arabidopsis thaliana]
  misc_feature (266)..(337): Homolog of NCBI NO: 34329671 NR Description: VAP27-2 [Arabidopsis thaliana]
  misc_feature (5)..(159): Homolog of NCBI NO: 11288307 NR Description: 27k vesicle-associated membrane
  misc_feature (2)..(137): Homolog of NCBI NO: 21554053 NR Description: putative VAMP-associated protein [Arabidopsis
  misc_feature (2)..(137): Homolog of NCBI NO: 18411661 NR Description: putative protein; protein id: At3g60600.1, by cDNA: 19714., supported by cDNA: gi_17473762 [Arabidopsis >gi|17473763|gb|AAL38320.1| putative protein [Arabidopsis
  misc_feature (1)..(171): Homolog of NCBI NO: 15225415 NR Description: putative VAMP-associated protein; protein id: supported by cDNA: 6457., supported by cDNA: gi_20260229
  misc_feature (5)..(139): Homolog of NCBI NO: 18411240 NR Description: putative proline-rich protein; protein id: supported by cDNA: 33482., supported by cDNA: gi_15292934
MNMPLLDIQPRTLQFAVDLKKQTSCVVQLTNTTHHYVAFKVKTTSPKKYCVRPNVGVVAPKSTCEFTVIMQAFKEPPPDMVCKDKFLIQSTAVSAETTDEDITASMFSKAEGKHIEENKLRVTLVPPSDSPELSPINTPKQGAVFEDSILKDRLYSQSETLAPPQYEGEIVKEPRMVGHDELKAADNAKELKTPKMATVDFVEDRYTANDLKATKDSYDSSRMAKETGFDPIRSHKDADDGRAIKATTNLDAPMKKAMDLPRDQGFTNGIAVDSEPKISKERDVVQLQKTDGQNVRGLDELKLVKDIEEMKLKVDALESKLKQVCLSNFKIHNFRAICNCAKEFKSGGTENEEDSERSAQWVPSAVCMRCGIHCLCYRALSAHLTARSVSISYQVCSKGYIDKEGKRIRFRLFGFALWERMNDFSDTFKMEYDRLYSIGVS

SEQ ID NO: 81311 - protein, 439 aa, Arabidopsis thaliana
  peptide (1)..(439): Ceres Seq. ID no. 12659263
  misc_feature (1)..(439): Homolog of NCBI NO: 7485994 NR Description: hypothetical protein F22O13.33 - Arabidopsis
  misc_feature (1)..(439): Homolog of NCBI NO: 25407055 NR Description: protein F22O13.31 [imported] - Arabidopsis >gi|9802569|gb|AAF99771.1|AC003981_21 F22O13.31 [Arabidopsis
  misc_feature (1)..(335): Homolog of NCBI NO: 30680831 NR Description: VAMP (vesicle-associated membrane
  misc_feature (234)..(335): Homolog of NCBI NO: 18377967 NR Description: unknown protein [Arabidopsis thaliana]
  misc_feature (264)..(335): Homolog of NCBI NO: 34329671 NR Description: VAP27-2 [Arabidopsis thaliana]
  misc_feature (3)..(157): Homolog of NCBI NO: 11288307 NR Description: 27k vesicle-associated membrane
  misc_feature (1)..(135): Homolog of NCBI NO: 21554053 NR Description: putative VAMP-associated protein [Arabidopsis
  misc_feature (1)..(135): Homolog of NCBI NO: 18411661 NR Description: putative protein; protein id: At3g60600.1, by cDNA: 19714., supported by cDNA: gi_17473762 [Arabidopsis >gi|17473763|gb|AAL38320.1| putative protein [Arabidopsis
  misc_feature (1)..(169): Homolog of NCBI NO: 15225415 NR Description: putative VAMP-associated protein; protein id: supported by cDNA: 6457., supported by cDNA: gi_20260229
  misc_feature (3)..(137): Homolog of NCBI NO: 18411240 NR Description: putative proline-rich protein; protein id: supported by cDNA: 33482., supported by cDNA: gi_15292934
MPLLDIQPRTLQFAVDLKKQTSCVVQLTNTTHHYVAFKVKTTSPKKYCVRPNVGVVAPKSTCEFTVIMQAFKEPPPDMVCKDKFLIQSTAVSAETTDEDITASMFSKAEGKHIEENKLRVTLVPPSDSPELSPINTPKQGAVFEDSILKDRLYSQSETLAPPQYEGEIVKEPRMVGHDELKAADNAKELKTPKMATVDFVEDRYTANDLKATKDSYDSSRMAKETGFDPIRSHKDADDGRAIKATTNLDAPMKKAMDLPRDQGFTNGIAVDSEPKISKERDVVQLQKTDGQNVRGLDELKLVKDIEEMKLKVDALESKLKQVCLSNFKIHNFRAICNCAKEFKSGGTENEEDSERSAQWVPSAVCMRCGIHCLCYRALSAHLTARSVSISYQVCSKGYIDKEGKRIRFRLFGFALWERMNDFSDTFKMEYDRLYSIGVS

SEQ ID NO: 81312 - protein, 372 aa, Arabidopsis thaliana
  peptide (1)..(372): Ceres Seq. ID no. 12659264
  misc_feature (1)..(372): Homolog of NCBI NO: 7485994 NR Description: hypothetical protein F22O13.33 - Arabidopsis
  misc_feature (1)..(372): Homolog of NCBI NO: 25407055 NR Description: protein F22O13.31 [imported] - Arabidopsis >gi|9802569|gb|AAF99771.1|AC003981_21 F22O13.31 [Arabidopsis
  misc_feature (1)..(268): Homolog of NCBI NO: 30680831 NR Description: VAMP (vesicle-associated membrane
  misc_feature (167)..(268): Homolog of NCBI NO: 18377967 NR Description: unknown protein [Arabidopsis thaliana]
  misc_feature (197)..(268): Homolog of NCBI NO: 34329671 NR Description: VAP27-2 [Arabidopsis thaliana]
  misc_feature (1)..(90): Homolog of NCBI NO: 11288307 NR Description: 27k vesicle-associated membrane
  misc_feature (1)..(68): Homolog of NCBI NO: 21554053 NR Description: putative VAMP-associated protein [Arabidopsis
  misc_feature (1)..(68): Homolog of NCBI NO: 18411661 NR Description: putative protein; protein id: At3g60600.1, by cDNA: 19714., supported by cDNA: gi_17473762 [Arabidopsis >gi|17473763|gb|AAL38320.1| putative protein [Arabidopsis
  misc_feature (1)..(102): Homolog of NCBI NO: 15225415 NR Description: putative VAMP-associated protein; protein id: supported by cDNA: 6457., supported by cDNA: gi_20260229
  misc_feature (1)..(70): Homolog of NCBI NO: 18411240 NR Description: putative proline-rich protein; protein id: supported by cDNA: 33482., supported by cDNA: gi_15292934
MQAFKEPPPDMVCKDKFLIQSTAVSAETTDEDITASMFSKAEGKHIEENKLRVTLVPPSDSPELSPINTPKQGAVFEDSILKDRLYSQSETLAPPQYEGEIVKEPRMVGHDELKAADNAKELKTPKMATVDFVEDRYTANDLKATKDSYDSSRMAKETGFDPIRSHKDADDGRAIKATTNLDAPMKKAMDLPRDQGFTNGIAVDSEPKISKERDVVQLQKTDGQNVRGLDELKLVKDIEEMKLKVDALESKLKQVCLSNFKIHNFRAICNCAKEFKSGGTENEEDSERSAQWVPSAVCMRCGIHCLCYRALSAHLTARSVSISYQVCSKGYIDKEGKRIRFRLFGFALWERMNDFSDTFKMEYDRLYSIGVS

SEQ ID NO: 81313 - DNA, 2073 bp, Arabidopsis thaliana
  misc_feature (1)..(2073): Ceres Seq. ID no. 12659265
  misc_feature: MA Experiment ID: 20000185 Result: Up-regulated in Transcription
  misc_feature: MA Experiment 20000185 PARAMETER Experiment Name: At_Roots__P Parameter: Age (day) Value: 7 vs. 21
  misc_feature: MA Experiment 20000185 PARAMETER Experiment Name: At_Roots__P Parameter: Organism Value: A. thaliana
  misc_feature: MA Experiment 20000185 PARAMETER Experiment Name: At_Roots__P Parameter: Tissue Value: Roots vs. Whole Plant
ttccctcaatcgttcaaatgcaagatttcttcggctccgttcgtcgatcgcttgttttccgtccttcttccgacgacgataaccaggagaaccagcctccgtttcccggtgttctcgccgataagatcacctcttgcatccgcaaatcgaagatttttatcaaaccctccttctcgcctcctcctcctgctaacactgtagacatggcacctccgatttcgtggaggaaaggtcagttaattggtcgcggcgcgtttggtacggtgtacatgggtatgaatcttgactccggggagcttctcgccgtcaaacaggttctgattgcagccaattttgcttccaaggaaaagactcaggctcatattcaggagcttgaagaagaagttaagcttcttaaaaatctctcccatcctaatatagttagatatttgggtacagtgagggaagatgataccctgaatatccttctcgagtttgttcccggtggatcgatatcatcgctcttggagaaatttggaccttttcctgaatcagttgtccggacatacacaaggcaactgcttttagggttggagtacctgcacaatcatgcaattatgcacagagacattaagggggctaatatccttgtggataataaaggatgcattaagcttgctgattttggtgcatccaaacaagtagctgagttggctacgatgactggtgcaaaatctatgaaagggacaccatattggatggctccggaagttattcttcaaactggacatagcttctctgctgacatatggagcgtcggctgtacagttattgaaatggtgactgggaaggctccttggagtcagcagtataaagaggttgctgctatcttcttcataggaacaacaaaatcacatcctccaatacctgatactctctcctctgatgcaaaagattttctgctcaagtgtctgcaggaggtaccaaatctgcggccaaccgcatctgagctactaaagcatccttttgttatggggaaacacaaggagtctgcttctactgatcttggttctgtcctgaacaatcttagcactccactaccgttacagataaataacaccaagagcactccagattctacttgcgacgatatgatgagaatttcttgacatttgacggagaaatgagttctacccttgaaaaagattgtcatctgaagaagagctgtgatgacataagtgatatgtccattgctttgaagtccaaatttgacgaaagtcctggtaatggagagaaagagtctacaatgagcatggaatgtgaccaaccttcatactcagaggatgatgatgagctgaccgagtcaaaaattaaagctttcttagatgagaaggctgcagatctaaagaagttacagactcctctctatgaagaattctacaatagtttgatcacattctctcccagttgtatggagagtaatttaagtaacagtaaaagagaggacactgctcgtggtttcctgaaactgcctccaaaaagcaggtcaccgagtcggggccctcttggtggttcaccttcaagagcaacagacgcaactagttgttccaagagcccaggaagtggaggtagtcgtgaattgaatattaacaatggaggtgatgaagcttcacaggatggtgtatcagcacgggtcacagactggaggggtctcgttgttgacactaagcaggaattaagccagtgtgttgctttgtcagagatagagaagaagtggaaggaagagcttgatcaagaactggaaagaaagcgacaagaaatcatgcgccaagcagggttgggatcatccccaagagacagaggcatgagccgacagagagagaagtcgaggtttgcatcaccaggaaaatgacttgcacaaaaagtctccggctttttgatttttgattgctcaactagtatatatatctgtaactcttatcttgctgtgatgaaaagtagacacgaggtttggtctgaatatatgattctgaactggttgttgaaggtattagatgtgtgtaatgtgagtgtcgggtgcatatttaagtgcgc

SEQ ID NO: 81314 - protein, 381 aa, Arabidopsis thaliana
  peptide (1)..(381): Ceres Seq. ID no. 12659266
  misc_feature (74)..(336): Pfam Name: Protein kinase domain Pfam Description: Protein kinase domain
  misc_feature (6)..(262): Homolog of NCBI NO: 25402508 NR Description: hypothetical protein [imported] - Arabidopsis >gi|2342692|gb|AAB70419.1| Similar to Nicotiana protein kinase
  misc_feature (259)..(319): Homolog of NCBI NO: 25402508 NR Description: hypothetical protein [imported] - Arabidopsis >gi|2342692|gb|AAB70419.1| Similar to Nicotiana protein kinase
  misc_feature (6)..(377): Homolog of NCBI NO: 25387090 NR Description: NPK1-related protein kinase 2 [imported] -
  misc_feature (15)..(377): Homolog of NCBI NO: 2342425 NR Description: NPK1-related protein kinase 2 [Arabidopsis
  misc_feature (6)..(332): Homolog of NCBI NO: 15221948 NR Description: NPK1-related protein kinase, putative; protein id:
  misc_feature (6)..(381): Homolog of NCBI NO: 2342423 NR Description: NPK1-related protein kinase 1S [Arabidopsis
  misc_feature (1)..(377): Homolog of NCBI NO: 477094 NR Description: STE11 protein kinase homolog NPK1 - common tobacco
  misc_feature (6)..(377): Homolog of NCBI NO: 456309 NR Description: protein kinase [Nicotiana tabacum]
  misc_feature (6)..(372): Homolog of NCBI NO: 15230612 NR Description: NPK1-related protein kinase 3; protein id: supported by cDNA: gi_17979011, supported by cDNA: gi_2342426
  misc_feature (70)..(338): Homolog of NCBI NO: 37573087 NR Description: putative protein kinase [Oryza sativa (japonica
PSIVQMQDFFGSVRRSLVFRPSSDDDNQENQPPFPGVLADKITSCIRKSKIFIKPSFSPPPPANTVDMAPPISWRKGQLIGRGAFGTVYMGMNLDSGELLAVKQVLIAANFASKEKTQAHIQELEEEVKLLKNLSHPNIVRYLGTVREDDTLNILLEFVPGGSISSLLEKFGPFPESVVRTYTRQLLLGLEYLHNHAIMHRDIKGANILVDNKGCIKLADFGASKQVAELATMTGAKSMKGTPYWMAPEVILQTGHSFSADIWSVGCTVIEMVTGKAPWSQQYKEVAAIFFIGTTKSHPPIPDTLSSDAKDFLLKCLQEVPNLRPTASELLKHPFVMGKHKESASTDLGSVLNNLSTPLPLQINNTKSTPDSTCDDMMRIS

SEQ ID NO: 81315 - protein, 376 aa, Arabidopsis thaliana
  peptide (1)..(376): Ceres Seq. ID no. 12659267
  misc_feature (69)..(331): Pfam Name: Protein kinase domain Pfam Description: Protein kinase domain
  misc_feature (1)..(257): Homolog of NCBI NO: 25402508 NR Description: hypothetical protein [imported] - Arabidopsis >gi|2342692|gb|AAB70419.1| Similar to Nicotiana protein kinase
  misc_feature (254)..(314): Homolog of NCBI NO: 25402508 NR Description: hypothetical protein [imported] - Arabidopsis >gi|2342692|gb|AAB70419.1| Similar to Nicotiana protein kinase
  misc_feature (1)..(372): Homolog of NCBI NO: 25387090 NR Description: NPK1-related protein kinase 2 [imported] -
  misc_feature (10)..(372): Homolog of NCBI NO: 2342425 NR Description: NPK1-related protein kinase 2 [Arabidopsis
  misc_feature (1)..(327): Homolog of NCBI NO: 15221948 NR Description: NPK1-related protein kinase, putative; protein id:
  misc_feature (1)..(376): Homolog of NCBI NO: 2342423 NR Description: NPK1-related protein kinase 1S [Arabidopsis
  misc_feature (1)..(372): Homolog of NCBI NO: 477094 NR Description: STE11 protein kinase homolog NPK1 - common tobacco
  misc_feature (1)..(372): Homolog of NCBI NO: 456309 NR Description: protein kinase [Nicotiana tabacum]
  misc_feature (1)..(367): Homolog of NCBI NO: 15230612 NR Description: NPK1-related protein kinase 3; protein id: supported by cDNA: gi_17979011, supported by cDNA: gi_2342426
  misc_feature (65)..(333): Homolog of NCBI NO: 37573087 NR Description: putative protein kinase [Oryza sativa (japonica
MQDFFGSVRRSLVFRPSSDDDNQENQPPFPGVLADKITSCIRKSKIFIKPSFSPPPPANTVDMAPPISWRKGQLIGRGAFGTVYMGMNLDSGELLAVKQVLIAANFASKEKTQAHIQELEEEVKLLKNLSHPNIVRYLGTVREDDTLNILLEFVPGGSISSLLEKFGPFPESVVRTYTRQLLLGLEYLHNHAIMHRDIKGANILVDNKGCIKLADFGASKQVAELATMTGAKSMKGTPYWMAPEVILQTGHSFSADIWSVGCTVIEMVTGKAPWSQQYKEVAAIFFIGTTKSHPPIPDTLSSDAKDFLLKCLQEVPNLRPTASELLKHPFVMGKHKESASTDLGSVLNNLSTPLPLQINNTKSTPDSTCDDMMRIS

SEQ ID NO: 81316 - protein, 314 aa, Arabidopsis thaliana
  peptide (1)..(314): Ceres Seq. ID no. 12659268
  misc_feature (7)..(269): Pfam Name: Protein kinase domain Pfam Description: Protein kinase domain
  misc_feature (1)..(195): Homolog of NCBI NO: 25402508 NR Description: hypothetical protein [imported] - Arabidopsis >gi|2342692|gb|AAB70419.1| Similar to Nicotiana protein kinase
  misc_feature (192)..(252): Homolog of NCBI NO: 25402508 NR Description: hypothetical protein [imported] - Arabidopsis >gi|2342692|gb|AAB70419.1| Similar to Nicotiana protein kinase
  misc_feature (1)..(310): Homolog of NCBI NO: 25387090 NR Description: NPK1-related protein kinase 2 [imported] -
  misc_feature (1)..(310): Homolog of NCBI NO: 2342425 NR Description: NPK1-related protein kinase 2 [Arabidopsis
  misc_feature (1)..(265): Homolog of NCBI NO: 15221948 NR Description: NPK1-related protein kinase, putative; protein id:
  misc_feature (1)..(314): Homolog of NCBI NO: 2342423 NR Description: NPK1-related protein kinase 1S [Arabidopsis
  misc_feature (1)..(310): Homolog of NCBI NO: 477094 NR Description: STE11 protein kinase homolog NPK1 - common tobacco
  misc_feature (1)..(310): Homolog of NCBI NO: 456309 NR Description: protein kinase [Nicotiana tabacum]
  misc_feature (1)..(305): Homolog of NCBI NO: 15230612 NR Description: NPK1-related protein kinase 3; protein id: supported by cDNA: gi_17979011, supported by cDNA: gi_2342426
  misc_feature (3)..(271): Homolog of NCBI NO: 37573087 NR Description: putative protein kinase [Oryza sativa (japonica
MAPPISWRKGQLIGRGAFGTVYMGMNLDSGELLAVKQVLIAANFASKEKTQAHIQELEEEVKLLKNLSHPNIVRYLGTVREDDTLNILLEFVPGGSISSLLEKFGPFPESVVRTYTRQLLLGLEYLHNHAIMHRDIKGANILVDNKGCIKLADFGASKQVAELATMTGAKSMKGTPYWMAPEVILQTGHSFSADIWSVGCTVIEMVTGKAPWSQQYKEVAAIFFIGTTKSHPPIPDTLSSDAKDFLLKCLQEVPNLRPTASELLKHPFVMGKHKESASTDLGSVLNNLSTPLPLQINNTKSTPDSTCDDMMRIS

SEQ ID NO: 81317 - DNA, 1299 bp, Arabidopsis thaliana
  misc_feature (1)..(1299): Ceres Seq. ID no. 12659310
  misc_feature: MA Experiment ID: 20000169 Result: Down-regulated in Transcription
  misc_feature: MA Experiment 20000169 PARAMETER Experiment Name: At_100uM_ABA_P Parameter: Age (day) Value: 14
  misc_feature: MA Experiment 20000169 PARAMETER Experiment Name: At_100uM_ABA_P Parameter: Organism Value: A. thaliana
  misc_feature: MA Experiment 20000169 PARAMETER Experiment Name: At_100uM_ABA_P Parameter: Plant Line Value: WS
  misc_feature: MA Experiment 20000169 PARAMETER Experiment Name: At_100uM_ABA_P Parameter: Timepoint (hr) Value: 6
  misc_feature: MA Experiment 20000169 PARAMETER Experiment Name: At_100uM_ABA_P Parameter: Tissue Value: Aerial
  misc_feature: MA Experiment 20000169 PARAMETER Experiment Name: At_100uM_ABA_P Parameter: Treatment Value: 100uM ABA vs. No Treatment
  misc_feature: MA Experiment ID: 20000185 Result: Up-regulated in Transcription
  misc_feature: MA Experiment 20000185 PARAMETER Experiment Name: At_Roots__P Parameter: Age (day) Value: 7 vs. 21
  misc_feature: MA Experiment 20000185 PARAMETER Experiment Name: At_Roots__P Parameter: Organism Value: A. thaliana
  misc_feature: MA Experiment 20000185 PARAMETER Experiment Name: At_Roots__P Parameter: Tissue Value: Roots vs. Whole Plant
  misc_feature: MA Experiment ID: 20000444 Result: Up-regulated in Transcription
  misc_feature: MA Experiment 20000444 PARAMETER Experiment Name: At_100uM_NAA__P Parameter: Age (day) Value: 14
  misc_feature: MA Experiment 20000444 PARAMETER Experiment Name: At_100uM_NAA__P Parameter: Organism Value: A. thaliana
  misc_feature: MA Experiment 20000444 PARAMETER Experiment Name: At_100uM_NAA__P Parameter: Plant Line Value: WS
  misc_feature: MA Experiment 20000444 PARAMETER Experiment Name: At_100uM_NAA__P Parameter: Timepoint (hr) Value: 1
  misc_feature: MA Experiment 20000444 PARAMETER Experiment Name: At_100uM_NAA__P Parameter: Tissue Value: Aerial
  misc_feature: MA Experiment 20000444 PARAMETER Experiment Name: At_100uM_NAA__P Parameter: Treatment Value: 100uM NAA vs. No Treatment
  misc_feature: MA Experiment ID: 20000495 Result: Down-regulated in Transcription
  misc_feature: MA Experiment 20000495 PARAMETER Experiment Name: At_Guard_Cells_P Parameter: Harvest Date Value: 8/2/2002
  misc_feature: MA Experiment 20000495 PARAMETER Experiment Name: At_Guard_Cells_P Parameter: Organism Value: A. thaliana
  misc_feature: MA Experiment 20000495 PARAMETER Experiment Name: At_Guard_Cells_P Parameter: Tissue Value: Guard Cells vs. Leaves
  misc_feature: MA Experiment ID: 20001555 Result: Down-regulated in Transcription
  misc_feature: MA Experiment 20001555 PARAMETER Experiment Name: At_Drought_Soil_Dry_P Parameter: Age (day) Value: 24
  misc_feature: MA Experiment 20001555 PARAMETER Experiment Name: At_Drought_Soil_Dry_P Parameter: Organism Value: A. thaliana
  misc_feature: MA Experiment 20001555 PARAMETER Experiment Name: At_Drought_Soil_Dry_P Parameter: Plant Line Value: WS
  misc_feature: MA Experiment 20001555 PARAMETER Experiment Name: At_Drought_Soil_Dry_P Parameter: Post Timepoint (hr) Value: None
  misc_feature: MA Experiment 20001555 PARAMETER Experiment Name: At_Drought_Soil_Dry_P Parameter: Post-Treatment Value: None
  misc_feature: MA Experiment 20001555 PARAMETER Experiment Name: At_Drought_Soil_Dry_P Parameter: Timepoint (day) Value: 10
  misc_feature: MA Experiment 20001555 PARAMETER Experiment Name: At_Drought_Soil_Dry_P Parameter: Treatment Value: Drought vs. No Drought
  misc_feature: MA Experiment ID: 20001556 Result: Down-regulated in Transcription
  misc_feature: MA Experiment 20001556 PARAMETER Experiment Name: At_Drought_Soil_Dry_P Parameter: Age (day) Value: 26
  misc_feature: MA Experiment 20001556 PARAMETER Experiment Name: At_Drought_Soil_Dry_P Parameter: Organism Value: A. thaliana
  misc_feature: MA Experiment 20001556 PARAMETER Experiment Name: At_Drought_Soil_Dry_P Parameter: Plant Line Value: WS
  misc_feature: MA Experiment 20001556 PARAMETER Experiment Name: At_Drought_Soil_Dry_P Parameter: Post Timepoint (hr) Value: None
  misc_feature: MA Experiment 20001556 PARAMETER Experiment Name: At_Drought_Soil_Dry_P Parameter: Post-Treatment Value: None
  misc_feature: MA Experiment 20001556 PARAMETER Experiment Name: At_Drought_Soil_Dry_P Parameter: Timepoint (day) Value: 12
  misc_feature: MA Experiment 20001556 PARAMETER Experiment Name: At_Drought_Soil_Dry_P Parameter: Treatment Value: Drought vs. No Drought
  misc_feature: MA Experiment ID: 20001558 Result: Down-regulated in Transcription
  misc_feature: MA Experiment 20001558 PARAMETER Experiment Name: At_Drought_Soil_Dry_P Parameter: Age (day) Value: 27
  misc_feature: MA Experiment 20001558 PARAMETER Experiment Name: At_Drought_Soil_Dry_P Parameter: Organism Value: A. thaliana
  misc_feature: MA Experiment 20001558 PARAMETER Experiment Name: At_Drought_Soil_Dry_P Parameter: Plant Line Value: WS
  misc_feature: MA Experiment 20001558 PARAMETER Experiment Name: At_Drought_Soil_Dry_P Parameter: Post Timepoint (hr) Value: 6
  misc_feature: MA Experiment 20001558 PARAMETER Experiment Name: At_Drought_Soil_Dry_P Parameter: Post-Treatment Value: Re-Water vs. No Drought
  misc_feature: MA Experiment 20001558 PARAMETER Experiment Name: At_Drought_Soil_Dry_P Parameter: Timepoint (day) Value: 13
  misc_feature: MA Experiment 20001558 PARAMETER Experiment Name: At_Drought_Soil_Dry_P Parameter: Treatment Value: Drought vs. No Drought
  misc_feature: MA Experiment ID: 20001560 Result: Down-regulated in Transcription
  misc_feature: MA Experiment 20001560 PARAMETER Experiment Name: At_Drought_Soil_Dry_P Parameter: Age (day) Value: 28
  misc_feature: MA Experiment 20001560 PARAMETER Experiment Name: At_Drought_Soil_Dry_P Parameter: Organism Value: A. thaliana
  misc_feature: MA Experiment 20001560 PARAMETER Experiment Name: At_Drought_Soil_Dry_P Parameter: Plant Line Value: WS
  misc_feature: MA Experiment 20001560 PARAMETER Experiment Name: At_Drought_Soil_Dry_P Parameter: Post Timepoint (hr) Value: None
  misc_feature: MA Experiment 20001560 PARAMETER Experiment Name: At_Drought_Soil_Dry_P Parameter: Post-Treatment Value: None
  misc_feature: MA Experiment 20001560 PARAMETER Experiment Name: At_Drought_Soil_Dry_P Parameter: Timepoint (day) Value: 14
  misc_feature: MA Experiment 20001560 PARAMETER Experiment Name: At_Drought_Soil_Dry_P Parameter: Treatment Value: Drought vs. No Drought
  misc_feature: MA Experiment ID: 20001904 Result: Down-regulated in Transcription
  misc_feature: MA Experiment 20001904 PARAMETER Experiment Name: At_Drought_Reproduction_P Parameter: Age (day) Value: 37
  misc_feature: MA Experiment 20001904 PARAMETER Experiment Name: At_Drought_Reproduction_P Parameter: Organism Value: A. thaliana
  misc_feature: MA Experiment 20001904 PARAMETER Experiment Name: At_Drought_Reproduction_P Parameter: Plant Line Value: WS
  misc_feature: MA Experiment 20001904 PARAMETER Experiment Name: At_Drought_Reproduction_P Parameter: Timepoint (day) Value: 7
  misc_feature: MA Experiment 20001904 PARAMETER Experiment Name: At_Drought_Reproduction_P Parameter: Tissue Value: Rosettes
  misc_feature: MA Experiment 20001904 PARAMETER Experiment Name: At_Drought_Reproduction_P Parameter: Treatment Value: Drought vs. No Drought
acttatcaacaactcaaaactgatcatcacaaagaaaagagttttctctgataatctttctcggacaagatggcacctgagatgaacaacaagttgagctacggagaaaagaagagagcgtacgttacgttcctcgccggaaccggagactacgtgaaaggagtggttggtctggctaaagggctaaggaaaactaaaagcaagtacccattagtggttgctgtgttacctgacgtgccggccgatcaccggagacagctattggaccaaggctgcgtcatcaaggagattcagccggtttacccaccggataaccaaactcagtttgctatggcttactacgtcctcaactactctaaacttcgtatttggaagtttgtagagtacagcaagctgatatacttagacggagacatacaagtgtttgagaacatagatcacttgtttgatcttcctgacggcaacttctacgccgttaaagactgtttctgcgagaagacttggagccacacgcctcagtacaagattggctactgccaacagtgtccggacaaggtgacgtggcctgagtcagagcttggtcctaagccaccgttgtacttcaacgccggcatgttcgtctacgagccaagcctccccacttattacaaccttttggagacactcaaagttgtccctcccacaccttttgctgaacaggatttcttgaacatgtacttcaaagacatatacaagcctattccaccagtttacaatcttgtcttggccatgctctggaggcatccagagaacatagagcttaacgaagctaaggttgttcattactgtgcagccggtgctaagccttggaggttcacaggccaagaaggaaatatggagagggaagacatcaagatgcttgtagagaaatggtgggacatttacaacgacgagtctcttgactacaaaaactttaatgtgcattgcggacaaaaagaagatgttcacaggaaaccgaaaacccttccacagttctttacagatttgtctgaagctgatgtgcttcaatgtgccaaagctccatccgcggcttagacaactttgtgagggctgacgagcgaggttcttgtcaacaccagtttgctaatagtttgtgaaactggtgatgtttacttaggaatttgttatatgaaattgtgctttactgttttttaatttactgaattaagaggactttttaatccccaaaccctctttgtaccttatatgtttgctatggactttccttcctaaaatacaatgaaaatatatatagttttg

SEQ ID NO: 81318 - protein, 334 aa, Arabidopsis thaliana
  peptide (1)..(334): Ceres Seq. ID no. 12659311
  misc_feature (1)..(334): Homolog of NCBI NO: 15217486 NR Description: putative galactinol synthase; protein id: supported by cDNA: gi_13899102, supported by cDNA: gi_17298126, by cDNA: gi_20148246 [Arabidopsis thaliana]
  misc_feature (1)..(334): Homolog of NCBI NO: 15223567 NR Description: water stress-induced protein, putative; protein At1g56600.1, supported by cDNA: gi_15215761, supported by cDNA:
  misc_feature (1)..(334): Homolog of NCBI NO: 20340247 NR Description: galactinol synthase-like protein [Thellungiella
  misc_feature (10)..(334): Homolog of NCBI NO: 15226522 NR Description: putative galactinol synthase; protein id: supported by cDNA: 124236., supported by cDNA: gi_15810148,
  misc_feature (16)..(334): Homolog of NCBI NO: 4588376 NR Description: galactinol synthase [Brassica napus]
  misc_feature (1)..(334): Homolog of NCBI NO: 5541885 NR Description: putative galactinol synthase [Pisum sativum]
  misc_feature (1)..(334): Homolog of NCBI NO: 29569824 NR Description: galactinol synthase [Cucumis sativus]
  misc_feature (1)..(334): Homolog of NCBI NO: 18874402 NR Description: galactinol synthase [Cucumis melo]
  misc_feature (1)..(334): Homolog of NCBI NO: 34898096 NR Description: WSI76 protein induced by water stress [Oryza
  misc_feature (1)..(294): Homolog of NCBI NO: 15219093 NR Description: galactinol synthase, putative; protein id: [Arabidopsis thaliana] >gi|25404266|pir||H96629 hypothetical
MAPEMNNKLSYGEKKRAYVTFLAGTGDYVKGVVGLAKGLRKTKSKYPLVVAVLPDVPADHRRQLLDQGCVIKEIQPVYPPDNQTQFAMAYYVLNYSKLRIWKFVEYSKLIYLDGDIQVFENIDHLFDLPDGNFYAVKDCFCEKTWSHTPQYKIGYCQQCPDKVTWPESELGPKPPLYFNAGMFVYEPSLPTYYNLLETLKVVPPTPFAEQDFLNMYFKDIYKPIPPVYNLVLAMLWRHPENIELNEAKVVHYCAAGAKPWRFTGQEGNMEREDIKMLVEKWWDIYNDESLDYKNFNVHCGQKEDVHRKPKTLPQFFTDLSEADVLQCAKAPSAA

SEQ ID NO: 81319 - protein, 330 aa, Arabidopsis thaliana
  peptide (1)..(330): Ceres Seq. ID no. 12659312
  misc_feature (1)..(330): Homolog of NCBI NO: 15217486 NR Description: putative galactinol synthase; protein id: supported by cDNA: gi_13899102, supported by cDNA: gi_17298126, by cDNA: gi_20148246 [Arabidopsis thaliana]
  misc_feature (1)..(330): Homolog of NCBI NO: 15223567 NR Description: water stress-induced protein, putative; protein At1g56600.1, supported by cDNA: gi_15215761, supported by cDNA:
  misc_feature (1)..(330): Homolog of NCBI NO: 20340247 NR Description: galactinol synthase-like protein [Thellungiella
  misc_feature (6)..(330): Homolog of NCBI NO: 15226522 NR Description: putative galactinol synthase; protein id: supported by cDNA: 124236., supported by cDNA: gi_15810148,
  misc_feature (12)..(330): Homolog of NCBI NO: 4588376 NR Description: galactinol synthase [Brassica napus]
  misc_feature (1)..(330): Homolog of NCBI NO: 5541885 NR Description: putative galactinol synthase [Pisum sativum]
  misc_feature (1)..(330): Homolog of NCBI NO: 29569824 NR Description: galactinol synthase [Cucumis sativus]
  misc_feature (1)..(330): Homolog of NCBI NO: 18874402 NR Description: galactinol synthase [Cucumis melo]
  misc_feature (1)..(330): Homolog of NCBI NO: 34898096 NR Description: WSI76 protein induced by water stress [Oryza
  misc_feature (1)..(290): Homolog of NCBI NO: 15219093 NR Description: galactinol synthase, putative; protein id: [Arabidopsis thaliana] >gi|25404266|pir||H96629 hypothetical
MNNKLSYGEKKRAYVTFLAGTGDYVKGVVGLAKGLRKTKSKYPLVVAVLPDVPADHRRQLLDQGCVIKEIQPVYPPDNQTQFAMAYYVLNYSKLRIWKFVEYSKLIYLDGDIQVFENIDHLFDLPDGNFYAVKDCFCEKTWSHTPQYKIGYCQQCPDKVTWPESELGPKPPLYFNAGMFVYEPSLPTYYNLLETLKVVPPTPFAEQDFLNMYFKDIYKPIPPVYNLVLAMLWRHPENIELNEAKVVHYCAAGAKPWRFTGQEGNMEREDIKMLVEKWWDIYNDESLDYKNFNVHCGQKEDVHRKPKTLPQFFTDLSEADVLQCAKAPSAA

SEQ ID NO: 81320 - protein, 247 aa, Arabidopsis thaliana
  peptide (1)..(247): Ceres Seq. ID no. 12659313
  misc_feature (1)..(247): Homolog of NCBI NO: 15217486 NR Description: putative galactinol synthase; protein id: supported by cDNA: gi_13899102, supported by cDNA: gi_17298126, by cDNA: gi_20148246 [Arabidopsis thaliana]
  misc_feature (1)..(247): Homolog of NCBI NO: 15223567 NR Description: water stress-induced protein, putative; protein At1g56600.1, supported by cDNA: gi_15215761, supported by cDNA:
  misc_feature (1)..(247): Homolog of NCBI NO: 20340247 NR Description: galactinol synthase-like protein [Thellungiella
  misc_feature (1)..(247): Homolog of NCBI NO: 15226522 NR Description: putative galactinol synthase; protein id: supported by cDNA: 124236., supported by cDNA: gi_15810148,
  misc_feature (1)..(247): Homolog of NCBI NO: 4588376 NR Description: galactinol synthase [Brassica napus]
  misc_feature (1)..(247): Homolog of NCBI NO: 5541885 NR Description: putative galactinol synthase [Pisum sativum]
  misc_feature (1)..(247): Homolog of NCBI NO: 29569824 NR Description: galactinol synthase [Cucumis sativus]
  misc_feature (1)..(247): Homolog of NCBI NO: 18874402 NR Description: galactinol synthase [Cucumis melo]
  misc_feature (1)..(247): Homolog of NCBI NO: 34898096 NR Description: WSI76 protein induced by water stress [Oryza
  misc_feature (1)..(207): Homolog of NCBI NO: 15219093 NR Description: galactinol synthase, putative; protein id: [Arabidopsis thaliana] >gi|25404266|pir||H96629 hypothetical
MAYYVLNYSKLRIWKFVEYSKLIYLDGDIQVFENIDHLFDLPDGNFYAVKDCFCEKTWSHTPQYKIGYCQQCPDKVTWPESELGPKPPLYFNAGMFVYEPSLPTYYNLLETLKVVPPTPFAEQDFLNMYFKDIYKPIPPVYNLVLAMLWRHPENIELNEAKVVHYCAAGAKPWRFTGQEGNMEREDIKMLVEKWWDIYNDESLDYKNFNVHCGQKEDVHRKPKTLPQFFTDLSEADVLQCAKAPSAA

SEQ ID NO: 81321 - DNA, 2118 bp, Arabidopsis thaliana
  misc_feature (1)..(2118): Ceres Seq. ID no. 12659314
  misc_feature: MA Experiment ID: 20000307 Result: Down-regulated in Transcription
  misc_feature: MA Experiment 20000307 PARAMETER Experiment Name: At_Germinating_Seeds_Sub_P Parameter: Age (hr) Value: 24 vs. 0
  misc_feature: MA Experiment 20000307 PARAMETER Experiment Name: At_Germinating_Seeds_Sub_P Parameter: Organism Value: A. thaliana
  misc_feature: MA Experiment 20000307 PARAMETER Experiment Name: At_Germinating_Seeds_Sub_P Parameter: Plant Line Value: WS
  misc_feature: MA Experiment 20000307 PARAMETER Experiment Name: At_Germinating_Seeds_Sub_P Parameter: Tissue Value: Germinating Seeds
  misc_feature: MA Experiment ID: 20000328 Result: Down-regulated in Transcription
  misc_feature: MA Experiment 20000328 PARAMETER Experiment Name: At_42deg_Heat_Sub_P Parameter: Age (day) Value: 14
  misc_feature: MA Experiment 20000328 PARAMETER Experiment Name: At_42deg_Heat_Sub_P Parameter: Organism Value: A. thaliana
  misc_feature: MA Experiment 20000328 PARAMETER Experiment Name: At_42deg_Heat_Sub_P Parameter: Plant Line Value: WS
  misc_feature: MA Experiment 20000328 PARAMETER Experiment Name: At_42deg_Heat_Sub_P Parameter: Temperature (deg C) Value: 42 vs. 22
  misc_feature: MA Experiment 20000328 PARAMETER Experiment Name: At_42deg_Heat_Sub_P Parameter: Timepoint (hr) Value: 6
  misc_feature: MA Experiment 20000328 PARAMETER Experiment Name: At_42deg_Heat_Sub_P Parameter: Tissue Value: Aerial
atgaagtcacagatactcctacgtcgaacgtatagcacaaccatccctcctcccacagcaaatgttagaatcactcatctctctcgtatcggcaagattcatgaagctcggaagcttttcgattcatgtgactcgaaatcaatctcttcctggaactctatggttgctgggtactttgcgaatctaatgccccgagatgcacggaaactgttcgatgaaatgcctgacagaaacatcatctcttggaatggtttggtgtccgggtatatgaagaacggggagattgacgaagctaggaaagtgtttgatttaatgcctgagaggaatgttgtctcatggacggcgttggtgaaagggtatgtgcacaatggtaaggttgatgtggcagagtcgttgttttggaaaatgcctgagaagaataaggtttcttggactgtgatgcttattgggtttttgcaagatgggcgaatcgatgatgcgtgtaagctgtatgaaatgataccggataaagataatattgcaaggactagtatgattcatggattgtgcaaagaaggaagagtggatgaggcaagagagatttttgatgagatgtcagagagaagtgtgattacttggactacaatggtcacaggatatgggcagaacaatcgtgtggatgatgctaggaagatttttgatgtgatgccagagaaaactgaagtttcatggacttccatgcttatgggctatgtacagaatgggcgaattgaggatgctgaagaactttttgaagttatgccagtgaagccagttattgcgtgtaatgctatgatttccgggcttggacagaaaggagagatagcaaaagcaagaagggtttttgattcaatgaaggagagaaatgatgcatcttggcaaacggtgatcaaaattcacgaaagaaacggttttgaattggaggctcttgatttatttattctgatgcagaaacagggagttagacccacttttccaacattgataagcattctttcggtctgcgccagcttagcaagcctccaccatggtaaacaggtccatgctcagttggttagatgtcaatttgatgttgatgtgtatgttgcgtctgttttaatgacaatgtacattaaatgcggcgagcttgtgaagtctaaactaatatttgacaggtttccttcaaaggacattatcatgtggaattcaatcatatctggttatgcctcacacggtcttggagaggaagcattaaaggttttctgtgagatgcctttgtctggtagtactaagcctaacgaagtcaccttcgttgcaactctctcagcatgtagttacgctgggatggttgaggaagggcttaagatctatgaatctatggaatcagtttttggggttaagccaatcaccgcgcattatgcttgcatggtagatatgcttgggcgtgcaggacggtttaatgaggcaatggaaatgattgatagtatgactgtcgaaccagatgctgcagtttggggttctctattaggagcgtgcagaactcactcgcagctggatgtggcagaattttgtgcgaagaaactcatagagattgaaccggagaattctgggacttacatcttgctctccaacatgtatgcatctcaaggtaggtgggctgacgttgcagaactgagaaaacttatgaagactaggttggtaagaaaatcaccaggttgtagctggactgaagtcgagaacaaggtgcatgcattcactcgtgggggtattaatagccatcccgagcaggaatctattttgaagatactggatgaattggatgggttattgagagaagccgggtataatcctgattgcagctatgcattgcacgatgtagacgaggaagagaaagtcaatagcctgaaatatcatagcgagagactagcggtagcttatgctcttttaaagctatctgaaggaatacccatccgagtcatgaagaaccttagagtttgtagtgattgccacacagcaataaaaataatctctaaggtgaaagagagggagatcattctaagagatgcaaacagattccatcacttcagaaacggagagtgttcctgtaaagattactggtga

SEQ ID NO: 81322 - protein, 705 aa, Arabidopsis thaliana
  peptide (1)..(705): Ceres Seq. ID no. 12659315
  misc_feature (49)..(83): Pfam Name: PPR repeat Pfam Description: PPR repeat
  misc_feature (4)..(705): Homolog of NCBI NO: 15223594 NR Description: hypothetical protein; protein id: At1g56690.1
  misc_feature (21)..(705): Homolog of NCBI NO: 15235498 NR Description: hypothetical protein; protein id: At4g02750.1
  misc_feature (136)..(705): Homolog of NCBI NO: 22328738 NR Description: similar to putative selenium-binding protein;
  misc_feature (114)..(705): Homolog of NCBI NO: 27817913 NR Description: OJ1066_B03.8 [Oryza sativa (japonica
  misc_feature (66)..(705): Homolog of NCBI NO: 15237442 NR Description: putative protein; protein id: At5g46460.1 thaliana] >gi|10177583|dbj|BAB10814.1|
  misc_feature (76)..(705): Homolog of NCBI NO: 34897884 NR Description: Similar to Arabidopsis thaliana DNA chromosome 4,
  misc_feature (31)..(93): Homolog of NCBI NO: 34897884 NR Description: Similar to Arabidopsis thaliana DNA chromosome 4,
  misc_feature (42)..(705): Homolog of NCBI NO: 15234006 NR Description: putative protein; protein id: At4g18750.1
  misc_feature (66)..(611): Homolog of NCBI NO: 15226879 NR Description: hypothetical protein; protein id: At2g35030.1
  misc_feature (172)..(705): Homolog of NCBI NO: 15242550 NR Description: selenium-binding protein-like; protein id:
MKSQILLRRTYSTTIPPPTANVRITHLSRIGKIHEARKLFDSCDSKSISSWNSMVAGYFANLMPRDARKLFDEMPDRNIISWNGLVSGYMKNGEIDEARKVFDLMPERNVVSWTALVKGYVHNGKVDVAESLFWKMPEKNKVSWTVMLIGFLQDGRIDDACKLYEMIPDKDNIARTSMIHGLCKEGRVDEAREIFDEMSERSVITWTTMVTGYGQNNRVDDARKIFDVMPEKTEVSWTSMLMGYVQNGRIEDAEELFEVMPVKPVIACNAMISGLGQKGEIAKARRVFDSMKERNDASWQTVIKIHERNGFELEALDLFILMQKQGVRPTFPTLISILSVCASLASLHHGKQVHAQLVRCQFDVDVYVASVLMTMYIKCGELVKSKLIFDRFPSKDIIMWNSIISGYASHGLGEEALKVFCEMPLSGSTKPNEVTFVATLSACSYAGMVEEGLKIYESMESVFGVKPITAHYACMVDMLGRAGRFNEAMEMIDSMTVEPDAAVWGSLLGACRTHSQLDVAEFCAKKLIEIEPENSGTYILLSNMYASQGRWADVAELRKLMKTRLVRKSPGCSWTEVENKVHAFTRGGINSHPEQESILKILDELDGLLREAGYNPDCSYALHDVDEEEKVNSLKYHSERLAVAYALLKLSEGIPIRVMKNLRVCSDCHTAIKIISKVKEREIILRDANRFHHFRNGECSCKDYW

SEQ ID NO: 81323 - protein, 652 aa, Arabidopsis thaliana
  peptide (1)..(652): Ceres Seq. ID no. 12659316
  misc_feature (1)..(30): Pfam Name: PPR repeat Pfam Description: PPR repeat
  misc_feature (1)..(652): Homolog of NCBI NO: 15223594 NR Description: hypothetical protein; protein id: At1g56690.1
  misc_feature (1)..(652): Homolog of NCBI NO: 15235498 NR Description: hypothetical protein; protein id: At4g02750.1
  misc_feature (83)..(652): Homolog of NCBI NO: 22328738 NR Description: similar to putative selenium-binding protein;
  misc_feature (61)..(652): Homolog of NCBI NO: 27817913 NR Description: OJ1066_B03.8 [Oryza sativa (japonica
  misc_feature (13)..(652): Homolog of NCBI NO: 15237442 NR Description: putative protein; protein id: At5g46460.1 thaliana] >gi|10177583|dbj|BAB10814.1|
  misc_feature (23)..(652): Homolog of NCBI NO: 34897884 NR Description: Similar to Arabidopsis thaliana DNA chromosome 4,
  misc_feature (1)..(40): Homolog of NCBI NO: 34897884 NR Description: Similar to Arabidopsis thaliana DNA chromosome 4,
  misc_feature (1)..(652): Homolog of NCBI NO: 15234006 NR Description: putative protein; protein id: At4g18750.1
  misc_feature (13)..(558): Homolog of NCBI NO: 15226879 NR Description: hypothetical protein; protein id: At2g35030.1
  misc_feature (119)..(652): Homolog of NCBI NO: 15242550 NR Description: selenium-binding protein-like; protein id:
MVAGYFANLMPRDARKLFDEMPDRNIISWNGLVSGYMKNGEIDEARKVFDLMPERNVVSWTALVKGYVHNGKVDVAESLFWKMPEKNKVSWTVMLIGFLQDGRIDDACKLYEMIPDKDNIARTSMIHGLCKEGRVDEAREIFDEMSERSVITWTTMVTGYGQNNRVDDARKIFDVMPEKTEVSWTSMLMGYVQNGRIEDAEELFEVMPVKPVIACNAMISGLGQKGEIAKARRVFDSMKERNDASWQTVIKIHERNGFELEALDLFILMQKQGVRPTFPTLISILSVCASLASLHHGKQVHAQLVRCQFDVDVYVASVLMTMYIKCGELVKSKLIFDRFPSKDIIMWNSIISGYASHGLGEEALKVFCEMPLSGSTKPNEVTFVATLSACSYAGMVEEGLKIYESMESVFGVKPITAHYACMVDMLGRAGRFNEAMEMIDSMTVEPDAAVWGSLLGACRTHSQLDVAEFCAKKLIEIEPENSGTYILLSNMYASQGRWADVAELRKLMKTRLVRKSPGCSWTEVENKVHAFTRGGINSHPEQESILKILDELDGLLREAGYNPDCSYALHDVDEEEKVNSLKYHSERLAVAYALLKLSEGIPIRVMKNLRVCSDCHTAIKIISKVKEREIILRDANRFHHFRNGECSCKDYW

SEQ ID NO: 81324 - protein, 643 aa, Arabidopsis thaliana
  peptide (1)..(643): Ceres Seq. ID no. 12659317
  misc_feature (19)..(51): Pfam Name: PPR repeat Pfam Description: PPR repeat
  misc_feature (1)..(643): Homolog of NCBI NO: 15223594 NR Description: hypothetical protein; protein id: At1g56690.1
  misc_feature (1)..(643): Homolog of NCBI NO: 15235498 NR Description: hypothetical protein; protein id: At4g02750.1
  misc_feature (74)..(643): Homolog of NCBI NO: 22328738 NR Description: similar to putative selenium-binding protein;
  misc_feature (52)..(643): Homolog of NCBI NO: 27817913 NR Description: OJ1066_B03.8 [Oryza sativa (japonica
  misc_feature (4)..(643): Homolog of NCBI NO: 15237442 NR Description: putative protein; protein id: At5g46460.1 thaliana] >gi|10177583|dbj|BAB10814.1|
  misc_feature (14)..(643): Homolog of NCBI NO: 34897884 NR Description: Similar to Arabidopsis thaliana DNA chromosome 4,
  misc_feature (1)..(31): Homolog of NCBI NO: 34897884 NR Description: Similar to Arabidopsis thaliana DNA chromosome 4,
  misc_feature (1)..(643): Homolog of NCBI NO: 15234006 NR Description: putative protein; protein id: At4g18750.1
  misc_feature (4)..(549): Homolog of NCBI NO: 15226879 NR Description: hypothetical protein; protein id: At2g35030.1
  misc_feature (110)..(643): Homolog of NCBI NO: 15242550 NR Description: selenium-binding protein-like; protein id:
MPRDARKLFDEMPDRNIISWNGLVSGYMKNGEIDEARKVFDLMPERNVVSWTALVKGYVHNGKVDVAESLFWKMPEKNKVSWTVMLIGFLQDGRIDDACKLYEMIPDKDNIARTSMIHGLCKEGRVDEAREIFDEMSERSVITWTTMVTGYGQNNRVDDARKIFDVMPEKTEVSWTSMLMGYVQNGRIEDAEELFEVMPVKPVIACNAMISGLGQKGEIAKARRVFDSMKERNDASWQTVIKIHERNGFELEALDLFILMQKQGVRPTFPTLISILSVCASLASLHHGKQVHAQLVRCQFDVDVYVASVLMTMYIKCGELVKSKLIFDRFPSKDIIMWNSIISGYASHGLGEEALKVFCEMPLSGSTKPNEVTFVATLSACSYAGMVEEGLKIYESMESVFGVKPITAHYACMVDMLGRAGRFNEAMEMIDSMTVEPDAAVWGSLLGACRTHSQLDVAEFCAKKLIEIEPENSGTYILLSNMYASQGRWADVAELRKLMKTRLVRKSPGCSWTEVENKVHAFTRGGINSHPEQESILKILDELDGLLREAGYNPDCSYALHDVDEEEKVNSLKYHSERLAVAYALLKLSEGIPIRVMKNLRVCSDCHTAIKIISKVKEREIILRDANRFHHFRNGECSCKDYW

SEQ ID NO: 81325 - DNA, 2143 bp, Arabidopsis thaliana
  misc_feature (1)..(2143): Ceres Seq. ID no. 12659322
  misc_feature: MA Experiment ID: 20000173 Result: Down-regulated in Transcription
  misc_feature: MA Experiment 20000173 PARAMETER Experiment Name: At_42deg_Heat_P Parameter: Age (day) Value: 14
  misc_feature: MA Experiment 20000173 PARAMETER Experiment Name: At_42deg_Heat_P Parameter: Organism Value: A. thaliana
  misc_feature: MA Experiment 20000173 PARAMETER Experiment Name: At_42deg_Heat_P Parameter: Plant Line Value: WS
  misc_feature: MA Experiment 20000173 PARAMETER Experiment Name: At_42deg_Heat_P Parameter: Temperature (deg C) Value: 42 vs. 22
  misc_feature: MA Experiment 20000173 PARAMETER Experiment Name: At_42deg_Heat_P Parameter: Timepoint (hr) Value: 6
  misc_feature: MA Experiment 20000173 PARAMETER Experiment Name: At_42deg_Heat_P Parameter: Tissue Value: Aerial
  misc_feature: MA Experiment ID: 20000184 Result: Down-regulated in Transcription
  misc_feature: MA Experiment 20000184 PARAMETER Experiment Name: At_Shoots__P Parameter: Age (day) Value: 7
  misc_feature: MA Experiment 20000184 PARAMETER Experiment Name: At_Shoots__P Parameter: Tissue Value: Shoots vs. Whole Plant
  misc_feature: MA Experiment ID: 20000234 Result: Up-regulated in Transcription
  misc_feature: MA Experiment 20000234 PARAMETER Experiment Name: At_Siliques_P Parameter: Age (day) Value: 21
  misc_feature: MA Experiment 20000234 PARAMETER Experiment Name: At_Siliques_P Parameter: Organism Value: A. thaliana
  misc_feature: MA Experiment 20000234 PARAMETER Experiment Name: At_Siliques_P Parameter: Plant Line Value: WS
  misc_feature: MA Experiment 20000234 PARAMETER Experiment Name: At_Siliques_P Parameter: Tissue Value: Less Than 5mm Siliques vs. Whole Plant
  misc_feature: MA Experiment ID: 20000264 Result: Up-regulated in Transcription
  misc_feature: MA Experiment 20000264 PARAMETER Experiment Name: At_Open_Flower_P Parameter: Age (day) Value: 21
  misc_feature: MA Experiment 20000264 PARAMETER Experiment Name: At_Open_Flower_P Parameter: Plant Line Value: WS
  misc_feature: MA Experiment 20000264 PARAMETER Experiment Name: At_Open_Flower_P Parameter: Tissue Value: Open Flower vs. Whole Plant
  misc_feature: MA Experiment ID: 20000265 Result: Up-regulated in Transcription
  misc_feature: MA Experiment 20000265 PARAMETER Experiment Name: At_Open_Flower_P Parameter: Age (day) Value: 21
  misc_feature: MA Experiment 20000265 PARAMETER Experiment Name: At_Open_Flower_P Parameter: Plant Line Value: WS
  misc_feature: MA Experiment 20000265 PARAMETER Experiment Name: At_Open_Flower_P Parameter: Tissue Value: Closed Flower vs. Whole Plant
  misc_feature: MA Experiment ID: 20000286 Result: Up-regulated in Transcription
  misc_feature: MA Experiment 20000286 PARAMETER Experiment Name: At_Open_Flower_P Parameter: Age (day) Value: 21
  misc_feature: MA Experiment 20000286 PARAMETER Experiment Name: At_Open_Flower_P Parameter: Plant Line Value: WS
  misc_feature: MA Experiment 20000286 PARAMETER Experiment Name: At_Open_Flower_P Parameter: Tissue Value: Half Open vs. Whole Plant
  misc_feature: MA Experiment ID: 20000495 Result: Up-regulated in Transcription
  misc_feature: MA Experiment 20000495 PARAMETER Experiment Name: At_Guard_Cells_P Parameter: Harvest Date Value: 8/2/2002
  misc_feature: MA Experiment 20000495 PARAMETER Experiment Name: At_Guard_Cells_P Parameter: Organism Value: A. thaliana
  misc_feature: MA Experiment 20000495 PARAMETER Experiment Name: At_Guard_Cells_P Parameter: Tissue Value: Guard Cells vs. Leaves
  misc_feature: MA Experiment ID: 20000496 Result: Up-regulated in Transcription
  misc_feature: MA Experiment 20000496 PARAMETER Experiment Name: At_Guard_Cells_P Parameter: Harvest Date Value: 7/19/2002
  misc_feature: MA Experiment 20000496 PARAMETER Experiment Name: At_Guard_Cells_P Parameter: Organism Value: Canola
  misc_feature: MA Experiment 20000496 PARAMETER Experiment Name: At_Guard_Cells_P Parameter: Tissue Value: Guard Cells vs. Leaves
  misc_feature: MA Experiment ID: 20000573 Result: Up-regulated in Transcription
  misc_feature: MA Experiment 20000573 PARAMETER Experiment Name: At_100uM_ABA_Mutants__P Parameter: Organism Value: A. thaliana
  misc_feature: MA Experiment 20000573 PARAMETER Experiment Name: At_100uM_ABA_Mutants__P Parameter: Plant Line Value: CS22 vs. Ler wt
  misc_feature: MA Experiment 20000573 PARAMETER Experiment Name: At_100uM_ABA_Mutants__P Parameter: Timepoint (hr) Value: N/A
  misc_feature: MA Experiment 20000573 PARAMETER Experiment Name: At_100uM_ABA_Mutants__P Parameter: Tissue Value: Whole Plant
  misc_feature: MA Experiment 20000573 PARAMETER Experiment Name: At_100uM_ABA_Mutants__P Parameter: Treatment Value: None
  misc_feature: MA Experiment ID: 20000574 Result: Up-regulated in Transcription
  misc_feature: MA Experiment 20000574 PARAMETER Experiment Name: At_100uM_ABA_Mutants__P Parameter: Organism Value: A. thaliana
  misc_feature: MA Experiment 20000574 PARAMETER Experiment Name: At_100uM_ABA_Mutants__P Parameter: Plant Line Value: CS23 vs. Ler wt
  misc_feature: MA Experiment 20000574 PARAMETER Experiment Name: At_100uM_ABA_Mutants__P Parameter: Timepoint (hr) Value: N/A
  misc_feature: MA Experiment 20000574 PARAMETER Experiment Name: At_100uM_ABA_Mutants__P Parameter: Tissue Value: Whole Plant
  misc_feature: MA Experiment 20000574 PARAMETER Experiment Name: At_100uM_ABA_Mutants__P Parameter: Treatment Value: None
  misc_feature: MA Experiment ID: 20001248 Result: Up-regulated in Transcription
  misc_feature: MA Experiment 20001248 PARAMETER Experiment Name: At_Far-red-induction_P Parameter: Age (day) Value: 7
  misc_feature: MA Experiment 20001248 PARAMETER Experiment Name: At_Far-red-induction_P Parameter: Light Value: Far-red vs. White
  misc_feature: MA Experiment 20001248 PARAMETER Experiment Name: At_Far-red-induction_P Parameter: Organism Value: A. thaliana
  misc_feature: MA Experiment 20001248 PARAMETER Experiment Name: At_Far-red-induction_P Parameter: Plant Line Value: Columbia
  misc_feature: MA Experiment 20001248 PARAMETER Experiment Name: At_Far-red-induction_P Parameter: Timepoint (hr) Value: 4
  misc_feature: MA Experiment 20001248 PARAMETER Experiment Name: At_Far-red-induction_P Parameter: Tissue Value: Whole Plant
  misc_feature: MA Experiment ID: 20001450 Result: Up-regulated in Transcription
  misc_feature: MA Experiment 20001450 PARAMETER Experiment Name: At_Far-red-induction_P Parameter: Age (day) Value: 7
  misc_feature: MA Experiment 20001450 PARAMETER Experiment Name: At_Far-red-induction_P Parameter: Light Value: Far-red vs. White
  misc_feature: MA Experiment 20001450 PARAMETER Experiment Name: At_Far-red-induction_P Parameter: Organism Value: A. thaliana
  misc_feature: MA Experiment 20001450 PARAMETER Experiment Name: At_Far-red-induction_P Parameter: Plant Line Value: Columbia
  misc_feature: MA Experiment 20001450 PARAMETER Experiment Name: At_Far-red-induction_P Parameter: Timepoint (hr) Value: 8
  misc_feature: MA Experiment 20001450 PARAMETER Experiment Name: At_Far-red-induction_P Parameter: Tissue Value: Whole Plant
  misc_feature: MA Experiment ID: 20001451 Result: Up-regulated in Transcription
  misc_feature: MA Experiment 20001451 PARAMETER Experiment Name: At_Far-red-induction_P Parameter: Age (day) Value: 7
  misc_feature: MA Experiment 20001451 PARAMETER Experiment Name: At_Far-red-induction_P Parameter: Light Value: Far-red vs. White
  misc_feature: MA Experiment 20001451 PARAMETER Experiment Name: At_Far-red-induction_P Parameter: Organism Value: A. thaliana
  misc_feature: MA Experiment 20001451 PARAMETER Experiment Name: At_Far-red-induction_P Parameter: Plant Line Value: Columbia
  misc_feature: MA Experiment 20001451 PARAMETER Experiment Name: At_Far-red-induction_P Parameter: Timepoint (hr) Value: 24
  misc_feature: MA Experiment 20001451 PARAMETER Experiment Name: At_Far-red-induction_P Parameter: Tissue Value: Whole Plant
  misc_feature: MA Experiment ID: 20001905 Result: Down-regulated in Transcription
  misc_feature: MA Experiment 20001905 PARAMETER Experiment Name: At_Drought_Reproduction_P Parameter: Age (day) Value: 40
  misc_feature: MA Experiment 20001905 PARAMETER Experiment Name: At_Drought_Reproduction_P Parameter: Organism Value: A. thaliana
  misc_feature: MA Experiment 20001905 PARAMETER Experiment Name: At_Drought_Reproduction_P Parameter: Plant Line Value: WS
  misc_feature: MA Experiment 20001905 PARAMETER Experiment Name: At_Drought_Reproduction_P Parameter: Timepoint (day) Value: 10
  misc_feature: MA Experiment 20001905 PARAMETER Experiment Name: At_Drought_Reproduction_P Parameter: Tissue Value: Rosettes
  misc_feature: MA Experiment 20001905 PARAMETER Experiment Name: At_Drought_Reproduction_P Parameter: Treatment Value: Drought vs. No Drought
aaacttgcactcgtcttccactttgatccacttaaagcagctttaaagctttgaacatgtttagctataatccctgaggaactatcctcatgtctctctccagttgcttgcttcccttttctcaatcagcgacggctccgtcttcctccgtctgctcttgccatctcgccgcctctttttctaattttccggtttcgtcaagagactatagtttctccagaagtggaagccttgttctcaacggaggaggctcgaatctctgccggagattctgtggtttgaaactgtggatacttaagagcttgaatcgtagacaaggcaacaacagaaaacatcagcctgtaaacgagcttacaacacactcaaagcacactttcctcagcgatgatgaacgaggttttgctgaagaaactagagctgaagatttacgaccagaagagaatattctgggaacggatttgaatgatgggtttcacaatgttggagacttaccacctgtgtcaaaacaactctcggatgatctttcagatgttcgaagaagggcctcactttgcattgctgttgtaggagccactggtgagctagcaagagggaagattttcccggcattgtttgcgttgtattatagcggctaccttcctgaggatgttgctatatttggggtttcaagaaagaatctgacagatgaagacctcagatccatcattgcatcaacgctgacttgccgtgttgatcatcaggagaattgtgggggcaagatggatgcatttcagagtagaacatactatatcaatggaggttataataacagggatgggatgtcccgacttgccgagagaatgaaacagattgagggagaatcagaagcaaatagaatcttttacctctcagtacctcaagaagctctggtggatgtggcatgcaccattggagataacgctcaggcaccacgaggctggactcgaataatagttgagaaaccttttggttttaactcacattcgtctcatcagttaacaaagtcacttctctctaagtttgaagagaagcaaatctacaggatagatcacatgttaggaagaaacctcattgaaaatctgacagtgttaaggttttcaaatctagtttttgaaccactatggaacagaacatacatacgcaatatacaggttattatatcagaatcaattgcgcaaacagaaaagttttctgatggatatggaataatacgggacatagtgcacagccatatacttcagacaatcgcattacttgccatggaacctccgataagtctcgatggtgaagatatccgaaatgaaaaggtgaaggttttaagatcaattcgcaagatagacccgcgtgatgtcatccttggccagtataaatccagttcccgagacaagaacggtgtgatcttgaacggtgtagaccctacatattgtgcagcagccttgtatattgataatgcacgttgggatggtgtacctttccttgtaagagttggcactggcctcattaaacacagagtggagattcatgtgcaattccggcatgttcctggaaacctataccgagaaaatattggaataaacatagatttggggacaaatgagcttattctacgtgacgaacctgatgaggccatcctggtgaaaatcaacaacaaggttcctggtttaggtcttcagctagacgcttctgaacttaacttgctctataaagacaggtataaaaccgaagtaccagactcatatgaacacctaattcatgatgtaattgacggagacaatcatctgttcatgagaagcgatgaggttgcagcagcatggaacattcttagtccggttctagaagagatagacaagcatcacacagctccggagttgtatgaatttggtggacgaggaccagttgcggcatactatctttgggccaagcacggtgtcccatgggcagatgactgaagaagaaacatagatgcagcaacaaacaaatgagagtgattctgaatggttattgtgaagtgtgtttgtttagcttgaagctgtgccattccctgtagactgtacatatgtacacatgtatgtcatgttgctatatgaatgtccatcatggtggggtccataatagtgttgaaaag

SEQ ID NO: 81326 - protein, 625 aa, Arabidopsis thaliana
  peptide (1)..(625): Ceres Seq. ID no. 12659323
  misc_feature (135)..(624): Homolog of NCBI NO: 3334193 NR Description: Glucose-6-phosphate 1-dehydrogenase, chloroplast
  misc_feature (153)..(624): Homolog of NCBI NO: 3023818 NR Description: Glucose-6-phosphate 1-dehydrogenase, chloroplast
  misc_feature (146)..(624): Homolog of NCBI NO: 9955555 NR Description: glucose-6-phosphate 1-dehydrogenase [Arabidopsis
  misc_feature (146)..(624): Homolog of NCBI NO: 22326761 NR Description: glucose-6-phosphate 1-dehydrogenase; protein id:
  misc_feature (151)..(624): Homolog of NCBI NO: 2146735 NR Description: glucose-6-phosphate 1-dehydrogenase (EC 1.1.1.49)
  misc_feature (146)..(624): Homolog of NCBI NO: 18086448 NR Description: AT5g13110/T19L5_70 [Arabidopsis thaliana]
  misc_feature (152)..(624): Homolog of NCBI NO: 15221719 NR Description: glucose-6-phosphate 1-dehydrogenase; protein id:
  misc_feature (152)..(624): Homolog of NCBI NO: 22654991 NR Description: At1g24280/F3I6_22 [Arabidopsis thaliana]
  misc_feature (153)..(624): Homolog of NCBI NO: 7431274 NR Description: glucose-6-phosphate 1-dehydrogenase (EC 1.1.1.49)
  misc_feature (151)..(624): Homolog of NCBI NO: 7431270 NR Description: glucose-6-phosphate 1-dehydrogenase (EC 1.1.1.49),
MSLSSCLLPFSQSATAPSSSVCSCHLAASFSNFPVSSRDYSFSRSGSLVLNGGGSNLCRRFCGLKLWILKSLNRRQGNNRKHQPVNELTTHSKHTFLSDDERGFAEETRAEDLRPEENILGTDLNDGFHNVGDLPPVSKQLSDDLSDVRRRASLCIAVVGATGELARGKIFPALFALYYSGYLPEDVAIFGVSRKNLTDEDLRSIIASTLTCRVDHQENCGGKMDAFQSRTYYINGGYNNRDGMSRLAERMKQIEGESEANRIFYLSVPQEALVDVACTIGDNAQAPRGWTRIIVEKPFGFNSHSSHQLTKSLLSKFEEKQIYRIDHMLGRNLIENLTVLRFSNLVFEPLWNRTYIRNIQVIISESIAQTEKFSDGYGIIRDIVHSHILQTIALLAMEPPISLDGEDIRNEKVKVLRSIRKIDPRDVILGQYKSSSRDKNGVILNGVDPTYCAAALYIDNARWDGVPFLVRVGTGLIKHRVEIHVQFRHVPGNLYRENIGINIDLGTNELILRDEPDEAILVKINNKVPGLGLQLDASELNLLYKDRYKTEVPDSYEHLIHDVIDGDNHLFMRSDEVAAAWNILSPVLEEIDKHHTAPELYEFGGRGPVAAYYLWAKHGVPWADD

SEQ ID NO: 81327 - protein, 402 aa, Arabidopsis thaliana
  peptide (1)..(402): Ceres Seq. ID no. 12659324
  misc_feature (1)..(401): Homolog of NCBI NO: 3334193 NR Description: Glucose-6-phosphate 1-dehydrogenase, chloroplast
  misc_feature (1)..(401): Homolog of NCBI NO: 3023818 NR Description: Glucose-6-phosphate 1-dehydrogenase, chloroplast
  misc_feature (1)..(401): Homolog of NCBI NO: 9955555 NR Description: glucose-6-phosphate 1-dehydrogenase [Arabidopsis
  misc_feature (1)..(401): Homolog of NCBI NO: 22326761 NR Description: glucose-6-phosphate 1-dehydrogenase; protein id:
  misc_feature (1)..(401): Homolog of NCBI NO: 2146735 NR Description: glucose-6-phosphate 1-dehydrogenase (EC 1.1.1.49)
  misc_feature (1)..(401): Homolog of NCBI NO: 18086448 NR Description: AT5g13110/T19L5_70 [Arabidopsis thaliana]
  misc_feature (1)..(401): Homolog of NCBI NO: 15221719 NR Description: glucose-6-phosphate 1-dehydrogenase; protein id:
  misc_feature (1)..(401): Homolog of NCBI NO: 22654991 NR Description: At1g24280/F3I6_22 [Arabidopsis thaliana]
  misc_feature (1)..(401): Homolog of NCBI NO: 7431274 NR Description: glucose-6-phosphate 1-dehydrogenase (EC 1.1.1.49)
  misc_feature (1)..(401): Homolog of NCBI NO: 7431270 NR Description: glucose-6-phosphate 1-dehydrogenase (EC 1.1.1.49),
MDAFQSRTYYINGGYNNRDGMSRLAERMKQIEGESEANRIFYLSVPQEALVDVACTIGDNAQAPRGWTRIIVEKPFGFNSHSSHQLTKSLLSKFEEKQIYRIDHMLGRNLIENLTVLRFSNLVFEPLWNRTYIRNIQVIISESIAQTEKFSDGYGIIRDIVHSHILQTIALLAMEPPISLDGEDIRNEKVKVLRSIRKIDPRDVILGQYKSSSRDKNGVILNGVDPTYCAAALYIDNARWDGVPFLVRVGTGLIKHRVEIHVQFRHVPGNLYRENIGINIDLGTNELILRDEPDEAILVKINNKVPGLGLQLDASELNLLYKDRYKTEVPDSYEHLIHDVIDGDNHLFMRSDEVAAAWNILSPVLEEIDKHHTAPELYEFGGRGPVAAYYLWAKHGVPWADD

SEQ ID NO: 81328 - protein, 382 aa, Arabidopsis thaliana
  peptide (1)..(382): Ceres Seq. ID no. 12659325
  misc_feature (1)..(381): Homolog of NCBI NO: 3334193 NR Description: Glucose-6-phosphate 1-dehydrogenase, chloroplast
  misc_feature (1)..(381): Homolog of NCBI NO: 3023818 NR Description: Glucose-6-phosphate 1-dehydrogenase, chloroplast
  misc_feature (1)..(381): Homolog of NCBI NO: 9955555 NR Description: glucose-6-phosphate 1-dehydrogenase [Arabidopsis
  misc_feature (1)..(381): Homolog of NCBI NO: 22326761 NR Description: glucose-6-phosphate 1-dehydrogenase; protein id:
  misc_feature (1)..(381): Homolog of NCBI NO: 2146735 NR Description: glucose-6-phosphate 1-dehydrogenase (EC 1.1.1.49)
  misc_feature (1)..(381): Homolog of NCBI NO: 18086448 NR Description: AT5g13110/T19L5_70 [Arabidopsis thaliana]
  misc_feature (1)..(381): Homolog of NCBI NO: 15221719 NR Description: glucose-6-phosphate 1-dehydrogenase; protein id:
  misc_feature (1)..(381): Homolog of NCBI NO: 22654991 NR Description: At1g24280/F3I6_22 [Arabidopsis thaliana]
  misc_feature (1)..(381): Homolog of NCBI NO: 7431274 NR Description: glucose-6-phosphate 1-dehydrogenase (EC 1.1.1.49)
  misc_feature (1)..(381): Homolog of NCBI NO: 7431270 NR Description: glucose-6-phosphate 1-dehydrogenase (EC 1.1.1.49),
MSRLAERMKQIEGESEANRIFYLSVPQEALVDVACTIGDNAQAPRGWTRIIVEKPFGFNSHSSHQLTKSLLSKFEEKQIYRIDHMLGRNLIENLTVLRFSNLVFEPLWNRTYIRNIQVIISESIAQTEKFSDGYGIIRDIVHSHILQTIALLAMEPPISLDGEDIRNEKVKVLRSIRKIDPRDVILGQYKSSSRDKNGVILNGVDPTYCAAALYIDNARWDGVPFLVRVGTGLIKHRVEIHVQFRHVPGNLYRENIGINIDLGTNELILRDEPDEAILVKINNKVPGLGLQLDASELNLLYKDRYKTEVPDSYEHLIHDVIDGDNHLFMRSDEVAAAWNILSPVLEEIDKHHTAPELYEFGGRGPVAAYYLWAKHGVPWADD

SEQ ID NO: 81329 - DNA, 1097 bp, Arabidopsis thaliana
  misc_feature (1)..(1097): Ceres Seq. ID no. 12659334
  misc_feature: MA Experiment ID: 20000327 Result: Down-regulated in Transcription
  misc_feature: MA Experiment 20000327 PARAMETER Experiment Name: At_42deg_Heat_Sub_P Parameter: Age (day) Value: 14
  misc_feature: MA Experiment 20000327 PARAMETER Experiment Name: At_42deg_Heat_Sub_P Parameter: Organism Value: A. thaliana
  misc_feature: MA Experiment 20000327 PARAMETER Experiment Name: At_42deg_Heat_Sub_P Parameter: Plant Line Value: WS
  misc_feature: MA Experiment 20000327 PARAMETER Experiment Name: At_42deg_Heat_Sub_P Parameter: Temperature (deg C) Value: 42 vs. 22
  misc_feature: MA Experiment 20000327 PARAMETER Experiment Name: At_42deg_Heat_Sub_P Parameter: Timepoint (hr) Value: 1
  misc_feature: MA Experiment 20000327 PARAMETER Experiment Name: At_42deg_Heat_Sub_P Parameter: Tissue Value: Aerial
  misc_feature: MA Experiment ID: 20000328 Result: Down-regulated in Transcription
  misc_feature: MA Experiment 20000328 PARAMETER Experiment Name: At_42deg_Heat_Sub_P Parameter: Age (day) Value: 14
  misc_feature: MA Experiment 20000328 PARAMETER Experiment Name: At_42deg_Heat_Sub_P Parameter: Organism Value: A. thaliana
  misc_feature: MA Experiment 20000328 PARAMETER Experiment Name: At_42deg_Heat_Sub_P Parameter: Plant Line Value: WS
  misc_feature: MA Experiment 20000328 PARAMETER Experiment Name: At_42deg_Heat_Sub_P Parameter: Temperature (deg C) Value: 42 vs. 22
  misc_feature: MA Experiment 20000328 PARAMETER Experiment Name: At_42deg_Heat_Sub_P Parameter: Timepoint (hr) Value: 6
  misc_feature: MA Experiment 20000328 PARAMETER Experiment Name: At_42deg_Heat_Sub_P Parameter: Tissue Value: Aerial
  misc_feature: MA Experiment ID: 20000347 Result: Up-regulated in Transcription
  misc_feature: MA Experiment 20000347 PARAMETER Experiment Name: At_2mM_SA_Sub_P Parameter: Age (day) Value: 14
  misc_feature: MA Experiment 20000347 PARAMETER Experiment Name: At_2mM_SA_Sub_P Parameter: Organism Value: A. thaliana
  misc_feature: MA Experiment 20000347 PARAMETER Experiment Name: At_2mM_SA_Sub_P Parameter: Plant Line Value: WS
  misc_feature: MA Experiment 20000347 PARAMETER Experiment Name: At_2mM_SA_Sub_P Parameter: Timepoint (hr) Value: 6
  misc_feature: MA Experiment 20000347 PARAMETER Experiment Name: At_2mM_SA_Sub_P Parameter: Tissue Value: Aerial
  misc_feature: MA Experiment 20000347 PARAMETER Experiment Name: At_2mM_SA_Sub_P Parameter: Treatment Value: 2mM SA vs. No Treatment
  misc_feature: MA Experiment ID: 20000348 Result: Up-regulated in Transcription
  misc_feature: MA Experiment 20000348 PARAMETER Experiment Name: At_100uM_ABA_Sub_P Parameter: Age (day) Value: 14
  misc_feature: MA Experiment 20000348 PARAMETER Experiment Name: At_100uM_ABA_Sub_P Parameter: Organism Value: A. thaliana
  misc_feature: MA Experiment 20000348 PARAMETER Experiment Name: At_100uM_ABA_Sub_P Parameter: Plant Line Value: WS
  misc_feature: MA Experiment 20000348 PARAMETER Experiment Name: At_100uM_ABA_Sub_P Parameter: Timepoint (hr) Value: 1
  misc_feature: MA Experiment 20000348 PARAMETER Experiment Name: At_100uM_ABA_Sub_P Parameter: Tissue Value: Aerial
  misc_feature: MA Experiment 20000348 PARAMETER Experiment Name: At_100uM_ABA_Sub_P Parameter: Treatment Value: 100uM ABA vs. No Treatment
  misc_feature: MA Experiment ID: 20000349 Result: Up-regulated in Transcription
  misc_feature: MA Experiment 20000349 PARAMETER Experiment Name: At_100uM_ABA_Sub_P Parameter: Age (day) Value: 14
  misc_feature: MA Experiment 20000349 PARAMETER Experiment Name: At_100uM_ABA_Sub_P Parameter: Organism Value: A. thaliana
  misc_feature: MA Experiment 20000349 PARAMETER Experiment Name: At_100uM_ABA_Sub_P Parameter: Plant Line Value: WS
  misc_feature: MA Experiment 20000349 PARAMETER Experiment Name: At_100uM_ABA_Sub_P Parameter: Timepoint (hr) Value: 6
  misc_feature: MA Experiment 20000349 PARAMETER Experiment Name: At_100uM_ABA_Sub_P Parameter: Tissue Value: Aerial
  misc_feature: MA Experiment 20000349 PARAMETER Experiment Name: At_100uM_ABA_Sub_P Parameter: Treatment Value: 100uM ABA vs. No Treatment
  misc_feature: MA Experiment ID: 20000352 Result: Up-regulated in Transcription
  misc_feature: MA Experiment 20000352 PARAMETER Experiment Name: At_Drought_Sub_P Parameter: Age (day) Value: 7
  misc_feature: MA Experiment 20000352 PARAMETER Experiment Name: At_Drought_Sub_P Parameter: Organism Value: A. thaliana
  misc_feature: MA Experiment 20000352 PARAMETER Experiment Name: At_Drought_Sub_P Parameter: Plant Line Value: WS
  misc_feature: MA Experiment 20000352 PARAMETER Experiment Name: At_Drought_Sub_P Parameter: Timepoint (hr) Value: 6
  misc_feature: MA Experiment 20000352 PARAMETER Experiment Name: At_Drought_Sub_P Parameter: Tissue Value: Whole Plant
  misc_feature: MA Experiment 20000352 PARAMETER Experiment Name: At_Drought_Sub_P Parameter: Treatment Value: Drought vs. No Drought
  misc_feature: MA Experiment ID: 20000355 Result: Down-regulated in Transcription
  misc_feature: MA Experiment 20000355 PARAMETER Experiment Name: At_Siliques_Sub_P Parameter: Age (day) Value: 21
  misc_feature: MA Experiment 20000355 PARAMETER Experiment Name: At_Siliques_Sub_P Parameter: Organism Value: A. thaliana
  misc_feature: MA Experiment 20000355 PARAMETER Experiment Name: At_Siliques_Sub_P Parameter: Plant Line Value: WS
  misc_feature: MA Experiment 20000355 PARAMETER Experiment Name: At_Siliques_Sub_P Parameter: Tissue Value: Less Than 5mm Siliques vs. Whole Plant
  misc_feature: MA Experiment ID: 20000440 Result: Down-regulated in Transcription
  misc_feature: MA Experiment 20000440 PARAMETER Experiment Name: At_Closed-Flower__Sub_P Parameter: Tissue Value: Closed Flower vs. Whole Plant
accgaagcctaccaaccacatgcacactaattctactcgccaaataaagtgaaaagagatggctgatggaggaaaggtggtctgcgtaaccggagcttccggttacatagcgtcttggatcgtcaagcttttgctcttccgtggctacaccatcaatgccaccgttcgagacccaaaagatcgaaagaaaacagatcaccttctagcacttgacggcgcaaaagaaagactcaaattattcaaagcagatcttctagatgaaggttcttttgagctcgcaattgatggatgcgagactgtcttccacactgcttcaccggttgcaatcactgtcaagactgatcctcaggttgagctgatcaatccagccgtcaatggtactattaacgtcctaagaacttgcactaaagtgtcttctgtcaagagggtcatcttaacatcgtccatggccgcagttcttgcgcctgagaccaagttgggaccaaacgatgtagtagacgaaaccttcttcactaatccaagttttgctgaggagagaaagcaatggtatgtactttctaagactttggccgaagatgcagcatggcgatttgccaaggacaatgagatcgacttgatcgtactgaatccgggacttgtgactggaccaatcttgcagccaactcttaatttctcggtagctgtgattgtggaacttatgaaaggcaagaatccttttaatactacacatcataggttcgtggacgtgagagatgttgctctagctcatgtaaaggcactcgagactccttcagccaatggcagatatatcattgatggtccggttgtgacaataaaagacattgaaaacgttttgcgcgaattctttcctgatttgtgtattgctgataggaatgaagacattactgagctgaattcagtgactttcaatgtgtgtctggataaagtgaaaagtttgggaataattgagttcactcctacagaaacaagccttagagacactgttcttagtctcaaggagaaatgtcttgtgtgatcttctttattgtttttggttacttgttattccttgcaggtctatatacatttcacaaatt

SEQ ID NO: 81330 - protein, 325 aa, Arabidopsis thaliana
  peptide (1)..(325): Ceres Seq. ID no. 12659335
  misc_feature (8)..(274): Pfam Name: NAD dependent epimerase/dehydratase family Pfam Description: NAD dependent epimerase/dehydratase family
  misc_feature (1)..(325): Homolog of NCBI NO: 15217530 NR Description: putative cinnamyl alcohol dehydrogenase; protein At1g09500.1, supported by cDNA: gi_15983385, supported by cDNA: [Arabidopsis thaliana] >gi|25284020|pir||E86228 hypothetical
  misc_feature (39)..(325): Homolog of NCBI NO: 30681183 NR Description: cinnamyl-alcohol dehydrogenase (CAD) family
  misc_feature (39)..(325): Homolog of NCBI NO: 16648726 NR Description: At1g09500/F14J9_16 [Arabidopsis thaliana]
  misc_feature (4)..(325): Homolog of NCBI NO: 15217529 NR Description: putative cinnamyl alcohol dehydrogenase; protein At1g09490.1, supported by cDNA: 32366., supported by cDNA: [Arabidopsis thaliana] >gi|25284017|pir||D86228 hypothetical
  misc_feature (1)..(325): Homolog of NCBI NO: 15217531 NR Description: putative cinnamyl alcohol dehydrogenase; protein At1g09510.1 [Arabidopsis thaliana] >gi|25284021|pir||F86228
  misc_feature (1)..(325): Homolog of NCBI NO: 15217528 NR Description: putative cinnamyl alcohol dehydrogenase; protein
  misc_feature (1)..(325): Homolog of NCBI NO: 25284016 NR Description: hypothetical protein [imported] - Arabidopsis >gi|3482923|gb|AAC33208.1| Highly similar to cinnamyl alcohol
  misc_feature (5)..(325): Homolog of NCBI NO: 30697406 NR Description: cinnamyl-alcohol dehydrogenase (CAD) family
  misc_feature (5)..(325): Homolog of NCBI NO: 12597772 NR Description: cinnamyl alcohol dehydrogenase, putative
  misc_feature (6)..(322): Homolog of NCBI NO: 25405464 NR Description: hypothetical protein F5D21.12 [imported] - thaliana >gi|12325359|gb|AAG52618.1|AC024261_5 cinnamyl alcohol
MADGGKVVCVTGASGYIASWIVKLLLFRGYTINATVRDPKDRKKTDHLLALDGAKERLKLFKADLLDEGSFELAIDGCETVFHTASPVAITVKTDPQVELINPAVNGTINVLRTCTKVSSVKRVILTSSMAAVLAPETKLGPNDVVDETFFTNPSFAEERKQWYVLSKTLAEDAAWRFAKDNEIDLIVLNPGLVTGPILQPTLNFSVAVIVELMKGKNPFNTTHHRFVDVRDVALAHVKALETPSANGRYIIDGPVVTIKDIENVLREFFPDLCIADRNEDITELNSVTFNVCLDKVKSLGIIEFTPTETSLRDTVLSLKEKCLV

SEQ ID NO: 81331 - protein, 196 aa, Arabidopsis thaliana
  peptide (1)..(196): Ceres Seq. ID no. 12659336
  misc_feature (1)..(145): Pfam Name: NAD dependent epimerase/dehydratase family Pfam Description: NAD dependent epimerase/dehydratase family
  misc_feature (1)..(196): Homolog of NCBI NO: 15217530 NR Description: putative cinnamyl alcohol dehydrogenase; protein At1g09500.1, supported by cDNA: gi_15983385, supported by cDNA: [Arabidopsis thaliana] >gi|25284020|pir||E86228 hypothetical
  misc_feature (1)..(196): Homolog of NCBI NO: 30681183 NR Description: cinnamyl-alcohol dehydrogenase (CAD) family
  misc_feature (1)..(196): Homolog of NCBI NO: 16648726 NR Description: At1g09500/F14J9_16 [Arabidopsis thaliana]
  misc_feature (1)..(196): Homolog of NCBI NO: 15217529 NR Description: putative cinnamyl alcohol dehydrogenase; protein At1g09490.1, supported by cDNA: 32366., supported by cDNA: [Arabidopsis thaliana] >gi|25284017|pir||D86228 hypothetical
  misc_feature (1)..(196): Homolog of NCBI NO: 15217531 NR Description: putative cinnamyl alcohol dehydrogenase; protein At1g09510.1 [Arabidopsis thaliana] >gi|25284021|pir||F86228
  misc_feature (1)..(196): Homolog of NCBI NO: 15217528 NR Description: putative cinnamyl alcohol dehydrogenase; protein
  misc_feature (1)..(196): Homolog of NCBI NO: 25284016 NR Description: hypothetical protein [imported] - Arabidopsis >gi|3482923|gb|AAC33208.1| Highly similar to cinnamyl alcohol
  misc_feature (1)..(196): Homolog of NCBI NO: 30697406 NR Description: cinnamyl-alcohol dehydrogenase (CAD) family
  misc_feature (1)..(196): Homolog of NCBI NO: 12597772 NR Description: cinnamyl alcohol dehydrogenase, putative
  misc_feature (1)..(193): Homolog of NCBI NO: 25405464 NR Description: hypothetical protein F5D21.12 [imported] - thaliana >gi|12325359|gb|AAG52618.1|AC024261_5 cinnamyl alcohol
MAAVLAPETKLGPNDVVDETFFTNPSFAEERKQWYVLSKTLAEDAAWRFAKDNEIDLIVLNPGLVTGPILQPTLNFSVAVIVELMKGKNPFNTTHHRFVDVRDVALAHVKALETPSANGRYIIDGPVVTIKDIENVLREFFPDLCIADRNEDITELNSVTFNVCLDKVKSLGIIEFTPTETSLRDTVLSLKEKCLV

SEQ ID NO: 81332 - DNA, 1092 bp, Arabidopsis thaliana
  misc_feature (1)..(1092): Ceres Seq. ID no. 12659350
  misc_feature: MA Experiment ID: 20000440 Result: Down-regulated in Transcription
  misc_feature: MA Experiment 20000440 PARAMETER Experiment Name: At_Closed-Flower__Sub_P Parameter: Tissue Value: Closed Flower vs. Whole Plant
atgaaaaccttcaacgagtccaatggaacaaatgcaaatgtcctgatggtaggactcacgctcgtccaagccgctgctgctaaaggagcggtgtgtctggatgggtcagtgcctggatatcatttgtgtcgcgggtatggttcaggagcaaacaactggatcattcagttgcagggaggtgcatggtgtgacagcatacaaaactgtcagagccgtaaagggagtggttatggatcatctaccttaatggagaaagagttggcatttttaggattactaagcaataaagccgctgaaaatccagacttttacaattggaacaaagtaaaagtccggtattgtgatggtgcatcctttgatggtgacagcgaaaacaaggcggcacaacttcagtatagaggaaagcgtatatttttagctgtcatggaagatttgatggaaaagggaatgcgtcaggcaaaacaggctttgctcagcggatgttcttctgggggtctttctgccattttacgatgcgatgatttcaataacttgtttcctcctaccaccacagtaaaatgcatgagcgatgctggcttcttcctcgacgccgttgatgtatctggaggtcattctttaaggcgtatgtattctggtgttgtgaacactcagggtttgcaaaacacacttcctcccacttgtacaagccatatcaaaccatttttgtgttttttccctcaatacataatcaaccaagtcaagaccccgttgtttattctcaactcgggatttgattcgtggcagattggaaatagtttagccccaccatctgctgataagagtggcagttggcataactgcagttttagctttaggtgcactgcctctcagatgcacttcttagaaggtttcaagatgagcatgttagatgcgttgaagaccttttcgaagtttagcaagaatggagttttaattacctcgggatgggctcattgtcaagcggagagacaagatacttggtttcctggatactctggagcgggcaaagctaaggggattgctgtggctgttggagattggtatttcgaaagaacaaaacagaatagctcatag

SEQ ID NO: 81333 - protein, 363 aa, Arabidopsis thaliana
  peptide (1)..(363): Ceres Seq. ID no. 12659351
  misc_feature (1)..(363): Pfam Name: Pectinacetylesterase Pfam Description: Pectinacetylesterase
  misc_feature (1)..(363): Homolog of NCBI NO: 25347291 NR Description: hypothetical protein [imported] - Arabidopsis >gi|3482930|gb|AAC33215.1| Similar to pectinacetylesterase
  misc_feature (1)..(363): Homolog of NCBI NO: 30681218 NR Description: pectinacetylesterase, putative [Arabidopsis
  misc_feature (2)..(357): Homolog of NCBI NO: 25347293 NR Description: probable pectinacetylesterase precursor T8L23.6 - Arabidopsis thaliana >gi|12321351|gb|AAG50747.1|AC079733_15
  misc_feature (2)..(357): Homolog of NCBI NO: 30696158 NR Description: pectinacetylesterase, putative [Arabidopsis
  misc_feature (2)..(357): Homolog of NCBI NO: 21703105 NR Description: At1g57590/T8L23_6 [Arabidopsis thaliana]
  misc_feature (10)..(359): Homolog of NCBI NO: 18397406 NR Description: pectinacetylesterase, putative; protein id: supported by cDNA: gi_15292826, supported by cDNA: gi_16226324, by cDNA: gi_20465792 [Arabidopsis thaliana]
  misc_feature (12)..(358): Homolog of NCBI NO: 15226462 NR Description: pectinacetylesterase, putative; protein id: supported by cDNA: gi_15450606 [Arabidopsis thaliana]
  misc_feature (10)..(359): Homolog of NCBI NO: 7487997 NR Description: pectin acetylesterase homolog F21E10.11 - thaliana >gi|3047082|gb|AAC13595.1| similar to Vigna radiata
  misc_feature (13)..(359): Homolog of NCBI NO: 28392968 NR Description: putative pectinacetylesterase [Arabidopsis >gi|28827554|gb|AAO50621.1| putative pectinacetylesterase
  misc_feature (10)..(226): Homolog of NCBI NO: 6714404 NR Description: putative pectinacetylesterase [Arabidopsis
MKTFNESNGTNANVLMVGLTLVQAAAAKGAVCLDGSVPGYHLCRGYGSGANNWIIQLQGGAWCDSIQNCQSRKGSGYGSSTLMEKELAFLGLLSNKAAENPDFYNWNKVKVRYCDGASFDGDSENKAAQLQYRGKRIFLAVMEDLMEKGMRQAKQALLSGCSSGGLSAILRCDDFNNLFPPTTTVKCMSDAGFFLDAVDVSGGHSLRRMYSGVVNTQGLQNTLPPTCTSHIKPFLCFFPQYIINQVKTPLFILNSGFDSWQIGNSLAPPSADKSGSWHNCSFSFRCTASQMHFLEGFKMSMLDALKTFSKFSKNGVLITSGWAHCQAERQDTWFPGYSGAGKAKGIAVAVGDWYFERTKQNSS

SEQ ID NO: 81334 - protein, 348 aa, Arabidopsis thaliana
  peptide (1)..(348): Ceres Seq. ID no. 12659352
  misc_feature (1)..(348): Pfam Name: Pectinacetylesterase Pfam Description: Pectinacetylesterase
  misc_feature (1)..(348): Homolog of NCBI NO: 25347291 NR Description: hypothetical protein [imported] - Arabidopsis >gi|3482930|gb|AAC33215.1| Similar to pectinacetylesterase
  misc_feature (1)..(348): Homolog of NCBI NO: 30681218 NR Description: pectinacetylesterase, putative [Arabidopsis
  misc_feature (1)..(342): Homolog of NCBI NO: 25347293 NR Description: probable pectinacetylesterase precursor T8L23.6 - Arabidopsis thaliana >gi|12321351|gb|AAG50747.1|AC079733_15
  misc_feature (1)..(342): Homolog of NCBI NO: 30696158 NR Description: pectinacetylesterase, putative [Arabidopsis
  misc_feature (1)..(342): Homolog of NCBI NO: 21703105 NR Description: At1g57590/T8L23_6 [Arabidopsis thaliana]
  misc_feature (1)..(344): Homolog of NCBI NO: 18397406 NR Description: pectinacetylesterase, putative; protein id: supported by cDNA: gi_15292826, supported by cDNA: gi_16226324, by cDNA: gi_20465792 [Arabidopsis thaliana]
  misc_feature (1)..(343): Homolog of NCBI NO: 15226462 NR Description: pectinacetylesterase, putative; protein id: supported by cDNA: gi_15450606 [Arabidopsis thaliana]
  misc_feature (1)..(344): Homolog of NCBI NO: 7487997 NR Description: pectin acetylesterase homolog F21E10.11 - thaliana >gi|3047082|gb|AAC13595.1| similar to Vigna radiata
  misc_feature (1)..(344): Homolog of NCBI NO: 28392968 NR Description: putative pectinacetylesterase [Arabidopsis >gi|28827554|gb|AAO50621.1| putative pectinacetylesterase
  misc_feature (1)..(211): Homolog of NCBI NO: 6714404 NR Description: putative pectinacetylesterase [Arabidopsis
MVGLTLVQAAAAKGAVCLDGSVPGYHLCRGYGSGANNWIIQLQGGAWCDSIQNCQSRKGSGYGSSTLMEKELAFLGLLSNKAAENPDFYNWNKVKVRYCDGASFDGDSENKAAQLQYRGKRIFLAVMEDLMEKGMRQAKQALLSGCSSGGLSAILRCDDFNNLFPPTTTVKCMSDAGFFLDAVDVSGGHSLRRMYSGVVNTQGLQNTLPPTCTSHIKPFLCFFPQYIINQVKTPLFILNSGFDSWQIGNSLAPPSADKSGSWHNCSFSFRCTASQMHFLEGFKMSMLDALKTFSKFSKNGVLITSGWAHCQAERQDTWFPGYSGAGKAKGIAVAVGDWYFERTKQNSS

SEQ ID NO: 81335 - protein, 281 aa, Arabidopsis thaliana
  peptide (1)..(281): Ceres Seq. ID no. 12659353
  misc_feature (1)..(281): Pfam Name: Pectinacetylesterase Pfam Description: Pectinacetylesterase
  misc_feature (1)..(281): Homolog of NCBI NO: 25347291 NR Description: hypothetical protein [imported] - Arabidopsis >gi|3482930|gb|AAC33215.1| Similar to pectinacetylesterase
  misc_feature (1)..(281): Homolog of NCBI NO: 30681218 NR Description: pectinacetylesterase, putative [Arabidopsis
  misc_feature (1)..(275): Homolog of NCBI NO: 25347293 NR Description: probable pectinacetylesterase precursor T8L23.6 - Arabidopsis thaliana >gi|12321351|gb|AAG50747.1|AC079733_15
  misc_feature (1)..(275): Homolog of NCBI NO: 30696158 NR Description: pectinacetylesterase, putative [Arabidopsis
  misc_feature (1)..(275): Homolog of NCBI NO: 21703105 NR Description: At1g57590/T8L23_6 [Arabidopsis thaliana]
  misc_feature (1)..(277): Homolog of NCBI NO: 18397406 NR Description: pectinacetylesterase, putative; protein id: supported by cDNA: gi_15292826, supported by cDNA: gi_16226324, by cDNA: gi_20465792 [Arabidopsis thaliana]
  misc_feature (1)..(276): Homolog of NCBI NO: 15226462 NR Description: pectinacetylesterase, putative; protein id: supported by cDNA: gi_15450606 [Arabidopsis thaliana]
  misc_feature (1)..(277): Homolog of NCBI NO: 7487997 NR Description: pectin acetylesterase homolog F21E10.11 - thaliana >gi|3047082|gb|AAC13595.1| similar to Vigna radiata
  misc_feature (1)..(277): Homolog of NCBI NO: 28392968 NR Description: putative pectinacetylesterase [Arabidopsis >gi|28827554|gb|AAO50621.1| putative pectinacetylesterase
  misc_feature (1)..(144): Homolog of NCBI NO: 6714404 NR Description: putative pectinacetylesterase [Arabidopsis
MEKELAFLGLLSNKAAENPDFYNWNKVKVRYCDGASFDGDSENKAAQLQYRGKRIFLAVMEDLMEKGMRQAKQALLSGCSSGGLSAILRCDDFNNLFPPTTTVKCMSDAGFFLDAVDVSGGHSLRRMYSGVVNTQGLQNTLPPTCTSHIKPFLCFFPQYIINQVKTPLFILNSGFDSWQIGNSLAPPSADKSGSWHNCSFSFRCTASQMHFLEGFKMSMLDALKTFSKFSKNGVLITSGWAHCQAERQDTWFPGYSGAGKAKGIAVAVGDWYFERTKQNSS

SEQ ID NO: 81336 - DNA, 1151 bp, Arabidopsis thaliana
  misc_feature (1)..(1151): Ceres Seq. ID no. 12659354
  misc_feature: MA Experiment ID: 20000495 Result: Down-regulated in Transcription
  misc_feature: MA Experiment 20000495 PARAMETER Experiment Name: At_Guard_Cells_P Parameter: Harvest Date Value: 8/2/2002
  misc_feature: MA Experiment 20000495 PARAMETER Experiment Name: At_Guard_Cells_P Parameter: Organism Value: A. thaliana
  misc_feature: MA Experiment 20000495 PARAMETER Experiment Name: At_Guard_Cells_P Parameter: Tissue Value: Guard Cells vs. Leaves
  misc_feature: MA Experiment ID: 20001247 Result: Up-regulated in Transcription
  misc_feature: MA Experiment 20001247 PARAMETER Experiment Name: At_Far-red-induction_P Parameter: Age (day) Value: 7
  misc_feature: MA Experiment 20001247 PARAMETER Experiment Name: At_Far-red-induction_P Parameter: Light Value: Far-red vs. White
  misc_feature: MA Experiment 20001247 PARAMETER Experiment Name: At_Far-red-induction_P Parameter: Organism Value: A. thaliana
  misc_feature: MA Experiment 20001247 PARAMETER Experiment Name: At_Far-red-induction_P Parameter: Plant Line Value: Columbia
  misc_feature: MA Experiment 20001247 PARAMETER Experiment Name: At_Far-red-induction_P Parameter: Timepoint (hr) Value: 1
  misc_feature: MA Experiment 20001247 PARAMETER Experiment Name: At_Far-red-induction_P Parameter: Tissue Value: Whole Plant
  misc_feature: MA Experiment ID: 20001248 Result: Up-regulated in Transcription
  misc_feature: MA Experiment 20001248 PARAMETER Experiment Name: At_Far-red-induction_P Parameter: Age (day) Value: 7
  misc_feature: MA Experiment 20001248 PARAMETER Experiment Name: At_Far-red-induction_P Parameter: Light Value: Far-red vs. White
  misc_feature: MA Experiment 20001248 PARAMETER Experiment Name: At_Far-red-induction_P Parameter: Organism Value: A. thaliana
  misc_feature: MA Experiment 20001248 PARAMETER Experiment Name: At_Far-red-induction_P Parameter: Plant Line Value: Columbia
  misc_feature: MA Experiment 20001248 PARAMETER Experiment Name: At_Far-red-induction_P Parameter: Timepoint (hr) Value: 4
  misc_feature: MA Experiment 20001248 PARAMETER Experiment Name: At_Far-red-induction_P Parameter: Tissue Value: Whole Plant
  misc_feature: MA Experiment ID: 20001450 Result: Up-regulated in Transcription
  misc_feature: MA Experiment 20001450 PARAMETER Experiment Name: At_Far-red-induction_P Parameter: Age (day) Value: 7
  misc_feature: MA Experiment 20001450 PARAMETER Experiment Name: At_Far-red-induction_P Parameter: Light Value: Far-red vs. White
  misc_feature: MA Experiment 20001450 PARAMETER Experiment Name: At_Far-red-induction_P Parameter: Organism Value: A. thaliana
  misc_feature: MA Experiment 20001450 PARAMETER Experiment Name: At_Far-red-induction_P Parameter: Plant Line Value: Columbia
  misc_feature: MA Experiment 20001450 PARAMETER Experiment Name: At_Far-red-induction_P Parameter: Timepoint (hr) Value: 8
  misc_feature: MA Experiment 20001450 PARAMETER Experiment Name: At_Far-red-induction_P Parameter: Tissue Value: Whole Plant
  misc_feature: MA Experiment ID: 20001905 Result: Up-regulated in Transcription
  misc_feature: MA Experiment 20001905 PARAMETER Experiment Name: At_Drought_Reproduction_P Parameter: Age (day) Value: 40
  misc_feature: MA Experiment 20001905 PARAMETER Experiment Name: At_Drought_Reproduction_P Parameter: Organism Value: A. thaliana
  misc_feature: MA Experiment 20001905 PARAMETER Experiment Name: At_Drought_Reproduction_P Parameter: Plant Line Value: WS
  misc_feature: MA Experiment 20001905 PARAMETER Experiment Name: At_Drought_Reproduction_P Parameter: Timepoint (day) Value: 10
  misc_feature: MA Experiment 20001905 PARAMETER Experiment Name: At_Drought_Reproduction_P Parameter: Tissue Value: Rosettes
  misc_feature: MA Experiment 20001905 PARAMETER Experiment Name: At_Drought_Reproduction_P Parameter: Treatment Value: Drought vs. No Drought
atcttttaatcgtttgatctgtgaacctaacttttattcaatttcgctttcaccaaatccagagctaagatcttcagattcgtgggtcaaataatgtggtcaatgggtttgataaggcgtacggcaatgtccaatgccattagagcttcttcgcaaaggacatggcttggtcacggtggattaagaagctgcgtcaccgtcaaaacaccgtcggaggatgaagaggagaagaagaaagagataactatagcggaagcgaagaagctaatgaggcttgtgaatgttgaagacatgaagaagaagcttgttggtgtggctgatagagatgttgtctcttactctacacttttagaagcttctcaaggaatgggtatcgctagatctcccgatgaagctcatgtctttgctcgtgttcttgacgatgctggcgttgtcttgatctttcgtgataaagtctatcttcacccagacaaggtggtggatctgattagaagagcgatgcctttggaccagaatccagaggaagatcaaatcaaggaagaattcaacaaattgagaatcatgaaagaagagattgatgttttggctcatagacaagtgaggaagattctttggtgtggtttagctacttcgatggttcaaattggactcttttttagattaactttctgggaattctcatgggatgtgatggaaccaatcactttcttcgctacagcgactggaatcattgtgggttatgcttatttcttgatgacttcgagagatccgacatatcaggatttcatgaagaggctcttcttgtcgagacagaggaagttgttgaagagtcataagtttgactgcgagaggtttaaggaattggagaggttatttaaaatgacgtcgtcttgtcatgcagctgcgtctataaggaatcgtgttggattagaacttgatctcgaggatgctttgcagagtcgcagggactgattattatgaaaaactttcttcatgtcctccggtggttcatcaaactgaagaagaagatgatcagtccttgcaaaagagtgacaaagattgttttccgtcatcttcttctacttcttatacataagtaaccattgacattgtttattacagtgacgataacagattttaaatgttctttt

SEQ ID NO: 81337 - protein, 292 aa, Arabidopsis thaliana
  peptide (1)..(292): Ceres Seq. ID no. 12659355
  misc_feature (88)..(245): Pfam Name: Protein of unknown function, DUF607 Pfam Description: Protein of unknown function, DUF607
  misc_feature (1)..(292): Homolog of NCBI NO: 18391039 NR Description: Expressed protein; protein id: At1g09575.1,
  misc_feature (12)..(245): Homolog of NCBI NO: 25402554 NR Description: hypothetical protein [imported] - Arabidopsis >gi|3482932|gb|AAC33217.1| Hypothetical protein [Arabidopsis
  misc_feature (1)..(292): Homolog of NCBI NO: 22330290 NR Description: hypothetical protein; protein id: At1g57610.1, by cDNA: gi_17979162 [Arabidopsis thaliana]
  misc_feature (4)..(292): Homolog of NCBI NO: 25404155 NR Description: hypothetical protein T8L23.8 [imported] - thaliana >gi|12321356|gb|AAG50752.1|AC079733_20 hypothetical
  misc_feature (13)..(262): Homolog of NCBI NO: 34909244 NR Description: B1148D12.10 [Oryza sativa (japonica
  misc_feature (45)..(270): Homolog of NCBI NO: 15224063 NR Description: hypothetical protein; protein id: At2g23790.1
  misc_feature (45)..(270): Homolog of NCBI NO: 24496456 NR Description: hypothetical protein [Arabidopsis thaliana]
  misc_feature (38)..(262): Homolog of NCBI NO: 14596231 NR Description: Unknown protein [Arabidopsis thaliana]
  misc_feature (38)..(262): Homolog of NCBI NO: 15240047 NR Description: putative protein; protein id: At5g66650.1, by cDNA: gi_14596230 [Arabidopsis thaliana] contains similarity to unknown
  misc_feature (44)..(261): Homolog of NCBI NO: 15234535 NR Description: putative protein; protein id: At4g36820.1
MWSMGLIRRTAMSNAIRASSQRTWLGHGGLRSCVTVKTPSEDEEEKKKEITIAEAKKLMRLVNVEDMKKKLVGVADRDVVSYSTLLEASQGMGIARSPDEAHVFARVLDDAGVVLIFRDKVYLHPDKVVDLIRRAMPLDQNPEEDQIKEEFNKLRIMKEEIDVLAHRQVRKILWCGLATSMVQIGLFFRLTFWEFSWDVMEPITFFATATGIIVGYAYFLMTSRDPTYQDFMKRLFLSRQRKLLKSHKFDCERFKELERLFKMTSSCHAAASIRNRVGLELDLEDALQSRRD

SEQ ID NO: 81338 - protein, 289 aa, Arabidopsis thaliana
  peptide (1)..(289): Ceres Seq. ID no. 12659356
  misc_feature (85)..(242): Pfam Name: Protein of unknown function, DUF607 Pfam Description: Protein of unknown function, DUF607
  misc_feature (1)..(289): Homolog of NCBI NO: 18391039 NR Description: Expressed protein; protein id: At1g09575.1,
  misc_feature (9)..(242): Homolog of NCBI NO: 25402554 NR Description: hypothetical protein [imported] - Arabidopsis >gi|3482932|gb|AAC33217.1| Hypothetical protein [Arabidopsis
  misc_feature (1)..(289): Homolog of NCBI NO: 22330290 NR Description: hypothetical protein; protein id: At1g57610.1, by cDNA: gi_17979162 [Arabidopsis thaliana]
  misc_feature (1)..(289): Homolog of NCBI NO: 25404155 NR Description: hypothetical protein T8L23.8 [imported] - thaliana >gi|12321356|gb|AAG50752.1|AC079733_20 hypothetical
  misc_feature (10)..(259): Homolog of NCBI NO: 34909244 NR Description: B1148D12.10 [Oryza sativa (japonica
  misc_feature (42)..(267): Homolog of NCBI NO: 15224063 NR Description: hypothetical protein; protein id: At2g23790.1
  misc_feature (42)..(267): Homolog of NCBI NO: 24496456 NR Description: hypothetical protein [Arabidopsis thaliana]
  misc_feature (35)..(259): Homolog of NCBI NO: 14596231 NR Description: Unknown protein [Arabidopsis thaliana]
  misc_feature (35)..(259): Homolog of NCBI NO: 15240047 NR Description: putative protein; protein id: At5g66650.1, by cDNA: gi_14596230 [Arabidopsis thaliana] contains similarity to unknown
  misc_feature (41)..(258): Homolog of NCBI NO: 15234535 NR Description: putative protein; protein id: At4g36820.1
MGLIRRTAMSNAIRASSQRTWLGHGGLRSCVTVKTPSEDEEEKKKEITIAEAKKLMRLVNVEDMKKKLVGVADRDVVSYSTLLEASQGMGIARSPDEAHVFARVLDDAGVVLIFRDKVYLHPDKVVDLIRRAMPLDQNPEEDQIKEEFNKLRIMKEEIDVLAHRQVRKILWCGLATSMVQIGLFFRLTFWEFSWDVMEPITFFATATGIIVGYAYFLMTSRDPTYQDFMKRLFLSRQRKLLKSHKFDCERFKELERLFKMTSSCHAAASIRNRVGLELDLEDALQSRRD

SEQ ID NO: 81339 - protein, 281 aa, Arabidopsis thaliana
  peptide (1)..(281): Ceres Seq. ID no. 12659357
  misc_feature (77)..(234): Pfam Name: Protein of unknown function, DUF607 Pfam Description: Protein of unknown function, DUF607
  misc_feature (1)..(281): Homolog of NCBI NO: 18391039 NR Description: Expressed protein; protein id: At1g09575.1,
  misc_feature (1)..(234): Homolog of NCBI NO: 25402554 NR Description: hypothetical protein [imported] - Arabidopsis >gi|3482932|gb|AAC33217.1| Hypothetical protein [Arabidopsis
  misc_feature (1)..(281): Homolog of NCBI NO: 22330290 NR Description: hypothetical protein; protein id: At1g57610.1, by cDNA: gi_17979162 [Arabidopsis thaliana]
  misc_feature (1)..(281): Homolog of NCBI NO: 25404155 NR Description: hypothetical protein T8L23.8 [imported] - thaliana >gi|12321356|gb|AAG50752.1|AC079733_20 hypothetical
  misc_feature (2)..(251): Homolog of NCBI NO: 34909244 NR Description: B1148D12.10 [Oryza sativa (japonica
  misc_feature (34)..(259): Homolog of NCBI NO: 15224063 NR Description: hypothetical protein; protein id: At2g23790.1
  misc_feature (34)..(259): Homolog of NCBI NO: 24496456 NR Description: hypothetical protein [Arabidopsis thaliana]
  misc_feature (27)..(251): Homolog of NCBI NO: 14596231 NR Description: Unknown protein [Arabidopsis thaliana]
  misc_feature (27)..(251): Homolog of NCBI NO: 15240047 NR Description: putative protein; protein id: At5g66650.1, by cDNA: gi_14596230 [Arabidopsis thaliana] contains similarity to unknown
  misc_feature (33)..(250): Homolog of NCBI NO: 15234535 NR Description: putative protein; protein id: At4g36820.1
MSNAIRASSQRTWLGHGGLRSCVTVKTPSEDEEEKKKEITIAEAKKLMRLVNVEDMKKKLVGVADRDVVSYSTLLEASQGMGIARSPDEAHVFARVLDDAGVVLIFRDKVYLHPDKVVDLIRRAMPLDQNPEEDQIKEEFNKLRIMKEEIDVLAHRQVRKILWCGLATSMVQIGLFFRLTFWEFSWDVMEPITFFATATGIIVGYAYFLMTSRDPTYQDFMKRLFLSRQRKLLKSHKFDCERFKELERLFKMTSSCHAAASIRNRVGLELDLEDALQSRRD

SEQ ID NO: 81340 - DNA, 849 bp, Arabidopsis thaliana
  misc_feature (1)..(849): Ceres Seq. ID no. 12659358
  misc_feature: MA Experiment ID: 20000184 Result: Down-regulated in Transcription
  misc_feature: MA Experiment 20000184 PARAMETER Experiment Name: At_Shoots__P Parameter: Age (day) Value: 7
  misc_feature: MA Experiment 20000184 PARAMETER Experiment Name: At_Shoots__P Parameter: Tissue Value: Shoots vs. Whole Plant
  misc_feature: MA Experiment ID: 20000185 Result: Down-regulated in Transcription
  misc_feature: MA Experiment 20000185 PARAMETER Experiment Name: At_Roots__P Parameter: Age (day) Value: 7 vs. 21
  misc_feature: MA Experiment 20000185 PARAMETER Experiment Name: At_Roots__P Parameter: Organism Value: A. thaliana
  misc_feature: MA Experiment 20000185 PARAMETER Experiment Name: At_Roots__P Parameter: Tissue Value: Roots vs. Whole Plant
  misc_feature: MA Experiment ID: 20000438 Result: Down-regulated in Transcription
  misc_feature: MA Experiment 20000438 PARAMETER Experiment Name: At_Shoots__P Parameter: Age (day) Value: 14
  misc_feature: MA Experiment 20000438 PARAMETER Experiment Name: At_Shoots__P Parameter: Tissue Value: Shoots vs. Whole Plant
  misc_feature: MA Experiment ID: 20001556 Result: Down-regulated in Transcription
  misc_feature: MA Experiment 20001556 PARAMETER Experiment Name: At_Drought_Soil_Dry_P Parameter: Age (day) Value: 26
  misc_feature: MA Experiment 20001556 PARAMETER Experiment Name: At_Drought_Soil_Dry_P Parameter: Organism Value: A. thaliana
  misc_feature: MA Experiment 20001556 PARAMETER Experiment Name: At_Drought_Soil_Dry_P Parameter: Plant Line Value: WS
  misc_feature: MA Experiment 20001556 PARAMETER Experiment Name: At_Drought_Soil_Dry_P Parameter: Post Timepoint (hr) Value: None
  misc_feature: MA Experiment 20001556 PARAMETER Experiment Name: At_Drought_Soil_Dry_P Parameter: Post-Treatment Value: None
  misc_feature: MA Experiment 20001556 PARAMETER Experiment Name: At_Drought_Soil_Dry_P Parameter: Timepoint (day) Value: 12
  misc_feature: MA Experiment 20001556 PARAMETER Experiment Name: At_Drought_Soil_Dry_P Parameter: Treatment Value: Drought vs. No Drought
  misc_feature: MA Experiment ID: 20001558 Result: Down-regulated in Transcription
  misc_feature: MA Experiment 20001558 PARAMETER Experiment Name: At_Drought_Soil_Dry_P Parameter: Age (day) Value: 27
  misc_feature: MA Experiment 20001558 PARAMETER Experiment Name: At_Drought_Soil_Dry_P Parameter: Organism Value: A. thaliana
  misc_feature: MA Experiment 20001558 PARAMETER Experiment Name: At_Drought_Soil_Dry_P Parameter: Plant Line Value: WS
  misc_feature: MA Experiment 20001558 PARAMETER Experiment Name: At_Drought_Soil_Dry_P Parameter: Post Timepoint (hr) Value: 6
  misc_feature: MA Experiment 20001558 PARAMETER Experiment Name: At_Drought_Soil_Dry_P Parameter: Post-Treatment Value: Re-Water vs. No Drought
  misc_feature: MA Experiment 20001558 PARAMETER Experiment Name: At_Drought_Soil_Dry_P Parameter: Timepoint (day) Value: 13
  misc_feature: MA Experiment 20001558 PARAMETER Experiment Name: At_Drought_Soil_Dry_P Parameter: Treatment Value: Drought vs. No Drought
  misc_feature: MA Experiment ID: 20001768 Result: Up-regulated in Transcription
  misc_feature: MA Experiment 20001768 PARAMETER Experiment Name: At_Far-red-enriched-adult_P Parameter: Age (day) Value: 28
  misc_feature: MA Experiment 20001768 PARAMETER Experiment Name: At_Far-red-enriched-adult_P Parameter: Light Value: Far-red enriched vs. White
  misc_feature: MA Experiment 20001768 PARAMETER Experiment Name: At_Far-red-enriched-adult_P Parameter: Organism Value: A. thaliana
  misc_feature: MA Experiment 20001768 PARAMETER Experiment Name: At_Far-red-enriched-adult_P Parameter: Plant Line Value: Columbia
  misc_feature: MA Experiment 20001768 PARAMETER Experiment Name: At_Far-red-enriched-adult_P Parameter: Timepoint (hr) Value: 1
  misc_feature: MA Experiment 20001768 PARAMETER Experiment Name: At_Far-red-enriched-adult_P Parameter: Tissue Value: Aerial
  misc_feature: MA Experiment ID: 20001773 Result: Up-regulated in Transcription
  misc_feature: MA Experiment 20001773 PARAMETER Experiment Name: At_Far-red-enriched-adult_P Parameter: Age (day) Value: 30
  misc_feature: MA Experiment 20001773 PARAMETER Experiment Name: At_Far-red-enriched-adult_P Parameter: Light Value: Far-red enriched vs. White
  misc_feature: MA Experiment 20001773 PARAMETER Experiment Name: At_Far-red-enriched-adult_P Parameter: Organism Value: A. thaliana
  misc_feature: MA Experiment 20001773 PARAMETER Experiment Name: At_Far-red-enriched-adult_P Parameter: Plant Line Value: Columbia
  misc_feature: MA Experiment 20001773 PARAMETER Experiment Name: At_Far-red-enriched-adult_P Parameter: Timepoint (hr) Value: 48
  misc_feature: MA Experiment 20001773 PARAMETER Experiment Name: At_Far-red-enriched-adult_P Parameter: Tissue Value: Aerial
atgaggcctaaagcaaatcaaaaccacaagctgaaggttctccttgtttttcttcttgccaccttaattctcatcttcatcgtgagatcaactctgacatcttcacaggaacaccagactccacaagagacaagatcaacgcgttgctctggtgcctgcaataagctaccacgttccctcgcacaagccctgatccattactcgacctcagttatcacaccacaacaaacgctcaaagagatagcggtaagcagtagagtactcggcaagaagtcaccctgcaatttcttggtgtttggtctaggccatgacagcctcatgtggagctctctcaactatggaggccggactgtgtttcttgaagaagatgaagcatggataaaacagatcaagagacggtttccgatgctggaatcgtaccatgtaacatatgacagtaaagtcaatcaagccgataatctcatagaagtcggaaaaggacctgaatgcacagccattggagatccaaggtactcaatgtgtcaactagcactcaagggtttgcctgcagaaatttatgagaccggttgggatctaatcatggttgatgcaccgactggctactacgatgaggctcctgggagaatgacagcaatttacactgcgggaatgatggcaaggaacaggaaacagggaggagagactgatgtgtttgtgcatgatgttaacagggaaatagaagacaagttttctaaggctttcttgtgtgaagggtacatgaagaaacaggaagggagactaaggcattttattatccctagctatagagatggatcagaatcagaatcaaatagacccttttgtccatag

SEQ ID NO: 81341 - protein, 282 aa, Arabidopsis thaliana
  peptide (1)..(282): Ceres Seq. ID no. 12659359
  misc_feature (38)..(281): Pfam Name: Protein of unknown function (DUF579) Pfam Description: Protein of unknown function (DUF579)
  misc_feature (1)..(282): Homolog of NCBI NO: 15217566 NR Description: unknown protein; protein id: At1g09610.1
  misc_feature (29)..(282): Homolog of NCBI NO: 25402555 NR Description: hypothetical protein [imported] - Arabidopsis >gi|3482933|gb|AAC33218.1| Similar to cdc2 protein kinases
  misc_feature (1)..(282): Homolog of NCBI NO: 18398986 NR Description: expressed protein; protein id: At1g33800.1, by cDNA: 114466., supported by cDNA: gi_17979548, supported by gi_20453344 [Arabidopsis thaliana] >gi|25354651|pir||E86461
  misc_feature (15)..(282): Homolog of NCBI NO: 15234881 NR Description: putative protein; protein id: At4g09990.1
  misc_feature (13)..(282): Homolog of NCBI NO: 18409879 NR Description: hypothetical protein; protein id: At1g71690.1
  misc_feature (13)..(282): Homolog of NCBI NO: 25354648 NR Description: hypothetical protein F14O23.3 [imported] - thaliana >gi|7239492|gb|AAF43218.1|AC012654_2 EST gb|AI999169
  misc_feature (11)..(281): Homolog of NCBI NO: 15220402 NR Description: unknown protein; protein id: At1g67330.1 thaliana] >gi|9828617|gb|AAG00240.1|AC002130_5 F1N21.15
  misc_feature (122)..(282): Homolog of NCBI NO: 27754730 NR Description: unknown protein [Arabidopsis thaliana]
  misc_feature (13)..(281): Homolog of NCBI NO: 18396558 NR Description: expressed protein; protein id: At1g27930.1, by cDNA: 1367., supported by cDNA: gi_15215712 [Arabidopsis
  misc_feature (13)..(281): Homolog of NCBI NO: 21537399 NR Description: unknown [Arabidopsis thaliana]
MRPKANQNHKLKVLLVFLLATLILIFIVRSTLTSSQEHQTPQETRSTRCSGACNKLPRSLAQALIHYSTSVITPQQTLKEIAVSSRVLGKKSPCNFLVFGLGHDSLMWSSLNYGGRTVFLEEDEAWIKQIKRRFPMLESYHVTYDSKVNQADNLIEVGKGPECTAIGDPRYSMCQLALKGLPAEIYETGWDLIMVDAPTGYYDEAPGRMTAIYTAGMMARNRKQGGETDVFVHDVNREIEDKFSKAFLCEGYMKKQEGRLRHFIIPSYRDGSESESNRPFCP

SEQ ID NO: 81342 - protein, 176 aa, Arabidopsis thaliana
  peptide (1)..(176): Ceres Seq. ID no. 12659360
  misc_feature (1)..(175): Pfam Name: Protein of unknown function (DUF579) Pfam Description: Protein of unknown function (DUF579)
  misc_feature (1)..(176): Homolog of NCBI NO: 15217566 NR Description: unknown protein; protein id: At1g09610.1
  misc_feature (1)..(176): Homolog of NCBI NO: 25402555 NR Description: hypothetical protein [imported] - Arabidopsis >gi|3482933|gb|AAC33218.1| Similar to cdc2 protein kinases
  misc_feature (1)..(176): Homolog of NCBI NO: 18398986 NR Description: expressed protein; protein id: At1g33800.1, by cDNA: 114466., supported by cDNA: gi_17979548, supported by gi_20453344 [Arabidopsis thaliana] >gi|25354651|pir||E86461
  misc_feature (1)..(176): Homolog of NCBI NO: 15234881 NR Description: putative protein; protein id: At4g09990.1
  misc_feature (1)..(176): Homolog of NCBI NO: 18409879 NR Description: hypothetical protein; protein id: At1g71690.1
  misc_feature (1)..(176): Homolog of NCBI NO: 25354648 NR Description: hypothetical protein F14O23.3 [imported] - thaliana >gi|7239492|gb|AAF43218.1|AC012654_2 EST gb|AI999169
  misc_feature (1)..(175): Homolog of NCBI NO: 15220402 NR Description: unknown protein; protein id: At1g67330.1 thaliana] >gi|9828617|gb|AAG00240.1|AC002130_5 F1N21.15
  misc_feature (16)..(176): Homolog of NCBI NO: 27754730 NR Description: unknown protein [Arabidopsis thaliana]
  misc_feature (1)..(175): Homolog of NCBI NO: 18396558 NR Description: expressed protein; protein id: At1g27930.1, by cDNA: 1367., supported by cDNA: gi_15215712 [Arabidopsis
  misc_feature (1)..(175): Homolog of NCBI NO: 21537399 NR Description: unknown [Arabidopsis thaliana]
MWSSLNYGGRTVFLEEDEAWIKQIKRRFPMLESYHVTYDSKVNQADNLIEVGKGPECTAIGDPRYSMCQLALKGLPAEIYETGWDLIMVDAPTGYYDEAPGRMTAIYTAGMMARNRKQGGETDVFVHDVNREIEDKFSKAFLCEGYMKKQEGRLRHFIIPSYRDGSESESNRPFCP

SEQ ID NO: 81343 - protein, 147 aa, Arabidopsis thaliana
  peptide (1)..(147): Ceres Seq. ID no. 12659361
  misc_feature (1)..(146): Pfam Name: Protein of unknown function (DUF579) Pfam Description: Protein of unknown function (DUF579)
  misc_feature (1)..(147): Homolog of NCBI NO: 15217566 NR Description: unknown protein; protein id: At1g09610.1
  misc_feature (1)..(147): Homolog of NCBI NO: 25402555 NR Description: hypothetical protein [imported] - Arabidopsis >gi|3482933|gb|AAC33218.1| Similar to cdc2 protein kinases
  misc_feature (1)..(147): Homolog of NCBI NO: 18398986 NR Description: expressed protein; protein id: At1g33800.1, by cDNA: 114466., supported by cDNA: gi_17979548, supported by gi_20453344 [Arabidopsis thaliana] >gi|25354651|pir||E86461
  misc_feature (1)..(147): Homolog of NCBI NO: 15234881 NR Description: putative protein; protein id: At4g09990.1
  misc_feature (1)..(147): Homolog of NCBI NO: 18409879 NR Description: hypothetical protein; protein id: At1g71690.1
  misc_feature (1)..(147): Homolog of NCBI NO: 25354648 NR Description: hypothetical protein F14O23.3 [imported] - thaliana >gi|7239492|gb|AAF43218.1|AC012654_2 EST gb|AI999169
  misc_feature (1)..(146): Homolog of NCBI NO: 15220402 NR Description: unknown protein; protein id: At1g67330.1 thaliana] >gi|9828617|gb|AAG00240.1|AC002130_5 F1N21.15
  misc_feature (1)..(147): Homolog of NCBI NO: 27754730 NR Description: unknown protein [Arabidopsis thaliana]
  misc_feature (1)..(146): Homolog of NCBI NO: 18396558 NR Description: expressed protein; protein id: At1g27930.1, by cDNA: 1367., supported by cDNA: gi_15215712 [Arabidopsis
  misc_feature (1)..(146): Homolog of NCBI NO: 21537399 NR Description: unknown [Arabidopsis thaliana]
MLESYHVTYDSKVNQADNLIEVGKGPECTAIGDPRYSMCQLALKGLPAEIYETGWDLIMVDAPTGYYDEAPGRMTAIYTAGMMARNRKQGGETDVFVHDVNREIEDKFSKAFLCEGYMKKQEGRLRHFIIPSYRDGSESESNRPFCP

SEQ ID NO: 81344 - DNA, 1824 bp, Arabidopsis thaliana
  misc_feature (1)..(1824): Ceres Seq. ID no. 12659372
  misc_feature: MA Experiment ID: 20000180 Result: Down-regulated in Transcription
  misc_feature: MA Experiment 20000180 PARAMETER Experiment Name: At_Germinating_Seeds_P Parameter: Age (hr) Value: 24 vs. 0
  misc_feature: MA Experiment 20000180 PARAMETER Experiment Name: At_Germinating_Seeds_P Parameter: Tissue Value: Germinating Seeds
  misc_feature: MA Experiment ID: 20001451 Result: Down-regulated in Transcription
  misc_feature: MA Experiment 20001451 PARAMETER Experiment Name: At_Far-red-induction_P Parameter: Age (day) Value: 7
  misc_feature: MA Experiment 20001451 PARAMETER Experiment Name: At_Far-red-induction_P Parameter: Light Value: Far-red vs. White
  misc_feature: MA Experiment 20001451 PARAMETER Experiment Name: At_Far-red-induction_P Parameter: Organism Value: A. thaliana
  misc_feature: MA Experiment 20001451 PARAMETER Experiment Name: At_Far-red-induction_P Parameter: Plant Line Value: Columbia
  misc_feature: MA Experiment 20001451 PARAMETER Experiment Name: At_Far-red-induction_P Parameter: Timepoint (hr) Value: 24
  misc_feature: MA Experiment 20001451 PARAMETER Experiment Name: At_Far-red-induction_P Parameter: Tissue Value: Whole Plant
atgttcagaatcgaaattctaagatgcacactctctcaatctcacccacagagattctctcgtgcatcattcctcttgtcaacatggtactctcaagaatctgtctccgcggcagacaacgacgatgacccagttcttgttaaactctcagttgccatcagagattcttacaaggatccgccgttggagttctcttcgttcactgactgcccctctatcagaaaggtcctgccttcgctcagcgttcatcatgtggttgatctcatcaaccataaccctctctccctcccacaacgttctatcttcgctttcttcaaattcatctcatctcagcctggatttcgttttaccgttgagacttacttcgtcttggctcgttttcttgctgttcacgaaatgttcaccgaagcacagtcacttatcgagctcgtcgtctctcgtaaaggcaaaaactcagcttcttcagttttcatttctttggtagaaatgagagtaacacctatgtgtggtttccttgttgatgctttgatgatcacgtacacggatctaggtttcatacccgatgctattcaatgttttaggctatctcggaagcataggtttgatgttccaattcgtggctgtggcaatttgcttgatcggatgatgaagctgaatccaactgggactatttggggattctatatggagattttggatgctgggtttcccttgaatgtgtacgttttcaatattttgatgaacaaattctgtaaagaaggcaatatatctgatgcacagaaggtgttcgacgaaattactaaaaggagtttgcagcctacagtggttagtttcaacactttgataaatgggtattgtaaagtaggaaacttggatgaagggtttaggctcaaacatcagatggagaaaagcagaacacgcccagatgttttcacctatagtgccttgattaatgcattgtgtaaagagaacaaaatggatggagcacatggcctgtttgatgagatgtgtaagagagggttgatcccaaatgatgttattttcactactttgattcatggtcatagtaggaatggagagattgacttgatgaaagaaagttatcagaagatgttaagtaagggtctgcagcctgatattgttttatataatactttagtaaatggcttttgtaagaacggggatttggtggctgcaaggaatatagttgatggaatgattcgtagaggtctgaggcccgacaaaattacatacacaactcttatagatggattttgtagaggaggagatgtagaaacagctttggagataaggaaggagatggatcagaatgggatagaactcgatagggtgggtttctcagcccttgtttgtggaatgtgcaaagaaggaagagtcattgatgctgaaagagctttaagagagatgctgcgagctggtattaaaccggatgatgtaacctatacaatgatgatggatgcattctgtaagaaaggtgatgctcagaccggtttcaaattgctcaaggaaatgcagagcgatgggcatgttcctagtgttgtgacgtataatgttctgctgaatggtctatgcaaattgggacagatgaagaatgctgatatgttgctagatgccatgcttaatataggggttgttccagatgacatcacatacaacactctattggaaggtcaccatagacatgcaaattcatcgaagcgttatatacagaaaccggagataggtattgtagctgacttggcttcttacaaatcaatagtcaatgagctagatagagcttcaaaagatcaccggaacagataa

SEQ ID NO: 81345 - protein, 607 aa, Arabidopsis thaliana
  peptide (1)..(607): Ceres Seq. ID no. 12659373
  misc_feature (311)..(345): Pfam Name: PPR repeat Pfam Description: PPR repeat
  misc_feature (29)..(607): Homolog of NCBI NO: 38567720 NR Description: B1358B12.18 [Oryza sativa (japonica
  misc_feature (92)..(602): Homolog of NCBI NO: 15242446 NR Description: putative protein; protein id: At5g39710.1
  misc_feature (146)..(563): Homolog of NCBI NO: 15242446 NR Description: putative protein; protein id: At5g39710.1
  misc_feature (82)..(599): Homolog of NCBI NO: 15226583 NR Description: putative salt-inducible protein; protein id:
  misc_feature (50)..(562): Homolog of NCBI NO: 15240891 NR Description: putative protein; protein id: At5g01110.1
  misc_feature (99)..(596): Homolog of NCBI NO: 15221232 NR Description: putative indole-3-acetate protein id: At1g05670.1 [Arabidopsis thaliana]
  misc_feature (104)..(595): Homolog of NCBI NO: 15241049 NR Description: putative protein; protein id: At5g55840.1
  misc_feature (209)..(595): Homolog of NCBI NO: 25404374 NR Description: hypothetical protein F16P17.1 [imported] - thaliana >gi|8493575|gb|AAF75798.1|AC011000_1 Contains multiple
  misc_feature (84)..(597): Homolog of NCBI NO: 15218284 NR Description: hypothetical protein; protein id: At1g09820.1
  misc_feature (102)..(593): Homolog of NCBI NO: 15240991 NR Description: putative protein; protein id: At5g38730.1
MFRIEILRCTLSQSHPQRFSRASFLLSTWYSQESVSAADNDDDPVLVKLSVAIRDSYKDPPLEFSSFTDCPSIRKVLPSLSVHHVVDLINHNPLSLPQRSIFAFFKFISSQPGFRFTVETYFVLARFLAVHEMFTEAQSLIELVVSRKGKNSASSVFISLVEMRVTPMCGFLVDALMITYTDLGFIPDAIQCFRLSRKHRFDVPIRGCGNLLDRMMKLNPTGTIWGFYMEILDAGFPLNVYVFNILMNKFCKEGNISDAQKVFDEITKRSLQPTVVSFNTLINGYCKVGNLDEGFRLKHQMEKSRTRPDVFTYSALINALCKENKMDGAHGLFDEMCKRGLIPNDVIFTTLIHGHSRNGEIDLMKESYQKMLSKGLQPDIVLYNTLVNGFCKNGDLVAARNIVDGMIRRGLRPDKITYTTLIDGFCRGGDVETALEIRKEMDQNGIELDRVGFSALVCGMCKEGRVIDAERALREMLRAGIKPDDVTYTMMMDAFCKKGDAQTGFKLLKEMQSDGHVPSVVTYNVLLNGLCKLGQMKNADMLLDAMLNIGVVPDDITYNTLLEGHHRHANSSKRYIQKPEIGIVADLASYKSIVNELDRASKDHRNR

SEQ ID NO: 81346 - protein, 475 aa, Arabidopsis thaliana
  peptide (1)..(475): Ceres Seq. ID no. 12659374
  misc_feature (179)..(213): Pfam Name: PPR repeat Pfam Description: PPR repeat
  misc_feature (1)..(475): Homolog of NCBI NO: 38567720 NR Description: B1358B12.18 [Oryza sativa (japonica
  misc_feature (1)..(470): Homolog of NCBI NO: 15242446 NR Description: putative protein; protein id: At5g39710.1
  misc_feature (14)..(431): Homolog of NCBI NO: 15242446 NR Description: putative protein; protein id: At5g39710.1
  misc_feature (1)..(467): Homolog of NCBI NO: 15226583 NR Description: putative salt-inducible protein; protein id:
  misc_feature (1)..(430): Homolog of NCBI NO: 15240891 NR Description: putative protein; protein id: At5g01110.1
  misc_feature (1)..(464): Homolog of NCBI NO: 15221232 NR Description: putative indole-3-acetate protein id: At1g05670.1 [Arabidopsis thaliana]
  misc_feature (1)..(463): Homolog of NCBI NO: 15241049 NR Description: putative protein; protein id: At5g55840.1
  misc_feature (77)..(463): Homolog of NCBI NO: 25404374 NR Description: hypothetical protein F16P17.1 [imported] - thaliana >gi|8493575|gb|AAF75798.1|AC011000_1 Contains multiple
  misc_feature (1)..(465): Homolog of NCBI NO: 15218284 NR Description: hypothetical protein; protein id: At1g09820.1
  misc_feature (1)..(461): Homolog of NCBI NO: 15240991 NR Description: putative protein; protein id: At5g38730.1
MFTEAQSLIELVVSRKGKNSASSVFISLVEMRVTPMCGFLVDALMITYTDLGFIPDAIQCFRLSRKHRFDVPIRGCGNLLDRMMKLNPTGTIWGFYMEILDAGFPLNVYVFNILMNKFCKEGNISDAQKVFDEITKRSLQPTVVSFNTLINGYCKVGNLDEGFRLKHQMEKSRTRPDVFTYSALINALCKENKMDGAHGLFDEMCKRGLIPNDVIFTTLIHGHSRNGEIDLMKESYQKMLSKGLQPDIVLYNTLVNGFCKNGDLVAARNIVDGMIRRGLRPDKITYTTLIDGFCRGGDVETALEIRKEMDQNGIELDRVGFSALVCGMCKEGRVIDAERALREMLRAGIKPDDVTYTMMMDAFCKKGDAQTGFKLLKEMQSDGHVPSVVTYNVLLNGLCKLGQMKNADMLLDAMLNIGVVPDDITYNTLLEGHHRHANSSKRYIQKPEIGIVADLASYKSIVNELDRASKDHRNR

SEQ ID NO: 81347 - protein, 445 aa, Arabidopsis thaliana
  peptide (1)..(445): Ceres Seq. ID no. 12659375
  misc_feature (149)..(183): Pfam Name: PPR repeat Pfam Description: PPR repeat
  misc_feature (1)..(445): Homolog of NCBI NO: 38567720 NR Description: B1358B12.18 [Oryza sativa (japonica
  misc_feature (1)..(440): Homolog of NCBI NO: 15242446 NR Description: putative protein; protein id: At5g39710.1
  misc_feature (1)..(401): Homolog of NCBI NO: 15242446 NR Description: putative protein; protein id: At5g39710.1
  misc_feature (1)..(437): Homolog of NCBI NO: 15226583 NR Description: putative salt-inducible protein; protein id:
  misc_feature (1)..(400): Homolog of NCBI NO: 15240891 NR Description: putative protein; protein id: At5g01110.1
  misc_feature (1)..(434): Homolog of NCBI NO: 15221232 NR Description: putative indole-3-acetate protein id: At1g05670.1 [Arabidopsis thaliana]
  misc_feature (1)..(433): Homolog of NCBI NO: 15241049 NR Description: putative protein; protein id: At5g55840.1
  misc_feature (47)..(433): Homolog of NCBI NO: 25404374 NR Description: hypothetical protein F16P17.1 [imported] - thaliana >gi|8493575|gb|AAF75798.1|AC011000_1 Contains multiple
  misc_feature (1)..(435): Homolog of NCBI NO: 15218284 NR Description: hypothetical protein; protein id: At1g09820.1
  misc_feature (1)..(431): Homolog of NCBI NO: 15240991 NR Description: putative protein; protein id: At5g38730.1
MRVTPMCGFLVDALMITYTDLGFIPDAIQCFRLSRKHRFDVPIRGCGNLLDRMMKLNPTGTIWGFYMEILDAGFPLNVYVFNILMNKFCKEGNISDAQKVFDEITKRSLQPTVVSFNTLINGYCKVGNLDEGFRLKHQMEKSRTRPDVFTYSALINALCKENKMDGAHGLFDEMCKRGLIPNDVIFTTLIHGHSRNGEIDLMKESYQKMLSKGLQPDIVLYNTLVNGFCKNGDLVAARNIVDGMIRRGLRPDKITYTTLIDGFCRGGDVETALEIRKEMDQNGIELDRVGFSALVCGMCKEGRVIDAERALREMLRAGIKPDDVTYTMMMDAFCKKGDAQTGFKLLKEMQSDGHVPSVVTYNVLLNGLCKLGQMKNADMLLDAMLNIGVVPDDITYNTLLEGHHRHANSSKRYIQKPEIGIVADLASYKSIVNELDRASKDHRNR

SEQ ID NO: 81348 - DNA, 1568 bp, Arabidopsis thaliana
  misc_feature (1)..(1568): Ceres Seq. ID no. 12659376
  misc_feature: MA Experiment ID: 20000227 Result: Up-regulated in Transcription
  misc_feature: MA Experiment 20000227 PARAMETER Experiment Name: At_Root-Tips-vs-Tops_P Parameter: Tissue Value: Root Tips vs. Root Tops
  misc_feature: MA Experiment ID: 20000437 Result: Down-regulated in Transcription
  misc_feature: MA Experiment 20000437 PARAMETER Experiment Name: At_Drought_P Parameter: Age (day) Value: 8
  misc_feature: MA Experiment 20000437 PARAMETER Experiment Name: At_Drought_P Parameter: Organism Value: A. thaliana
  misc_feature: MA Experiment 20000437 PARAMETER Experiment Name: At_Drought_P Parameter: Plant Line Value: WS
  misc_feature: MA Experiment 20000437 PARAMETER Experiment Name: At_Drought_P Parameter: Timepoint (hr) Value: 24
  misc_feature: MA Experiment 20000437 PARAMETER Experiment Name: At_Drought_P Parameter: Tissue Value: Whole Plant
  misc_feature: MA Experiment 20000437 PARAMETER Experiment Name: At_Drought_P Parameter: Treatment Value: Drought vs. No Drought
  misc_feature: MA Experiment ID: 20000495 Result: Up-regulated in Transcription
  misc_feature: MA Experiment 20000495 PARAMETER Experiment Name: At_Guard_Cells_P Parameter: Harvest Date Value: 8/2/2002
  misc_feature: MA Experiment 20000495 PARAMETER Experiment Name: At_Guard_Cells_P Parameter: Organism Value: A. thaliana
  misc_feature: MA Experiment 20000495 PARAMETER Experiment Name: At_Guard_Cells_P Parameter: Tissue Value: Guard Cells vs. Leaves
  misc_feature: MA Experiment ID: 20001557 Result: Up-regulated in Transcription
  misc_feature: MA Experiment 20001557 PARAMETER Experiment Name: At_Drought_Soil_Dry_P Parameter: Age (day) Value: 27
  misc_feature: MA Experiment 20001557 PARAMETER Experiment Name: At_Drought_Soil_Dry_P Parameter: Organism Value: A. thaliana
  misc_feature: MA Experiment 20001557 PARAMETER Experiment Name: At_Drought_Soil_Dry_P Parameter: Plant Line Value: WS
  misc_feature: MA Experiment 20001557 PARAMETER Experiment Name: At_Drought_Soil_Dry_P Parameter: Post Timepoint (hr) Value: 3
  misc_feature: MA Experiment 20001557 PARAMETER Experiment Name: At_Drought_Soil_Dry_P Parameter: Post-Treatment Value: Re-Water vs. No Drought
  misc_feature: MA Experiment 20001557 PARAMETER Experiment Name: At_Drought_Soil_Dry_P Parameter: Timepoint (day) Value: 13
  misc_feature: MA Experiment 20001557 PARAMETER Experiment Name: At_Drought_Soil_Dry_P Parameter: Treatment Value: Drought vs. No Drought
  misc_feature: MA Experiment ID: 20001560 Result: Up-regulated in Transcription
  misc_feature: MA Experiment 20001560 PARAMETER Experiment Name: At_Drought_Soil_Dry_P Parameter: Age (day) Value: 28
  misc_feature: MA Experiment 20001560 PARAMETER Experiment Name: At_Drought_Soil_Dry_P Parameter: Organism Value: A. thaliana
  misc_feature: MA Experiment 20001560 PARAMETER Experiment Name: At_Drought_Soil_Dry_P Parameter: Plant Line Value: WS
  misc_feature: MA Experiment 20001560 PARAMETER Experiment Name: At_Drought_Soil_Dry_P Parameter: Post Timepoint (hr) Value: None
  misc_feature: MA Experiment 20001560 PARAMETER Experiment Name: At_Drought_Soil_Dry_P Parameter: Post-Treatment Value: None
  misc_feature: MA Experiment 20001560 PARAMETER Experiment Name: At_Drought_Soil_Dry_P Parameter: Timepoint (day) Value: 14
  misc_feature: MA Experiment 20001560 PARAMETER Experiment Name: At_Drought_Soil_Dry_P Parameter: Treatment Value: Drought vs. No Drought
agaagaatcatctctctctctctgcttcttcgcagcagcagcacgtttctttcttgctcttcgccgtgccctactaacctattattcgtctcttcagctacattctgctcgtgaaaatgacctccactgatgtttcctctggtgtttccaattgctatgttttcaaaagtcggttgcaggagtatgctcagaagtacaagctcccaacgcctgtttatgagatcgttaaagaaggcccttcacacaaatctttatttcaatcgactgtgatactggatggtgtcagatataattctttgcctggattcttcaatcgtaaggctgcagagcaatcagctgccgaggttgctctccgggaattagcaaaatccagtgagctaagccaatgtgtttcacaacctgttcacgaaacgggattatgcaagaacctacttcaagaatacgctcaaaagatgaattacgcgattccattgtatcagtgccagaaggtcgaaactcttgggagagttacacaattcacatgtactgtagagattggaggcataaagtacacaggagctgcaacaagaactaaaaaagatgctgagattagcgctgggagaactgctcttttagcgatccagtcagacactaaaaacaaccttgccaactacaacactcagcttactgtacttccttgtgagaagaagacaatacaggcagctatcccgcttaaagaaaccgtcaagactcttaaagccaggaaggctcagttcaagaagaaagctcagaaaggaaaacgcacagtagctaaaaatcctgaagatattatcatccctcctcaacctactgatcattgtcaaaacgatcagtcagagaaaattgagacaacgccaaatctggaaccttcttcatgcatgaacgggttaaaggaggcagcatttgggagtgtggagacagagaaaattgagacaacgccaaatctggaacctccttcatgcatgaacgggttaaaggaggcagcatttgggagtgtggagacagagaaaattgagacaacgccaaatctggaacctccttcatgcatgaacgggttaaaggaggcagcatttgggagtgtggagacagagaaaattgagacaacgccaaatctggaaccttcttcatgcatgaacgggttaaaggaggcagcatttgggagtgtggagacagagaaaattgagacaacgccaaatctggaacctccttcatgcatgaacgggttaaaggaggcagcatttgggagtgtggagacagagaaaattgagacaacgccaaatctggaatcttcttcatgcatgagcgggttaaaggaggcagcatttgggagtgtggagacagaagcaagccacgcataacagtgtcaagatggagtcttgtgagtttgtcatagttactatatggttacgtagccattttgtgattcctatctagtctagtagtaattcacagattgaagagaagtaatatttgagcggaaaatcaaaactaatatgattggtacaatttggtggtcgattgagtcattcgaataaagtaatgtggggttg

SEQ ID NO: 81349 - protein, 419 aa, Arabidopsis thaliana
  peptide (1)..(419): Ceres Seq. ID no. 12659377
  misc_feature (102)..(168): Pfam Name: Double-stranded RNA binding motif Pfam Description: Double-stranded RNA binding motif
  misc_feature (1)..(419): Homolog of NCBI NO: 18391056 NR Description: expressed protein; protein id: At1g09700.1, by cDNA: gi_12247456, supported by cDNA: gi_15451101, supported cDNA: gi_20148392 [Arabidopsis thaliana] >gi|25402565|pir||H86230
  misc_feature (1)..(275): Homolog of NCBI NO: 9967526 NR Description: RBP2 protein [Brassica oleracea var. capitata]
  misc_feature (1)..(275): Homolog of NCBI NO: 27262835 NR Description: dsRNA-binding protein [Brassica oleracea var.
  misc_feature (1)..(275): Homolog of NCBI NO: 8346542 NR Description: BcpLH protein [Brassica rapa]
  misc_feature (1)..(275): Homolog of NCBI NO: 27262831 NR Description: dsRNA-binding protein [Brassica oleracea var.
  misc_feature (1)..(275): Homolog of NCBI NO: 27262833 NR Description: dsRNA-binding protein [Brassica oleracea var.
  misc_feature (1)..(275): Homolog of NCBI NO: 27262837 NR Description: dsRNA-binding protein [Brassica oleracea var.
  misc_feature (1)..(275): Homolog of NCBI NO: 27262829 NR Description: dsRNA-binding protein [Brassica rapa subsp. rapa]
  misc_feature (10)..(362): Homolog of NCBI NO: 9229939 NR Description: dsRNA-binding protein ODB1 [Oryza sativa
  misc_feature (15)..(180): Homolog of NCBI NO: 37535422 NR Description: putative extensin [Oryza sativa (japonica
MTSTDVSSGVSNCYVFKSRLQEYAQKYKLPTPVYEIVKEGPSHKSLFQSTVILDGVRYNSLPGFFNRKAAEQSAAEVALRELAKSSELSQCVSQPVHETGLCKNLLQEYAQKMNYAIPLYQCQKVETLGRVTQFTCTVEIGGIKYTGAATRTKKDAEISAGRTALLAIQSDTKNNLANYNTQLTVLPCEKKTIQAAIPLKETVKTLKARKAQFKKKAQKGKRTVAKNPEDIIIPPQPTDHCQNDQSEKIETTPNLEPSSCMNGLKEAAFGSVETEKIETTPNLEPPSCMNGLKEAAFGSVETEKIETTPNLEPPSCMNGLKEAAFGSVETEKIETTPNLEPSSCMNGLKEAAFGSVETEKIETTPNLEPPSCMNGLKEAAFGSVETEKIETTPNLESSSCMSGLKEAAFGSVETEASHA

SEQ ID NO: 81350 - protein, 307 aa, Arabidopsis thaliana
  peptide (1)..(307): Ceres Seq. ID no. 12659378
  misc_feature (1)..(56): Pfam Name: Double-stranded RNA binding motif Pfam Description: Double-stranded RNA binding motif
  misc_feature (1)..(307): Homolog of NCBI NO: 18391056 NR Description: expressed protein; protein id: At1g09700.1, by cDNA: gi_12247456, supported by cDNA: gi_15451101, supported cDNA: gi_20148392 [Arabidopsis thaliana] >gi|25402565|pir||H86230
  misc_feature (1)..(163): Homolog of NCBI NO: 9967526 NR Description: RBP2 protein [Brassica oleracea var. capitata]
  misc_feature (1)..(163): Homolog of NCBI NO: 27262835 NR Description: dsRNA-binding protein [Brassica oleracea var.
  misc_feature (1)..(163): Homolog of NCBI NO: 8346542 NR Description: BcpLH protein [Brassica rapa]
  misc_feature (1)..(163): Homolog of NCBI NO: 27262831 NR Description: dsRNA-binding protein [Brassica oleracea var.
  misc_feature (1)..(163): Homolog of NCBI NO: 27262833 NR Description: dsRNA-binding protein [Brassica oleracea var.
  misc_feature (1)..(163): Homolog of NCBI NO: 27262837 NR Description: dsRNA-binding protein [Brassica oleracea var.
  misc_feature (1)..(163): Homolog of NCBI NO: 27262829 NR Description: dsRNA-binding protein [Brassica rapa subsp. rapa]
  misc_feature (1)..(250): Homolog of NCBI NO: 9229939 NR Description: dsRNA-binding protein ODB1 [Oryza sativa
  misc_feature (1)..(68): Homolog of NCBI NO: 37535422 NR Description: putative extensin [Oryza sativa (japonica
MNYAIPLYQCQKVETLGRVTQFTCTVEIGGIKYTGAATRTKKDAEISAGRTALLAIQSDTKNNLANYNTQLTVLPCEKKTIQAAIPLKETVKTLKARKAQFKKKAQKGKRTVAKNPEDIIIPPQPTDHCQNDQSEKIETTPNLEPSSCMNGLKEAAFGSVETEKIETTPNLEPPSCMNGLKEAAFGSVETEKIETTPNLEPPSCMNGLKEAAFGSVETEKIETTPNLEPSSCMNGLKEAAFGSVETEKIETTPNLEPPSCMNGLKEAAFGSVETEKIETTPNLESSSCMSGLKEAAFGSVETEASHA

SEQ ID NO: 81351 - DNA, 1821 bp, Arabidopsis thaliana
  misc_feature (1)..(1821): Ceres Seq. ID no. 12659395
  misc_feature: MA Experiment ID: 20001451 Result: Down-regulated in Transcription
  misc_feature: MA Experiment 20001451 PARAMETER Experiment Name: At_Far-red-induction_P Parameter: Age (day) Value: 7
  misc_feature: MA Experiment 20001451 PARAMETER Experiment Name: At_Far-red-induction_P Parameter: Light Value: Far-red vs. White
  misc_feature: MA Experiment 20001451 PARAMETER Experiment Name: At_Far-red-induction_P Parameter: Organism Value: A. thaliana
  misc_feature: MA Experiment 20001451 PARAMETER Experiment Name: At_Far-red-induction_P Parameter: Plant Line Value: Columbia
  misc_feature: MA Experiment 20001451 PARAMETER Experiment Name: At_Far-red-induction_P Parameter: Timepoint (hr) Value: 24
  misc_feature: MA Experiment 20001451 PARAMETER Experiment Name: At_Far-red-induction_P Parameter: Tissue Value: Whole Plant
atgttccccaaatccttagccgtaagtagaaaaaactcgaatttaacaaaaggagtctctggtttaagaagactctgttcttcttcatctaccatcaccgggagcccttgcccacctagatatgacgtagctgtcatcgctgatctcatagagaagcagcactggtcaaagctcggagttcatgtgacagacataaaccctaacgagctgtttcgacagttgataagttctgagcttgacccagatttgtgtctcaggtactattcctggttagtgaagaacagtgacatctctgtttcacttgagctcacatttaagctcttgcattctcttgccaatgcgaaaaggtactcaaaaatccgatctttccttgatgggtttgtgagaaatggatctgatcatcaagttcactcgattttccatgcaatctctatgtgtgacaatgtttgtgtcaattcgattatagctgatatgttggtattagcttatgcgaataattcgagattcgagttaggatttgaggcgtttaagcgttcaggttattatgggtataagttgtcggctttgtcttgtaagcctttgatgattgcgttgttgaaggagaatcgttctgctgatgttgaatatgtgtataaggagatgattaggaggaagattcaaccaaatgtgttcactttcaatgttgtgatcaatgcgttgtgcaaaactgggaaaatgaataaagctagggatgttatggaggacatgaaagtttatgggtgttctccaaatgtagttagttacaacactctcattgatgggtattgtaagcttggtggaaatgggaaaatgtacaaagcagacgcggttttgaaggaaatggtggagaatgatgtgtctccgaacttgactacattcaatatattgattgatgggttctggaaagatgacaaccttccggggagtatgaaggtgtttaaagagatgctggatcaagacgtgaaaccgaatgtgatctcgtataattcattgataaatggtttgtgcaatggaggaaagatcagcgaggctattagtatgcgcgataagatggtaagtgcaggtgtgcagcctaacctaattacttacaatgctcttataaatgggttttgcaagaacgatatgctgaaggaagctcttgatatgtttggctcagtgaaaggccaaggagctgttcccactactagaatgtataacatgcttatcgatgcgtattgtaagttaggcaaaatcgatgatggctttgcactgaaagaagagatggagcgggaggggattgtaccagatgttggaacttataattgcttgattgctggtctatgtagaaacggtaacatagaagcagctaagaagctttttgatcagttgactagtaaaggacttcctgaccttgtgacgtttcacatactaatggagggatattgcagaaaaggtgaatcgagaaaagcagcaatgcttttgaaagaaatgtcaaagatggggctgaaaccgagacatctgacttataacattgtgatgaaaggctactgtaaggaaggaaatctgaaggcagcaacgaacatgaggacacagatggagaaagaaagacggttgcgaatgaatgtagcgtcatataatgtgcttctgcaaggatattctcaaaagggaaagttggaggatgcaaacatgcttttgaatgagatgttagagaaaggtctagtcccgaaccgaataacctatgagatagttaaagaagaaatggtagatcaaggtttcgtcccagacattgaagggcatctattcaacgtctctaccaaatcctaa

SEQ ID NO: 81352 - protein, 606 aa, Arabidopsis thaliana
  peptide (1)..(606): Ceres Seq. ID no. 12659396
  misc_feature (297)..(331): Pfam Name: PPR repeat Pfam Description: PPR repeat
  misc_feature (81)..(597): Homolog of NCBI NO: 18087893 NR Description: putative membrane-associated salt-inducible
  misc_feature (81)..(597): Homolog of NCBI NO: 37535490 NR Description: putative membrane-associated salt-inducible
  misc_feature (15)..(582): Homolog of NCBI NO: 15242446 NR Description: putative protein; protein id: At5g39710.1
  misc_feature (24)..(579): Homolog of NCBI NO: 15226583 NR Description: putative salt-inducible protein; protein id:
  misc_feature (78)..(582): Homolog of NCBI NO: 22329519 NR Description: hypothetical protein; protein id: At1g12700.1
  misc_feature (534)..(585): Homolog of NCBI NO: 22329519 NR Description: hypothetical protein; protein id: At1g12700.1
  misc_feature (83)..(580): Homolog of NCBI NO: 15241049 NR Description: putative protein; protein id: At5g55840.1
  misc_feature (106)..(596): Homolog of NCBI NO: 11994279 NR Description: gb|AAD43616.1~gene_id:F16J14.3~strong similarity
  misc_feature (106)..(596): Homolog of NCBI NO: 15228763 NR Description: hypothetical protein; protein id: At3g22470.1
  misc_feature (106)..(582): Homolog of NCBI NO: 15221282 NR Description: hypothetical protein; protein id: At1g12300.1
MFPKSLAVSRKNSNLTKGVSGLRRLCSSSSTITGSPCPPRYDVAVIADLIEKQHWSKLGVHVTDINPNELFRQLISSELDPDLCLRYYSWLVKNSDISVSLELTFKLLHSLANAKRYSKIRSFLDGFVRNGSDHQVHSIFHAISMCDNVCVNSIIADMLVLAYANNSRFELGFEAFKRSGYYGYKLSALSCKPLMIALLKENRSADVEYVYKEMIRRKIQPNVFTFNVVINALCKTGKMNKARDVMEDMKVYGCSPNVVSYNTLIDGYCKLGGNGKMYKADAVLKEMVENDVSPNLTTFNILIDGFWKDDNLPGSMKVFKEMLDQDVKPNVISYNSLINGLCNGGKISEAISMRDKMVSAGVQPNLITYNALINGFCKNDMLKEALDMFGSVKGQGAVPTTRMYNMLIDAYCKLGKIDDGFALKEEMEREGIVPDVGTYNCLIAGLCRNGNIEAAKKLFDQLTSKGLPDLVTFHILMEGYCRKGESRKAAMLLKEMSKMGLKPRHLTYNIVMKGYCKEGNLKAATNMRTQMEKERRLRMNVASYNVLLQGYSQKGKLEDANMLLNEMLEKGLVPNRITYEIVKEEMVDQGFVPDIEGHLFNVSTKS

SEQ ID NO: 81353 - protein, 462 aa, Arabidopsis thaliana
  peptide (1)..(462): Ceres Seq. ID no. 12659397
  misc_feature (153)..(187): Pfam Name: PPR repeat Pfam Description: PPR repeat
  misc_feature (1)..(453): Homolog of NCBI NO: 18087893 NR Description: putative membrane-associated salt-inducible
  misc_feature (1)..(453): Homolog of NCBI NO: 37535490 NR Description: putative membrane-associated salt-inducible
  misc_feature (1)..(438): Homolog of NCBI NO: 15242446 NR Description: putative protein; protein id: At5g39710.1
  misc_feature (1)..(435): Homolog of NCBI NO: 15226583 NR Description: putative salt-inducible protein; protein id:
  misc_feature (1)..(438): Homolog of NCBI NO: 22329519 NR Description: hypothetical protein; protein id: At1g12700.1
  misc_feature (390)..(441): Homolog of NCBI NO: 22329519 NR Description: hypothetical protein; protein id: At1g12700.1
  misc_feature (1)..(436): Homolog of NCBI NO: 15241049 NR Description: putative protein; protein id: At5g55840.1
  misc_feature (1)..(452): Homolog of NCBI NO: 11994279 NR Description: gb|AAD43616.1~gene_id:F16J14.3~strong similarity
  misc_feature (1)..(452): Homolog of NCBI NO: 15228763 NR Description: hypothetical protein; protein id: At3g22470.1
  misc_feature (1)..(438): Homolog of NCBI NO: 15221282 NR Description: hypothetical protein; protein id: At1g12300.1
MCDNVCVNSIIADMLVLAYANNSRFELGFEAFKRSGYYGYKLSALSCKPLMIALLKENRSADVEYVYKEMIRRKIQPNVFTFNVVINALCKTGKMNKARDVMEDMKVYGCSPNVVSYNTLIDGYCKLGGNGKMYKADAVLKEMVENDVSPNLTTFNILIDGFWKDDNLPGSMKVFKEMLDQDVKPNVISYNSLINGLCNGGKISEAISMRDKMVSAGVQPNLITYNALINGFCKNDMLKEALDMFGSVKGQGAVPTTRMYNMLIDAYCKLGKIDDGFALKEEMEREGIVPDVGTYNCLIAGLCRNGNIEAAKKLFDQLTSKGLPDLVTFHILMEGYCRKGESRKAAMLLKEMSKMGLKPRHLTYNIVMKGYCKEGNLKAATNMRTQMEKERRLRMNVASYNVLLQGYSQKGKLEDANMLLNEMLEKGLVPNRITYEIVKEEMVDQGFVPDIEGHLFNVSTKS

SEQ ID NO: 81354 - protein, 449 aa, Arabidopsis thaliana
  peptide (1)..(449): Ceres Seq. ID no. 12659398
  misc_feature (140)..(174): Pfam Name: PPR repeat Pfam Description: PPR repeat
  misc_feature (1)..(440): Homolog of NCBI NO: 18087893 NR Description: putative membrane-associated salt-inducible
  misc_feature (1)..(440): Homolog of NCBI NO: 37535490 NR Description: putative membrane-associated salt-inducible
  misc_feature (1)..(425): Homolog of NCBI NO: 15242446 NR Description: putative protein; protein id: At5g39710.1
  misc_feature (1)..(422): Homolog of NCBI NO: 15226583 NR Description: putative salt-inducible protein; protein id:
  misc_feature (1)..(425): Homolog of NCBI NO: 22329519 NR Description: hypothetical protein; protein id: At1g12700.1
  misc_feature (377)..(428): Homolog of NCBI NO: 22329519 NR Description: hypothetical protein; protein id: At1g12700.1
  misc_feature (1)..(423): Homolog of NCBI NO: 15241049 NR Description: putative protein; protein id: At5g55840.1
  misc_feature (1)..(439): Homolog of NCBI NO: 11994279 NR Description: gb|AAD43616.1~gene_id:F16J14.3~strong similarity
  misc_feature (1)..(439): Homolog of NCBI NO: 15228763 NR Description: hypothetical protein; protein id: At3g22470.1
  misc_feature (1)..(425): Homolog of NCBI NO: 15221282 NR Description: hypothetical protein; protein id: At1g12300.1
MLVLAYANNSRFELGFEAFKRSGYYGYKLSALSCKPLMIALLKENRSADVEYVYKEMIRRKIQPNVFTFNVVINALCKTGKMNKARDVMEDMKVYGCSPNVVSYNTLIDGYCKLGGNGKMYKADAVLKEMVENDVSPNLTTFNILIDGFWKDDNLPGSMKVFKEMLDQDVKPNVISYNSLINGLCNGGKISEAISMRDKMVSAGVQPNLITYNALINGFCKNDMLKEALDMFGSVKGQGAVPTTRMYNMLIDAYCKLGKIDDGFALKEEMEREGIVPDVGTYNCLIAGLCRNGNIEAAKKLFDQLTSKGLPDLVTFHILMEGYCRKGESRKAAMLLKEMSKMGLKPRHLTYNIVMKGYCKEGNLKAATNMRTQMEKERRLRMNVASYNVLLQGYSQKGKLEDANMLLNEMLEKGLVPNRITYEIVKEEMVDQGFVPDIEGHLFNVSTKS

SEQ ID NO: 81355 - DNA, 1428 bp, Arabidopsis thaliana
  misc_feature (1)..(1428): Ceres Seq. ID no. 12659423
  misc_feature: MA Experiment ID: 20000355 Result: Up-regulated in Transcription
  misc_feature: MA Experiment 20000355 PARAMETER Experiment Name: At_Siliques_Sub_P Parameter: Age (day) Value: 21
  misc_feature: MA Experiment 20000355 PARAMETER Experiment Name: At_Siliques_Sub_P Parameter: Organism Value: A. thaliana
  misc_feature: MA Experiment 20000355 PARAMETER Experiment Name: At_Siliques_Sub_P Parameter: Plant Line Value: WS
  misc_feature: MA Experiment 20000355 PARAMETER Experiment Name: At_Siliques_Sub_P Parameter: Tissue Value: Less Than 5mm Siliques vs. Whole Plant
atggacgcatacaacaatccctcggcggtggagtcgggtgacgccgccgtgaaaagcgtcgacgacgatggtcgagagaagagaacgggaacattttggacggcgagtgcgcacataatcacggcggtcataggctcaggggtgctgtcgttggcttgggctatagcacagcttggttgggtggcaggaaccacagttttggtcgctttcgccatcattacttactacacgtccaccttgctcgccgactgttaccgttcgccggactccatcaccggaacacgcaactataattacatgggcgtcgtccgatcttaccttggtggtaaaaaggttcagctatgtggagtggcacagtacgtgaatctcgtaggggtcactattggttacaccatcactgcctccataagcttagtagcgattgggaaatcaaattgttatcatgacaagggacataaagcgaaatgttctgtatcgaattatccatacatggcggcatttgggatcgtccagatcattctgagccagcttcctaacttccacaagctctctttcctatccatcatcgccgcggttatgtccttctcttatgcgtctatcggaataggcctagccatcgctactgtagcaagtgggaagattggtaagacagaattgacagggacagtgataggtgtggacgtaactgcgtctgaaaaagtttggaaattgtttcaagcgattggagacattgccttttcatacgcttttaccactattctcatcgagattcaggacacattgagatcaagcccaccagagaacaaagtgatgaaacgagcaagtcttgtcggagtctcaaccacaactgttttctacatcttgtgtggttgcatcggatatgctgcgttcggcaaccaagcccctggtgacttccttaccgattttggtttttacgaaccttattggctcatcgactttgccaatgcttgcattgctctccatctaataggtgcctatcaggtgtatgcgcagccgtttttccagtttgttgaggaaaactgcaacaaaaaatggcctcaaagcaatttcatcaacaaagaatactcgtcaaaggttcctttgcttggaaaatgtcgtgtcaacctcttcagactggtttggaggacatgctatgttgttttgacaacatttgtagcaatgatattccccttcttcaatgcgatcttgggtttgctaggggcattcgcgttctggccactcacagtttattttccggtggcaatgcacattgcgcaggctaaagtcaagaagtattctcgtagatggttggccttgaacctcctcgtattggtttgcttgatcgtctcggcccttgccgccgtaggatccatcattggcttaattaatagtgtcaagtcatacaagcccttcaagaatttagactag

SEQ ID NO: 81356 - protein, 475 aa, Arabidopsis thaliana
  peptide (1)..(475): Ceres Seq. ID no. 12659424
  misc_feature (1)..(475): Homolog of NCBI NO: 15218370 NR Description: putative amino acid permease; protein id: [Arabidopsis thaliana] >gi|7442730|pir||T00620 probable amino
  misc_feature (5)..(474): Homolog of NCBI NO: 15217945 NR Description: amino acid permease I; protein id: At1g58360.1, by cDNA: gi_404018 [Arabidopsis thaliana] >gi|541848|pir||A48187
  misc_feature (5)..(474): Homolog of NCBI NO: 2654019 NR Description: neutral amino acid transport system II
  misc_feature (11)..(472): Homolog of NCBI NO: 15240523 NR Description: amino acid permease 6 (emb CAA65051.1); protein At5g49630.1 [Arabidopsis thaliana] >gi|11277401|pir||T50691 amino
  misc_feature (10)..(448): Homolog of NCBI NO: 24370975 NR Description: amino acid transporter [Solanum tuberosum]
  misc_feature (21)..(473): Homolog of NCBI NO: 27447655 NR Description: amino acid transporter [Lycopersicon esculentum]
  misc_feature (11)..(471): Homolog of NCBI NO: 34393418 NR Description: putative amino acid permease [Oryza sativa
  misc_feature (18)..(473): Homolog of NCBI NO: 27447657 NR Description: amino acid transporter [Lycopersicon esculentum]
  misc_feature (38)..(420): Homolog of NCBI NO: 7442731 NR Description: probable amino acid transporter protein AAP1 -
  misc_feature (18)..(472): Homolog of NCBI NO: 7442735 NR Description: amino acid transport protein AAP1 - castor bean
MDAYNNPSAVESGDAAVKSVDDDGREKRTGTFWTASAHIITAVIGSGVLSLAWAIAQLGWVAGTTVLVAFAIITYYTSTLLADCYRSPDSITGTRNYNYMGVVRSYLGGKKVQLCGVAQYVNLVGVTIGYTITASISLVAIGKSNCYHDKGHKAKCSVSNYPYMAAFGIVQIILSQLPNFHKLSFLSIIAAVMSFSYASIGIGLAIATVASGKIGKTELTGTVIGVDVTASEKVWKLFQAIGDIAFSYAFTTILIEIQDTLRSSPPENKVMKRASLVGVSTTTVFYILCGCIGYAAFGNQAPGDFLTDFGFYEPYWLIDFANACIALHLIGAYQVYAQPFFQFVEENCNKKWPQSNFINKEYSSKVPLLGKCRVNLFRLVWRTCYVVLTTFVAMIFPFFNAILGLLGAFAFWPLTVYFPVAMHIAQAKVKKYSRRWLALNLLVLVCLIVSALAAVGSIIGLINSVKSYKPFKNLD

SEQ ID NO: 81357 - protein, 376 aa, Arabidopsis thaliana
  peptide (1)..(376): Ceres Seq. ID no. 12659425
  misc_feature (1)..(376): Homolog of NCBI NO: 15218370 NR Description: putative amino acid permease; protein id: [Arabidopsis thaliana] >gi|7442730|pir||T00620 probable amino
  misc_feature (1)..(375): Homolog of NCBI NO: 15217945 NR Description: amino acid permease I; protein id: At1g58360.1, by cDNA: gi_404018 [Arabidopsis thaliana] >gi|541848|pir||A48187
  misc_feature (1)..(375): Homolog of NCBI NO: 2654019 NR Description: neutral amino acid transport system II
  misc_feature (1)..(373): Homolog of NCBI NO: 15240523 NR Description: amino acid permease 6 (emb CAA65051.1); protein At5g49630.1 [Arabidopsis thaliana] >gi|11277401|pir||T50691 amino
  misc_feature (1)..(349): Homolog of NCBI NO: 24370975 NR Description: amino acid transporter [Solanum tuberosum]
  misc_feature (1)..(374): Homolog of NCBI NO: 27447655 NR Description: amino acid transporter [Lycopersicon esculentum]
  misc_feature (1)..(372): Homolog of NCBI NO: 34393418 NR Description: putative amino acid permease [Oryza sativa
  misc_feature (1)..(374): Homolog of NCBI NO: 27447657 NR Description: amino acid transporter [Lycopersicon esculentum]
  misc_feature (1)..(321): Homolog of NCBI NO: 7442731 NR Description: probable amino acid transporter protein AAP1 -
  misc_feature (1)..(373): Homolog of NCBI NO: 7442735 NR Description: amino acid transport protein AAP1 - castor bean
MGVVRSYLGGKKVQLCGVAQYVNLVGVTIGYTITASISLVAIGKSNCYHDKGHKAKCSVSNYPYMAAFGIVQIILSQLPNFHKLSFLSIIAAVMSFSYASIGIGLAIATVASGKIGKTELTGTVIGVDVTASEKVWKLFQAIGDIAFSYAFTTILIEIQDTLRSSPPENKVMKRASLVGVSTTTVFYILCGCIGYAAFGNQAPGDFLTDFGFYEPYWLIDFANACIALHLIGAYQVYAQPFFQFVEENCNKKWPQSNFINKEYSSKVPLLGKCRVNLFRLVWRTCYVVLTTFVAMIFPFFNAILGLLGAFAFWPLTVYFPVAMHIAQAKVKKYSRRWLALNLLVLVCLIVSALAAVGSIIGLINSVKSYKPFKNLD

SEQ ID NO: 81358 - protein, 312 aa, Arabidopsis thaliana
  peptide (1)..(312): Ceres Seq. ID no. 12659426
  misc_feature (1)..(312): Homolog of NCBI NO: 15218370 NR Description: putative amino acid permease; protein id: [Arabidopsis thaliana] >gi|7442730|pir||T00620 probable amino
  misc_feature (1)..(311): Homolog of NCBI NO: 15217945 NR Description: amino acid permease I; protein id: At1g58360.1, by cDNA: gi_404018 [Arabidopsis thaliana] >gi|541848|pir||A48187
  misc_feature (1)..(311): Homolog of NCBI NO: 2654019 NR Description: neutral amino acid transport system II
  misc_feature (1)..(309): Homolog of NCBI NO: 15240523 NR Description: amino acid permease 6 (emb CAA65051.1); protein At5g49630.1 [Arabidopsis thaliana] >gi|11277401|pir||T50691 amino
  misc_feature (1)..(285): Homolog of NCBI NO: 24370975 NR Description: amino acid transporter [Solanum tuberosum]
  misc_feature (1)..(310): Homolog of NCBI NO: 27447655 NR Description: amino acid transporter [Lycopersicon esculentum]
  misc_feature (1)..(308): Homolog of NCBI NO: 34393418 NR Description: putative amino acid permease [Oryza sativa
  misc_feature (1)..(310): Homolog of NCBI NO: 27447657 NR Description: amino acid transporter [Lycopersicon esculentum]
  misc_feature (1)..(257): Homolog of NCBI NO: 7442731 NR Description: probable amino acid transporter protein AAP1 -
  misc_feature (1)..(309): Homolog of NCBI NO: 7442735 NR Description: amino acid transport protein AAP1 - castor bean
MAAFGIVQIILSQLPNFHKLSFLSIIAAVMSFSYASIGIGLAIATVASGKIGKTELTGTVIGVDVTASEKVWKLFQAIGDIAFSYAFTTILIEIQDTLRSSPPENKVMKRASLVGVSTTTVFYILCGCIGYAAFGNQAPGDFLTDFGFYEPYWLIDFANACIALHLIGAYQVYAQPFFQFVEENCNKKWPQSNFINKEYSSKVPLLGKCRVNLFRLVWRTCYVVLTTFVAMIFPFFNAILGLLGAFAFWPLTVYFPVAMHIAQAKVKKYSRRWLALNLLVLVCLIVSALAAVGSIIGLINSVKSYKPFKNLD

SEQ ID NO: 81359 - DNA, 1588 bp, Arabidopsis thaliana
  misc_feature (1)..(1588): Ceres Seq. ID no. 12659431
  misc_feature: MA Experiment ID: 20000173 Result: Down-regulated in Transcription
  misc_feature: MA Experiment 20000173 PARAMETER Experiment Name: At_42deg_Heat_P Parameter: Age (day) Value: 14
  misc_feature: MA Experiment 20000173 PARAMETER Experiment Name: At_42deg_Heat_P Parameter: Organism Value: A. thaliana
  misc_feature: MA Experiment 20000173 PARAMETER Experiment Name: At_42deg_Heat_P Parameter: Plant Line Value: WS
  misc_feature: MA Experiment 20000173 PARAMETER Experiment Name: At_42deg_Heat_P Parameter: Temperature (deg C) Value: 42 vs. 22
  misc_feature: MA Experiment 20000173 PARAMETER Experiment Name: At_42deg_Heat_P Parameter: Timepoint (hr) Value: 6
  misc_feature: MA Experiment 20000173 PARAMETER Experiment Name: At_42deg_Heat_P Parameter: Tissue Value: Aerial
  misc_feature: MA Experiment ID: 20000185 Result: Down-regulated in Transcription
  misc_feature: MA Experiment 20000185 PARAMETER Experiment Name: At_Roots__P Parameter: Age (day) Value: 7 vs. 21
  misc_feature: MA Experiment 20000185 PARAMETER Experiment Name: At_Roots__P Parameter: Organism Value: A. thaliana
  misc_feature: MA Experiment 20000185 PARAMETER Experiment Name: At_Roots__P Parameter: Tissue Value: Roots vs. Whole Plant
  misc_feature: MA Experiment ID: 20000234 Result: Down-regulated in Transcription
  misc_feature: MA Experiment 20000234 PARAMETER Experiment Name: At_Siliques_P Parameter: Age (day) Value: 21
  misc_feature: MA Experiment 20000234 PARAMETER Experiment Name: At_Siliques_P Parameter: Organism Value: A. thaliana
  misc_feature: MA Experiment 20000234 PARAMETER Experiment Name: At_Siliques_P Parameter: Plant Line Value: WS
  misc_feature: MA Experiment 20000234 PARAMETER Experiment Name: At_Siliques_P Parameter: Tissue Value: Less Than 5mm Siliques vs. Whole Plant
  misc_feature: MA Experiment ID: 20000264 Result: Up-regulated in Transcription
  misc_feature: MA Experiment 20000264 PARAMETER Experiment Name: At_Open_Flower_P Parameter: Age (day) Value: 21
  misc_feature: MA Experiment 20000264 PARAMETER Experiment Name: At_Open_Flower_P Parameter: Plant Line Value: WS
  misc_feature: MA Experiment 20000264 PARAMETER Experiment Name: At_Open_Flower_P Parameter: Tissue Value: Open Flower vs. Whole Plant
  misc_feature: MA Experiment ID: 20000265 Result: Up-regulated in Transcription
  misc_feature: MA Experiment 20000265 PARAMETER Experiment Name: At_Open_Flower_P Parameter: Age (day) Value: 21
  misc_feature: MA Experiment 20000265 PARAMETER Experiment Name: At_Open_Flower_P Parameter: Plant Line Value: WS
  misc_feature: MA Experiment 20000265 PARAMETER Experiment Name: At_Open_Flower_P Parameter: Tissue Value: Closed Flower vs. Whole Plant
  misc_feature: MA Experiment ID: 20000286 Result: Up-regulated in Transcription
  misc_feature: MA Experiment 20000286 PARAMETER Experiment Name: At_Open_Flower_P Parameter: Age (day) Value: 21
  misc_feature: MA Experiment 20000286 PARAMETER Experiment Name: At_Open_Flower_P Parameter: Plant Line Value: WS
  misc_feature: MA Experiment 20000286 PARAMETER Experiment Name: At_Open_Flower_P Parameter: Tissue Value: Half Open vs. Whole Plant
  misc_feature: MA Experiment ID: 20000439 Result: Down-regulated in Transcription
  misc_feature: MA Experiment 20000439 PARAMETER Experiment Name: At_Roots__P Parameter: Age (day) Value: 14 vs. 21
  misc_feature: MA Experiment 20000439 PARAMETER Experiment Name: At_Roots__P Parameter: Organism Value: A. thaliana
  misc_feature: MA Experiment 20000439 PARAMETER Experiment Name: At_Roots__P Parameter: Tissue Value: Roots vs. Whole Plant
  misc_feature: MA Experiment ID: 20000794 Result: Up-regulated in Transcription
  misc_feature: MA Experiment 20000794 PARAMETER Experiment Name: At_Petals_P Parameter: Age (day) Value: 23-25 days
  misc_feature: MA Experiment 20000794 PARAMETER Experiment Name: At_Petals_P Parameter: Plant Line Value: WS
  misc_feature: MA Experiment 20000794 PARAMETER Experiment Name: At_Petals_P Parameter: Tissue Value: Petals vs. Whole plant
  misc_feature: MA Experiment ID: 20001248 Result: Up-regulated in Transcription
  misc_feature: MA Experiment 20001248 PARAMETER Experiment Name: At_Far-red-induction_P Parameter: Age (day) Value: 7
  misc_feature: MA Experiment 20001248 PARAMETER Experiment Name: At_Far-red-induction_P Parameter: Light Value: Far-red vs. White
  misc_feature: MA Experiment 20001248 PARAMETER Experiment Name: At_Far-red-induction_P Parameter: Organism Value: A. thaliana
  misc_feature: MA Experiment 20001248 PARAMETER Experiment Name: At_Far-red-induction_P Parameter: Plant Line Value: Columbia
  misc_feature: MA Experiment 20001248 PARAMETER Experiment Name: At_Far-red-induction_P Parameter: Timepoint (hr) Value: 4
  misc_feature: MA Experiment 20001248 PARAMETER Experiment Name: At_Far-red-induction_P Parameter: Tissue Value: Whole Plant
  misc_feature: MA Experiment ID: 20001450 Result: Up-regulated in Transcription
  misc_feature: MA Experiment 20001450 PARAMETER Experiment Name: At_Far-red-induction_P Parameter: Age (day) Value: 7
  misc_feature: MA Experiment 20001450 PARAMETER Experiment Name: At_Far-red-induction_P Parameter: Light Value: Far-red vs. White
  misc_feature: MA Experiment 20001450 PARAMETER Experiment Name: At_Far-red-induction_P Parameter: Organism Value: A. thaliana
  misc_feature: MA Experiment 20001450 PARAMETER Experiment Name: At_Far-red-induction_P Parameter: Plant Line Value: Columbia
  misc_feature: MA Experiment 20001450 PARAMETER Experiment Name: At_Far-red-induction_P Parameter: Timepoint (hr) Value: 8
  misc_feature: MA Experiment 20001450 PARAMETER Experiment Name: At_Far-red-induction_P Parameter: Tissue Value: Whole Plant
  misc_feature: MA Experiment ID: 20001557 Result: Up-regulated in Transcription
  misc_feature: MA Experiment 20001557 PARAMETER Experiment Name: At_Drought_Soil_Dry_P Parameter: Age (day) Value: 27
  misc_feature: MA Experiment 20001557 PARAMETER Experiment Name: At_Drought_Soil_Dry_P Parameter: Organism Value: A. thaliana
  misc_feature: MA Experiment 20001557 PARAMETER Experiment Name: At_Drought_Soil_Dry_P Parameter: Plant Line Value: WS
  misc_feature: MA Experiment 20001557 PARAMETER Experiment Name: At_Drought_Soil_Dry_P Parameter: Post Timepoint (hr) Value: 3
  misc_feature: MA Experiment 20001557 PARAMETER Experiment Name: At_Drought_Soil_Dry_P Parameter: Post-Treatment Value: Re-Water vs. No Drought
  misc_feature: MA Experiment 20001557 PARAMETER Experiment Name: At_Drought_Soil_Dry_P Parameter: Timepoint (day) Value: 13
  misc_feature: MA Experiment 20001557 PARAMETER Experiment Name: At_Drought_Soil_Dry_P Parameter: Treatment Value: Drought vs. No Drought
  misc_feature: MA Experiment ID: 20001911 Result: Down-regulated in Transcription
  misc_feature: MA Experiment 20001911 PARAMETER Experiment Name: At_Drought_Reproduction_P Parameter: Age (day) Value: 40
  misc_feature: MA Experiment 20001911 PARAMETER Experiment Name: At_Drought_Reproduction_P Parameter: Organism Value: A. thaliana
  misc_feature: MA Experiment 20001911 PARAMETER Experiment Name: At_Drought_Reproduction_P Parameter: Plant Line Value: WS
  misc_feature: MA Experiment 20001911 PARAMETER Experiment Name: At_Drought_Reproduction_P Parameter: Timepoint (day) Value: 10
  misc_feature: MA Experiment 20001911 PARAMETER Experiment Name: At_Drought_Reproduction_P Parameter: Tissue Value: Flowers
  misc_feature: MA Experiment 20001911 PARAMETER Experiment Name: At_Drought_Reproduction_P Parameter: Treatment Value: Drought vs. No Drought
aaaaagaaaatgcctctaacttcccttcctctctctatatatttcaaccactctctgtctctcttcctctttgtagtttctcaaatattttcttcagagttggcacgacctcattaataataatcttctctacacctatcaataagagatatattttagagtttcactttggtgcacaaacaaagctcgtacaacattcttcgtatatggctcttcgtcgctgcttacctcaatattcaacaacttcatcttatctctccaagatctggggatttcgtatgcatgggaccaaggcagcagcttctgttgtagaagaacatgtctcgggggcagaacgtgaggatgaagaatatgctgatgtagattgggacaaccttggattcagtcttgtacggacagatttcatgttcgccaccaaaagttgcagagacggaaacttcgaacagggttaccttagccgttacggcaacatcgagctcaaccctgctgctggaattctcaactatggccagggactaatagaggggatgaaagcgtacagaggagaagacggtagggttcttctcttccgtccagagctaaacgcgatgcgtatgaagataggagctgagagaatgtgtatgcattctccttctgttcatcagtttattgaaggtgttaagcagaccgttcttgcaaacaggcgttgggttcctcctccgggcaaaggctcgttgtatctcagaccgttgttgttcggaagtggagcaagcttgggtgtggctgcagcatcagagtacacgtttcttgtgtttggctctcctgttcaaaactacttcaaggaaggcacagcggcgttgaacctgtatgtggaggaggtgattccacgcgcttatcttggaggaactggtggtgtaaaggcaatatccaattacggtccagtgcttgaagtgatgagaagagcaaaatcaagagggttttcggatgttttgtatcttgatgcagatactgggaagaacatagaagaagtctctgctgctaatatattccttgtgaagggcaatacaatagtgacaccagctacgagcggaacgattctcggagggatcacacgtggaagaacgaagtgttccggtagaagaactgaaggaagctgaagaagttttctgcactggaactgccgctggagttgcttctgttggaagcatcacttttaagaacacaaggactgagtacaaagttggagatgggattgttacacagcaacttcgatctattcttgtcggaatacaaactggttctatccaagacactaaagattgggttttgcagattgcctaagttactttcatatcctataaataatgttgcactctcttgatcacccatcaaaagcttttgaaatagtttttggtaaatttgtgacataaatttgtgatatatcaccacatcgtattagtattaaacatttgtttcactcttccaaagagacaaaagcaaaactaaagaccttcaacttcaaggtcaggatatgtaatctaatggtttgtctttgtggcattttgccaccattggttcaaaataccattgctgtatgatcagcctcctc

SEQ ID NO: 81360 - protein, 377 aa, Arabidopsis thaliana
  peptide (1)..(377): Ceres Seq. ID no. 12659432
  misc_feature (69)..(364): Homolog of NCBI NO: 30681524 NR Description: branched-chain amino acid aminotransferase
  misc_feature (69)..(377): Homolog of NCBI NO: 18391105 NR Description: expressed protein; protein id: At1g10060.1, by cDNA: gi_15450873 [Arabidopsis thaliana]
  misc_feature (91)..(364): Homolog of NCBI NO: 15218409 NR Description: tat-binding protein, putative; protein id: supported by cDNA: gi_13877744, supported by cDNA: gi_15293208
  misc_feature (114)..(364): Homolog of NCBI NO: 14280354 NR Description: branched-chain amino acid aminotransferase
  misc_feature (116)..(364): Homolog of NCBI NO: 6319167 NR Description: branched-chain amino acid aminotransferase
  misc_feature (113)..(364): Homolog of NCBI NO: 34902362 NR Description: Putative aminotransferase [Oryza sativa (japonica group)] >gi|24418036|gb|AAN60486.1| Putative aminotransferase
  misc_feature (107)..(364): Homolog of NCBI NO: 26391655 NR Description: Branched-chain amino acid aminotransferase 5,
  misc_feature (135)..(364): Homolog of NCBI NO: 7450517 NR Description: branched-chain amino acid aminotransferase
  misc_feature (112)..(376): Homolog of NCBI NO: 15222881 NR Description: branched-chain amino acid aminotransferase, protein id: At1g50090.1 [Arabidopsis thaliana]
  misc_feature (118)..(364): Homolog of NCBI NO: 6319165 NR Description: branched-chain amino acid aminotransferase
KENASNFPSSLYIFQPLSVSLPLCSFSNIFFRVGTTSLIIIFSTPINKRYILEFHFGAQTKLVQHSSYMALRRCLPQYSTTSSYLSKIWGFRMHGTKAAASVVEEHVSGAEREDEEYADVDWDNLGFSLVRTDFMFATKSCRDGNFEQGYLSRYGNIELNPAAGILNYGQGLIEGMKAYRGEDGRVLLFRPELNAMRMKIGAERMCMHSPSVHQFIEGVKQTVLANRRWVPPPGKGSLYLRPLLFGSGASLGVAAASEYTFLVFGSPVQNYFKEGTAALNLYVEEVIPRAYLGGTGGVKAISNYGPVLEVMRRAKSRGFSDVLYLDADTGKNIEEVSAANIFLVKGNTIVTPATSGTILGGITRGRTKCSGRRTEGS

SEQ ID NO: 81361 - protein, 309 aa, Arabidopsis thaliana
  peptide (1)..(309): Ceres Seq. ID no. 12659433
  misc_feature (1)..(296): Homolog of NCBI NO: 30681524 NR Description: branched-chain amino acid aminotransferase
  misc_feature (1)..(309): Homolog of NCBI NO: 18391105 NR Description: expressed protein; protein id: At1g10060.1, by cDNA: gi_15450873 [Arabidopsis thaliana]
  misc_feature (23)..(296): Homolog of NCBI NO: 15218409 NR Description: tat-binding protein, putative; protein id: supported by cDNA: gi_13877744, supported by cDNA: gi_15293208
  misc_feature (46)..(296): Homolog of NCBI NO: 14280354 NR Description: branched-chain amino acid aminotransferase
  misc_feature (48)..(296): Homolog of NCBI NO: 6319167 NR Description: branched-chain amino acid aminotransferase
  misc_feature (45)..(296): Homolog of NCBI NO: 34902362 NR Description: Putative aminotransferase [Oryza sativa (japonica group)] >gi|24418036|gb|AAN60486.1| Putative aminotransferase
  misc_feature (39)..(296): Homolog of NCBI NO: 26391655 NR Description: Branched-chain amino acid aminotransferase 5,
  misc_feature (67)..(296): Homolog of NCBI NO: 7450517 NR Description: branched-chain amino acid aminotransferase
  misc_feature (44)..(308): Homolog of NCBI NO: 15222881 NR Description: branched-chain amino acid aminotransferase, protein id: At1g50090.1 [Arabidopsis thaliana]
  misc_feature (50)..(296): Homolog of NCBI NO: 6319165 NR Description: branched-chain amino acid aminotransferase
MALRRCLPQYSTTSSYLSKIWGFRMHGTKAAASVVEEHVSGAEREDEEYADVDWDNLGFSLVRTDFMFATKSCRDGNFEQGYLSRYGNIELNPAAGILNYGQGLIEGMKAYRGEDGRVLLFRPELNAMRMKIGAERMCMHSPSVHQFIEGVKQTVLANRRWVPPPGKGSLYLRPLLFGSGASLGVAAASEYTFLVFGSPVQNYFKEGTAALNLYVEEVIPRAYLGGTGGVKAISNYGPVLEVMRRAKSRGFSDVLYLDADTGKNIEEVSAANIFLVKGNTIVTPATSGTILGGITRGRTKCSGRRTEGS

SEQ ID NO: 81362 - protein, 285 aa, Arabidopsis thaliana
  peptide (1)..(285): Ceres Seq. ID no. 12659434
  misc_feature (1)..(272): Homolog of NCBI NO: 30681524 NR Description: branched-chain amino acid aminotransferase
  misc_feature (1)..(285): Homolog of NCBI NO: 18391105 NR Description: expressed protein; protein id: At1g10060.1, by cDNA: gi_15450873 [Arabidopsis thaliana]
  misc_feature (1)..(272): Homolog of NCBI NO: 15218409 NR Description: tat-binding protein, putative; protein id: supported by cDNA: gi_13877744, supported by cDNA: gi_15293208
  misc_feature (22)..(272): Homolog of NCBI NO: 14280354 NR Description: branched-chain amino acid aminotransferase
  misc_feature (24)..(272): Homolog of NCBI NO: 6319167 NR Description: branched-chain amino acid aminotransferase
  misc_feature (21)..(272): Homolog of NCBI NO: 34902362 NR Description: Putative aminotransferase [Oryza sativa (japonica group)] >gi|24418036|gb|AAN60486.1| Putative aminotransferase
  misc_feature (15)..(272): Homolog of NCBI NO: 26391655 NR Description: Branched-chain amino acid aminotransferase 5,
  misc_feature (43)..(272): Homolog of NCBI NO: 7450517 NR Description: branched-chain amino acid aminotransferase
  misc_feature (20)..(284): Homolog of NCBI NO: 15222881 NR Description: branched-chain amino acid aminotransferase, protein id: At1g50090.1 [Arabidopsis thaliana]
  misc_feature (26)..(272): Homolog of NCBI NO: 6319165 NR Description: branched-chain amino acid aminotransferase
MHGTKAAASVVEEHVSGAEREDEEYADVDWDNLGFSLVRTDFMFATKSCRDGNFEQGYLSRYGNIELNPAAGILNYGQGLIEGMKAYRGEDGRVLLFRPELNAMRMKIGAERMCMHSPSVHQFIEGVKQTVLANRRWVPPPGKGSLYLRPLLFGSGASLGVAAASEYTFLVFGSPVQNYFKEGTAALNLYVEEVIPRAYLGGTGGVKAISNYGPVLEVMRRAKSRGFSDVLYLDADTGKNIEEVSAANIFLVKGNTIVTPATSGTILGGITRGRTKCSGRRTEGS

SEQ ID NO: 81363 - DNA, 1623 bp, Arabidopsis thaliana
  misc_feature (1)..(1623): Ceres Seq. ID no. 12659450
  misc_feature: MA Experiment ID: 20000184 Result: Down-regulated in Transcription
  misc_feature: MA Experiment 20000184 PARAMETER Experiment Name: At_Shoots__P Parameter: Age (day) Value: 7
  misc_feature: MA Experiment 20000184 PARAMETER Experiment Name: At_Shoots__P Parameter: Tissue Value: Shoots vs. Whole Plant
  misc_feature: MA Experiment ID: 20000227 Result: Down-regulated in Transcription
  misc_feature: MA Experiment 20000227 PARAMETER Experiment Name: At_Root-Tips-vs-Tops_P Parameter: Tissue Value: Root Tips vs. Root Tops
  misc_feature: MA Experiment ID: 20000234 Result: Down-regulated in Transcription
  misc_feature: MA Experiment 20000234 PARAMETER Experiment Name: At_Siliques_P Parameter: Age (day) Value: 21
  misc_feature: MA Experiment 20000234 PARAMETER Experiment Name: At_Siliques_P Parameter: Organism Value: A. thaliana
  misc_feature: MA Experiment 20000234 PARAMETER Experiment Name: At_Siliques_P Parameter: Plant Line Value: WS
  misc_feature: MA Experiment 20000234 PARAMETER Experiment Name: At_Siliques_P Parameter: Tissue Value: Less Than 5mm Siliques vs. Whole Plant
  misc_feature: MA Experiment ID: 20000235 Result: Down-regulated in Transcription
  misc_feature: MA Experiment 20000235 PARAMETER Experiment Name: At_Siliques_P Parameter: Age (day) Value: 21
  misc_feature: MA Experiment 20000235 PARAMETER Experiment Name: At_Siliques_P Parameter: Organism Value: A. thaliana
  misc_feature: MA Experiment 20000235 PARAMETER Experiment Name: At_Siliques_P Parameter: Plant Line Value: WS
  misc_feature: MA Experiment 20000235 PARAMETER Experiment Name: At_Siliques_P Parameter: Tissue Value: 5-10mm Siliques vs. Whole Plant
  misc_feature: MA Experiment ID: 20000264 Result: Down-regulated in Transcription
  misc_feature: MA Experiment 20000264 PARAMETER Experiment Name: At_Open_Flower_P Parameter: Age (day) Value: 21
  misc_feature: MA Experiment 20000264 PARAMETER Experiment Name: At_Open_Flower_P Parameter: Plant Line Value: WS
  misc_feature: MA Experiment 20000264 PARAMETER Experiment Name: At_Open_Flower_P Parameter: Tissue Value: Open Flower vs. Whole Plant
  misc_feature: MA Experiment ID: 20000265 Result: Down-regulated in Transcription
  misc_feature: MA Experiment 20000265 PARAMETER Experiment Name: At_Open_Flower_P Parameter: Age (day) Value: 21
  misc_feature: MA Experiment 20000265 PARAMETER Experiment Name: At_Open_Flower_P Parameter: Plant Line Value: WS
  misc_feature: MA Experiment 20000265 PARAMETER Experiment Name: At_Open_Flower_P Parameter: Tissue Value: Closed Flower vs. Whole Plant
  misc_feature: MA Experiment ID: 20001560 Result: Down-regulated in Transcription
  misc_feature: MA Experiment 20001560 PARAMETER Experiment Name: At_Drought_Soil_Dry_P Parameter: Age (day) Value: 28
  misc_feature: MA Experiment 20001560 PARAMETER Experiment Name: At_Drought_Soil_Dry_P Parameter: Organism Value: A. thaliana
  misc_feature: MA Experiment 20001560 PARAMETER Experiment Name: At_Drought_Soil_Dry_P Parameter: Plant Line Value: WS
  misc_feature: MA Experiment 20001560 PARAMETER Experiment Name: At_Drought_Soil_Dry_P Parameter: Post Timepoint (hr) Value: None
  misc_feature: MA Experiment 20001560 PARAMETER Experiment Name: At_Drought_Soil_Dry_P Parameter: Post-Treatment Value: None
  misc_feature: MA Experiment 20001560 PARAMETER Experiment Name: At_Drought_Soil_Dry_P Parameter: Timepoint (day) Value: 14
  misc_feature: MA Experiment 20001560 PARAMETER Experiment Name: At_Drought_Soil_Dry_P Parameter: Treatment Value: Drought vs. No Drought
gtccgagcgttggccaaatctctctcacttccacaggtttctctctccggccaaatctaacctccggggaacgtcgttggtcacttatcaccgagggaaaacaaaaaatggcgactttggttgatcctcctaatgggataaggaatgaagggaagcattacttctcaatgtggcaaactctgttcgagatcgacactaagtacatgcctatcaagcctattggtcgtggagcttacggtgttgtctgctcctctgttaacagtgacaccaacgagaaagttgctatcaagaagattcacaatgtttatgagaataggatcgatgcgttgaggactcttcgggagctcaagcttctacgccatcttcgacatgagaatgtcattgctttgaaagatgtcatgatgccaattcataagatgagcttcaaggatgtttatcttgtttatgagctcatggacactgatctccaccagattatcaagtcttctcaagttcttagtaacgatcattgccaatacttcttgttccagttgcttcgagggctcaagtatattcattcagccaatatcctgcaccgagatttgaaacctggtaaccttcttgtcaacgcaaactgcgatttaaagatatgcgattttggactagcgcgtgcgagcaacaccaagggtcagttcatgactgaatatgttgtgactcgttggtaccgagccccagagcttctcctctgttgtgacaactatggaacatccattgatgtttggtctgttggttgcattttcgccgagcttcttggtaggaaaccgatattccaaggaacggaatgtcttaaccagctgaagctcattgtcaacattctcggaagccaaagagaagaagatcttgagttcatagataacccgaaagctaaaagatacattagatcacttccgtactcacctgggatgtctttatccagactttacccgggcgctcatgttttggccatcgaccttctgcagaaaatgcttgtttttgatccgtcaaagaggattagtgtctctgaagcactccagcatccatacatggcgcctctatatgacccgaatgcaaaccctcctgctcaagttcctatcgatctcgatgtagatgaggatttgagagaggagatgataagagaaatgatgtggaatgagatgcttcactaccatccacaagcttcaaccttaaacactgagctctgagctcaagtcttgtttgtacgggtaatttacagaaaacttcttcttcttatgtctgattgtcatcatagactcatagtgtatatagtcttgaaaaataagatgaagactaacttatagtttaagcgaatagtgatgccatggaagctctgttttatttaattacaagcttgatgtgtgtctgtaacatatgtacatagagagagctgttttttttttttaattacaagtttgatgtgtgtctgtaacatatgtacatagaaagagctgtgttttttttttaattacaagcttgatgtgtgtctgtaacatatgttcatagagagagctgtgtttctgtttctctgtttgtttgttgcgttcttgcagaacttttaaccctctcatgcaatccaagccttttgat

SEQ ID NO: 81364 - protein, 405 aa, Arabidopsis thaliana
  peptide (1)..(405): Ceres Seq. ID no. 12659451
  misc_feature (67)..(354): Pfam Name: Protein kinase domain Pfam Description: Protein kinase domain
  misc_feature (36)..(405): Homolog of NCBI NO: 15218451 NR Description: putative mitogen-activated protein kinase, MAP
  misc_feature (36)..(405): Homolog of NCBI NO: 533280 NR Description: ATMPK1 [Arabidopsis thaliana]
  misc_feature (36)..(402): Homolog of NCBI NO: 533281 NR Description: ATMPK2 [Arabidopsis thaliana]
  misc_feature (36)..(402): Homolog of NCBI NO: 18406388 NR Description: expressed protein; protein id: At1g59580.1, by cDNA: gi_14334921, supported by cDNA: gi_21281196, supported cDNA: gi_464137 [Arabidopsis thaliana]
  misc_feature (36)..(405): Homolog of NCBI NO: 2499614 NR Description: MITOGEN-ACTIVATED PROTEIN KINASE HOMOLOG NTF3
  misc_feature (36)..(405): Homolog of NCBI NO: 8132347 NR Description: MAP kinase PsMAPK2 [Pisum sativum]
  misc_feature (36)..(399): Homolog of NCBI NO: 2499612 NR Description: MITOGEN-ACTIVATED PROTEIN KINASE HOMOLOG 1 (PMEK1)
  misc_feature (36)..(397): Homolog of NCBI NO: 11869994 NR Description: MAP kinase 2 [Oryza sativa]
  misc_feature (36)..(397): Homolog of NCBI NO: 7341300 NR Description: MAP kinase MAPK2 [Oryza sativa]
  misc_feature (36)..(397): Homolog of NCBI NO: 24412848 NR Description: putative mitogen-activated protein kinase, msrmk3
PSVGQISLTSTGFSLRPNLTSGERRWSLITEGKQKMATLVDPPNGIRNEGKHYFSMWQTLFEIDTKYMPIKPIGRGAYGVVCSSVNSDTNEKVAIKKIHNVYENRIDALRTLRELKLLRHLRHENVIALKDVMMPIHKMSFKDVYLVYELMDTDLHQIIKSSQVLSNDHCQYFLFQLLRGLKYIHSANILHRDLKPGNLLVNANCDLKICDFGLARASNTKGQFMTEYVVTRWYRAPELLLCCDNYGTSIDVWSVGCIFAELLGRKPIFQGTECLNQLKLIVNILGSQREEDLEFIDNPKAKRYIRSLPYSPGMSLSRLYPGAHVLAIDLLQKMLVFDPSKRISVSEALQHPYMAPLYDPNANPPAQVPIDLDVDEDLREEMIREMMWNEMLHYHPQASTLNTEL

SEQ ID NO: 81365 - protein, 370 aa, Arabidopsis thaliana
  peptide (1)..(370): Ceres Seq. ID no. 12659452
  misc_feature (32)..(319): Pfam Name: Protein kinase domain Pfam Description: Protein kinase domain
  misc_feature (1)..(370): Homolog of NCBI NO: 15218451 NR Description: putative mitogen-activated protein kinase, MAP
  misc_feature (1)..(370): Homolog of NCBI NO: 533280 NR Description: ATMPK1 [Arabidopsis thaliana]
  misc_feature (1)..(367): Homolog of NCBI NO: 533281 NR Description: ATMPK2 [Arabidopsis thaliana]
  misc_feature (1)..(367): Homolog of NCBI NO: 18406388 NR Description: expressed protein; protein id: At1g59580.1, by cDNA: gi_14334921, supported by cDNA: gi_21281196, supported cDNA: gi_464137 [Arabidopsis thaliana]
  misc_feature (1)..(370): Homolog of NCBI NO: 2499614 NR Description: MITOGEN-ACTIVATED PROTEIN KINASE HOMOLOG NTF3
  misc_feature (1)..(370): Homolog of NCBI NO: 8132347 NR Description: MAP kinase PsMAPK2 [Pisum sativum]
  misc_feature (1)..(364): Homolog of NCBI NO: 2499612 NR Description: MITOGEN-ACTIVATED PROTEIN KINASE HOMOLOG 1 (PMEK1)
  misc_feature (1)..(362): Homolog of NCBI NO: 11869994 NR Description: MAP kinase 2 [Oryza sativa]
  misc_feature (1)..(362): Homolog of NCBI NO: 7341300 NR Description: MAP kinase MAPK2 [Oryza sativa]
  misc_feature (1)..(362): Homolog of NCBI NO: 24412848 NR Description: putative mitogen-activated protein kinase, msrmk3
MATLVDPPNGIRNEGKHYFSMWQTLFEIDTKYMPIKPIGRGAYGVVCSSVNSDTNEKVAIKKIHNVYENRIDALRTLRELKLLRHLRHENVIALKDVMMPIHKMSFKDVYLVYELMDTDLHQIIKSSQVLSNDHCQYFLFQLLRGLKYIHSANILHRDLKPGNLLVNANCDLKICDFGLARASNTKGQFMTEYVVTRWYRAPELLLCCDNYGTSIDVWSVGCIFAELLGRKPIFQGTECLNQLKLIVNILGSQREEDLEFIDNPKAKRYIRSLPYSPGMSLSRLYPGAHVLAIDLLQKMLVFDPSKRISVSEALQHPYMAPLYDPNANPPAQVPIDLDVDEDLREEMIREMMWNEMLHYHPQASTLNTEL

SEQ ID NO: 81366 - protein, 350 aa, Arabidopsis thaliana
  peptide (1)..(350): Ceres Seq. ID no. 12659453
  misc_feature (12)..(299): Pfam Name: Protein kinase domain Pfam Description: Protein kinase domain
  misc_feature (1)..(350): Homolog of NCBI NO: 15218451 NR Description: putative mitogen-activated protein kinase, MAP
  misc_feature (1)..(350): Homolog of NCBI NO: 533280 NR Description: ATMPK1 [Arabidopsis thaliana]
  misc_feature (1)..(347): Homolog of NCBI NO: 533281 NR Description: ATMPK2 [Arabidopsis thaliana]
  misc_feature (1)..(347): Homolog of NCBI NO: 18406388 NR Description: expressed protein; protein id: At1g59580.1, by cDNA: gi_14334921, supported by cDNA: gi_21281196, supported cDNA: gi_464137 [Arabidopsis thaliana]
  misc_feature (1)..(350): Homolog of NCBI NO: 2499614 NR Description: MITOGEN-ACTIVATED PROTEIN KINASE HOMOLOG NTF3
  misc_feature (1)..(350): Homolog of NCBI NO: 8132347 NR Description: MAP kinase PsMAPK2 [Pisum sativum]
  misc_feature (1)..(344): Homolog of NCBI NO: 2499612 NR Description: MITOGEN-ACTIVATED PROTEIN KINASE HOMOLOG 1 (PMEK1)
  misc_feature (1)..(342): Homolog of NCBI NO: 11869994 NR Description: MAP kinase 2 [Oryza sativa]
  misc_feature (1)..(342): Homolog of NCBI NO: 7341300 NR Description: MAP kinase MAPK2 [Oryza sativa]
  misc_feature (1)..(342): Homolog of NCBI NO: 24412848 NR Description: putative mitogen-activated protein kinase, msrmk3
MWQTLFEIDTKYMPIKPIGRGAYGVVCSSVNSDTNEKVAIKKIHNVYENRIDALRTLRELKLLRHLRHENVIALKDVMMPIHKMSFKDVYLVYELMDTDLHQIIKSSQVLSNDHCQYFLFQLLRGLKYIHSANILHRDLKPGNLLVNANCDLKICDFGLARASNTKGQFMTEYVVTRWYRAPELLLCCDNYGTSIDVWSVGCIFAELLGRKPIFQGTECLNQLKLIVNILGSQREEDLEFIDNPKAKRYIRSLPYSPGMSLSRLYPGAHVLAIDLLQKMLVFDPSKRISVSEALQHPYMAPLYDPNANPPAQVPIDLDVDEDLREEMIREMMWNEMLHYHPQASTLNTEL

SEQ ID NO: 81367 - DNA, 3181 bp, Arabidopsis thaliana
  misc_feature (1)..(3181): Ceres Seq. ID no. 12659457
  misc_feature: MA Experiment ID: 20000171 Result: Down-regulated in Transcription
  misc_feature: MA Experiment 20000171 PARAMETER Experiment Name: At_42deg_Heat_P Parameter: Age (day) Value: 14
  misc_feature: MA Experiment 20000171 PARAMETER Experiment Name: At_42deg_Heat_P Parameter: Organism Value: A. thaliana
  misc_feature: MA Experiment 20000171 PARAMETER Experiment Name: At_42deg_Heat_P Parameter: Plant Line Value: WS
  misc_feature: MA Experiment 20000171 PARAMETER Experiment Name: At_42deg_Heat_P Parameter: Temperature (deg C) Value: 42 vs. 22
  misc_feature: MA Experiment 20000171 PARAMETER Experiment Name: At_42deg_Heat_P Parameter: Timepoint (hr) Value: 1
  misc_feature: MA Experiment 20000171 PARAMETER Experiment Name: At_42deg_Heat_P Parameter: Tissue Value: Aerial
  misc_feature: MA Experiment ID: 20000173 Result: Down-regulated in Transcription
  misc_feature: MA Experiment 20000173 PARAMETER Experiment Name: At_42deg_Heat_P Parameter: Age (day) Value: 14
  misc_feature: MA Experiment 20000173 PARAMETER Experiment Name: At_42deg_Heat_P Parameter: Organism Value: A. thaliana
  misc_feature: MA Experiment 20000173 PARAMETER Experiment Name: At_42deg_Heat_P Parameter: Plant Line Value: WS
  misc_feature: MA Experiment 20000173 PARAMETER Experiment Name: At_42deg_Heat_P Parameter: Temperature (deg C) Value: 42 vs. 22
  misc_feature: MA Experiment 20000173 PARAMETER Experiment Name: At_42deg_Heat_P Parameter: Timepoint (hr) Value: 6
  misc_feature: MA Experiment 20000173 PARAMETER Experiment Name: At_42deg_Heat_P Parameter: Tissue Value: Aerial
  misc_feature: MA Experiment ID: 20000234 Result: Up-regulated in Transcription
  misc_feature: MA Experiment 20000234 PARAMETER Experiment Name: At_Siliques_P Parameter: Age (day) Value: 21
  misc_feature: MA Experiment 20000234 PARAMETER Experiment Name: At_Siliques_P Parameter: Organism Value: A. thaliana
  misc_feature: MA Experiment 20000234 PARAMETER Experiment Name: At_Siliques_P Parameter: Plant Line Value: WS
  misc_feature: MA Experiment 20000234 PARAMETER Experiment Name: At_Siliques_P Parameter: Tissue Value: Less Than 5mm Siliques vs. Whole Plant
  misc_feature: MA Experiment ID: 20001557 Result: Up-regulated in Transcription
  misc_feature: MA Experiment 20001557 PARAMETER Experiment Name: At_Drought_Soil_Dry_P Parameter: Age (day) Value: 27
  misc_feature: MA Experiment 20001557 PARAMETER Experiment Name: At_Drought_Soil_Dry_P Parameter: Organism Value: A. thaliana
  misc_feature: MA Experiment 20001557 PARAMETER Experiment Name: At_Drought_Soil_Dry_P Parameter: Plant Line Value: WS
  misc_feature: MA Experiment 20001557 PARAMETER Experiment Name: At_Drought_Soil_Dry_P Parameter: Post Timepoint (hr) Value: 3
  misc_feature: MA Experiment 20001557 PARAMETER Experiment Name: At_Drought_Soil_Dry_P Parameter: Post-Treatment Value: Re-Water vs. No Drought
  misc_feature: MA Experiment 20001557 PARAMETER Experiment Name: At_Drought_Soil_Dry_P Parameter: Timepoint (day) Value: 13
  misc_feature: MA Experiment 20001557 PARAMETER Experiment Name: At_Drought_Soil_Dry_P Parameter: Treatment Value: Drought vs. No Drought
cccaacgaaaaatcttagcttaacaccatcgcgaccggattccaaattccggcccatcgtctcaccgggaaagaccccgcctattgccgccgatttcggttccggtctgctcagatctaatcgagtggcttccttcttcctccagatctcttcactttgaatcggttactcgatctcgattcgcggagggcttttgctagtcgcgatggaggcgatcgatgagttgtctcagctctcagattcgatgaagcaggcggcgtctctcctcgccgacgaagatcccgacgaaacctcttcttccaagcgccctgccactttcctcaacgtcgttgccttgggaaatgtgggagctggaaagtctgcagttctaaacagtctaattgggcatccagtgctgccgacgggtgagaatggtgctacacgagctcctataataattgaattgagcagggagagttctttgagcagcaaggcaattatcttgcaaatcgacaataaatctcaacaagtttctgcaagtgctttgagacattctctgcaagatagacttagcaaaggagcctcagggaagaatcgtgatgaaataaacttaaaacttcgtaccagcacagctccaccattgaaattagttgatctgcctggactggaccagagaattgtggacgagtcaatgattgctgaatacgcgcaacacaatgatgccatactgctggttatagtgcctgctagccaggcatctgaaatttcatcatcccgagccctgaagattgcaaaggagtatgatccagagagtactaggacaataggcattattggaaaaattgaccaggcagcagagaactcgaaagcccttgcagctgttcaggctcttctttcaaatcaaggacctccaaaaacaactgacattccatgggttgctgttattggccaatccgtttcaattgcgtcagcacagtctggaagtggtgagaactccttagaaactgcttggcgtgctgagagtgaaagtcttaagtccattttgactggggctccacaaagcaagcttggcagaattgcgttggtggatacccttgctagccagattcgtagcagaatgaagctcaggcttccaagtgtcctgtctgggctccagggtaagtctcaaatagtgcaggatgagctagcgaggcttggtgaacaactagttaacagtgctgaaggtacaagggctatagctttggagctttgccgtgagtttgaagacaagtttcttctgcacttggctggtggtgaaggaagtggttggaaagttgttgcaagttttgaaggaaatttccccaaccgtatcaagcagcttccattggatagacattttgacctgaacaatgttaaaagggttgttttggaggcagatggttatcaaccttatcttatatctccagagaaagggttgagatcgttgataaagattgtccttgagttggctaaagacccggcacgcctttgtgttgatgaggttcaccgagttcttgttgacatagtttcagcttctgcaaatgctacacctggacttgggagatatcctcctttcaagcgagaggttgtagctatagcaagtgcagcacttgatggtttcaagaatgaagccaagaaaatggtggttgcactagttgatatggaacgcgcttttgtaccacctcaacattttatccgtcttgtgcaaaggagaatggaaagacaacgtcgcgaggaagagctgaaagggcgatcttctaagaagggacaagatgcagagcagtcccttttaagcagggctactagtcctcagccagatgggccaacagctggtggtagcttaaaatcaatgaaagacaaacctagtccgcaagataaagagacgccggaggtctctggtctgaaaactgctggacctgagggggagataacagcagggtacttaatgaagaaaagtgcaaaaacaaatgggtggagtaggcgatggtttgttctgaatgagaaaactggaaagcttggctataccaaaaagcaagaagaaagaaactttcggggcacgataactttggaggaatgcactattgaagaaatccccgaggacgaagtagaaaagtcaaagagctcgaaggacaagaaggcaaatggacctgattcaaaaggaccaggccttgtgtttaaaataacctgcaaggttccctataagactgtactcaaagctcacaatgcccttgtgcttaaggctgagagtgtagtcgacaagaacgagtggattaataagttgcaaaaggttatccaggctcgtggaggccaagtgggcagtgtttccatgaggcagagtctttcagaaggttcacttgataagatggttaggaaacccatcgatccagaagaggagctccggtggatgtcccaagaagtacggggttacgttgaagctgttcttaacagccttgcagccaatgttccaaaggctgttgttctttgtcaagtagagaaagcaaaggaagacatgctgaatcaactctacagttctataagtgcaataggcaatgaaaggattgagtcattgatacaagaggatcagaatgtcaaaagacgaagagagcgttaccagaaacaatcctctcttctttctaaactcacgaggcagcttagcattcacgacaaccgagcagcagctgcttcaagttattcggacaacagtggcactgagagtagcccaagagcaagtggaggttcttcaggggacgactggatgaatgccttcaactccgctgctaatggaccctcagactcattgtcaaagtacggttccggtggtcacagccgccgttacagtgaccctgcgcagaacggagatgcagcatcaccagggtctggtagcaaccgccgcaccacccccaatcggttgccaccagcaccaccgcctacaggttcagcttataggtattagaacctgaagaaaaaaccctggaagcgcattgtgtcccgttttctgggactacgttactcttattttttctagtttaagacagtgattggatgattgtactactgttttttggtctttgtagatagatattatcacacacatgtgttggcagctaaaaaagagtttggtctcatgagtcaaatgtctgtttgaatttttgttttatttcttattcaacttttcttggcatcc

SEQ ID NO: 81368 - protein, 914 aa, Arabidopsis thaliana
  peptide (1)..(914): Ceres Seq. ID no. 12659458
  misc_feature (219)..(512): Pfam Name: Dynamin central region Pfam Description: Dynamin central region
  misc_feature (1)..(883): Homolog of NCBI NO: 38175440 NR Description: putative dynamin homolog [Oryza sativa (japonica
  misc_feature (1)..(528): Homolog of NCBI NO: 34904996 NR Description: P0456B03.5 [Oryza sativa (japonica
  misc_feature (595)..(781): Homolog of NCBI NO: 34904996 NR Description: P0456B03.5 [Oryza sativa (japonica
  misc_feature (863)..(909): Homolog of NCBI NO: 34904996 NR Description: P0456B03.5 [Oryza sativa (japonica
  misc_feature (4)..(498): Homolog of NCBI NO: 30689768 NR Description: phragmoplastin -related [Arabidopsis thaliana]
  misc_feature (674)..(810): Homolog of NCBI NO: 30689768 NR Description: phragmoplastin -related [Arabidopsis thaliana]
  misc_feature (4)..(498): Homolog of NCBI NO: 30689765 NR Description: phragmoplastin -related [Arabidopsis thaliana]
  misc_feature (674)..(810): Homolog of NCBI NO: 30689765 NR Description: phragmoplastin -related [Arabidopsis thaliana]
  misc_feature (4)..(498): Homolog of NCBI NO: 30689760 NR Description: phragmoplastin -related [Arabidopsis thaliana]
  misc_feature (674)..(810): Homolog of NCBI NO: 30689760 NR Description: phragmoplastin -related [Arabidopsis thaliana]
MEAIDELSQLSDSMKQAASLLADEDPDETSSSKRPATFLNVVALGNVGAGKSAVLNSLIGHPVLPTGENGATRAPIIIELSRESSLSSKAIILQIDNKSQQVSASALRHSLQDRLSKGASGKNRDEINLKLRTSTAPPLKLVDLPGLDQRIVDESMIAEYAQHNDAILLVIVPASQASEISSSRALKIAKEYDPESTRTIGIIGKIDQAAENSKALAAVQALLSNQGPPKTTDIPWVAVIGQSVSIASAQSGSGENSLETAWRAESESLKSILTGAPQSKLGRIALVDTLASQIRSRMKLRLPSVLSGLQGKSQIVQDELARLGEQLVNSAEGTRAIALELCREFEDKFLLHLAGGEGSGWKVVASFEGNFPNRIKQLPLDRHFDLNNVKRVVLEADGYQPYLISPEKGLRSLIKIVLELAKDPARLCVDEVHRVLVDIVSASANATPGLGRYPPFKREVVAIASAALDGFKNEAKKMVVALVDMERAFVPPQHFIRLVQRRMERQRREEELKGRSSKKGQDAEQSLLSRATSPQPDGPTAGGSLKSMKDKPSPQDKETPEVSGLKTAGPEGEITAGYLMKKSAKTNGWSRRWFVLNEKTGKLGYTKKQEERNFRGTITLEECTIEEIPEDEVEKSKSSKDKKANGPDSKGPGLVFKITCKVPYKTVLKAHNALVLKAESVVDKNEWINKLQKVIQARGGQVGSVSMRQSLSEGSLDKMVRKPIDPEEELRWMSQEVRGYVEAVLNSLAANVPKAVVLCQVEKAKEDMLNQLYSSISAIGNERIESLIQEDQNVKRRRERYQKQSSLLSKLTRQLSIHDNRAAAASSYSDNSGTESSPRASGGSSGDDWMNAFNSAANGPSDSLSKYGSGGHSRRYSDPAQNGDAASPGSGSNRRTTPNRLPPAPPPTGSAYRY

SEQ ID NO: 81369 - protein, 901 aa, Arabidopsis thaliana
  peptide (1)..(901): Ceres Seq. ID no. 12659459
  misc_feature (206)..(499): Pfam Name: Dynamin central region Pfam Description: Dynamin central region
  misc_feature (1)..(870): Homolog of NCBI NO: 38175440 NR Description: putative dynamin homolog [Oryza sativa (japonica
  misc_feature (1)..(515): Homolog of NCBI NO: 34904996 NR Description: P0456B03.5 [Oryza sativa (japonica
  misc_feature (582)..(768): Homolog of NCBI NO: 34904996 NR Description: P0456B03.5 [Oryza sativa (japonica
  misc_feature (850)..(896): Homolog of NCBI NO: 34904996 NR Description: P0456B03.5 [Oryza sativa (japonica
  misc_feature (1)..(485): Homolog of NCBI NO: 30689768 NR Description: phragmoplastin -related [Arabidopsis thaliana]
  misc_feature (661)..(797): Homolog of NCBI NO: 30689768 NR Description: phragmoplastin -related [Arabidopsis thaliana]
  misc_feature (1)..(485): Homolog of NCBI NO: 30689765 NR Description: phragmoplastin -related [Arabidopsis thaliana]
  misc_feature (661)..(797): Homolog of NCBI NO: 30689765 NR Description: phragmoplastin -related [Arabidopsis thaliana]
  misc_feature (1)..(485): Homolog of NCBI NO: 30689760 NR Description: phragmoplastin -related [Arabidopsis thaliana]
  misc_feature (661)..(797): Homolog of NCBI NO: 30689760 NR Description: phragmoplastin -related [Arabidopsis thaliana]
MKQAASLLADEDPDETSSSKRPATFLNVVALGNVGAGKSAVLNSLIGHPVLPTGENGATRAPIIIELSRESSLSSKAIILQIDNKSQQVSASALRHSLQDRLSKGASGKNRDEINLKLRTSTAPPLKLVDLPGLDQRIVDESMIAEYAQHNDAILLVIVPASQASEISSSRALKIAKEYDPESTRTIGIIGKIDQAAENSKALAAVQALLSNQGPPKTTDIPWVAVIGQSVSIASAQSGSGENSLETAWRAESESLKSILTGAPQSKLGRIALVDTLASQIRSRMKLRLPSVLSGLQGKSQIVQDELARLGEQLVNSAEGTRAIALELCREFEDKFLLHLAGGEGSGWKVVASFEGNFPNRIKQLPLDRHFDLNNVKRVVLEADGYQPYLISPEKGLRSLIKIVLELAKDPARLCVDEVHRVLVDIVSASANATPGLGRYPPFKREVVAIASAALDGFKNEAKKMVVALVDMERAFVPPQHFIRLVQRRMERQRREEELKGRSSKKGQDAEQSLLSRATSPQPDGPTAGGSLKSMKDKPSPQDKETPEVSGLKTAGPEGEITAGYLMKKSAKTNGWSRRWFVLNEKTGKLGYTKKQEERNFRGTITLEECTIEEIPEDEVEKSKSSKDKKANGPDSKGPGLVFKITCKVPYKTVLKAHNALVLKAESVVDKNEWINKLQKVIQARGGQVGSVSMRQSLSEGSLDKMVRKPIDPEEELRWMSQEVRGYVEAVLNSLAANVPKAVVLCQVEKAKEDMLNQLYSSISAIGNERIESLIQEDQNVKRRRERYQKQSSLLSKLTRQLSIHDNRAAAASSYSDNSGTESSPRASGGSSGDDWMNAFNSAANGPSDSLSKYGSGGHSRRYSDPAQNGDAASPGSGSNRRTTPNRLPPAPPPTGSAYRY

SEQ ID NO: 81370 - protein, 759 aa, Arabidopsis thaliana
  peptide (1)..(759): Ceres Seq. ID no. 12659460
  misc_feature (64)..(357): Pfam Name: Dynamin central region Pfam Description: Dynamin central region
  misc_feature (1)..(728): Homolog of NCBI NO: 38175440 NR Description: putative dynamin homolog [Oryza sativa (japonica
  misc_feature (1)..(373): Homolog of NCBI NO: 34904996 NR Description: P0456B03.5 [Oryza sativa (japonica
  misc_feature (440)..(626): Homolog of NCBI NO: 34904996 NR Description: P0456B03.5 [Oryza sativa (japonica
  misc_feature (708)..(754): Homolog of NCBI NO: 34904996 NR Description: P0456B03.5 [Oryza sativa (japonica
  misc_feature (1)..(343): Homolog of NCBI NO: 30689768 NR Description: phragmoplastin -related [Arabidopsis thaliana]
  misc_feature (519)..(655): Homolog of NCBI NO: 30689768 NR Description: phragmoplastin -related [Arabidopsis thaliana]
  misc_feature (1)..(343): Homolog of NCBI NO: 30689765 NR Description: phragmoplastin -related [Arabidopsis thaliana]
  misc_feature (519)..(655): Homolog of NCBI NO: 30689765 NR Description: phragmoplastin -related [Arabidopsis thaliana]
  misc_feature (1)..(343): Homolog of NCBI NO: 30689760 NR Description: phragmoplastin -related [Arabidopsis thaliana]
  misc_feature (519)..(655): Homolog of NCBI NO: 30689760 NR Description: phragmoplastin -related [Arabidopsis thaliana]
MIAEYAQHNDAILLVIVPASQASEISSSRALKIAKEYDPESTRTIGIIGKIDQAAENSKALAAVQALLSNQGPPKTTDIPWVAVIGQSVSIASAQSGSGENSLETAWRAESESLKSILTGAPQSKLGRIALVDTLASQIRSRMKLRLPSVLSGLQGKSQIVQDELARLGEQLVNSAEGTRAIALELCREFEDKFLLHLAGGEGSGWKVVASFEGNFPNRIKQLPLDRHFDLNNVKRVVLEADGYQPYLISPEKGLRSLIKIVLELAKDPARLCVDEVHRVLVDIVSASANATPGLGRYPPFKREVVAIASAALDGFKNEAKKMVVALVDMERAFVPPQHFIRLVQRRMERQRREEELKGRSSKKGQDAEQSLLSRATSPQPDGPTAGGSLKSMKDKPSPQDKETPEVSGLKTAGPEGEITAGYLMKKSAKTNGWSRRWFVLNEKTGKLGYTKKQEERNFRGTITLEECTIEEIPEDEVEKSKSSKDKKANGPDSKGPGLVFKITCKVPYKTVLKAHNALVLKAESVVDKNEWINKLQKVIQARGGQVGSVSMRQSLSEGSLDKMVRKPIDPEEELRWMSQEVRGYVEAVLNSLAANVPKAVVLCQVEKAKEDMLNQLYSSISAIGNERIESLIQEDQNVKRRRERYQKQSSLLSKLTRQLSIHDNRAAAASSYSDNSGTESSPRASGGSSGDDWMNAFNSAANGPSDSLSKYGSGGHSRRYSDPAQNGDAASPGSGSNRRTTPNRLPPAPPPTGSAYRY

SEQ ID NO: 81371 - DNA, 1404 bp, Arabidopsis thaliana
  misc_feature (1)..(1404): Ceres Seq. ID no. 12659465
  misc_feature: MA Experiment ID: 20000235 Result: Down-regulated in Transcription
  misc_feature: MA Experiment 20000235 PARAMETER Experiment Name: At_Siliques_P Parameter: Age (day) Value: 21
  misc_feature: MA Experiment 20000235 PARAMETER Experiment Name: At_Siliques_P Parameter: Organism Value: A. thaliana
  misc_feature: MA Experiment 20000235 PARAMETER Experiment Name: At_Siliques_P Parameter: Plant Line Value: WS
  misc_feature: MA Experiment 20000235 PARAMETER Experiment Name: At_Siliques_P Parameter: Tissue Value: 5-10mm Siliques vs. Whole Plant
atgcgttgtacttccttctcaagtttcagtttgtctcttgaagacgcacttcatcttctccaacgtttcttatactcctcaaaccagattaagcagattcacacagttcttttgaccagcaacgcattggttgcttcgagatggaagacgaaatgcgtctacaacactctcattcgatcctatctcactacaggagaatacaagacttctcttgctctcttcactcatatgcttgcaagccatgtccaaccaaataacctcactttcccttctctgattaaagcagcttgctcatctttctctgtttcttatggcgttgccttacatggccaagctcttaaacggggttttctatgggatccatttgttcagacttcttttgtccggttctatggtgaagttggtgatttggagagctcgaggaagatgtttgatgatattttaaacccttgtgttgtagcttgtaacagtttgcttgacgcttgtggaagaaacggagagatggattatgctttcgagtattttcagagaatgcctgtaactgatgtggtctcttggaccactgttatcaacgggtttagtaagaaagggttacacgccaaagctttaatggtttttggtgagatgatacagaatgagcgtgcggtaataacacctaacgaggctactttcgtaagtgtactttcttcatgtgctaattttgatcaaggaggtattcgactggggaagcagattcatggatatgttatgagtaaagagatcattcttactacaactttgggtactgctttgcttgatatgtatggaaaagccggtgacttggagatggcattgaccatttttgatcaaattcgtgataagaaagtttgcgcttggaatgcgataatatcagctcttgcctccaatggtagacctaagcaagcgctggagatgtttgagatgatgaaatcaagctatgtgcatccgaatgggatcactttacttgcaatactcacggcttgtgctcgatctaaacttgtggatttaggtattcagttgttctcttctatatgtagcgagtacaagatcattccaacatcagaacattacggttgcgttgttgatctcattggcagagctggactattggttgacgcagccaatttcattcaaagtttgcccttcgagcctgatgcttctgttctcggagctcttttgggcgcttgcaagattcatgagaatactgaattaggaaatacagtaggtaaacagcttattggactgcaacctcaacactgtggccagtatgtggcattgtcgacgttcaatgctttggatagcaattggtcagaagcagaaaaaatgaggaaagccatgatagaagctggaattcggaaaatccctgcttacagtgtgctgacttaa

SEQ ID NO: 81372 - protein, 467 aa, Arabidopsis thaliana
  peptide (1)..(467): Ceres Seq. ID no. 12659466
  misc_feature (290)..(324): Pfam Name: PPR repeat Pfam Description: PPR repeat
  misc_feature (1)..(467): Homolog of NCBI NO: 15218490 NR Description: hypothetical protein; protein id: At1g10330.1
  misc_feature (53)..(467): Homolog of NCBI NO: 15239979 NR Description: selenium-binding protein-like; protein id:
  misc_feature (53)..(466): Homolog of NCBI NO: 15240085 NR Description: selenium-binding protein-like; protein id:
  misc_feature (54)..(466): Homolog of NCBI NO: 15241593 NR Description: putative protein; protein id: At5g08310.1 thaliana] >gi|10178273|emb|CAC08331.1| putative protein
  misc_feature (53)..(464): Homolog of NCBI NO: 15241180 NR Description: putative protein; protein id: At5g56310.1 thaliana] >gi|10177829|dbj|BAB11258.1|
  misc_feature (70)..(464): Homolog of NCBI NO: 37534772 NR Description: putative selenium-binding protein [Oryza sativa
  misc_feature (156)..(466): Homolog of NCBI NO: 38347057 NR Description: OSJNBa0060P14.4 [Oryza sativa (japonica
  misc_feature (38)..(178): Homolog of NCBI NO: 38347057 NR Description: OSJNBa0060P14.4 [Oryza sativa (japonica
  misc_feature (50)..(466): Homolog of NCBI NO: 34915288 NR Description: similar to selenium-binding protein [Oryza sativa
  misc_feature (53)..(466): Homolog of NCBI NO: 9759241 NR Description: gene_id:MNC17.11~pir||T04732~strong similarity to
MRCTSFSSFSLSLEDALHLLQRFLYSSNQIKQIHTVLLTSNALVASRWKTKCVYNTLIRSYLTTGEYKTSLALFTHMLASHVQPNNLTFPSLIKAACSSFSVSYGVALHGQALKRGFLWDPFVQTSFVRFYGEVGDLESSRKMFDDILNPCVVACNSLLDACGRNGEMDYAFEYFQRMPVTDVVSWTTVINGFSKKGLHAKALMVFGEMIQNERAVITPNEATFVSVLSSCANFDQGGIRLGKQIHGYVMSKEIILTTTLGTALLDMYGKAGDLEMALTIFDQIRDKKVCAWNAIISALASNGRPKQALEMFEMMKSSYVHPNGITLLAILTACARSKLVDLGIQLFSSICSEYKIIPTSEHYGCVVDLIGRAGLLVDAANFIQSLPFEPDASVLGALLGACKIHENTELGNTVGKQLIGLQPQHCGQYVALSTFNALDSNWSEAEKMRKAMIEAGIRKIPAYSVLT

SEQ ID NO: 81373 - protein, 391 aa, Arabidopsis thaliana
  peptide (1)..(391): Ceres Seq. ID no. 12659467
  misc_feature (214)..(248): Pfam Name: PPR repeat Pfam Description: PPR repeat
  misc_feature (1)..(391): Homolog of NCBI NO: 15218490 NR Description: hypothetical protein; protein id: At1g10330.1
  misc_feature (1)..(391): Homolog of NCBI NO: 15239979 NR Description: selenium-binding protein-like; protein id:
  misc_feature (1)..(390): Homolog of NCBI NO: 15240085 NR Description: selenium-binding protein-like; protein id:
  misc_feature (1)..(390): Homolog of NCBI NO: 15241593 NR Description: putative protein; protein id: At5g08310.1 thaliana] >gi|10178273|emb|CAC08331.1| putative protein
  misc_feature (1)..(388): Homolog of NCBI NO: 15241180 NR Description: putative protein; protein id: At5g56310.1 thaliana] >gi|10177829|dbj|BAB11258.1|
  misc_feature (1)..(388): Homolog of NCBI NO: 37534772 NR Description: putative selenium-binding protein [Oryza sativa
  misc_feature (80)..(390): Homolog of NCBI NO: 38347057 NR Description: OSJNBa0060P14.4 [Oryza sativa (japonica
  misc_feature (1)..(102): Homolog of NCBI NO: 38347057 NR Description: OSJNBa0060P14.4 [Oryza sativa (japonica
  misc_feature (1)..(390): Homolog of NCBI NO: 34915288 NR Description: similar to selenium-binding protein [Oryza sativa
  misc_feature (1)..(390): Homolog of NCBI NO: 9759241 NR Description: gene_id:MNC17.11~pir||T04732~strong similarity to
MLASHVQPNNLTFPSLIKAACSSFSVSYGVALHGQALKRGFLWDPFVQTSFVRFYGEVGDLESSRKMFDDILNPCVVACNSLLDACGRNGEMDYAFEYFQRMPVTDVVSWTTVINGFSKKGLHAKALMVFGEMIQNERAVITPNEATFVSVLSSCANFDQGGIRLGKQIHGYVMSKEIILTTTLGTALLDMYGKAGDLEMALTIFDQIRDKKVCAWNAIISALASNGRPKQALEMFEMMKSSYVHPNGITLLAILTACARSKLVDLGIQLFSSICSEYKIIPTSEHYGCVVDLIGRAGLLVDAANFIQSLPFEPDASVLGALLGACKIHENTELGNTVGKQLIGLQPQHCGQYVALSTFNALDSNWSEAEKMRKAMIEAGIRKIPAYSVLT

SEQ ID NO: 81374 - protein, 325 aa, Arabidopsis thaliana
  peptide (1)..(325): Ceres Seq. ID no. 12659468
  misc_feature (148)..(182): Pfam Name: PPR repeat Pfam Description: PPR repeat
  misc_feature (1)..(325): Homolog of NCBI NO: 15218490 NR Description: hypothetical protein; protein id: At1g10330.1
  misc_feature (1)..(325): Homolog of NCBI NO: 15239979 NR Description: selenium-binding protein-like; protein id:
  misc_feature (1)..(324): Homolog of NCBI NO: 15240085 NR Description: selenium-binding protein-like; protein id:
  misc_feature (1)..(324): Homolog of NCBI NO: 15241593 NR Description: putative protein; protein id: At5g08310.1 thaliana] >gi|10178273|emb|CAC08331.1| putative protein
  misc_feature (1)..(322): Homolog of NCBI NO: 15241180 NR Description: putative protein; protein id: At5g56310.1 thaliana] >gi|10177829|dbj|BAB11258.1|
  misc_feature (1)..(322): Homolog of NCBI NO: 37534772 NR Description: putative selenium-binding protein [Oryza sativa
  misc_feature (14)..(324): Homolog of NCBI NO: 38347057 NR Description: OSJNBa0060P14.4 [Oryza sativa (japonica
  misc_feature (1)..(36): Homolog of NCBI NO: 38347057 NR Description: OSJNBa0060P14.4 [Oryza sativa (japonica
  misc_feature (1)..(324): Homolog of NCBI NO: 34915288 NR Description: similar to selenium-binding protein [Oryza sativa
  misc_feature (1)..(324): Homolog of NCBI NO: 9759241 NR Description: gene_id:MNC17.11~pir||T04732~strong similarity to
MFDDILNPCVVACNSLLDACGRNGEMDYAFEYFQRMPVTDVVSWTTVINGFSKKGLHAKALMVFGEMIQNERAVITPNEATFVSVLSSCANFDQGGIRLGKQIHGYVMSKEIILTTTLGTALLDMYGKAGDLEMALTIFDQIRDKKVCAWNAIISALASNGRPKQALEMFEMMKSSYVHPNGITLLAILTACARSKLVDLGIQLFSSICSEYKIIPTSEHYGCVVDLIGRAGLLVDAANFIQSLPFEPDASVLGALLGACKIHENTELGNTVGKQLIGLQPQHCGQYVALSTFNALDSNWSEAEKMRKAMIEAGIRKIPAYSVLT

SEQ ID NO: 81375 - DNA, 957 bp, Arabidopsis thaliana
  misc_feature (1)..(957): Ceres Seq. ID no. 12659473
  misc_feature: MA Experiment ID: 20000166 Result: Up-regulated in Transcription
  misc_feature: MA Experiment 20000166 PARAMETER Experiment Name: At_100uM_ABA_P Parameter: Age (day) Value: 14
  misc_feature: MA Experiment 20000166 PARAMETER Experiment Name: At_100uM_ABA_P Parameter: Organism Value: A. thaliana
  misc_feature: MA Experiment 20000166 PARAMETER Experiment Name: At_100uM_ABA_P Parameter: Plant Line Value: WS
  misc_feature: MA Experiment 20000166 PARAMETER Experiment Name: At_100uM_ABA_P Parameter: Timepoint (hr) Value: 1
  misc_feature: MA Experiment 20000166 PARAMETER Experiment Name: At_100uM_ABA_P Parameter: Tissue Value: Aerial
  misc_feature: MA Experiment 20000166 PARAMETER Experiment Name: At_100uM_ABA_P Parameter: Treatment Value: 100uM ABA vs. No Treatment
  misc_feature: MA Experiment ID: 20000173 Result: Up-regulated in Transcription
  misc_feature: MA Experiment 20000173 PARAMETER Experiment Name: At_42deg_Heat_P Parameter: Age (day) Value: 14
  misc_feature: MA Experiment 20000173 PARAMETER Experiment Name: At_42deg_Heat_P Parameter: Organism Value: A. thaliana
  misc_feature: MA Experiment 20000173 PARAMETER Experiment Name: At_42deg_Heat_P Parameter: Plant Line Value: WS
  misc_feature: MA Experiment 20000173 PARAMETER Experiment Name: At_42deg_Heat_P Parameter: Temperature (deg C) Value: 42 vs. 22
  misc_feature: MA Experiment 20000173 PARAMETER Experiment Name: At_42deg_Heat_P Parameter: Timepoint (hr) Value: 6
  misc_feature: MA Experiment 20000173 PARAMETER Experiment Name: At_42deg_Heat_P Parameter: Tissue Value: Aerial
  misc_feature: MA Experiment ID: 20000180 Result: Up-regulated in Transcription
  misc_feature: MA Experiment 20000180 PARAMETER Experiment Name: At_Germinating_Seeds_P Parameter: Age (hr) Value: 24 vs. 0
  misc_feature: MA Experiment 20000180 PARAMETER Experiment Name: At_Germinating_Seeds_P Parameter: Tissue Value: Germinating Seeds
  misc_feature: MA Experiment ID: 20000184 Result: Up-regulated in Transcription
  misc_feature: MA Experiment 20000184 PARAMETER Experiment Name: At_Shoots__P Parameter: Age (day) Value: 7
  misc_feature: MA Experiment 20000184 PARAMETER Experiment Name: At_Shoots__P Parameter: Tissue Value: Shoots vs. Whole Plant
  misc_feature: MA Experiment ID: 20000213 Result: Up-regulated in Transcription
  misc_feature: MA Experiment 20000213 PARAMETER Experiment Name: At_4deg_Cold_P Parameter: Timepoint (hr) Value: 2
  misc_feature: MA Experiment ID: 20000234 Result: Up-regulated in Transcription
  misc_feature: MA Experiment 20000234 PARAMETER Experiment Name: At_Siliques_P Parameter: Age (day) Value: 21
  misc_feature: MA Experiment 20000234 PARAMETER Experiment Name: At_Siliques_P Parameter: Organism Value: A. thaliana
  misc_feature: MA Experiment 20000234 PARAMETER Experiment Name: At_Siliques_P Parameter: Plant Line Value: WS
  misc_feature: MA Experiment 20000234 PARAMETER Experiment Name: At_Siliques_P Parameter: Tissue Value: Less Than 5mm Siliques vs. Whole Plant
  misc_feature: MA Experiment ID: 20000235 Result: Up-regulated in Transcription
  misc_feature: MA Experiment 20000235 PARAMETER Experiment Name: At_Siliques_P Parameter: Age (day) Value: 21
  misc_feature: MA Experiment 20000235 PARAMETER Experiment Name: At_Siliques_P Parameter: Organism Value: A. thaliana
  misc_feature: MA Experiment 20000235 PARAMETER Experiment Name: At_Siliques_P Parameter: Plant Line Value: WS
  misc_feature: MA Experiment 20000235 PARAMETER Experiment Name: At_Siliques_P Parameter: Tissue Value: 5-10mm Siliques vs. Whole Plant
  misc_feature: MA Experiment ID: 20000264 Result: Up-regulated in Transcription
  misc_feature: MA Experiment 20000264 PARAMETER Experiment Name: At_Open_Flower_P Parameter: Age (day) Value: 21
  misc_feature: MA Experiment 20000264 PARAMETER Experiment Name: At_Open_Flower_P Parameter: Plant Line Value: WS
  misc_feature: MA Experiment 20000264 PARAMETER Experiment Name: At_Open_Flower_P Parameter: Tissue Value: Open Flower vs. Whole Plant
  misc_feature: MA Experiment ID: 20000265 Result: Up-regulated in Transcription
  misc_feature: MA Experiment 20000265 PARAMETER Experiment Name: At_Open_Flower_P Parameter: Age (day) Value: 21
  misc_feature: MA Experiment 20000265 PARAMETER Experiment Name: At_Open_Flower_P Parameter: Plant Line Value: WS
  misc_feature: MA Experiment 20000265 PARAMETER Experiment Name: At_Open_Flower_P Parameter: Tissue Value: Closed Flower vs. Whole Plant
  misc_feature: MA Experiment ID: 20000267 Result: Up-regulated in Transcription
  misc_feature: MA Experiment 20000267 PARAMETER Experiment Name: At_Drought_P Parameter: Age (day) Value: 7
  misc_feature: MA Experiment 20000267 PARAMETER Experiment Name: At_Drought_P Parameter: Organism Value: A. thaliana
  misc_feature: MA Experiment 20000267 PARAMETER Experiment Name: At_Drought_P Parameter: Plant Line Value: WS
  misc_feature: MA Experiment 20000267 PARAMETER Experiment Name: At_Drought_P Parameter: Timepoint (hr) Value: 6
  misc_feature: MA Experiment 20000267 PARAMETER Experiment Name: At_Drought_P Parameter: Tissue Value: Whole Plant
  misc_feature: MA Experiment 20000267 PARAMETER Experiment Name: At_Drought_P Parameter: Treatment Value: Drought vs. No Drought
  misc_feature: MA Experiment ID: 20000268 Result: Up-regulated in Transcription
  misc_feature: MA Experiment 20000268 PARAMETER Experiment Name: At_100mM_NaCl__P Parameter: Age (day) Value: 14
  misc_feature: MA Experiment 20000268 PARAMETER Experiment Name: At_100mM_NaCl__P Parameter: Organism Value: A. thaliana
  misc_feature: MA Experiment 20000268 PARAMETER Experiment Name: At_100mM_NaCl__P Parameter: Plant Line Value: WS
  misc_feature: MA Experiment 20000268 PARAMETER Experiment Name: At_100mM_NaCl__P Parameter: Timepoint (hr) Value: 6
  misc_feature: MA Experiment 20000268 PARAMETER Experiment Name: At_100mM_NaCl__P Parameter: Tissue Value: Whole Plant
  misc_feature: MA Experiment 20000268 PARAMETER Experiment Name: At_100mM_NaCl__P Parameter: Treatment Value: 100mM NaCl vs. No Treatment
  misc_feature: MA Experiment ID: 20000286 Result: Up-regulated in Transcription
  misc_feature: MA Experiment 20000286 PARAMETER Experiment Name: At_Open_Flower_P Parameter: Age (day) Value: 21
  misc_feature: MA Experiment 20000286 PARAMETER Experiment Name: At_Open_Flower_P Parameter: Plant Line Value: WS
  misc_feature: MA Experiment 20000286 PARAMETER Experiment Name: At_Open_Flower_P Parameter: Tissue Value: Half Open vs. Whole Plant
  misc_feature: MA Experiment ID: 20000437 Result: Down-regulated in Transcription
  misc_feature: MA Experiment 20000437 PARAMETER Experiment Name: At_Drought_P Parameter: Age (day) Value: 8
  misc_feature: MA Experiment 20000437 PARAMETER Experiment Name: At_Drought_P Parameter: Organism Value: A. thaliana
  misc_feature: MA Experiment 20000437 PARAMETER Experiment Name: At_Drought_P Parameter: Plant Line Value: WS
  misc_feature: MA Experiment 20000437 PARAMETER Experiment Name: At_Drought_P Parameter: Timepoint (hr) Value: 24
  misc_feature: MA Experiment 20000437 PARAMETER Experiment Name: At_Drought_P Parameter: Tissue Value: Whole Plant
  misc_feature: MA Experiment 20000437 PARAMETER Experiment Name: At_Drought_P Parameter: Treatment Value: Drought vs. No Drought
  misc_feature: MA Experiment ID: 20000438 Result: Up-regulated in Transcription
  misc_feature: MA Experiment 20000438 PARAMETER Experiment Name: At_Shoots__P Parameter: Age (day) Value: 14
  misc_feature: MA Experiment 20000438 PARAMETER Experiment Name: At_Shoots__P Parameter: Tissue Value: Shoots vs. Whole Plant
  misc_feature: MA Experiment ID: 20000451 Result: Down-regulated in Transcription
  misc_feature: MA Experiment 20000451 PARAMETER Experiment Name: At_CS6879_Shoots-Roots_P Parameter: Age (day) Value: 14
  misc_feature: MA Experiment 20000451 PARAMETER Experiment Name: At_CS6879_Shoots-Roots_P Parameter: Organism Value: A. thaliana
  misc_feature: MA Experiment 20000451 PARAMETER Experiment Name: At_CS6879_Shoots-Roots_P Parameter: Plant Line Value: CS6879 vs. WS
  misc_feature: MA Experiment 20000451 PARAMETER Experiment Name: At_CS6879_Shoots-Roots_P Parameter: Tissue Value: Roots
  misc_feature: MA Experiment ID: 20000456 Result: Up-regulated in Transcription
  misc_feature: MA Experiment 20000456 PARAMETER Experiment Name: At_100uM_BA_P Parameter: Age (day) Value: 14
  misc_feature: MA Experiment 20000456 PARAMETER Experiment Name: At_100uM_BA_P Parameter: Organism Value: A. thaliana
  misc_feature: MA Experiment 20000456 PARAMETER Experiment Name: At_100uM_BA_P Parameter: Plant Line Value: WS
  misc_feature: MA Experiment 20000456 PARAMETER Experiment Name: At_100uM_BA_P Parameter: Timepoint (hr) Value: 6
  misc_feature: MA Experiment 20000456 PARAMETER Experiment Name: At_100uM_BA_P Parameter: Tissue Value: Aerial
  misc_feature: MA Experiment 20000456 PARAMETER Experiment Name: At_100uM_BA_P Parameter: Treatment Value: 100uM BA vs. No Treatment
  misc_feature: MA Experiment ID: 20000495 Result: Down-regulated in Transcription
  misc_feature: MA Experiment 20000495 PARAMETER Experiment Name: At_Guard_Cells_P Parameter: Harvest Date Value: 8/2/2002
  misc_feature: MA Experiment 20000495 PARAMETER Experiment Name: At_Guard_Cells_P Parameter: Organism Value: A. thaliana
  misc_feature: MA Experiment 20000495 PARAMETER Experiment Name: At_Guard_Cells_P Parameter: Tissue Value: Guard Cells vs. Leaves
  misc_feature: MA Experiment ID: 20000496 Result: Down-regulated in Transcription
  misc_feature: MA Experiment 20000496 PARAMETER Experiment Name: At_Guard_Cells_P Parameter: Harvest Date Value: 7/19/2002
  misc_feature: MA Experiment 20000496 PARAMETER Experiment Name: At_Guard_Cells_P Parameter: Organism Value: Canola
  misc_feature: MA Experiment 20000496 PARAMETER Experiment Name: At_Guard_Cells_P Parameter: Tissue Value: Guard Cells vs. Leaves
  misc_feature: MA Experiment ID: 20000506 Result: Up-regulated in Transcription
  misc_feature: MA Experiment 20000506 PARAMETER Experiment Name: At_Wounding_P Parameter: Organism Value: A. thaliana
  misc_feature: MA Experiment 20000506 PARAMETER Experiment Name: At_Wounding_P Parameter: Plant Line Value: WS
  misc_feature: MA Experiment 20000506 PARAMETER Experiment Name: At_Wounding_P Parameter: Timepoint (hr) Value: 6
  misc_feature: MA Experiment 20000506 PARAMETER Experiment Name: At_Wounding_P Parameter: Tissue Value: Aerial
  misc_feature: MA Experiment 20000506 PARAMETER Experiment Name: At_Wounding_P Parameter: Treatment Value: Wounding vs. No Wounding
  misc_feature: MA Experiment ID: 20000794 Result: Up-regulated in Transcription
  misc_feature: MA Experiment 20000794 PARAMETER Experiment Name: At_Petals_P Parameter: Age (day) Value: 23-25 days
  misc_feature: MA Experiment 20000794 PARAMETER Experiment Name: At_Petals_P Parameter: Plant Line Value: WS
  misc_feature: MA Experiment 20000794 PARAMETER Experiment Name: At_Petals_P Parameter: Tissue Value: Petals vs. Whole plant
  misc_feature: MA Experiment ID: 20001247 Result: Up-regulated in Transcription
  misc_feature: MA Experiment 20001247 PARAMETER Experiment Name: At_Far-red-induction_P Parameter: Age (day) Value: 7
  misc_feature: MA Experiment 20001247 PARAMETER Experiment Name: At_Far-red-induction_P Parameter: Light Value: Far-red vs. White
  misc_feature: MA Experiment 20001247 PARAMETER Experiment Name: At_Far-red-induction_P Parameter: Organism Value: A. thaliana
  misc_feature: MA Experiment 20001247 PARAMETER Experiment Name: At_Far-red-induction_P Parameter: Plant Line Value: Columbia
  misc_feature: MA Experiment 20001247 PARAMETER Experiment Name: At_Far-red-induction_P Parameter: Timepoint (hr) Value: 1
  misc_feature: MA Experiment 20001247 PARAMETER Experiment Name: At_Far-red-induction_P Parameter: Tissue Value: Whole Plant
  misc_feature: MA Experiment ID: 20001248 Result: Down-regulated in Transcription
  misc_feature: MA Experiment 20001248 PARAMETER Experiment Name: At_Far-red-induction_P Parameter: Age (day) Value: 7
  misc_feature: MA Experiment 20001248 PARAMETER Experiment Name: At_Far-red-induction_P Parameter: Light Value: Far-red vs. White
  misc_feature: MA Experiment 20001248 PARAMETER Experiment Name: At_Far-red-induction_P Parameter: Organism Value: A. thaliana
  misc_feature: MA Experiment 20001248 PARAMETER Experiment Name: At_Far-red-induction_P Parameter: Plant Line Value: Columbia
  misc_feature: MA Experiment 20001248 PARAMETER Experiment Name: At_Far-red-induction_P Parameter: Timepoint (hr) Value: 4
  misc_feature: MA Experiment 20001248 PARAMETER Experiment Name: At_Far-red-induction_P Parameter: Tissue Value: Whole Plant
  misc_feature: MA Experiment ID: 20001450 Result: Down-regulated in Transcription
  misc_feature: MA Experiment 20001450 PARAMETER Experiment Name: At_Far-red-induction_P Parameter: Age (day) Value: 7
  misc_feature: MA Experiment 20001450 PARAMETER Experiment Name: At_Far-red-induction_P Parameter: Light Value: Far-red vs. White
  misc_feature: MA Experiment 20001450 PARAMETER Experiment Name: At_Far-red-induction_P Parameter: Organism Value: A. thaliana
  misc_feature: MA Experiment 20001450 PARAMETER Experiment Name: At_Far-red-induction_P Parameter: Plant Line Value: Columbia
  misc_feature: MA Experiment 20001450 PARAMETER Experiment Name: At_Far-red-induction_P Parameter: Timepoint (hr) Value: 8
  misc_feature: MA Experiment 20001450 PARAMETER Experiment Name: At_Far-red-induction_P Parameter: Tissue Value: Whole Plant
  misc_feature: MA Experiment ID: 20001451 Result: Down-regulated in Transcription
  misc_feature: MA Experiment 20001451 PARAMETER Experiment Name: At_Far-red-induction_P Parameter: Age (day) Value: 7
  misc_feature: MA Experiment 20001451 PARAMETER Experiment Name: At_Far-red-induction_P Parameter: Light Value: Far-red vs. White
  misc_feature: MA Experiment 20001451 PARAMETER Experiment Name: At_Far-red-induction_P Parameter: Organism Value: A. thaliana
  misc_feature: MA Experiment 20001451 PARAMETER Experiment Name: At_Far-red-induction_P Parameter: Plant Line Value: Columbia
  misc_feature: MA Experiment 20001451 PARAMETER Experiment Name: At_Far-red-induction_P Parameter: Timepoint (hr) Value: 24
  misc_feature: MA Experiment 20001451 PARAMETER Experiment Name: At_Far-red-induction_P Parameter: Tissue Value: Whole Plant
  misc_feature: MA Experiment ID: 20001560 Result: Up-regulated in Transcription
  misc_feature: MA Experiment 20001560 PARAMETER Experiment Name: At_Drought_Soil_Dry_P Parameter: Age (day) Value: 28
  misc_feature: MA Experiment 20001560 PARAMETER Experiment Name: At_Drought_Soil_Dry_P Parameter: Organism Value: A. thaliana
  misc_feature: MA Experiment 20001560 PARAMETER Experiment Name: At_Drought_Soil_Dry_P Parameter: Plant Line Value: WS
  misc_feature: MA Experiment 20001560 PARAMETER Experiment Name: At_Drought_Soil_Dry_P Parameter: Post Timepoint (hr) Value: None
  misc_feature: MA Experiment 20001560 PARAMETER Experiment Name: At_Drought_Soil_Dry_P Parameter: Post-Treatment Value: None
  misc_feature: MA Experiment 20001560 PARAMETER Experiment Name: At_Drought_Soil_Dry_P Parameter: Timepoint (day) Value: 14
  misc_feature: MA Experiment 20001560 PARAMETER Experiment Name: At_Drought_Soil_Dry_P Parameter: Treatment Value: Drought vs. No Drought
aaaaacgcttcaacgtgtcaaaacattacatttccactctcacattcagacgcaccaatcctctgttttggattttgaagagaaaatggcaagcagcgacgtgaagctgatcggtgcatgggcgagtccctttgtgatgaggccgaggattgctctaaacctcaagtctgtcccctacgagttcctccaagagacgtttgggtctaagagcgagttgcttcttaaatcaaacccggttcacaagaagatcccggttctgcttcatgctgataaaccggtgagtgagtccaacatcatcgttgagtatatcgatgacacttggagctcatctggaccgtccattctcccttccgatccttacgatcgggccatggctcggttctgggctgcttacatcgacgaaaagtggtttgtcgctctaagaggtttcctaaaagccggaggagaagaagagaagaaagctgtgatagctcaactagaagaagggaatgcgtttctggagaaggcgttcattgattgcagcaaaggaaaaccgttcttcaacggtgacaacatcggttactcgacattgctctcgggtgcttcttggcttggttgagagtcaccgagttagcagtcagctataaaattcttgatgaggccaagacaccttctttgtccaaatgggctgagaatttctgtaatgatcccgctgtaaaacctgtcatgcccgagactgcaaagcttgctgaattcgcaaagaagatctttcctaagccgcaggcctaagttgttggtggactaggttttgtatttgtgggttgggttcttgcaagaataaattaagagtgttattgtttttagatggctttatctttgtgtgtgagttttaatcaggcgtacgttaaacgttacgtatgtatcaggtttggtgaatgattttatttaggttatgttgattgagaagtattttttttt

SEQ ID NO: 81376 - protein, 198 aa, Arabidopsis thaliana
  peptide (1)..(198): Ceres Seq. ID no. 12659474
  misc_feature (29)..(197): Homolog of NCBI NO: 11096016 NR Description: glutathione S-transferase [Arabidopsis thaliana]
  misc_feature (29)..(197): Homolog of NCBI NO: 15375408 NR Description: glutathione S-transferase [Arabidopsis thaliana]
  misc_feature (29)..(148): Homolog of NCBI NO: 11096018 NR Description: glutathione S-transferase [Arabidopsis thaliana]
  misc_feature (29)..(198): Homolog of NCBI NO: 15218517 NR Description: glutathione transferase, putative; protein id:
  misc_feature (29)..(198): Homolog of NCBI NO: 15218518 NR Description: glutathione transferase, putative; protein id: supported by cDNA: gi_11096015, supported by cDNA: gi_15375407
  misc_feature (31)..(197): Homolog of NCBI NO: 6652870 NR Description: glutathione S-transferase 1 [Papaver somniferum]
  misc_feature (31)..(197): Homolog of NCBI NO: 6652874 NR Description: glutathione S-transferase 3 [Papaver somniferum]
  misc_feature (29)..(135): Homolog of NCBI NO: 4914338 NR Description: F14N23.24 [Arabidopsis thaliana]
  misc_feature (29)..(197): Homolog of NCBI NO: 6856103 NR Description: glutathione S-transferase [Gossypium hirsutum]
  misc_feature (33)..(194): Homolog of NCBI NO: 15218872 NR Description: glutathione transferase, putative; protein id: supported by cDNA: gi_13877558 [Arabidopsis thaliana]
KTLQRVKTLHFHSHIQTHQSSVLDFEEKMASSDVKLIGAWASPFVMRPRIALNLKSVPYEFLQETFGSKSELLLKSNPVHKKIPVLLHADKPVSESNIIVEYIDDTWSSSGPSILPSDPYDRAMARFWAAYIDEKWFVALRGFLKAGGEEEKKAVIAQLEEGNAFLEKAFIDCSKGKPFFNGDNIGYSTLLSGASWLG

SEQ ID NO: 81377 - protein, 170 aa, Arabidopsis thaliana
  peptide (1)..(170): Ceres Seq. ID no. 12659475
  misc_feature (1)..(169): Homolog of NCBI NO: 11096016 NR Description: glutathione S-transferase [Arabidopsis thaliana]
  misc_feature (1)..(169): Homolog of NCBI NO: 15375408 NR Description: glutathione S-transferase [Arabidopsis thaliana]
  misc_feature (1)..(120): Homolog of NCBI NO: 11096018 NR Description: glutathione S-transferase [Arabidopsis thaliana]
  misc_feature (1)..(170): Homolog of NCBI NO: 15218517 NR Description: glutathione transferase, putative; protein id:
  misc_feature (1)..(170): Homolog of NCBI NO: 15218518 NR Description: glutathione transferase, putative; protein id: supported by cDNA: gi_11096015, supported by cDNA: gi_15375407
  misc_feature (3)..(169): Homolog of NCBI NO: 6652870 NR Description: glutathione S-transferase 1 [Papaver somniferum]
  misc_feature (3)..(169): Homolog of NCBI NO: 6652874 NR Description: glutathione S-transferase 3 [Papaver somniferum]
  misc_feature (1)..(107): Homolog of NCBI NO: 4914338 NR Description: F14N23.24 [Arabidopsis thaliana]
  misc_feature (1)..(169): Homolog of NCBI NO: 6856103 NR Description: glutathione S-transferase [Gossypium hirsutum]
  misc_feature (5)..(166): Homolog of NCBI NO: 15218872 NR Description: glutathione transferase, putative; protein id: supported by cDNA: gi_13877558 [Arabidopsis thaliana]
MASSDVKLIGAWASPFVMRPRIALNLKSVPYEFLQETFGSKSELLLKSNPVHKKIPVLLHADKPVSESNIIVEYIDDTWSSSGPSILPSDPYDRAMARFWAAYIDEKWFVALRGFLKAGGEEEKKAVIAQLEEGNAFLEKAFIDCSKGKPFFNGDNIGYSTLLSGASWLG

SEQ ID NO: 81378 - protein, 153 aa, Arabidopsis thaliana
  peptide (1)..(153): Ceres Seq. ID no. 12659476
  misc_feature (1)..(152): Homolog of NCBI NO: 11096016 NR Description: glutathione S-transferase [Arabidopsis thaliana]
  misc_feature (1)..(152): Homolog of NCBI NO: 15375408 NR Description: glutathione S-transferase [Arabidopsis thaliana]
  misc_feature (1)..(103): Homolog of NCBI NO: 11096018 NR Description: glutathione S-transferase [Arabidopsis thaliana]
  misc_feature (1)..(153): Homolog of NCBI NO: 15218517 NR Description: glutathione transferase, putative; protein id:
  misc_feature (1)..(153): Homolog of NCBI NO: 15218518 NR Description: glutathione transferase, putative; protein id: supported by cDNA: gi_11096015, supported by cDNA: gi_15375407
  misc_feature (1)..(152): Homolog of NCBI NO: 6652870 NR Description: glutathione S-transferase 1 [Papaver somniferum]
  misc_feature (1)..(152): Homolog of NCBI NO: 6652874 NR Description: glutathione S-transferase 3 [Papaver somniferum]
  misc_feature (1)..(90): Homolog of NCBI NO: 4914338 NR Description: F14N23.24 [Arabidopsis thaliana]
  misc_feature (1)..(152): Homolog of NCBI NO: 6856103 NR Description: glutathione S-transferase [Gossypium hirsutum]
  misc_feature (1)..(149): Homolog of NCBI NO: 15218872 NR Description: glutathione transferase, putative; protein id: supported by cDNA: gi_13877558 [Arabidopsis thaliana]
MRPRIALNLKSVPYEFLQETFGSKSELLLKSNPVHKKIPVLLHADKPVSESNIIVEYIDDTWSSSGPSILPSDPYDRAMARFWAAYIDEKWFVALRGFLKAGGEEEKKAVIAQLEEGNAFLEKAFIDCSKGKPFFNGDNIGYSTLLSGASWLG

SEQ ID NO: 81379 - DNA, 905 bp, Arabidopsis thaliana
  misc_feature (1)..(905): Ceres Seq. ID no. 12659485
  misc_feature: MA Experiment ID: 20000180 Result: Up-regulated in Transcription
  misc_feature: MA Experiment 20000180 PARAMETER Experiment Name: At_Germinating_Seeds_P Parameter: Age (hr) Value: 24 vs. 0
  misc_feature: MA Experiment 20000180 PARAMETER Experiment Name: At_Germinating_Seeds_P Parameter: Tissue Value: Germinating Seeds
atgattctaaacatactactaacgctcacacttcttatgggtcgggttaaatccgacccggacccgctccaagactactgcgtttctcctcctccttcatctcaccaacaaatcttcctcaacggcaaactttgcaaagatccgacacaagccagcgtctctgacttttcaacatccgcattatccagacccggaaacactaagaccaaaccgtttatgatcaacgtcactgtgaccacaaccgccaacctcccaggtctaaacacagtgggccttacaatggccaggctagacttcggaggctctggtgttgtcccaccgcacgtgcacccacgcgcctccgaagtgacagtctgcctcgacggtgtccttctcgtcgggttcgtggatacgtcgggtcgggtctttacgcaggagcttcatccgggtgagacattcgtgtttcccaaaggtttgatccattttctatataacattgatacggtgagctcagctttggcagtctctgggctgagtagtcagaatcctgggactcagattgtatctttgtcgtctttcatttcaaagcctccgtttctggtagaggttttgaagagtgcttatgatatcaacggccaggatgttgctaggatccgcaaaagtcttgaaggctaaaaatgctaaaagcctaaaactatatataactacatggccaaccaataactatatacaaatgtatatgactaactcaaaactatattatgacaacaacaaaaaaaaacgtataaacaataaaatgtcactaaaaaaggctatacactcaattccgaattgagtttttctgcaattctttagctatcttgttaactatgaatgtttttggaatgtgaacgatttatgatccatagaactatgtaaagagcatt

SEQ ID NO: 81380 - protein, 217 aa, Arabidopsis thaliana
  peptide (1)..(217): Ceres Seq. ID no. 12659486
  misc_feature (59)..(209): Pfam Name: Cupin Pfam Description: Cupin
  misc_feature (1)..(217): Homolog of NCBI NO: 22329473 NR Description: germin-like oxalate oxidase; protein id:
  misc_feature (71)..(217): Homolog of NCBI NO: 1755182 NR Description: germin-like protein [Arabidopsis thaliana]
  misc_feature (3)..(217): Homolog of NCBI NO: 7447346 NR Description: germin-like protein - Monterey pine
  misc_feature (3)..(217): Homolog of NCBI NO: 19071771 NR Description: germin-like protein [Pinus sylvestris]
  misc_feature (3)..(217): Homolog of NCBI NO: 2745849 NR Description: germin-like protein; PcGER1 [Pinus caribaea]
  misc_feature (5)..(217): Homolog of NCBI NO: 27436750 NR Description: Hypothetical protein [Oryza sativa (japonica
  misc_feature (19)..(204): Homolog of NCBI NO: 15230587 NR Description: germin-like protein; protein id: At3g05950.1
  misc_feature (2)..(213): Homolog of NCBI NO: 15241589 NR Description: germin - like protein; protein id: At5g38960.1
  misc_feature (2)..(213): Homolog of NCBI NO: 18202909 NR Description: Putative germin-like protein subfamily 1 member
  misc_feature (5)..(204): Homolog of NCBI NO: 15241653 NR Description: germin - like protein; protein id: At5g39150.1
MILNILLTLTLLMGRVKSDPDPLQDYCVSPPPSSHQQIFLNGKLCKDPTQASVSDFSTSALSRPGNTKTKPFMINVTVTTTANLPGLNTVGLTMARLDFGGSGVVPPHVHPRASEVTVCLDGVLLVGFVDTSGRVFTQELHPGETFVFPKGLIHFLYNIDTVSSALAVSGLSSQNPGTQIVSLSSFISKPPFLVEVLKSAYDINGQDVARIRKSLEG

SEQ ID NO: 81381 - protein, 205 aa, Arabidopsis thaliana
  peptide (1)..(205): Ceres Seq. ID no. 12659487
  misc_feature (47)..(197): Pfam Name: Cupin Pfam Description: Cupin
  misc_feature (1)..(205): Homolog of NCBI NO: 22329473 NR Description: germin-like oxalate oxidase; protein id:
  misc_feature (59)..(205): Homolog of NCBI NO: 1755182 NR Description: germin-like protein [Arabidopsis thaliana]
  misc_feature (1)..(205): Homolog of NCBI NO: 7447346 NR Description: germin-like protein - Monterey pine
  misc_feature (1)..(205): Homolog of NCBI NO: 19071771 NR Description: germin-like protein [Pinus sylvestris]
  misc_feature (1)..(205): Homolog of NCBI NO: 2745849 NR Description: germin-like protein; PcGER1 [Pinus caribaea]
  misc_feature (1)..(205): Homolog of NCBI NO: 27436750 NR Description: Hypothetical protein [Oryza sativa (japonica
  misc_feature (7)..(192): Homolog of NCBI NO: 15230587 NR Description: germin-like protein; protein id: At3g05950.1
  misc_feature (1)..(201): Homolog of NCBI NO: 15241589 NR Description: germin - like protein; protein id: At5g38960.1
  misc_feature (1)..(201): Homolog of NCBI NO: 18202909 NR Description: Putative germin-like protein subfamily 1 member
  misc_feature (1)..(192): Homolog of NCBI NO: 15241653 NR Description: germin - like protein; protein id: At5g39150.1
MGRVKSDPDPLQDYCVSPPPSSHQQIFLNGKLCKDPTQASVSDFSTSALSRPGNTKTKPFMINVTVTTTANLPGLNTVGLTMARLDFGGSGVVPPHVHPRASEVTVCLDGVLLVGFVDTSGRVFTQELHPGETFVFPKGLIHFLYNIDTVSSALAVSGLSSQNPGTQIVSLSSFISKPPFLVEVLKSAYDINGQDVARIRKSLEG

SEQ ID NO: 81382 - protein, 145 aa, Arabidopsis thaliana
  peptide (1)..(145): Ceres Seq. ID no. 12659488
  misc_feature (1)..(137): Pfam Name: Cupin Pfam Description: Cupin
  misc_feature (1)..(145): Homolog of NCBI NO: 22329473 NR Description: germin-like oxalate oxidase; protein id:
  misc_feature (1)..(145): Homolog of NCBI NO: 1755182 NR Description: germin-like protein [Arabidopsis thaliana]
  misc_feature (1)..(145): Homolog of NCBI NO: 7447346 NR Description: germin-like protein - Monterey pine
  misc_feature (1)..(145): Homolog of NCBI NO: 19071771 NR Description: germin-like protein [Pinus sylvestris]
  misc_feature (1)..(145): Homolog of NCBI NO: 2745849 NR Description: germin-like protein; PcGER1 [Pinus caribaea]
  misc_feature (1)..(145): Homolog of NCBI NO: 27436750 NR Description: Hypothetical protein [Oryza sativa (japonica
  misc_feature (1)..(132): Homolog of NCBI NO: 15230587 NR Description: germin-like protein; protein id: At3g05950.1
  misc_feature (1)..(141): Homolog of NCBI NO: 15241589 NR Description: germin - like protein; protein id: At5g38960.1
  misc_feature (1)..(141): Homolog of NCBI NO: 18202909 NR Description: Putative germin-like protein subfamily 1 member
  misc_feature (1)..(132): Homolog of NCBI NO: 15241653 NR Description: germin - like protein; protein id: At5g39150.1
MINVTVTTTANLPGLNTVGLTMARLDFGGSGVVPPHVHPRASEVTVCLDGVLLVGFVDTSGRVFTQELHPGETFVFPKGLIHFLYNIDTVSSALAVSGLSSQNPGTQIVSLSSFISKPPFLVEVLKSAYDINGQDVARIRKSLEG

SEQ ID NO: 81383 - DNA, 1047 bp, Arabidopsis thaliana
  misc_feature (1)..(1047): Ceres Seq. ID no. 12659557
  misc_feature: MA Experiment ID: 108434 Result: Down-regulated in Transcription
  misc_feature: MA Experiment 108434 PARAMETER Experiment Name: At_Root_Tips_cDNA_P Parameter: Tissue Value: Root Tips
  misc_feature: MA Experiment ID: 108435 Result: Up-regulated in Transcription
  misc_feature: MA Experiment 108435 PARAMETER Experiment Name: At_stm_Mutants_cDNA_P Parameter: Plant Line Value: wt Landsburg vs stm
  misc_feature: MA Experiment 108435 PARAMETER Experiment Name: At_stm_Mutants_cDNA_P Parameter: Tissue Value: Shoot Apical Meristem Region
  misc_feature: MA Experiment ID: 108461 Result: Down-regulated in Transcription
  misc_feature: MA Experiment 108461 PARAMETER Experiment Name: At_Germinating_Seeds_cDNA_P Parameter: Age (day) Value: 1 vs. 0
  misc_feature: MA Experiment 108461 PARAMETER Experiment Name: At_Germinating_Seeds_cDNA_P Parameter: Tissue Value: Germinating Seeds
  misc_feature: MA Experiment ID: 108572 Result: Down-regulated in Transcription
  misc_feature: MA Experiment 108572 PARAMETER Experiment Name: At_Drought_cDNA_P Parameter: Timepoint (hr) Value: 1
  misc_feature: MA Experiment 108572 PARAMETER Experiment Name: At_Drought_cDNA_P Parameter: Tissue Value: Aerial
  misc_feature: MA Experiment 108572 PARAMETER Experiment Name: At_Drought_cDNA_P Parameter: Treatment Value: Drought vs. No Drought
  misc_feature: MA Experiment ID: 108574 Result: Up-regulated in Transcription
  misc_feature: MA Experiment 108574 PARAMETER Experiment Name: At_Wounding__cDNA_P Parameter: Timepoint (hr) Value: 1
  misc_feature: MA Experiment 108574 PARAMETER Experiment Name: At_Wounding__cDNA_P Parameter: Tissue Value: Aerial
  misc_feature: MA Experiment 108574 PARAMETER Experiment Name: At_Wounding__cDNA_P Parameter: Treatment Value: Wounding vs. No Wounding
  misc_feature: MA Experiment ID: 108577 Result: Down-regulated in Transcription
  misc_feature: MA Experiment 108577 PARAMETER Experiment Name: At_42deg_Heat_cDNA_P Parameter: Temperature (deg C) Value: 42 vs. 22
  misc_feature: MA Experiment 108577 PARAMETER Experiment Name: At_42deg_Heat_cDNA_P Parameter: Timepoint (hr) Value: 6
  misc_feature: MA Experiment 108577 PARAMETER Experiment Name: At_42deg_Heat_cDNA_P Parameter: Tissue Value: Aerial
  misc_feature: MA Experiment ID: 108579 Result: Up-regulated in Transcription
  misc_feature: MA Experiment 108579 PARAMETER Experiment Name: At_4deg_Cold_cDNA_P Parameter: Temperature (deg C) Value: 4 vs. 22
  misc_feature: MA Experiment 108579 PARAMETER Experiment Name: At_4deg_Cold_cDNA_P Parameter: Timepoint (hr) Value: 6
  misc_feature: MA Experiment 108579 PARAMETER Experiment Name: At_4deg_Cold_cDNA_P Parameter: Tissue Value: Aerial
  misc_feature: MA Experiment ID: 108585 Result: Up-regulated in Transcription
  misc_feature: MA Experiment 108585 PARAMETER Experiment Name: At_5mM_NaNP_cDNA_P Parameter: Timepoint (hr) Value: 6
  misc_feature: MA Experiment 108585 PARAMETER Experiment Name: At_5mM_NaNP_cDNA_P Parameter: Tissue Value: Aerial
  misc_feature: MA Experiment 108585 PARAMETER Experiment Name: At_5mM_NaNP_cDNA_P Parameter: Treatment Value: null
  misc_feature: MA Experiment ID: 108667 Result: Up-regulated in Transcription
  misc_feature: MA Experiment 108667 PARAMETER Experiment Name: At_2mM_SA_cDNA_P Parameter: Plant Line Value: WS
  misc_feature: MA Experiment 108667 PARAMETER Experiment Name: At_2mM_SA_cDNA_P Parameter: Timepoint (hr) Value: 1
  misc_feature: MA Experiment 108667 PARAMETER Experiment Name: At_2mM_SA_cDNA_P Parameter: Treatment Value: 2mM SA vs. No Treatment
  misc_feature: MA Experiment ID: 20000069 Result: Up-regulated in Transcription
  misc_feature: MA Experiment 20000069 PARAMETER Experiment Name: At_100uM_ABA_Mutants_cDNA_P Parameter: Plant Line Value: CS23
  misc_feature: MA Experiment 20000069 PARAMETER Experiment Name: At_100uM_ABA_Mutants_cDNA_P Parameter: Timepoint (hr) Value: 6
  misc_feature: MA Experiment 20000069 PARAMETER Experiment Name: At_100uM_ABA_Mutants_cDNA_P Parameter: Tissue Value: Aerial
  misc_feature: MA Experiment 20000069 PARAMETER Experiment Name: At_100uM_ABA_Mutants_cDNA_P Parameter: Treatment Value: 100uM ABA vs. No Treatment
  misc_feature: MA Experiment ID: 20000090 Result: Down-regulated in Transcription
  misc_feature: MA Experiment ID: 20000144 Result: Down-regulated in Transcription
  misc_feature: MA Experiment 20000144 PARAMETER Experiment Name: At_42deg_Heat_cDNA_P Parameter: Temperature (deg C) Value: 42 vs. 22
  misc_feature: MA Experiment 20000144 PARAMETER Experiment Name: At_42deg_Heat_cDNA_P Parameter: Timepoint (hr) Value: 1
  misc_feature: MA Experiment 20000144 PARAMETER Experiment Name: At_42deg_Heat_cDNA_P Parameter: Tissue Value: Aerial
  misc_feature: MA Experiment ID: 20000224 Result: Down-regulated in Transcription
  misc_feature: MA Experiment ID: 20000306 Result: Down-regulated in Transcription
  misc_feature: MA Experiment 20000306 PARAMETER Experiment Name: At_Germinating_Seeds_Sub_P Parameter: Age (hr) Value: 6 vs. 0
  misc_feature: MA Experiment 20000306 PARAMETER Experiment Name: At_Germinating_Seeds_Sub_P Parameter: Organism Value: A. thaliana
  misc_feature: MA Experiment 20000306 PARAMETER Experiment Name: At_Germinating_Seeds_Sub_P Parameter: Plant Line Value: WS
  misc_feature: MA Experiment 20000306 PARAMETER Experiment Name: At_Germinating_Seeds_Sub_P Parameter: Tissue Value: Germinating Seeds
  misc_feature: MA Experiment ID: 20000307 Result: Down-regulated in Transcription
  misc_feature: MA Experiment 20000307 PARAMETER Experiment Name: At_Germinating_Seeds_Sub_P Parameter: Age (hr) Value: 24 vs. 0
  misc_feature: MA Experiment 20000307 PARAMETER Experiment Name: At_Germinating_Seeds_Sub_P Parameter: Organism Value: A. thaliana
  misc_feature: MA Experiment 20000307 PARAMETER Experiment Name: At_Germinating_Seeds_Sub_P Parameter: Plant Line Value: WS
  misc_feature: MA Experiment 20000307 PARAMETER Experiment Name: At_Germinating_Seeds_Sub_P Parameter: Tissue Value: Germinating Seeds
  misc_feature: MA Experiment ID: 20000314 Result: Up-regulated in Transcription
  misc_feature: MA Experiment 20000314 PARAMETER Experiment Name: At_14day_Shoots-Roots_Sub_P Parameter: Age (day) Value: 14
  misc_feature: MA Experiment 20000314 PARAMETER Experiment Name: At_14day_Shoots-Roots_Sub_P Parameter: Organism Value: A. thaliana
  misc_feature: MA Experiment 20000314 PARAMETER Experiment Name: At_14day_Shoots-Roots_Sub_P Parameter: Plant Line Value: WS
  misc_feature: MA Experiment 20000314 PARAMETER Experiment Name: At_14day_Shoots-Roots_Sub_P Parameter: Tissue Value: Roots vs. Whole Plant
  misc_feature: MA Experiment ID: 20000328 Result: Down-regulated in Transcription
  misc_feature: MA Experiment 20000328 PARAMETER Experiment Name: At_42deg_Heat_Sub_P Parameter: Age (day) Value: 14
  misc_feature: MA Experiment 20000328 PARAMETER Experiment Name: At_42deg_Heat_Sub_P Parameter: Organism Value: A. thaliana
  misc_feature: MA Experiment 20000328 PARAMETER Experiment Name: At_42deg_Heat_Sub_P Parameter: Plant Line Value: WS
  misc_feature: MA Experiment 20000328 PARAMETER Experiment Name: At_42deg_Heat_Sub_P Parameter: Temperature (deg C) Value: 42 vs. 22
  misc_feature: MA Experiment 20000328 PARAMETER Experiment Name: At_42deg_Heat_Sub_P Parameter: Timepoint (hr) Value: 6
  misc_feature: MA Experiment 20000328 PARAMETER Experiment Name: At_42deg_Heat_Sub_P Parameter: Tissue Value: Aerial
  misc_feature: MA Experiment ID: 20000332 Result: Up-regulated in Transcription
  misc_feature: MA Experiment 20000332 PARAMETER Experiment Name: At_4deg_Cold_Sub_P Parameter: Age (day) Value: 14
  misc_feature: MA Experiment 20000332 PARAMETER Experiment Name: At_4deg_Cold_Sub_P Parameter: Organism Value: A. thaliana
  misc_feature: MA Experiment 20000332 PARAMETER Experiment Name: At_4deg_Cold_Sub_P Parameter: Plant Line Value: WS
  misc_feature: MA Experiment 20000332 PARAMETER Experiment Name: At_4deg_Cold_Sub_P Parameter: Temperature (deg C) Value: 4 vs. 22
  misc_feature: MA Experiment 20000332 PARAMETER Experiment Name: At_4deg_Cold_Sub_P Parameter: Timepoint (hr) Value: 2
  misc_feature: MA Experiment 20000332 PARAMETER Experiment Name: At_4deg_Cold_Sub_P Parameter: Tissue Value: Aerial
  misc_feature: MA Experiment ID: 20000346 Result: Up-regulated in Transcription
  misc_feature: MA Experiment 20000346 PARAMETER Experiment Name: At_2mM_SA_Sub_P Parameter: Age (day) Value: 14
  misc_feature: MA Experiment 20000346 PARAMETER Experiment Name: At_2mM_SA_Sub_P Parameter: Organism Value: A. thaliana
  misc_feature: MA Experiment 20000346 PARAMETER Experiment Name: At_2mM_SA_Sub_P Parameter: Plant Line Value: WS
  misc_feature: MA Experiment 20000346 PARAMETER Experiment Name: At_2mM_SA_Sub_P Parameter: Timepoint (hr) Value: 1
  misc_feature: MA Experiment 20000346 PARAMETER Experiment Name: At_2mM_SA_Sub_P Parameter: Tissue Value: Aerial
  misc_feature: MA Experiment 20000346 PARAMETER Experiment Name: At_2mM_SA_Sub_P Parameter: Treatment Value: 2mM SA vs. No Treatment
  misc_feature: MA Experiment ID: 20000347 Result: Up-regulated in Transcription
  misc_feature: MA Experiment 20000347 PARAMETER Experiment Name: At_2mM_SA_Sub_P Parameter: Age (day) Value: 14
  misc_feature: MA Experiment 20000347 PARAMETER Experiment Name: At_2mM_SA_Sub_P Parameter: Organism Value: A. thaliana
  misc_feature: MA Experiment 20000347 PARAMETER Experiment Name: At_2mM_SA_Sub_P Parameter: Plant Line Value: WS
  misc_feature: MA Experiment 20000347 PARAMETER Experiment Name: At_2mM_SA_Sub_P Parameter: Timepoint (hr) Value: 6
  misc_feature: MA Experiment 20000347 PARAMETER Experiment Name: At_2mM_SA_Sub_P Parameter: Tissue Value: Aerial
  misc_feature: MA Experiment 20000347 PARAMETER Experiment Name: At_2mM_SA_Sub_P Parameter: Treatment Value: 2mM SA vs. No Treatment
  misc_feature: MA Experiment ID: 20000355 Result: Down-regulated in Transcription
  misc_feature: MA Experiment 20000355 PARAMETER Experiment Name: At_Siliques_Sub_P Parameter: Age (day) Value: 21
  misc_feature: MA Experiment 20000355 PARAMETER Experiment Name: At_Siliques_Sub_P Parameter: Organism Value: A. thaliana
  misc_feature: MA Experiment 20000355 PARAMETER Experiment Name: At_Siliques_Sub_P Parameter: Plant Line Value: WS
  misc_feature: MA Experiment 20000355 PARAMETER Experiment Name: At_Siliques_Sub_P Parameter: Tissue Value: Less Than 5mm Siliques vs. Whole Plant
  misc_feature: MA Experiment ID: 20000440 Result: Down-regulated in Transcription
  misc_feature: MA Experiment 20000440 PARAMETER Experiment Name: At_Closed-Flower__Sub_P Parameter: Tissue Value: Closed Flower vs. Whole Plant
  misc_feature: MA Experiment ID: 20000634 Result: Up-regulated in Transcription
  misc_feature: MA Experiment 20000634 PARAMETER Experiment Name: At_10percent_PEG_Sub_P Parameter: Age (day) Value: 12
  misc_feature: MA Experiment 20000634 PARAMETER Experiment Name: At_10percent_PEG_Sub_P Parameter: Organism Value: A. thaliana
  misc_feature: MA Experiment 20000634 PARAMETER Experiment Name: At_10percent_PEG_Sub_P Parameter: Plant Line Value: WS
  misc_feature: MA Experiment 20000634 PARAMETER Experiment Name: At_10percent_PEG_Sub_P Parameter: Timepoint (day) Value: 12
  misc_feature: MA Experiment 20000634 PARAMETER Experiment Name: At_10percent_PEG_Sub_P Parameter: Tissue Value: Whole Plant
  misc_feature: MA Experiment 20000634 PARAMETER Experiment Name: At_10percent_PEG_Sub_P Parameter: Treatment Value: 10% PEG vs. No Treatment
aacaatacatttgagatatcaatactcctgtgagaacaaaatgaagctttcttgtggtacaagctttgcgttcttacttctgtttcttcttgcggcacaatctgtgcatgtctatgcgggtagcttccacaaagacgttcagatacattggggtgatggccgcggaaagattcacgacagagatggaaaacttctttctctctcgctcgacaaatcctctggatccggttttcagtctaaccaggagtttctctatggcaaagccgaggttcaaatgaaacttgttcctggtaattcagctggaacagtgacaacattctatctaaaatctccgggaactacgtgggatgagatcgatttcgagttcttgggaaacataagtggtcatccatatactctccatactaatgtttacacaaaaggcacaggagacaaagaacaacaatttcatctatggttcgacccaaccgttaactttcacacttattgcatcacatggaatcctcaaaggattatttttacggttgatggaattcctattagagagttcaagaaccccgaggcgattggagtcccgttcccaactagacaaccaatgagactctacgcgagtctttgggaagccgagcattgggcaacaagaggaggattagagaaaacagattggtcaaaagctccttttactgctttttatagaaactacaatgtcgatggatgtgtatgggctaatggaaaatcatcttgttccgcgaattccccatggttcactcaaaaactcgattcgaacggccagacaagaatgaaaggtgtgcaaagtaaatacatgatctacaactattgcaccgataaaagaaggtttcctcgaggagttcctgccgagtgcacttaaattcttgattctttgatacatgaatatgttacttggcattgcctttgtaactcaatcaagtttttatttatttttatcatttatttgttgctcatatatacagtatgtggtgtttgtgtaagatgttttaagattgaagtaataaaaataaattatgg

SEQ ID NO: 81384 - protein, 295 aa, Arabidopsis thaliana
  peptide (1)..(295): Ceres Seq. ID no. 12659558
  misc_feature (42)..(224): Pfam Name: Glycosyl hydrolases family 16 Pfam Description: Glycosyl hydrolases family 16
  misc_feature (14)..(295): Homolog of NCBI NO: 15218642 NR Description: xyloglucan endotransglycosylase, putative; id: At1g65310.1, supported by cDNA: gi_13877724 [Arabidopsis
  misc_feature (14)..(295): Homolog of NCBI NO: 15234681 NR Description: xyloglucan endotransglycosylase, putative; id: At4g30280.1, supported by cDNA: 142204., supported by cDNA:
  misc_feature (21)..(295): Homolog of NCBI NO: 15234701 NR Description: xyloglucan endotransglycosylase, putative; id: At4g30290.1, supported by cDNA: gi_15215689 [Arabidopsis >gi|25313544|pir||B85354 hypothetical protein AT4g30290
  misc_feature (21)..(295): Homolog of NCBI NO: 15215690 NR Description: AT4g30290/F17I23_370 [Arabidopsis thaliana]
  misc_feature (18)..(295): Homolog of NCBI NO: 15238891 NR Description: xyloglucan endotransglycosylase, putative;
  misc_feature (25)..(294): Homolog of NCBI NO: 15242781 NR Description: xyloglucan endotransglycosylase (TCH4); protein At5g57560.1, supported by cDNA: gi_14194112, supported by cDNA:
  misc_feature (25)..(294): Homolog of NCBI NO: 3901012 NR Description: xyloglucan endotransglycosylase 1 [Fagus
  misc_feature (21)..(294): Homolog of NCBI NO: 15235997 NR Description: xyloglucan endotransglycosylase (XTR-6); protein At4g25810.1, supported by cDNA: gi_1244757, supported by cDNA:
  misc_feature (20)..(294): Homolog of NCBI NO: 22327914 NR Description: xyloglucan endotransglycosylase (XTR3); protein At5g57550.1 [Arabidopsis thaliana] endoxyloglucan transferase [Arabidopsis thaliana]
  misc_feature (21)..(294): Homolog of NCBI NO: 29500891 NR Description: putative xyloglucan endotransglycosylase [Cucumis >gi|29500899|emb|CAD87533.1| putative xyloglucan
TIHLRYQYSCENKMKLSCGTSFAFLLLFLLAAQSVHVYAGSFHKDVQIHWGDGRGKIHDRDGKLLSLSLDKSSGSGFQSNQEFLYGKAEVQMKLVPGNSAGTVTTFYLKSPGTTWDEIDFEFLGNISGHPYTLHTNVYTKGTGDKEQQFHLWFDPTVNFHTYCITWNPQRIIFTVDGIPIREFKNPEAIGVPFPTRQPMRLYASLWEAEHWATRGGLEKTDWSKAPFTAFYRNYNVDGCVWANGKSSCSANSPWFTQKLDSNGQTRMKGVQSKYMIYNYCTDKRRFPRGVPAECT

SEQ ID NO: 81385 - protein, 282 aa, Arabidopsis thaliana [sequence omitted]

SEQ ID NO: 81386 - protein, 204 aa, Arabidopsis thaliana
  peptide (1)..(204): Ceres Seq. ID no. 12659560
  misc_feature (1)..(133): Pfam Name: Glycosyl hydrolases family 16 Pfam Description: Glycosyl hydrolases family 16
  misc_feature (1)..(204): Homolog of NCBI NO: 15218642 NR Description: xyloglucan endotransglycosylase, putative; id: At1g65310.1, supported by cDNA: gi_13877724 [Arabidopsis
  misc_feature (1)..(204): Homolog of NCBI NO: 15234681 NR Description: xyloglucan endotransglycosylase, putative; id: At4g30280.1, supported by cDNA: 142204., supported by cDNA:
  misc_feature (1)..(204): Homolog of NCBI NO: 15234701 NR Description: xyloglucan endotransglycosylase, putative; id: At4g30290.1, supported by cDNA: gi_15215689 [Arabidopsis >gi|25313544|pir||B85354 hypothetical protein AT4g30290
  misc_feature (1)..(204): Homolog of NCBI NO: 15215690 NR Description: AT4g30290/F17I23_370 [Arabidopsis thaliana]
  misc_feature (1)..(204): Homolog of NCBI NO: 15238891 NR Description: xyloglucan endotransglycosylase, putative;
  misc_feature (1)..(203): Homolog of NCBI NO: 15242781 NR Description: xyloglucan endotransglycosylase (TCH4); protein At5g57560.1, supported by cDNA: gi_14194112, supported by cDNA:
  misc_feature (1)..(203): Homolog of NCBI NO: 3901012 NR Description: xyloglucan endotransglycosylase 1 [Fagus
  misc_feature (1)..(203): Homolog of NCBI NO: 15235997 NR Description: xyloglucan endotransglycosylase (XTR-6); protein At4g25810.1, supported by cDNA: gi_1244757, supported by cDNA:
  misc_feature (1)..(203): Homolog of NCBI NO: 22327914 NR Description: xyloglucan endotransglycosylase (XTR3); protein At5g57550.1 [Arabidopsis thaliana] endoxyloglucan transferase [Arabidopsis thaliana]
  misc_feature (1)..(203): Homolog of NCBI NO: 29500891 NR Description: putative xyloglucan endotransglycosylase [Cucumis >gi|29500899|emb|CAD87533.1| putative xyloglucan
MKLVPGNSAGTVTTFYLKSPGTTWDEIDFEFLGNISGHPYTLHTNVYTKGTGDKEQQFHLWFDPTVNFHTYCITWNPQRIIFTVDGIPIREFKNPEAIGVPFPTRQPMRLYASLWEAEHWATRGGLEKTDWSKAPFTAFYRNYNVDGCVWANGKSSCSANSPWFTQKLDSNGQTRMKGVQSKYMIYNYCTDKRRFPRGVPAECT

SEQ ID NO: 81387 - DNA, 736 bp, Arabidopsis thaliana
  misc_feature (1)..(736): Ceres Seq. ID no. 12659581
  misc_feature: MA Experiment ID: 20000171 Result: Up-regulated in Transcription
  misc_feature: MA Experiment 20000171 PARAMETER Experiment Name: At_42deg_Heat_P Parameter: Age (day) Value: 14
  misc_feature: MA Experiment 20000171 PARAMETER Experiment Name: At_42deg_Heat_P Parameter: Organism Value: A. thaliana
  misc_feature: MA Experiment 20000171 PARAMETER Experiment Name: At_42deg_Heat_P Parameter: Plant Line Value: WS
  misc_feature: MA Experiment 20000171 PARAMETER Experiment Name: At_42deg_Heat_P Parameter: Temperature (deg C) Value: 42 vs. 22
  misc_feature: MA Experiment 20000171 PARAMETER Experiment Name: At_42deg_Heat_P Parameter: Timepoint (hr) Value: 1
  misc_feature: MA Experiment 20000171 PARAMETER Experiment Name: At_42deg_Heat_P Parameter: Tissue Value: Aerial
  misc_feature: MA Experiment ID: 20000173 Result: Up-regulated in Transcription
  misc_feature: MA Experiment 20000173 PARAMETER Experiment Name: At_42deg_Heat_P Parameter: Age (day) Value: 14
  misc_feature: MA Experiment 20000173 PARAMETER Experiment Name: At_42deg_Heat_P Parameter: Organism Value: A. thaliana
  misc_feature: MA Experiment 20000173 PARAMETER Experiment Name: At_42deg_Heat_P Parameter: Plant Line Value: WS
  misc_feature: MA Experiment 20000173 PARAMETER Experiment Name: At_42deg_Heat_P Parameter: Temperature (deg C) Value: 42 vs. 22
  misc_feature: MA Experiment 20000173 PARAMETER Experiment Name: At_42deg_Heat_P Parameter: Timepoint (hr) Value: 6
  misc_feature: MA Experiment 20000173 PARAMETER Experiment Name: At_42deg_Heat_P Parameter: Tissue Value: Aerial
  misc_feature: MA Experiment ID: 20000214 Result: Down-regulated in Transcription
  misc_feature: MA Experiment 20000214 PARAMETER Experiment Name: At_4deg_Cold_P Parameter: Timepoint (hr) Value: 6
  misc_feature: MA Experiment ID: 20000794 Result: Up-regulated in Transcription
  misc_feature: MA Experiment 20000794 PARAMETER Experiment Name: At_Petals_P Parameter: Age (day) Value: 23-25 days
  misc_feature: MA Experiment 20000794 PARAMETER Experiment Name: At_Petals_P Parameter: Plant Line Value: WS
  misc_feature: MA Experiment 20000794 PARAMETER Experiment Name: At_Petals_P Parameter: Tissue Value: Petals vs. Whole plant
  misc_feature: MA Experiment ID: 20001554 Result: Up-regulated in Transcription
  misc_feature: MA Experiment 20001554 PARAMETER Experiment Name: At_Drought_Soil_Dry_P Parameter: Age (day) Value: 21
  misc_feature: MA Experiment 20001554 PARAMETER Experiment Name: At_Drought_Soil_Dry_P Parameter: Organism Value: A. thaliana
  misc_feature: MA Experiment 20001554 PARAMETER Experiment Name: At_Drought_Soil_Dry_P Parameter: Plant Line Value: WS
  misc_feature: MA Experiment 20001554 PARAMETER Experiment Name: At_Drought_Soil_Dry_P Parameter: Post Timepoint (hr) Value: None
  misc_feature: MA Experiment 20001554 PARAMETER Experiment Name: At_Drought_Soil_Dry_P Parameter: Post-Treatment Value: None
  misc_feature: MA Experiment 20001554 PARAMETER Experiment Name: At_Drought_Soil_Dry_P Parameter: Timepoint (day) Value: 7
  misc_feature: MA Experiment 20001554 PARAMETER Experiment Name: At_Drought_Soil_Dry_P Parameter: Treatment Value: Drought vs. No Drought
  misc_feature: MA Experiment ID: 20001555 Result: Up-regulated in Transcription
  misc_feature: MA Experiment 20001555 PARAMETER Experiment Name: At_Drought_Soil_Dry_P Parameter: Age (day) Value: 24
  misc_feature: MA Experiment 20001555 PARAMETER Experiment Name: At_Drought_Soil_Dry_P Parameter: Organism Value: A. thaliana
  misc_feature: MA Experiment 20001555 PARAMETER Experiment Name: At_Drought_Soil_Dry_P Parameter: Plant Line Value: WS
  misc_feature: MA Experiment 20001555 PARAMETER Experiment Name: At_Drought_Soil_Dry_P Parameter: Post Timepoint (hr) Value: None
  misc_feature: MA Experiment 20001555 PARAMETER Experiment Name: At_Drought_Soil_Dry_P Parameter: Post-Treatment Value: None
  misc_feature: MA Experiment 20001555 PARAMETER Experiment Name: At_Drought_Soil_Dry_P Parameter: Timepoint (day) Value: 10
  misc_feature: MA Experiment 20001555 PARAMETER Experiment Name: At_Drought_Soil_Dry_P Parameter: Treatment Value: Drought vs. No Drought
ctcgcattaagtccaaacactttcatttgtctcctttcgtcaactccacagagatctcctcatggctccaattgctgtcggcgatgtcgtaccagacggaactatctccttcttcgatgagaatgatcaacttcagaccgcctccgttcactctctcgccgccggtaaaaaagtcattctctttggtgttcctggtgctttcactcccacttgcagcatgaagcatgttcctgggttcattgagaaagcagaggagctgaagtcaaagggtgttgatgagatcatttgctttagcgtgaacgatccgtttgtgatgaaagcatggggaaaaacatacccagagaacaaacatgtgaagtttgtagctgatgggtctggagaatacacacaccttctcggacttgagcttgaccttaaagacaagggtcttggtgttaggtcaaggagatttgctctgttacttgatgatctcaaagtgactgtagccaatgtcgaatctggtggcgaattcacagtttccagcgccgatgatatcctcaaggctctctaagaaatgtaccacttgtgttgtctatgtaaaccgctgtatgtgtagtagaggattctatagcttgttctcagacattaaccaaggttgtaataaagcggtttcattgtgacttgtttggcataacaaagtatttggttttgttgtttttctgtgcgttgattaatgaaagatgtgactcattgacgt

SEQ ID NO: 81388 - protein, 162 aa, Arabidopsis thaliana
  peptide (1)..(162): Ceres Seq. ID no. 12659582
  misc_feature (6)..(160): Pfam Name: AhpC/TSA family Pfam Description: AhpC/TSA family
  misc_feature (1)..(162): Homolog of NCBI NO: 15218877 NR Description: type 2 peroxiredoxin, putative; protein id: supported by cDNA: 5476., supported by cDNA: gi_12083335,
  misc_feature (1)..(162): Homolog of NCBI NO: 4928472 NR Description: type 2 peroxiredoxin [Brassica rapa subsp.
  misc_feature (1)..(162): Homolog of NCBI NO: 21593881 NR Description: type 2 peroxiredoxin, putative [Arabidopsis
  misc_feature (1)..(162): Homolog of NCBI NO: 15218876 NR Description: type 2 peroxiredoxin, putative; protein id: supported by cDNA: 10862., supported by cDNA: gi_12083333, by cDNA: gi_4704731 [Arabidopsis thaliana]
  misc_feature (1)..(162): Homolog of NCBI NO: 18406870 NR Description: peroxiredoxin, putative; protein id: At1g60740.1,
  misc_feature (1)..(162): Homolog of NCBI NO: 4704732 NR Description: peroxiredoxin TPx2 [Arabidopsis thaliana]
  misc_feature (1)..(162): Homolog of NCBI NO: 21553913 NR Description: peroxiredoxin, putative [Arabidopsis thaliana]
  misc_feature (1)..(162): Homolog of NCBI NO: 30841938 NR Description: thioredoxin peroxidase 1 [Lycopersicon esculentum]
  misc_feature (1)..(162): Homolog of NCBI NO: 18654477 NR Description: thioredoxin peroxidase [Capsicum annuum]
  misc_feature (1)..(162): Homolog of NCBI NO: 19548660 NR Description: peroxiredoxin [Populus tremula x Populus
MAPIAVGDVVPDGTISFFDENDQLQTASVHSLAAGKKVILFGVPGAFTPTCSMKHVPGFIEKAEELKSKGVDEIICFSVNDPFVMKAWGKTYPENKHVKFVADGSGEYTHLLGLELDLKDKGLGVRSRRFALLLDDLKVTVANVESGGEFTVSSADDILKAL

SEQ ID NO: 81389 - protein, 110 aa, Arabidopsis thaliana
  peptide (1)..(110): Ceres Seq. ID no. 12659583
  misc_feature (1)..(108): Pfam Name: AhpC/TSA family Pfam Description: AhpC/TSA family
  misc_feature (1)..(110): Homolog of NCBI NO: 15218877 NR Description: type 2 peroxiredoxin, putative; protein id: supported by cDNA: 5476., supported by cDNA: gi_12083335,
  misc_feature (1)..(110): Homolog of NCBI NO: 4928472 NR Description: type 2 peroxiredoxin [Brassica rapa subsp.
  misc_feature (1)..(110): Homolog of NCBI NO: 21593881 NR Description: type 2 peroxiredoxin, putative [Arabidopsis
  misc_feature (1)..(110): Homolog of NCBI NO: 15218876 NR Description: type 2 peroxiredoxin, putative; protein id: supported by cDNA: 10862., supported by cDNA: gi_12083333, by cDNA: gi_4704731 [Arabidopsis thaliana]
  misc_feature (1)..(110): Homolog of NCBI NO: 18406870 NR Description: peroxiredoxin, putative; protein id: At1g60740.1,
  misc_feature (1)..(110): Homolog of NCBI NO: 4704732 NR Description: peroxiredoxin TPx2 [Arabidopsis thaliana]
  misc_feature (1)..(110): Homolog of NCBI NO: 21553913 NR Description: peroxiredoxin, putative [Arabidopsis thaliana]
  misc_feature (1)..(110): Homolog of NCBI NO: 30841938 NR Description: thioredoxin peroxidase 1 [Lycopersicon esculentum]
  misc_feature (1)..(110): Homolog of NCBI NO: 18654477 NR Description: thioredoxin peroxidase [Capsicum annuum]
  misc_feature (1)..(110): Homolog of NCBI NO: 19548660 NR Description: peroxiredoxin [Populus tremula x Populus
MKHVPGFIEKAEELKSKGVDEIICFSVNDPFVMKAWGKTYPENKHVKFVADGSGEYTHLLGLELDLKDKGLGVRSRRFALLLDDLKVTVANVESGGEFTVSSADDILKAL

SEQ ID NO: 81390 - DNA, 798 bp, Arabidopsis thaliana
  misc_feature (1)..(798): Ceres Seq. ID no. 12659584
  misc_feature: MA Experiment ID: 108462 Result: Down-regulated in Transcription
  misc_feature: MA Experiment 108462 PARAMETER Experiment Name: At_Germinating_Seeds_cDNA_P Parameter: Age (day) Value: 2 vs. 0
  misc_feature: MA Experiment 108462 PARAMETER Experiment Name: At_Germinating_Seeds_cDNA_P Parameter: Tissue Value: Germinating Seeds
  misc_feature: MA Experiment ID: 108463 Result: Down-regulated in Transcription
  misc_feature: MA Experiment 108463 PARAMETER Experiment Name: At_Germinating_Seeds_cDNA_P Parameter: Age (day) Value: 3 vs. 0
  misc_feature: MA Experiment 108463 PARAMETER Experiment Name: At_Germinating_Seeds_cDNA_P Parameter: Tissue Value: Germinating Seeds
  misc_feature: MA Experiment ID: 108576 Result: Up-regulated in Transcription
  misc_feature: MA Experiment 108576 PARAMETER Experiment Name: At_42deg_Heat_cDNA_P Parameter: Temperature (deg C) Value: 42 vs. 22
  misc_feature: MA Experiment 108576 PARAMETER Experiment Name: At_42deg_Heat_cDNA_P Parameter: Timepoint (hr) Value: 1
  misc_feature: MA Experiment 108576 PARAMETER Experiment Name: At_42deg_Heat_cDNA_P Parameter: Tissue Value: Aerial
  misc_feature: MA Experiment ID: 108577 Result: Up-regulated in Transcription
  misc_feature: MA Experiment 108577 PARAMETER Experiment Name: At_42deg_Heat_cDNA_P Parameter: Temperature (deg C) Value: 42 vs. 22
  misc_feature: MA Experiment 108577 PARAMETER Experiment Name: At_42deg_Heat_cDNA_P Parameter: Timepoint (hr) Value: 6
  misc_feature: MA Experiment 108577 PARAMETER Experiment Name: At_42deg_Heat_cDNA_P Parameter: Tissue Value: Aerial
  misc_feature: MA Experiment ID: 20000093 Result: Up-regulated in Transcription
  misc_feature: MA Experiment 20000093 PARAMETER Experiment Name: At_42deg_Heat_cDNA_P Parameter: Temperature (deg C) Value: 42 vs. 22
  misc_feature: MA Experiment 20000093 PARAMETER Experiment Name: At_42deg_Heat_cDNA_P Parameter: Timepoint (hr) Value: 0.5
  misc_feature: MA Experiment 20000093 PARAMETER Experiment Name: At_42deg_Heat_cDNA_P Parameter: Tissue Value: Aerial
  misc_feature: MA Experiment ID: 20000111 Result: Up-regulated in Transcription
  misc_feature: MA Experiment 20000111 PARAMETER Experiment Name: At_42deg_Heat_cDNA_P Parameter: Temperature (deg C) Value: 42 vs. 22
  misc_feature: MA Experiment 20000111 PARAMETER Experiment Name: At_42deg_Heat_cDNA_P Parameter: Timepoint (hr) Value: 6
  misc_feature: MA Experiment 20000111 PARAMETER Experiment Name: At_42deg_Heat_cDNA_P Parameter: Tissue Value: Aerial
  misc_feature: MA Experiment ID: 20000112 Result: Up-regulated in Transcription
  misc_feature: MA Experiment 20000112 PARAMETER Experiment Name: At_42deg_Heat_cDNA_P Parameter: Temperature (deg C) Value: 42 vs. 22
  misc_feature: MA Experiment 20000112 PARAMETER Experiment Name: At_42deg_Heat_cDNA_P Parameter: Timepoint (hr) Value: 2
  misc_feature: MA Experiment 20000112 PARAMETER Experiment Name: At_42deg_Heat_cDNA_P Parameter: Tissue Value: Aerial
  misc_feature: MA Experiment ID: 20000144 Result: Up-regulated in Transcription
  misc_feature: MA Experiment 20000144 PARAMETER Experiment Name: At_42deg_Heat_cDNA_P Parameter: Temperature (deg C) Value: 42 vs. 22
  misc_feature: MA Experiment 20000144 PARAMETER Experiment Name: At_42deg_Heat_cDNA_P Parameter: Timepoint (hr) Value: 1
  misc_feature: MA Experiment 20000144 PARAMETER Experiment Name: At_42deg_Heat_cDNA_P Parameter: Tissue Value: Aerial
  misc_feature: MA Experiment ID: 20000171 Result: Up-regulated in Transcription
  misc_feature: MA Experiment 20000171 PARAMETER Experiment Name: At_42deg_Heat_P Parameter: Age (day) Value: 14
  misc_feature: MA Experiment 20000171 PARAMETER Experiment Name: At_42deg_Heat_P Parameter: Organism Value: A. thaliana
  misc_feature: MA Experiment 20000171 PARAMETER Experiment Name: At_42deg_Heat_P Parameter: Plant Line Value: WS
  misc_feature: MA Experiment 20000171 PARAMETER Experiment Name: At_42deg_Heat_P Parameter: Temperature (deg C) Value: 42 vs. 22
  misc_feature: MA Experiment 20000171 PARAMETER Experiment Name: At_42deg_Heat_P Parameter: Timepoint (hr) Value: 1
  misc_feature: MA Experiment 20000171 PARAMETER Experiment Name: At_42deg_Heat_P Parameter: Tissue Value: Aerial
  misc_feature: MA Experiment ID: 20000173 Result: Up-regulated in Transcription
  misc_feature: MA Experiment 20000173 PARAMETER Experiment Name: At_42deg_Heat_P Parameter: Age (day) Value: 14
  misc_feature: MA Experiment 20000173 PARAMETER Experiment Name: At_42deg_Heat_P Parameter: Organism Value: A. thaliana
  misc_feature: MA Experiment 20000173 PARAMETER Experiment Name: At_42deg_Heat_P Parameter: Plant Line Value: WS
  misc_feature: MA Experiment 20000173 PARAMETER Experiment Name: At_42deg_Heat_P Parameter: Temperature (deg C) Value: 42 vs. 22
  misc_feature: MA Experiment 20000173 PARAMETER Experiment Name: At_42deg_Heat_P Parameter: Timepoint (hr) Value: 6
  misc_feature: MA Experiment 20000173 PARAMETER Experiment Name: At_42deg_Heat_P Parameter: Tissue Value: Aerial
  misc_feature: MA Experiment ID: 20000214 Result: Down-regulated in Transcription
  misc_feature: MA Experiment 20000214 PARAMETER Experiment Name: At_4deg_Cold_P Parameter: Timepoint (hr) Value: 6
  misc_feature: MA Experiment ID: 20000794 Result: Up-regulated in Transcription
  misc_feature: MA Experiment 20000794 PARAMETER Experiment Name: At_Petals_P Parameter: Age (day) Value: 23-25 days
  misc_feature: MA Experiment 20000794 PARAMETER Experiment Name: At_Petals_P Parameter: Plant Line Value: WS
  misc_feature: MA Experiment 20000794 PARAMETER Experiment Name: At_Petals_P Parameter: Tissue Value: Petals vs. Whole plant
  misc_feature: MA Experiment ID: 20001554 Result: Up-regulated in Transcription
  misc_feature: MA Experiment 20001554 PARAMETER Experiment Name: At_Drought_Soil_Dry_P Parameter: Age (day) Value: 21
  misc_feature: MA Experiment 20001554 PARAMETER Experiment Name: At_Drought_Soil_Dry_P Parameter: Organism Value: A. thaliana
  misc_feature: MA Experiment 20001554 PARAMETER Experiment Name: At_Drought_Soil_Dry_P Parameter: Plant Line Value: WS
  misc_feature: MA Experiment 20001554 PARAMETER Experiment Name: At_Drought_Soil_Dry_P Parameter: Post Timepoint (hr) Value: None
  misc_feature: MA Experiment 20001554 PARAMETER Experiment Name: At_Drought_Soil_Dry_P Parameter: Post-Treatment Value: None
  misc_feature: MA Experiment 20001554 PARAMETER Experiment Name: At_Drought_Soil_Dry_P Parameter: Timepoint (day) Value: 7
  misc_feature: MA Experiment 20001554 PARAMETER Experiment Name: At_Drought_Soil_Dry_P Parameter: Treatment Value: Drought vs. No Drought
  misc_feature: MA Experiment ID: 20001555 Result: Up-regulated in Transcription
  misc_feature: MA Experiment 20001555 PARAMETER Experiment Name: At_Drought_Soil_Dry_P Parameter: Age (day) Value: 24
  misc_feature: MA Experiment 20001555 PARAMETER Experiment Name: At_Drought_Soil_Dry_P Parameter: Organism Value: A. thaliana
  misc_feature: MA Experiment 20001555 PARAMETER Experiment Name: At_Drought_Soil_Dry_P Parameter: Plant Line Value: WS
  misc_feature: MA Experiment 20001555 PARAMETER Experiment Name: At_Drought_Soil_Dry_P Parameter: Post Timepoint (hr) Value: None
  misc_feature: MA Experiment 20001555 PARAMETER Experiment Name: At_Drought_Soil_Dry_P Parameter: Post-Treatment Value: None
  misc_feature: MA Experiment 20001555 PARAMETER Experiment Name: At_Drought_Soil_Dry_P Parameter: Timepoint (day) Value: 10
  misc_feature: MA Experiment 20001555 PARAMETER Experiment Name: At_Drought_Soil_Dry_P Parameter: Treatment Value: Drought vs. No Drought
atccttttatctcattctggaaacttcttaccataacagaaaataaacaaatctcattccggaaaacgctcataaattgtccgaaagccctaaaaatctgagtctcgcattaagtccaaacactttcatttgtctcctttcgtcaactccacagagatctcctcatggctccaattgctgtcggcgatgtcgtaccagacggaactatctccttcttcgatgagaatgatcaacttcagaccgcctccgttcactctctcgccgccggtaaaaaagtcattctctttggtgttcctggtgctttcactcccacttgcagcatgaagcatgttcctgggttcattgagaaagcagaggagctgaagtcaaagggtgttgatgagatcatttgctttagcgtgaacgatccgtttgtgatgaaagcatggggaaaaacatacccagagaacaaacatgtgaagtttgtagctgatgggtctggagaatacacacaccttctcggacttgagcttgaccttaaagacaagggtcttggtgttaggtcaaggagatttgctctgttacttgatgatctcaaagtgactgtagccaatgtcgaatctggtggcgaattcacagtttccagcgccgatgatatcctcaaggctctctaagaaatgtaccacttgtgttgtctatgtaaaccgctgtatgtgtagtagaggattctatagcttgttctcagacattaaccaaggttgtaataaagcggtttcattgtgacttgtttggcataacaaagtatttggttttgttgtt

SEQ ID NO: 81391 - protein, 162 aa, Arabidopsis thaliana; identical to SEQ ID NO: 81388
  peptide (1)..(162): Ceres Seq. ID no. 12659585
  misc_feature (6)..(160): Pfam Name: AhpC/TSA family Pfam Description: AhpC/TSA family
  misc_feature (1)..(162): Homolog of NCBI NO: 15218877 NR Description: type 2 peroxiredoxin, putative; protein id: supported by cDNA: 5476., supported by cDNA: gi_12083335,
  misc_feature (1)..(162): Homolog of NCBI NO: 4928472 NR Description: type 2 peroxiredoxin [Brassica rapa subsp.
  misc_feature (1)..(162): Homolog of NCBI NO: 21593881 NR Description: type 2 peroxiredoxin, putative [Arabidopsis
  misc_feature (1)..(162): Homolog of NCBI NO: 15218876 NR Description: type 2 peroxiredoxin, putative; protein id: supported by cDNA: 10862., supported by cDNA: gi_12083333, by cDNA: gi_4704731 [Arabidopsis thaliana]
  misc_feature (1)..(162): Homolog of NCBI NO: 18406870 NR Description: peroxiredoxin, putative; protein id: At1g60740.1,
  misc_feature (1)..(162): Homolog of NCBI NO: 4704732 NR Description: peroxiredoxin TPx2 [Arabidopsis thaliana]
  misc_feature (1)..(162): Homolog of NCBI NO: 21553913 NR Description: peroxiredoxin, putative [Arabidopsis thaliana]
  misc_feature (1)..(162): Homolog of NCBI NO: 30841938 NR Description: thioredoxin peroxidase 1 [Lycopersicon esculentum]
  misc_feature (1)..(162): Homolog of NCBI NO: 18654477 NR Description: thioredoxin peroxidase [Capsicum annuum]
  misc_feature (1)..(162): Homolog of NCBI NO: 19548660 NR Description: peroxiredoxin [Populus tremula x Populus

SEQ ID NO: 81392 - protein, 110 aa, Arabidopsis thaliana; identical to SEQ ID NO: 81389
  peptide (1)..(110): Ceres Seq. ID no. 12659586
  misc_feature (1)..(108): Pfam Name: AhpC/TSA family Pfam Description: AhpC/TSA family
  misc_feature (1)..(110): Homolog of NCBI NO: 15218877 NR Description: type 2 peroxiredoxin, putative; protein id: supported by cDNA: 5476., supported by cDNA: gi_12083335,
  misc_feature (1)..(110): Homolog of NCBI NO: 4928472 NR Description: type 2 peroxiredoxin [Brassica rapa subsp.
  misc_feature (1)..(110): Homolog of NCBI NO: 21593881 NR Description: type 2 peroxiredoxin, putative [Arabidopsis
  misc_feature (1)..(110): Homolog of NCBI NO: 15218876 NR Description: type 2 peroxiredoxin, putative; protein id: supported by cDNA: 10862., supported by cDNA: gi_12083333, by cDNA: gi_4704731 [Arabidopsis thaliana]
  misc_feature (1)..(110): Homolog of NCBI NO: 18406870 NR Description: peroxiredoxin, putative; protein id: At1g60740.1,
  misc_feature (1)..(110): Homolog of NCBI NO: 4704732 NR Description: peroxiredoxin TPx2 [Arabidopsis thaliana]
  misc_feature (1)..(110): Homolog of NCBI NO: 21553913 NR Description: peroxiredoxin, putative [Arabidopsis thaliana]
  misc_feature (1)..(110): Homolog of NCBI NO: 30841938 NR Description: thioredoxin peroxidase 1 [Lycopersicon esculentum]
  misc_feature (1)..(110): Homolog of NCBI NO: 18654477 NR Description: thioredoxin peroxidase [Capsicum annuum]
  misc_feature (1)..(110): Homolog of NCBI NO: 19548660 NR Description: peroxiredoxin [Populus tremula x Populus

SEQ ID NO: 81393 - DNA, 650 bp, Arabidopsis thaliana
  misc_feature (1)..(650): Ceres Seq. ID no. 12659587
  misc_feature: MA Experiment ID: 20000171 Result: Up-regulated in Transcription
  misc_feature: MA Experiment 20000171 PARAMETER Experiment Name: At_42deg_Heat_P Parameter: Age (day) Value: 14
  misc_feature: MA Experiment 20000171 PARAMETER Experiment Name: At_42deg_Heat_P Parameter: Organism Value: A. thaliana
  misc_feature: MA Experiment 20000171 PARAMETER Experiment Name: At_42deg_Heat_P Parameter: Plant Line Value: WS
  misc_feature: MA Experiment 20000171 PARAMETER Experiment Name: At_42deg_Heat_P Parameter: Temperature (deg C) Value: 42 vs. 22
  misc_feature: MA Experiment 20000171 PARAMETER Experiment Name: At_42deg_Heat_P Parameter: Timepoint (hr) Value: 1
  misc_feature: MA Experiment 20000171 PARAMETER Experiment Name: At_42deg_Heat_P Parameter: Tissue Value: Aerial
  misc_feature: MA Experiment ID: 20000173 Result: Up-regulated in Transcription
  misc_feature: MA Experiment 20000173 PARAMETER Experiment Name: At_42deg_Heat_P Parameter: Age (day) Value: 14
  misc_feature: MA Experiment 20000173 PARAMETER Experiment Name: At_42deg_Heat_P Parameter: Organism Value: A. thaliana
  misc_feature: MA Experiment 20000173 PARAMETER Experiment Name: At_42deg_Heat_P Parameter: Plant Line Value: WS
  misc_feature: MA Experiment 20000173 PARAMETER Experiment Name: At_42deg_Heat_P Parameter: Temperature (deg C) Value: 42 vs. 22
  misc_feature: MA Experiment 20000173 PARAMETER Experiment Name: At_42deg_Heat_P Parameter: Timepoint (hr) Value: 6
  misc_feature: MA Experiment 20000173 PARAMETER Experiment Name: At_42deg_Heat_P Parameter: Tissue Value: Aerial
  misc_feature: MA Experiment ID: 20000214 Result: Down-regulated in Transcription
  misc_feature: MA Experiment 20000214 PARAMETER Experiment Name: At_4deg_Cold_P Parameter: Timepoint (hr) Value: 6
  misc_feature: MA Experiment ID: 20000794 Result: Up-regulated in Transcription
  misc_feature: MA Experiment 20000794 PARAMETER Experiment Name: At_Petals_P Parameter: Age (day) Value: 23-25 days
  misc_feature: MA Experiment 20000794 PARAMETER Experiment Name: At_Petals_P Parameter: Plant Line Value: WS
  misc_feature: MA Experiment 20000794 PARAMETER Experiment Name: At_Petals_P Parameter: Tissue Value: Petals vs. Whole plant
  misc_feature: MA Experiment ID: 20001554 Result: Up-regulated in Transcription
  misc_feature: MA Experiment 20001554 PARAMETER Experiment Name: At_Drought_Soil_Dry_P Parameter: Age (day) Value: 21
  misc_feature: MA Experiment 20001554 PARAMETER Experiment Name: At_Drought_Soil_Dry_P Parameter: Organism Value: A. thaliana
  misc_feature: MA Experiment 20001554 PARAMETER Experiment Name: At_Drought_Soil_Dry_P Parameter: Plant Line Value: WS
  misc_feature: MA Experiment 20001554 PARAMETER Experiment Name: At_Drought_Soil_Dry_P Parameter: Post Timepoint (hr) Value: None
  misc_feature: MA Experiment 20001554 PARAMETER Experiment Name: At_Drought_Soil_Dry_P Parameter: Post-Treatment Value: None
  misc_feature: MA Experiment 20001554 PARAMETER Experiment Name: At_Drought_Soil_Dry_P Parameter: Timepoint (day) Value: 7
  misc_feature: MA Experiment 20001554 PARAMETER Experiment Name: At_Drought_Soil_Dry_P Parameter: Treatment Value: Drought vs. No Drought
  misc_feature: MA Experiment ID: 20001555 Result: Up-regulated in Transcription
  misc_feature: MA Experiment 20001555 PARAMETER Experiment Name: At_Drought_Soil_Dry_P Parameter: Age (day) Value: 24
  misc_feature: MA Experiment 20001555 PARAMETER Experiment Name: At_Drought_Soil_Dry_P Parameter: Organism Value: A. thaliana
  misc_feature: MA Experiment 20001555 PARAMETER Experiment Name: At_Drought_Soil_Dry_P Parameter: Plant Line Value: WS
  misc_feature: MA Experiment 20001555 PARAMETER Experiment Name: At_Drought_Soil_Dry_P Parameter: Post Timepoint (hr) Value: None
  misc_feature: MA Experiment 20001555 PARAMETER Experiment Name: At_Drought_Soil_Dry_P Parameter: Post-Treatment Value: None
  misc_feature: MA Experiment 20001555 PARAMETER Experiment Name: At_Drought_Soil_Dry_P Parameter: Timepoint (day) Value: 10
  misc_feature: MA Experiment 20001555 PARAMETER Experiment Name: At_Drought_Soil_Dry_P Parameter: Treatment Value: Drought vs. No Drought
ctttcatttgtctcctttcgtcaactccacagagatctcctcatggctccaattgctgtcggcgatgtcgtaccagacggaactatctccttcttcgatgagaatgatcaacttcagaccgcctccgttcactctctcgccgccggtaaaaaagtcattctctttggtgttcctggtgctttcactcccacttgcagcatgaagcatgttcctgggttcattgagaaagcagaggagctgaagtcaaagggtgttgatgagatcatttgctttagcgtgaacgatccgtttgtgatgaaagcatggggaaaaacatacccagagaacaaacatgtgaagtttgtagctgatgggtctggagaatacacacaccttctcggacttgagcttgaccttaaagacaagggtcttggtgttaggtcaaggagatttgctctgttacttgatgatctcaaagtgactgtagccaatgtcgaatctggtggcgaattcacagtttccagcgccgatgatatcctcaaggctctctaagaaatgtaccacttgtgttgtctatgtaaaccgctgtatgtgtagtagaggattctatagcttgttctcagacattaaccaaggttgtaataaagcggtttcattgtgacttgtttggc

SEQ ID NO: 81394 - protein, 176 aa, Arabidopsis thaliana
  peptide (1)..(176): Ceres Seq. ID no. 12659588
  misc_feature (20)..(174): Pfam Name: AhpC/TSA family Pfam Description: AhpC/TSA family
  misc_feature (15)..(176): Homolog of NCBI NO: 15218877 NR Description: type 2 peroxiredoxin, putative; protein id: supported by cDNA: 5476., supported by cDNA: gi_12083335,
  misc_feature (15)..(176): Homolog of NCBI NO: 4928472 NR Description: type 2 peroxiredoxin [Brassica rapa subsp.
  misc_feature (15)..(176): Homolog of NCBI NO: 21593881 NR Description: type 2 peroxiredoxin, putative [Arabidopsis
  misc_feature (15)..(176): Homolog of NCBI NO: 15218876 NR Description: type 2 peroxiredoxin, putative; protein id: supported by cDNA: 10862., supported by cDNA: gi_12083333, by cDNA: gi_4704731 [Arabidopsis thaliana]
  misc_feature (15)..(176): Homolog of NCBI NO: 18406870 NR Description: peroxiredoxin, putative; protein id: At1g60740.1,
  misc_feature (15)..(176): Homolog of NCBI NO: 4704732 NR Description: peroxiredoxin TPx2 [Arabidopsis thaliana]
  misc_feature (15)..(176): Homolog of NCBI NO: 21553913 NR Description: peroxiredoxin, putative [Arabidopsis thaliana]
  misc_feature (15)..(176): Homolog of NCBI NO: 30841938 NR Description: thioredoxin peroxidase 1 [Lycopersicon esculentum]
  misc_feature (15)..(176): Homolog of NCBI NO: 18654477 NR Description: thioredoxin peroxidase [Capsicum annuum]
  misc_feature (15)..(176): Homolog of NCBI NO: 19548660 NR Description: peroxiredoxin [Populus tremula x Populus
LSFVSFRQLHRDLLMAPIAVGDVVPDGTISFFDENDQLQTASVHSLAAGKKVILFGVPGAFTPTCSMKHVPGFIEKAEELKSKGVDEIICFSVNDPFVMKAWGKTYPENKHVKFVADGSGEYTHLLGLELDLKDKGLGVRSRRFALLLDDLKVTVANVESGGEFTVSSADDILKAL

SEQ ID NO: 81395 - protein, 162 aa, Arabidopsis thaliana; identical to SEQ ID NO: 81388
  peptide (1)..(162): Ceres Seq. ID no. 12659589
  misc_feature (6)..(160): Pfam Name: AhpC/TSA family Pfam Description: AhpC/TSA family
  misc_feature (1)..(162): Homolog of NCBI NO: 15218877 NR Description: type 2 peroxiredoxin, putative; protein id: supported by cDNA: 5476., supported by cDNA: gi_12083335,
  misc_feature (1)..(162): Homolog of NCBI NO: 4928472 NR Description: type 2 peroxiredoxin [Brassica rapa subsp.
  misc_feature (1)..(162): Homolog of NCBI NO: 21593881 NR Description: type 2 peroxiredoxin, putative [Arabidopsis
  misc_feature (1)..(162): Homolog of NCBI NO: 15218876 NR Description: type 2 peroxiredoxin, putative; protein id: supported by cDNA: 10862., supported by cDNA: gi_12083333, by cDNA: gi_4704731 [Arabidopsis thaliana]
  misc_feature (1)..(162): Homolog of NCBI NO: 18406870 NR Description: peroxiredoxin, putative; protein id: At1g60740.1,
  misc_feature (1)..(162): Homolog of NCBI NO: 4704732 NR Description: peroxiredoxin TPx2 [Arabidopsis thaliana]
  misc_feature (1)..(162): Homolog of NCBI NO: 21553913 NR Description: peroxiredoxin, putative [Arabidopsis thaliana]
  misc_feature (1)..(162): Homolog of NCBI NO: 30841938 NR Description: thioredoxin peroxidase 1 [Lycopersicon esculentum]
  misc_feature (1)..(162): Homolog of NCBI NO: 18654477 NR Description: thioredoxin peroxidase [Capsicum annuum]
  misc_feature (1)..(162): Homolog of NCBI NO: 19548660 NR Description: peroxiredoxin [Populus tremula x Populus

SEQ ID NO: 81396 - protein, 110 aa, Arabidopsis thaliana; identical to SEQ ID NO: 81389
  peptide (1)..(110): Ceres Seq. ID no. 12659590
  misc_feature (1)..(108): Pfam Name: AhpC/TSA family Pfam Description: AhpC/TSA family
  misc_feature (1)..(110): Homolog of NCBI NO: 15218877 NR Description: type 2 peroxiredoxin, putative; protein id: supported by cDNA: 5476., supported by cDNA: gi_12083335,
  misc_feature (1)..(110): Homolog of NCBI NO: 4928472 NR Description: type 2 peroxiredoxin [Brassica rapa subsp.
  misc_feature (1)..(110): Homolog of NCBI NO: 21593881 NR Description: type 2 peroxiredoxin, putative [Arabidopsis
  misc_feature (1)..(110): Homolog of NCBI NO: 15218876 NR Description: type 2 peroxiredoxin, putative; protein id: supported by cDNA: 10862., supported by cDNA: gi_12083333, by cDNA: gi_4704731 [Arabidopsis thaliana]
  misc_feature (1)..(110): Homolog of NCBI NO: 18406870 NR Description: peroxiredoxin, putative; protein id: At1g60740.1,
  misc_feature (1)..(110): Homolog of NCBI NO: 4704732 NR Description: peroxiredoxin TPx2 [Arabidopsis thaliana]
  misc_feature (1)..(110): Homolog of NCBI NO: 21553913 NR Description: peroxiredoxin, putative [Arabidopsis thaliana]
  misc_feature (1)..(110): Homolog of NCBI NO: 30841938 NR Description: thioredoxin peroxidase 1 [Lycopersicon esculentum]
  misc_feature (1)..(110): Homolog of NCBI NO: 18654477 NR Description: thioredoxin peroxidase [Capsicum annuum]
  misc_feature (1)..(110): Homolog of NCBI NO: 19548660 NR Description: peroxiredoxin [Populus tremula x Populus

SEQ ID NO: 81397 - DNA, 729 bp, Arabidopsis thaliana
  misc_feature (1)..(729): Ceres Seq. ID no. 12659594
  misc_feature: MA Experiment ID: 20000171 Result: Up-regulated in Transcription
  misc_feature: MA Experiment 20000171 PARAMETER Experiment Name: At_42deg_Heat_P Parameter: Age (day) Value: 14
  misc_feature: MA Experiment 20000171 PARAMETER Experiment Name: At_42deg_Heat_P Parameter: Organism Value: A. thaliana
  misc_feature: MA Experiment 20000171 PARAMETER Experiment Name: At_42deg_Heat_P Parameter: Plant Line Value: WS
  misc_feature: MA Experiment 20000171 PARAMETER Experiment Name: At_42deg_Heat_P Parameter: Temperature (deg C) Value: 42 vs. 22
  misc_feature: MA Experiment 20000171 PARAMETER Experiment Name: At_42deg_Heat_P Parameter: Timepoint (hr) Value: 1
  misc_feature: MA Experiment 20000171 PARAMETER Experiment Name: At_42deg_Heat_P Parameter: Tissue Value: Aerial
  misc_feature: MA Experiment ID: 20000173 Result: Up-regulated in Transcription
  misc_feature: MA Experiment 20000173 PARAMETER Experiment Name: At_42deg_Heat_P Parameter: Age (day) Value: 14
  misc_feature: MA Experiment 20000173 PARAMETER Experiment Name: At_42deg_Heat_P Parameter: Organism Value: A. thaliana
  misc_feature: MA Experiment 20000173 PARAMETER Experiment Name: At_42deg_Heat_P Parameter: Plant Line Value: WS
  misc_feature: MA Experiment 20000173 PARAMETER Experiment Name: At_42deg_Heat_P Parameter: Temperature (deg C) Value: 42 vs. 22
  misc_feature: MA Experiment 20000173 PARAMETER Experiment Name: At_42deg_Heat_P Parameter: Timepoint (hr) Value: 6
  misc_feature: MA Experiment 20000173 PARAMETER Experiment Name: At_42deg_Heat_P Parameter: Tissue Value: Aerial
  misc_feature: MA Experiment ID: 20000214 Result: Down-regulated in Transcription
  misc_feature: MA Experiment 20000214 PARAMETER Experiment Name: At_4deg_Cold_P Parameter: Timepoint (hr) Value: 6
  misc_feature: MA Experiment ID: 20000794 Result: Up-regulated in Transcription
  misc_feature: MA Experiment 20000794 PARAMETER Experiment Name: At_Petals_P Parameter: Age (day) Value: 23-25 days
  misc_feature: MA Experiment 20000794 PARAMETER Experiment Name: At_Petals_P Parameter: Plant Line Value: WS
  misc_feature: MA Experiment 20000794 PARAMETER Experiment Name: At_Petals_P Parameter: Tissue Value: Petals vs. Whole plant
  misc_feature: MA Experiment ID: 20001554 Result: Up-regulated in Transcription
  misc_feature: MA Experiment 20001554 PARAMETER Experiment Name: At_Drought_Soil_Dry_P Parameter: Age (day) Value: 21
  misc_feature: MA Experiment 20001554 PARAMETER Experiment Name: At_Drought_Soil_Dry_P Parameter: Organism Value: A. thaliana
  misc_feature: MA Experiment 20001554 PARAMETER Experiment Name: At_Drought_Soil_Dry_P Parameter: Plant Line Value: WS
  misc_feature: MA Experiment 20001554 PARAMETER Experiment Name: At_Drought_Soil_Dry_P Parameter: Post Timepoint (hr) Value: None
  misc_feature: MA Experiment 20001554 PARAMETER Experiment Name: At_Drought_Soil_Dry_P Parameter: Post-Treatment Value: None
  misc_feature: MA Experiment 20001554 PARAMETER Experiment Name: At_Drought_Soil_Dry_P Parameter: Timepoint (day) Value: 7
  misc_feature: MA Experiment 20001554 PARAMETER Experiment Name: At_Drought_Soil_Dry_P Parameter: Treatment Value: Drought vs. No Drought
  misc_feature: MA Experiment ID: 20001555 Result: Up-regulated in Transcription
  misc_feature: MA Experiment 20001555 PARAMETER Experiment Name: At_Drought_Soil_Dry_P Parameter: Age (day) Value: 24
  misc_feature: MA Experiment 20001555 PARAMETER Experiment Name: At_Drought_Soil_Dry_P Parameter: Organism Value: A. thaliana
  misc_feature: MA Experiment 20001555 PARAMETER Experiment Name: At_Drought_Soil_Dry_P Parameter: Plant Line Value: WS
  misc_feature: MA Experiment 20001555 PARAMETER Experiment Name: At_Drought_Soil_Dry_P Parameter: Post Timepoint (hr) Value: None
  misc_feature: MA Experiment 20001555 PARAMETER Experiment Name: At_Drought_Soil_Dry_P Parameter: Post-Treatment Value: None
  misc_feature: MA Experiment 20001555 PARAMETER Experiment Name: At_Drought_Soil_Dry_P Parameter: Timepoint (day) Value: 10
  misc_feature: MA Experiment 20001555 PARAMETER Experiment Name: At_Drought_Soil_Dry_P Parameter: Treatment Value: Drought vs. No Drought
aagtccaaacactttcatttgtctcctttcgtcaactccacagagatctcctcatggctccaattgctgtcggcgatgtcgtaccagacggaactatctccttcttcgatgagaatgatcaacttcagaccgcctccgttcactctctcgccgccggtaaaaaagtcattctctttggtgttcctggtgctttcactcccacttgcagcatgaagcatgttcctgggttcattgagaaagcagaggagctgaagtcaaagggtgttgatgagatcatttgctttagcgtgaacgatccgtttgtgatgaaagcatggggaaaaacatacccagagaacaaacatgtgaagtttgtagctgatgggtctggagaatacacacaccttctcggacttgagcttgaccttaaagacaagggtcttggtgttaggtcaaggagatttgctctgttacttgatgatctcaaagtgactgtagccaatgtcgaatctggtggcgaattcacagtttccagcgccgatgatatcctcaaggctctctaagaaatgtaccacttgtgttgtctatgtaaaccgctgtatgtgtagtagaggattctatagcttgttctcagacattaaccaaggttgtaataaagcggtttcattgtgacttgtttggcataacaaagtatttggttttgttgtttttctgtgcgttgattaatgaaagatgtgactcattgacgtg

SEQ ID NO: 81398 - protein, 179 aa, Arabidopsis thaliana
  peptide (1)..(179): Ceres Seq. ID no. 12659595
  misc_feature (23)..(177): Pfam Name: AhpC/TSA family Pfam Description: AhpC/TSA family
  misc_feature (18)..(179): Homolog of NCBI NO: 15218877 NR Description: type 2 peroxiredoxin, putative; protein id: supported by cDNA: 5476., supported by cDNA: gi_12083335,
  misc_feature (18)..(179): Homolog of NCBI NO: 4928472 NR Description: type 2 peroxiredoxin [Brassica rapa subsp.
  misc_feature (18)..(179): Homolog of NCBI NO: 21593881 NR Description: type 2 peroxiredoxin, putative [Arabidopsis
  misc_feature (18)..(179): Homolog of NCBI NO: 15218876 NR Description: type 2 peroxiredoxin, putative; protein id: supported by cDNA: 10862., supported by cDNA: gi_12083333, by cDNA: gi_4704731 [Arabidopsis thaliana]
  misc_feature (18)..(179): Homolog of NCBI NO: 18406870 NR Description: peroxiredoxin, putative; protein id: At1g60740.1,
  misc_feature (18)..(179): Homolog of NCBI NO: 4704732 NR Description: peroxiredoxin TPx2 [Arabidopsis thaliana]
  misc_feature (18)..(179): Homolog of NCBI NO: 21553913 NR Description: peroxiredoxin, putative [Arabidopsis thaliana]
  misc_feature (18)..(179): Homolog of NCBI NO: 30841938 NR Description: thioredoxin peroxidase 1 [Lycopersicon esculentum]
  misc_feature (18)..(179): Homolog of NCBI NO: 18654477 NR Description: thioredoxin peroxidase [Capsicum annuum]
  misc_feature (18)..(179): Homolog of NCBI NO: 19548660 NR Description: peroxiredoxin [Populus tremula x Populus
VQTLSFVSFRQLHRDLLMAPIAVGDVVPDGTISFFDENDQLQTASVHSLAAGKKVILFGVPGAFTPTCSMKHVPGFIEKAEELKSKGVDEIICFSVNDPFVMKAWGKTYPENKHVKFVADGSGEYTHLLGLELDLKDKGLGVRSRRFALLLDDLKVTVANVESGGEFTVSSADDILKAL

SEQ ID NO: 81399 - protein, 162 aa, Arabidopsis thaliana; identical to SEQ ID NO: 81388
  peptide (1)..(162): Ceres Seq. ID no. 12659596
  misc_feature (6)..(160): Pfam Name: AhpC/TSA family Pfam Description: AhpC/TSA family
  misc_feature (1)..(162): Homolog of NCBI NO: 15218877 NR Description: type 2 peroxiredoxin, putative; protein id: supported by cDNA: 5476., supported by cDNA: gi_12083335,
  misc_feature (1)..(162): Homolog of NCBI NO: 4928472 NR Description: type 2 peroxiredoxin [Brassica rapa subsp.
  misc_feature (1)..(162): Homolog of NCBI NO: 21593881 NR Description: type 2 peroxiredoxin, putative [Arabidopsis
  misc_feature (1)..(162): Homolog of NCBI NO: 15218876 NR Description: type 2 peroxiredoxin, putative; protein id: supported by cDNA: 10862., supported by cDNA: gi_12083333, by cDNA: gi_4704731 [Arabidopsis thaliana]
  misc_feature (1)..(162): Homolog of NCBI NO: 18406870 NR Description: peroxiredoxin, putative; protein id: At1g60740.1,
  misc_feature (1)..(162): Homolog of NCBI NO: 4704732 NR Description: peroxiredoxin TPx2 [Arabidopsis thaliana]
  misc_feature (1)..(162): Homolog of NCBI NO: 21553913 NR Description: peroxiredoxin, putative [Arabidopsis thaliana]
  misc_feature (1)..(162): Homolog of NCBI NO: 30841938 NR Description: thioredoxin peroxidase 1 [Lycopersicon esculentum]
  misc_feature (1)..(162): Homolog of NCBI NO: 18654477 NR Description: thioredoxin peroxidase [Capsicum annuum]
  misc_feature (1)..(162): Homolog of NCBI NO: 19548660 NR Description: peroxiredoxin [Populus tremula x Populus

SEQ ID NO: 81400 - protein, 110 aa, Arabidopsis thaliana; identical to SEQ ID NO: 81389
  peptide (1)..(110): Ceres Seq. ID no. 12659597
  misc_feature (1)..(108): Pfam Name: AhpC/TSA family Pfam Description: AhpC/TSA family
  misc_feature (1)..(110): Homolog of NCBI NO: 15218877 NR Description: type 2 peroxiredoxin, putative; protein id: supported by cDNA: 5476., supported by cDNA: gi_12083335,
  misc_feature (1)..(110): Homolog of NCBI NO: 4928472 NR Description: type 2 peroxiredoxin [Brassica rapa subsp.
  misc_feature (1)..(110): Homolog of NCBI NO: 21593881 NR Description: type 2 peroxiredoxin, putative [Arabidopsis
  misc_feature (1)..(110): Homolog of NCBI NO: 15218876 NR Description: type 2 peroxiredoxin, putative; protein id: supported by cDNA: 10862., supported by cDNA: gi_12083333, by cDNA: gi_4704731 [Arabidopsis thaliana]
  misc_feature (1)..(110): Homolog of NCBI NO: 18406870 NR Description: peroxiredoxin, putative; protein id: At1g60740.1,
  misc_feature (1)..(110): Homolog of NCBI NO: 4704732 NR Description: peroxiredoxin TPx2 [Arabidopsis thaliana]
  misc_feature (1)..(110): Homolog of NCBI NO: 21553913 NR Description: peroxiredoxin, putative [Arabidopsis thaliana]
  misc_feature (1)..(110): Homolog of NCBI NO: 30841938 NR Description: thioredoxin peroxidase 1 [Lycopersicon esculentum]
  misc_feature (1)..(110): Homolog of NCBI NO: 18654477 NR Description: thioredoxin peroxidase [Capsicum annuum]
  misc_feature (1)..(110): Homolog of NCBI NO: 19548660 NR Description: peroxiredoxin [Populus tremula x Populus

SEQ ID NO: 81401 - DNA, 513 bp, Arabidopsis thaliana
  misc_feature (1)..(513): Ceres Seq. ID no. 12659627
  misc_feature: MA Experiment ID: 20000438 Result: Up-regulated in Transcription
  misc_feature: MA Experiment 20000438 PARAMETER Experiment Name: At_Shoots__P Parameter: Age (day) Value: 14
  misc_feature: MA Experiment 20000438 PARAMETER Experiment Name: At_Shoots__P Parameter: Tissue Value: Shoots vs. Whole Plant
  misc_feature: MA Experiment ID: 20000794 Result: Down-regulated in Transcription
  misc_feature: MA Experiment 20000794 PARAMETER Experiment Name: At_Petals_P Parameter: Age (day) Value: 23-25 days
  misc_feature: MA Experiment 20000794 PARAMETER Experiment Name: At_Petals_P Parameter: Plant Line Value: WS
  misc_feature: MA Experiment 20000794 PARAMETER Experiment Name: At_Petals_P Parameter: Tissue Value: Petals vs. Whole plant
atgacgaggttgctctctaggacgttcccgtccgtgaagcttcgcgattccaatcctaaagctcccgaattcaaaaatttgaaaaattcacaaacccaagttccgattccatcgtcttcttctccgcaagagaactcaaagattcccaaatccaaatcctggtctgtttatctcattctctccacgaccgaacccatcaaaacatatgtcggaatcaccaccgatttttctcgccgattaaagcagcacaatggtgaaatcagaggtggtgcaaaagcttcaagtgcaggaagaccatggctttgtgcttgcattatcactggattcacttgtttaagtcaagcttcttcgtttgaatcaaaatggaagatctttacaagaaagttaccgcggagaaagaaagacgaagacatgagtcagagtgatgctttgctacaacaccgtaggagagctttaaacaaagtcgaggaatcattagactgtagttatcttgaaactgactggaaaatctaa

SEQ ID NO: 81402 - protein, 170 aa, Arabidopsis thaliana
  peptide (1)..(170): Ceres Seq. ID no. 12659628
  misc_feature (1)..(170): Homolog of NCBI NO: 15239808 NR Description: putative protein; protein id: At5g43210.1 thaliana] >gi|10177383|dbj|BAB10584.1|
  misc_feature (74)..(106): Homolog of NCBI NO: 9294275 NR Description: gene_id:MZN14.8~unknown protein [Arabidopsis
  misc_feature (57)..(158): Homolog of NCBI NO: 19114332 NR Description: conserved hypothetical protein pombe] >gi|7106110|emb|CAB76036.1| conserved hypothetical protein
  misc_feature (57)..(133): Homolog of NCBI NO: 23617258 NR Description: hypothetical protein~predicted by FGENESH etc.
  misc_feature (37)..(170): Homolog of NCBI NO: 17507665 NR Description: Putative nuclear protein of eukaryotic origin
MTRLLSRTFPSVKLRDSNPKAPEFKNLKNSQTQVPIPSSSSPQENSKIPKSKSWSVYLILSTTEPIKTYVGITTDFSRRLKQHNGEIRGGAKASSAGRPWLCACIITGFTCLSQASSFESKWKIFTRKLPRRKKDEDMSQSDALLQHRRRALNKVEESLDCSYLETDWKI

SEQ ID NO: 81403 - DNA, 1771 bp, Arabidopsis thaliana
  misc_feature (1)..(1771): Ceres Seq. ID no. 12659651
  misc_feature: MA Experiment ID: 20000227 Result: Down-regulated in Transcription
  misc_feature: MA Experiment 20000227 PARAMETER Experiment Name: At_Root-Tips-vs-Tops_P Parameter: Tissue Value: Root Tips vs. Root Tops
  misc_feature: MA Experiment ID: 20000437 Result: Down-regulated in Transcription
  misc_feature: MA Experiment 20000437 PARAMETER Experiment Name: At_Drought_P Parameter: Age (day) Value: 8
  misc_feature: MA Experiment 20000437 PARAMETER Experiment Name: At_Drought_P Parameter: Organism Value: A. thaliana
  misc_feature: MA Experiment 20000437 PARAMETER Experiment Name: At_Drought_P Parameter: Plant Line Value: WS
  misc_feature: MA Experiment 20000437 PARAMETER Experiment Name: At_Drought_P Parameter: Timepoint (hr) Value: 24
  misc_feature: MA Experiment 20000437 PARAMETER Experiment Name: At_Drought_P Parameter: Tissue Value: Whole Plant
  misc_feature: MA Experiment 20000437 PARAMETER Experiment Name: At_Drought_P Parameter: Treatment Value: Drought vs. No Drought
  misc_feature: MA Experiment ID: 20000439 Result: Up-regulated in Transcription
  misc_feature: MA Experiment 20000439 PARAMETER Experiment Name: At_Roots__P Parameter: Age (day) Value: 14 vs. 21
  misc_feature: MA Experiment 20000439 PARAMETER Experiment Name: At_Roots__P Parameter: Organism Value: A. thaliana
  misc_feature: MA Experiment 20000439 PARAMETER Experiment Name: At_Roots__P Parameter: Tissue Value: Roots vs. Whole Plant
  misc_feature: MA Experiment ID: 20000527 Result: Down-regulated in Transcription
  misc_feature: MA Experiment 20000527 PARAMETER Experiment Name: At_10percent_PEG_P Parameter: Age (day) Value: 20
  misc_feature: MA Experiment 20000527 PARAMETER Experiment Name: At_10percent_PEG_P Parameter: Organism Value: A. thaliana
  misc_feature: MA Experiment 20000527 PARAMETER Experiment Name: At_10percent_PEG_P Parameter: Plant Line Value: WS
  misc_feature: MA Experiment 20000527 PARAMETER Experiment Name: At_10percent_PEG_P Parameter: Timepoint (day) Value: 20
  misc_feature: MA Experiment 20000527 PARAMETER Experiment Name: At_10percent_PEG_P Parameter: Tissue Value: Whole Plant
  misc_feature: MA Experiment 20000527 PARAMETER Experiment Name: At_10percent_PEG_P Parameter: Treatment Value: 10percent PEG vs. No Treatment
accacatatagtctctcctcaactctccagagaagttcttaatttctcctgccaagctgattaagagctctaggaaatggccgaacaacaactaggagtgctaaaggcactcgatgttgcgaagacgcaactttatcatttcacggcgattgtcatcgccggtatgggtttctttaccgatgcctacgatcttttttgcgtgtccttggtgacgaaactccttggccgcatctactatttcaatccggagtcagcgaagcctggctcacttccccctcatgttgcggccgcggtcaacggtgtggccctttgtggaaccctttctggtcaactcttcttcggttggctcggtgacaaactcggacggaaaaaagtgtacggtctcactttggtaatgatgatcttgtgctctgtcgcttctggtctctcttttggccacgaagccaagggtgtcatgaccaccctttgcttcttcaggttttggttgggatttggtattggaggtgactacccactttctgccaccatcatgtctgaatacgcaaacaagaagacccgtggggctttcatcgcagctgtcttcgccatgcaaggtgtcggtatcttggctggaggtttcgtggcactcgcagtatcttctatattcgacaaaaagttcccagctccaacatatgcagtaaacagggccctctcaacgcctcctcaagttgactacatttggcgaatcatcgtcatgtttggtgctttacccgcagctttgacttactactggcgtatgaagatgcctgaaactgcccgttacaccgctttggttgccaagaacatcaaacaagccacagccgacatgtccaaggtcttacaaacagatatcgagcttgaggaaagggtggaggatgacgtcaaagaccccaaacaaaactatggcttgttctccaaggaattccttagacgccatgggcttcatctccttggaactacctccacatggtttttgcttgacattgccttctacagccaaaacttgttccagaaggatattttctcggccatcggatggatcccaaaggcagccaccatgaacgccacccatgaggttttcaggattgctagggctcagactcttatcgccctttgcagtacagtcccaggctactggttcacagttgcgtttattgataccattggaaggtttaagatccaactaaatggatttttcatgatgaccgtgtttatgtttgccattgccttcccttacaaccactggatcaaaccagaaaaccgtatcggatttgtggttatgtactctcttactttcttcttcgccaattttggtccaaatgcaaccacttttattgtccctgctgagatattcccggccaggctaaggtctacatgtcatggaatatcagccgcggctggtaaggctggagccattgttggagcctttgggttcctatatgcggctcaatcacaagacaaggccaaggtagacgcaggatacccaccaggcatcggagttaagaactcattgatcatgcttggtgttcttaactttatcggtatgctcttcaccttccttgtcccagagcccaaaggcaagtcccttgaagaactctctggtgaggctgaggttagccatgacgagaaataattatgtatgtttattttgttatttggagtgcgatgtttggttttgttttcattttattggctcgttgaccttaagttatgatgttataagaatatttatgatatcatttaaatcttgtct

SEQ ID NO: 81404 - protein, 524 aa, Arabidopsis thaliana
  peptide (1)..(524): Ceres Seq. ID no. 12659652
  misc_feature (23)..(517): Pfam Name: Sugar (and other) transporter Pfam Description: Sugar (and other) transporter
  misc_feature (1)..(524): Homolog of NCBI NO: 15239848 NR Description: phosphate transporter (gb|AAB17265.1); protein At5g43350.1, supported by cDNA: gi_17979403, supported by cDNA: [Arabidopsis thaliana] >gi|1502428|gb|AAB17265.1| phosphate
  misc_feature (1)..(524): Homolog of NCBI NO: 17979404 NR Description: putative phosphate transporter protein
  misc_feature (1)..(524): Homolog of NCBI NO: 1523798 NR Description: phosphate transporter [Arabidopsis thaliana]
  misc_feature (1)..(524): Homolog of NCBI NO: 15239860 NR Description: inorganic phosphate transporter (dbj|BAA24282.1); id: At5g43370.1 [Arabidopsis thaliana] inorganic phosphate transporter [Arabidopsis thaliana]
  misc_feature (1)..(524): Homolog of NCBI NO: 1523793 NR Description: phosphate transporter [Arabidopsis thaliana]
  misc_feature (1)..(519): Homolog of NCBI NO: 15239851 NR Description: inorganic phosphate transporter (dbj|BAA24281.1); id: At5g43360.1 [Arabidopsis thaliana] inorganic phosphate transporter [Arabidopsis thaliana]
  misc_feature (1)..(519): Homolog of NCBI NO: 2149973 NR Description: putative proton/phosphate cotransporter
  misc_feature (5)..(518): Homolog of NCBI NO: 12697484 NR Description: phosphate transporter [Sesbania rostrata]
  misc_feature (5)..(518): Homolog of NCBI NO: 12697486 NR Description: phosphate transporter [Sesbania rostrata]
  misc_feature (4)..(518): Homolog of NCBI NO: 6177892 NR Description: Phospate transpoter [Nicotiana tabacum]
MAEQQLGVLKALDVAKTQLYHFTAIVIAGMGFFTDAYDLFCVSLVTKLLGRIYYFNPESAKPGSLPPHVAAAVNGVALCGTLSGQLFFGWLGDKLGRKKVYGLTLVMMILCSVASGLSFGHEAKGVMTTLCFFRFWLGFGIGGDYPLSATIMSEYANKKTRGAFIAAVFAMQGVGILAGGFVALAVSSIFDKKFPAPTYAVNRALSTPPQVDYIWRIIVMFGALPAALTYYWRMKMPETARYTALVAKNIKQATADMSKVLQTDIELEERVEDDVKDPKQNYGLFSKEFLRRHGLHLLGTTSTWFLLDIAFYSQNLFQKDIFSAIGWIPKAATMNATHEVFRIARAQTLIALCSTVPGYWFTVAFIDTIGRFKIQLNGFFMMTVFMFAIAFPYNHWIKPENRIGFVVMYSLTFFFANFGPNATTFIVPAEIFPARLRSTCHGISAAAGKAGAIVGAFGFLYAAQSQDKAKVDAGYPPGIGVKNSLIMLGVLNFIGMLFTFLVPEPKGKSLEELSGEAEVSHDEK

SEQ ID NO: 81405 - protein, 495 aa, Arabidopsis thaliana
  peptide (1)..(495): Ceres Seq. ID no. 12659653
  misc_feature (1)..(488): Pfam Name: Sugar (and other) transporter Pfam Description: Sugar (and other) transporter
  misc_feature (1)..(495): Homolog of NCBI NO: 15239848 NR Description: phosphate transporter (gb|AAB17265.1); protein At5g43350.1, supported by cDNA: gi_17979403, supported by cDNA: [Arabidopsis thaliana] >gi|1502428|gb|AAB17265.1| phosphate
  misc_feature (1)..(495): Homolog of NCBI NO: 17979404 NR Description: putative phosphate transporter protein
  misc_feature (1)..(495): Homolog of NCBI NO: 1523798 NR Description: phosphate transporter [Arabidopsis thaliana]
  misc_feature (1)..(495): Homolog of NCBI NO: 15239860 NR Description: inorganic phosphate transporter (dbj|BAA24282.1); id: At5g43370.1 [Arabidopsis thaliana] inorganic phosphate transporter [Arabidopsis thaliana]
  misc_feature (1)..(495): Homolog of NCBI NO: 1523793 NR Description: phosphate transporter [Arabidopsis thaliana]
  misc_feature (1)..(490): Homolog of NCBI NO: 15239851 NR Description: inorganic phosphate transporter (dbj|BAA24281.1); id: At5g43360.1 [Arabidopsis thaliana] inorganic phosphate transporter [Arabidopsis thaliana]
  misc_feature (1)..(490): Homolog of NCBI NO: 2149973 NR Description: putative proton/phosphate cotransporter
  misc_feature (1)..(489): Homolog of NCBI NO: 12697484 NR Description: phosphate transporter [Sesbania rostrata]
  misc_feature (1)..(489): Homolog of NCBI NO: 12697486 NR Description: phosphate transporter [Sesbania rostrata]
  misc_feature (1)..(489): Homolog of NCBI NO: 6177892 NR Description: Phospate transpoter [Nicotiana tabacum]
MGFFTDAYDLFCVSLVTKLLGRIYYFNPESAKPGSLPPHVAAAVNGVALCGTLSGQLFFGWLGDKLGRKKVYGLTLVMMILCSVASGLSFGHEAKGVMTTLCFFRFWLGFGIGGDYPLSATIMSEYANKKTRGAFIAAVFAMQGVGILAGGFVALAVSSIFDKKFPAPTYAVNRALSTPPQVDYIWRIIVMFGALPAALTYYWRMKMPETARYTALVAKNIKQATADMSKVLQTDIELEERVEDDVKDPKQNYGLFSKEFLRRHGLHLLGTTSTWFLLDIAFYSQNLFQKDIFSAIGWIPKAATMNATHEVFRIARAQTLIALCSTVPGYWFTVAFIDTIGRFKIQLNGFFMMTVFMFAIAFPYNHWIKPENRIGFVVMYSLTFFFANFGPNATTFIVPAEIFPARLRSTCHGISAAAGKAGAIVGAFGFLYAAQSQDKAKVDAGYPPGIGVKNSLIMLGVLNFIGMLFTFLVPEPKGKSLEELSGEAEVSHDEK

SEQ ID NO: 81406 - protein, 418 aa, Arabidopsis thaliana
  peptide (1)..(418): Ceres Seq. ID no. 12659654
  misc_feature (1)..(411): Pfam Name: Sugar (and other) transporter Pfam Description: Sugar (and other) transporter
  misc_feature (1)..(418): Homolog of NCBI NO: 15239848 NR Description: phosphate transporter (gb|AAB17265.1); protein At5g43350.1, supported by cDNA: gi_17979403, supported by cDNA: [Arabidopsis thaliana] >gi|1502428|gb|AAB17265.1| phosphate
  misc_feature (1)..(418): Homolog of NCBI NO: 17979404 NR Description: putative phosphate transporter protein
  misc_feature (1)..(418): Homolog of NCBI NO: 1523798 NR Description: phosphate transporter [Arabidopsis thaliana]
  misc_feature (1)..(418): Homolog of NCBI NO: 15239860 NR Description: inorganic phosphate transporter (dbj|BAA24282.1); id: At5g43370.1 [Arabidopsis thaliana] inorganic phosphate transporter [Arabidopsis thaliana]
  misc_feature (1)..(418): Homolog of NCBI NO: 1523793 NR Description: phosphate transporter [Arabidopsis thaliana]
  misc_feature (1)..(413): Homolog of NCBI NO: 15239851 NR Description: inorganic phosphate transporter (dbj|BAA24281.1); id: At5g43360.1 [Arabidopsis thaliana] inorganic phosphate transporter [Arabidopsis thaliana]
  misc_feature (1)..(413): Homolog of NCBI NO: 2149973 NR Description: putative proton/phosphate cotransporter
  misc_feature (1)..(412): Homolog of NCBI NO: 12697484 NR Description: phosphate transporter [Sesbania rostrata]
  misc_feature (1)..(412): Homolog of NCBI NO: 12697486 NR Description: phosphate transporter [Sesbania rostrata]
  misc_feature (1)..(412): Homolog of NCBI NO: 6177892 NR Description: Phospate transpoter [Nicotiana tabacum]
MMILCSVASGLSFGHEAKGVMTTLCFFRFWLGFGIGGDYPLSATIMSEYANKKTRGAFIAAVFAMQGVGILAGGFVALAVSSIFDKKFPAPTYAVNRALSTPPQVDYIWRIIVMFGALPAALTYYWRMKMPETARYTALVAKNIKQATADMSKVLQTDIELEERVEDDVKDPKQNYGLFSKEFLRRHGLHLLGTTSTWFLLDIAFYSQNLFQKDIFSAIGWIPKAATMNATHEVFRIARAQTLIALCSTVPGYWFTVAFIDTIGRFKIQLNGFFMMTVFMFAIAFPYNHWIKPENRIGFVVMYSLTFFFANFGPNATTFIVPAEIFPARLRSTCHGISAAAGKAGAIVGAFGFLYAAQSQDKAKVDAGYPPGIGVKNSLIMLGVLNFIGMLFTFLVPEPKGKSLEELSGEAEVSHDEK

SEQ ID NO: 81407 - DNA, 1566 bp, Arabidopsis thaliana
  misc_feature (1)..(1566): Ceres Seq. ID no. 12659655
  misc_feature: MA Experiment ID: 20000314 Result: Up-regulated in Transcription
  misc_feature: MA Experiment 20000314 PARAMETER Experiment Name: At_14day_Shoots-Roots_Sub_P Parameter: Age (day) Value: 14
  misc_feature: MA Experiment 20000314 PARAMETER Experiment Name: At_14day_Shoots-Roots_Sub_P Parameter: Organism Value: A. thaliana
  misc_feature: MA Experiment 20000314 PARAMETER Experiment Name: At_14day_Shoots-Roots_Sub_P Parameter: Plant Line Value: WS
  misc_feature: MA Experiment 20000314 PARAMETER Experiment Name: At_14day_Shoots-Roots_Sub_P Parameter: Tissue Value: Roots vs. Whole Plant
  misc_feature: MA Experiment ID: 20000440 Result: Up-regulated in Transcription
  misc_feature: MA Experiment 20000440 PARAMETER Experiment Name: At_Closed-Flower__Sub_P Parameter: Tissue Value: Closed Flower vs. Whole Plant
atggccgatcaacagctaggagtgctaaaggcacttgatgttgcgaagacgcaactttaccatttcacggctattgtcattgccggtatgggcttctttacggacgcgtacgatctcttttgtgtgtccttggtgaccaagcttcttggccgcctctactacttcaatccaacgtcagcaaagcctggctcacttccccctcatgttgcggctgcagtcaacggtgtggccctttgtggaacccttgccggtcaactcttcttcggatggcttggtgacaaactcggacggaaaaaggtgtacggtatcactttgatcatgatgattctctgctcagttgcttccggtctttccttgggcaattcggccaagggtgtcatgacgactctttgcttcttcaggttttggctcgggtttggcattggaggtgactaccctctatctgccaccatcatgtctgaatacgctaacaagaagactcgtggggctttcatcgcggcagtgttcgccatgcaaggtgtaggtatcttggcgggaggttttgtggcacttgcagtttcttccatatttgacaaaaagttcccatcgccgacgtatgagcaagacaggtttctatcaacgcctcctcaagctgattacatttggcgaatcatcgtcatgtttggtgctttacccgcagctttgacttactattggcgtatgaagatgcctgaaacagcccgttacaccgctttagttgccaagaacatcaaacaagccacagcagacatgtccaaggtcttacaaacagatctcgagcttgaggaaagggtggaggatgacgtcaaggaccccaaaaaaaactatggcttgttctccaaggaattccttagacgccatgggcttcatctccttgggactacctccacttggtttttgcttgacatcgccttctacagccaaaacttgttccaaaaggatattttctcggccattggatggatcccaaaggcagccactatgaacgccatccatgaggttttcaagattgctagggctcagactctcattgccctctgcagtacagtcccaggttactggttcacagtagcctttattgatatcattggaaggtttgcgatccaactaatgggatttttcatgatgaccgtttttatgtttgctattgccttcccatacaaccactggattttaccagataatcgtatcggattcgtggttatgtactcactcacatttttcttcgccaactttggacccaatgcaactactttcattgtcccagctgaaatctttccagcaaggctaaggtctacgtgccatggaatatcagccgcaactggtaaggctggagccatcgttggagccttcgggttcctatatgctgctcaaccacaggataagaccaagacagacgcaggatacccaccgggcatcggagtcaagaactcattgatcatgcttggtgtcattaactttgttggtatgctcttcaccttcctcgtccctgagcccaagggcaagtcccttgaagaactctccggcgaggctgaggttgataaatga

SEQ ID NO: 81408 - protein, 521 aa, Arabidopsis thaliana
  peptide (1)..(521): Ceres Seq. ID no. 12659656
  misc_feature (23)..(517): Pfam Name: Sugar (and other) transporter Pfam Description: Sugar (and other) transporter
  misc_feature (1)..(521): Homolog of NCBI NO: 15239851 NR Description: inorganic phosphate transporter (dbj|BAA24281.1); id: At5g43360.1 [Arabidopsis thaliana] inorganic phosphate transporter [Arabidopsis thaliana]
  misc_feature (1)..(521): Homolog of NCBI NO: 2149973 NR Description: putative proton/phosphate cotransporter
  misc_feature (1)..(519): Homolog of NCBI NO: 15239848 NR Description: phosphate transporter (gb|AAB17265.1); protein At5g43350.1, supported by cDNA: gi_17979403, supported by cDNA: [Arabidopsis thaliana] >gi|1502428|gb|AAB17265.1| phosphate
  misc_feature (1)..(519): Homolog of NCBI NO: 1523798 NR Description: phosphate transporter [Arabidopsis thaliana]
  misc_feature (1)..(519): Homolog of NCBI NO: 15239860 NR Description: inorganic phosphate transporter (dbj|BAA24282.1); id: At5g43370.1 [Arabidopsis thaliana] inorganic phosphate transporter [Arabidopsis thaliana]
  misc_feature (1)..(519): Homolog of NCBI NO: 17979404 NR Description: putative phosphate transporter protein
  misc_feature (1)..(519): Homolog of NCBI NO: 1523793 NR Description: phosphate transporter [Arabidopsis thaliana]
  misc_feature (5)..(518): Homolog of NCBI NO: 12697484 NR Description: phosphate transporter [Sesbania rostrata]
  misc_feature (1)..(518): Homolog of NCBI NO: 7446753 NR Description: probable inorganic phosphate transport protein - >gi|2570523|gb|AAB82146.1| inorganic phosphate transporter
  misc_feature (1)..(518): Homolog of NCBI NO: 8248034 NR Description: inorganic phosphate transporter [Nicotiana
MADQQLGVLKALDVAKTQLYHFTAIVIAGMGFFTDAYDLFCVSLVTKLLGRLYYFNPTSAKPGSLPPHVAAAVNGVALCGTLAGQLFFGWLGDKLGRKKVYGITLIMMILCSVASGLSLGNSAKGVMTTLCFFRFWLGFGIGGDYPLSATIMSEYANKKTRGAFIAAVFAMQGVGILAGGFVALAVSSIFDKKFPSPTYEQDRFLSTPPQADYIWRIIVMFGALPAALTYYWRMKMPETARYTALVAKNIKQATADMSKVLQTDLELEERVEDDVKDPKKNYGLFSKEFLRRHGLHLLGTTSTWFLLDIAFYSQNLFQKDIFSAIGWIPKAATMNAIHEVFKIARAQTLIALCSTVPGYWFTVAFIDIIGRFAIQLMGFFMMTVFMFAIAFPYNHWILPDNRIGFVVMYSLTFFFANFGPNATTFIVPAEIFPARLRSTCHGISAATGKAGAIVGAFGFLYAAQPQDKTKTDAGYPPGIGVKNSLIMLGVINFVGMLFTFLVPEPKGKSLEELSGEAEVDK

SEQ ID NO: 81409 - protein, 492 aa, Arabidopsis thaliana
  peptide (1)..(492): Ceres Seq. ID no. 12659657
  misc_feature (1)..(488): Pfam Name: Sugar (and other) transporter Pfam Description: Sugar (and other) transporter
  misc_feature (1)..(492): Homolog of NCBI NO: 15239851 NR Description: inorganic phosphate transporter (dbj|BAA24281.1); id: At5g43360.1 [Arabidopsis thaliana] inorganic phosphate transporter [Arabidopsis thaliana]
  misc_feature (1)..(492): Homolog of NCBI NO: 2149973 NR Description: putative proton/phosphate cotransporter
  misc_feature (1)..(490): Homolog of NCBI NO: 15239848 NR Description: phosphate transporter (gb|AAB17265.1); protein At5g43350.1, supported by cDNA: gi_17979403, supported by cDNA: [Arabidopsis thaliana] >gi|1502428|gb|AAB17265.1| phosphate
  misc_feature (1)..(490): Homolog of NCBI NO: 1523798 NR Description: phosphate transporter [Arabidopsis thaliana]
  misc_feature (1)..(490): Homolog of NCBI NO: 15239860 NR Description: inorganic phosphate transporter (dbj|BAA24282.1); id: At5g43370.1 [Arabidopsis thaliana] inorganic phosphate transporter [Arabidopsis thaliana]
  misc_feature (1)..(490): Homolog of NCBI NO: 17979404 NR Description: putative phosphate transporter protein
  misc_feature (1)..(490): Homolog of NCBI NO: 1523793 NR Description: phosphate transporter [Arabidopsis thaliana]
  misc_feature (1)..(489): Homolog of NCBI NO: 12697484 NR Description: phosphate transporter [Sesbania rostrata]
  misc_feature (1)..(489): Homolog of NCBI NO: 7446753 NR Description: probable inorganic phosphate transport protein - >gi|2570523|gb|AAB82146.1| inorganic phosphate transporter
  misc_feature (1)..(489): Homolog of NCBI NO: 8248034 NR Description: inorganic phosphate transporter [Nicotiana
MGFFTDAYDLFCVSLVTKLLGRLYYFNPTSAKPGSLPPHVAAAVNGVALCGTLAGQLFFGWLGDKLGRKKVYGITLIMMILCSVASGLSLGNSAKGVMTTLCFFRFWLGFGIGGDYPLSATIMSEYANKKTRGAFIAAVFAMQGVGILAGGFVALAVSSIFDKKFPSPTYEQDRFLSTPPQADYIWRIIVMFGALPAALTYYWRMKMPETARYTALVAKNIKQATADMSKVLQTDLELEERVEDDVKDPKKNYGLFSKEFLRRHGLHLLGTTSTWFLLDIAFYSQNLFQKDIFSAIGWIPKAATMNAIHEVFKIARAQTLIALCSTVPGYWFTVAFIDIIGRFAIQLMGFFMMTVFMFAIAFPYNHWILPDNRIGFVVMYSLTFFFANFGPNATTFIVPAEIFPARLRSTCHGISAATGKAGAIVGAFGFLYAAQPQDKTKTDAGYPPGIGVKNSLIMLGVINFVGMLFTFLVPEPKGKSLEELSGEAEVDK

SEQ ID NO: 81410 - protein, 415 aa, Arabidopsis thaliana
  peptide (1)..(415): Ceres Seq. ID no. 12659658
  misc_feature (1)..(411): Pfam Name: Sugar (and other) transporter Pfam Description: Sugar (and other) transporter
  misc_feature (1)..(415): Homolog of NCBI NO: 15239851 NR Description: inorganic phosphate transporter (dbj|BAA24281.1); id: At5g43360.1 [Arabidopsis thaliana] inorganic phosphate transporter [Arabidopsis thaliana]
  misc_feature (1)..(415): Homolog of NCBI NO: 2149973 NR Description: putative proton/phosphate cotransporter
  misc_feature (1)..(413): Homolog of NCBI NO: 15239848 NR Description: phosphate transporter (gb|AAB17265.1); protein At5g43350.1, supported by cDNA: gi_17979403, supported by cDNA: [Arabidopsis thaliana] >gi|1502428|gb|AAB17265.1| phosphate
  misc_feature (1)..(413): Homolog of NCBI NO: 1523798 NR Description: phosphate transporter [Arabidopsis thaliana]
  misc_feature (1)..(413): Homolog of NCBI NO: 15239860 NR Description: inorganic phosphate transporter (dbj|BAA24282.1); id: At5g43370.1 [Arabidopsis thaliana] inorganic phosphate transporter [Arabidopsis thaliana]
  misc_feature (1)..(413): Homolog of NCBI NO: 17979404 NR Description: putative phosphate transporter protein
  misc_feature (1)..(413): Homolog of NCBI NO: 1523793 NR Description: phosphate transporter [Arabidopsis thaliana]
  misc_feature (1)..(412): Homolog of NCBI NO: 12697484 NR Description: phosphate transporter [Sesbania rostrata]
  misc_feature (1)..(412): Homolog of NCBI NO: 7446753 NR Description: probable inorganic phosphate transport protein - >gi|2570523|gb|AAB82146.1| inorganic phosphate transporter
  misc_feature (1)..(412): Homolog of NCBI NO: 8248034 NR Description: inorganic phosphate transporter [Nicotiana
MMILCSVASGLSLGNSAKGVMTTLCFFRFWLGFGIGGDYPLSATIMSEYANKKTRGAFIAAVFAMQGVGILAGGFVALAVSSIFDKKFPSPTYEQDRFLSTPPQADYIWRIIVMFGALPAALTYYWRMKMPETARYTALVAKNIKQATADMSKVLQTDLELEERVEDDVKDPKKNYGLFSKEFLRRHGLHLLGTTSTWFLLDIAFYSQNLFQKDIFSAIGWIPKAATMNAIHEVFKIARAQTLIALCSTVPGYWFTVAFIDIIGRFAIQLMGFFMMTVFMFAIAFPYNHWILPDNRIGFVVMYSLTFFFANFGPNATTFIVPAEIFPARLRSTCHGISAATGKAGAIVGAFGFLYAAQPQDKTKTDAGYPPGIGVKNSLIMLGVINFVGMLFTFLVPEPKGKSLEELSGEAEVDK

SEQ ID NO: 81411 - DNA, 1255 bp, Arabidopsis thaliana
  misc_feature (1)..(1255): Ceres Seq. ID no. 12659679
  misc_feature: MA Experiment ID: 20000184 Result: Down-regulated in Transcription
  misc_feature: MA Experiment 20000184 PARAMETER Experiment Name: At_Shoots__P Parameter: Age (day) Value: 7
  misc_feature: MA Experiment 20000184 PARAMETER Experiment Name: At_Shoots__P Parameter: Tissue Value: Shoots vs. Whole Plant
  misc_feature: MA Experiment ID: 20000185 Result: Down-regulated in Transcription
  misc_feature: MA Experiment 20000185 PARAMETER Experiment Name: At_Roots__P Parameter: Age (day) Value: 7 vs. 21
  misc_feature: MA Experiment 20000185 PARAMETER Experiment Name: At_Roots__P Parameter: Organism Value: A. thaliana
  misc_feature: MA Experiment 20000185 PARAMETER Experiment Name: At_Roots__P Parameter: Tissue Value: Roots vs. Whole Plant
  misc_feature: MA Experiment ID: 20000235 Result: Down-regulated in Transcription
  misc_feature: MA Experiment 20000235 PARAMETER Experiment Name: At_Siliques_P Parameter: Age (day) Value: 21
  misc_feature: MA Experiment 20000235 PARAMETER Experiment Name: At_Siliques_P Parameter: Organism Value: A. thaliana
  misc_feature: MA Experiment 20000235 PARAMETER Experiment Name: At_Siliques_P Parameter: Plant Line Value: WS
  misc_feature: MA Experiment 20000235 PARAMETER Experiment Name: At_Siliques_P Parameter: Tissue Value: 5-10mm Siliques vs. Whole Plant
  misc_feature: MA Experiment ID: 20000264 Result: Down-regulated in Transcription
  misc_feature: MA Experiment 20000264 PARAMETER Experiment Name: At_Open_Flower_P Parameter: Age (day) Value: 21
  misc_feature: MA Experiment 20000264 PARAMETER Experiment Name: At_Open_Flower_P Parameter: Plant Line Value: WS
  misc_feature: MA Experiment 20000264 PARAMETER Experiment Name: At_Open_Flower_P Parameter: Tissue Value: Open Flower vs. Whole Plant
  misc_feature: MA Experiment ID: 20000265 Result: Down-regulated in Transcription
  misc_feature: MA Experiment 20000265 PARAMETER Experiment Name: At_Open_Flower_P Parameter: Age (day) Value: 21
  misc_feature: MA Experiment 20000265 PARAMETER Experiment Name: At_Open_Flower_P Parameter: Plant Line Value: WS
  misc_feature: MA Experiment 20000265 PARAMETER Experiment Name: At_Open_Flower_P Parameter: Tissue Value: Closed Flower vs. Whole Plant
  misc_feature: MA Experiment ID: 20000286 Result: Down-regulated in Transcription
  misc_feature: MA Experiment 20000286 PARAMETER Experiment Name: At_Open_Flower_P Parameter: Age (day) Value: 21
  misc_feature: MA Experiment 20000286 PARAMETER Experiment Name: At_Open_Flower_P Parameter: Plant Line Value: WS
  misc_feature: MA Experiment 20000286 PARAMETER Experiment Name: At_Open_Flower_P Parameter: Tissue Value: Half Open vs. Whole Plant
  misc_feature: MA Experiment ID: 20000439 Result: Down-regulated in Transcription
  misc_feature: MA Experiment 20000439 PARAMETER Experiment Name: At_Roots__P Parameter: Age (day) Value: 14 vs. 21
  misc_feature: MA Experiment 20000439 PARAMETER Experiment Name: At_Roots__P Parameter: Organism Value: A. thaliana
  misc_feature: MA Experiment 20000439 PARAMETER Experiment Name: At_Roots__P Parameter: Tissue Value: Roots vs. Whole Plant
  misc_feature: MA Experiment ID: 20000573 Result: Down-regulated in Transcription
  misc_feature: MA Experiment 20000573 PARAMETER Experiment Name: At_100uM_ABA_Mutants__P Parameter: Organism Value: A. thaliana
  misc_feature: MA Experiment 20000573 PARAMETER Experiment Name: At_100uM_ABA_Mutants__P Parameter: Plant Line Value: CS22 vs. Ler wt
  misc_feature: MA Experiment 20000573 PARAMETER Experiment Name: At_100uM_ABA_Mutants__P Parameter: Timepoint (hr) Value: N/A
  misc_feature: MA Experiment 20000573 PARAMETER Experiment Name: At_100uM_ABA_Mutants__P Parameter: Tissue Value: Whole Plant
  misc_feature: MA Experiment 20000573 PARAMETER Experiment Name: At_100uM_ABA_Mutants__P Parameter: Treatment Value: None
  misc_feature: MA Experiment ID: 20000574 Result: Down-regulated in Transcription
  misc_feature: MA Experiment 20000574 PARAMETER Experiment Name: At_100uM_ABA_Mutants__P Parameter: Organism Value: A. thaliana
  misc_feature: MA Experiment 20000574 PARAMETER Experiment Name: At_100uM_ABA_Mutants__P Parameter: Plant Line Value: CS23 vs. Ler wt
  misc_feature: MA Experiment 20000574 PARAMETER Experiment Name: At_100uM_ABA_Mutants__P Parameter: Timepoint (hr) Value: N/A
  misc_feature: MA Experiment 20000574 PARAMETER Experiment Name: At_100uM_ABA_Mutants__P Parameter: Tissue Value: Whole Plant
  misc_feature: MA Experiment 20000574 PARAMETER Experiment Name: At_100uM_ABA_Mutants__P Parameter: Treatment Value: None
  misc_feature: MA Experiment ID: 20001247 Result: Down-regulated in Transcription
  misc_feature: MA Experiment 20001247 PARAMETER Experiment Name: At_Far-red-induction_P Parameter: Age (day) Value: 7
  misc_feature: MA Experiment 20001247 PARAMETER Experiment Name: At_Far-red-induction_P Parameter: Light Value: Far-red vs. White
  misc_feature: MA Experiment 20001247 PARAMETER Experiment Name: At_Far-red-induction_P Parameter: Organism Value: A. thaliana
  misc_feature: MA Experiment 20001247 PARAMETER Experiment Name: At_Far-red-induction_P Parameter: Plant Line Value: Columbia
  misc_feature: MA Experiment 20001247 PARAMETER Experiment Name: At_Far-red-induction_P Parameter: Timepoint (hr) Value: 1
  misc_feature: MA Experiment 20001247 PARAMETER Experiment Name: At_Far-red-induction_P Parameter: Tissue Value: Whole Plant
  misc_feature: MA Experiment ID: 20001557 Result: Down-regulated in Transcription
  misc_feature: MA Experiment 20001557 PARAMETER Experiment Name: At_Drought_Soil_Dry_P Parameter: Age (day) Value: 27
  misc_feature: MA Experiment 20001557 PARAMETER Experiment Name: At_Drought_Soil_Dry_P Parameter: Organism Value: A. thaliana
  misc_feature: MA Experiment 20001557 PARAMETER Experiment Name: At_Drought_Soil_Dry_P Parameter: Plant Line Value: WS
  misc_feature: MA Experiment 20001557 PARAMETER Experiment Name: At_Drought_Soil_Dry_P Parameter: Post Timepoint (hr) Value: 3
  misc_feature: MA Experiment 20001557 PARAMETER Experiment Name: At_Drought_Soil_Dry_P Parameter: Post-Treatment Value: Re-Water vs. No Drought
  misc_feature: MA Experiment 20001557 PARAMETER Experiment Name: At_Drought_Soil_Dry_P Parameter: Timepoint (day) Value: 13
  misc_feature: MA Experiment 20001557 PARAMETER Experiment Name: At_Drought_Soil_Dry_P Parameter: Treatment Value: Drought vs. No Drought
  misc_feature: MA Experiment ID: 20001558 Result: Down-regulated in Transcription
  misc_feature: MA Experiment 20001558 PARAMETER Experiment Name: At_Drought_Soil_Dry_P Parameter: Age (day) Value: 27
  misc_feature: MA Experiment 20001558 PARAMETER Experiment Name: At_Drought_Soil_Dry_P Parameter: Organism Value: A. thaliana
  misc_feature: MA Experiment 20001558 PARAMETER Experiment Name: At_Drought_Soil_Dry_P Parameter: Plant Line Value: WS
  misc_feature: MA Experiment 20001558 PARAMETER Experiment Name: At_Drought_Soil_Dry_P Parameter: Post Timepoint (hr) Value: 6
  misc_feature: MA Experiment 20001558 PARAMETER Experiment Name: At_Drought_Soil_Dry_P Parameter: Post-Treatment Value: Re-Water vs. No Drought
  misc_feature: MA Experiment 20001558 PARAMETER Experiment Name: At_Drought_Soil_Dry_P Parameter: Timepoint (day) Value: 13
  misc_feature: MA Experiment 20001558 PARAMETER Experiment Name: At_Drought_Soil_Dry_P Parameter: Treatment Value: Drought vs. No Drought
  misc_feature: MA Experiment ID: 20001560 Result: Down-regulated in Transcription
  misc_feature: MA Experiment 20001560 PARAMETER Experiment Name: At_Drought_Soil_Dry_P Parameter: Age (day) Value: 28
  misc_feature: MA Experiment 20001560 PARAMETER Experiment Name: At_Drought_Soil_Dry_P Parameter: Organism Value: A. thaliana
  misc_feature: MA Experiment 20001560 PARAMETER Experiment Name: At_Drought_Soil_Dry_P Parameter: Plant Line Value: WS
  misc_feature: MA Experiment 20001560 PARAMETER Experiment Name: At_Drought_Soil_Dry_P Parameter: Post Timepoint (hr) Value: None
  misc_feature: MA Experiment 20001560 PARAMETER Experiment Name: At_Drought_Soil_Dry_P Parameter: Post-Treatment Value: None
  misc_feature: MA Experiment 20001560 PARAMETER Experiment Name: At_Drought_Soil_Dry_P Parameter: Timepoint (day) Value: 14
  misc_feature: MA Experiment 20001560 PARAMETER Experiment Name: At_Drought_Soil_Dry_P Parameter: Treatment Value: Drought vs. No Drought
gtctttacttcctctctcaacgtacgtagacagaaaaaaacaaaacatcatgacagaaaaatctgcagaactcgttcgtttgaacgaactcaaggcttttgtatcgacaaaagcaggtgtgaaaggacttgtcgataccaaaataaccgaagttcctcgaatcttccatatcccttcttcttcaactttatctaacaacaaaccttctgatatctttggcttaaacctcactgtcccaatcattgacctcggagatggtaacacatctgctgcaagaaacgtcctcgtttccaagattaaagaagcagctgagaattggggatttttccaagtaatcaatcatggtattcctttaactgttcttaaagatatcaaacaaggtgttcgaagatttcatgaggaagatccagaggtcaagaaacagtattttgctacagatttcaatacaagatttgcttacaacaccaacttcgatattcattattcttctcctatgaattggaaagactctttcacttgctacacttgtcctcaagatcctctaaagccagaggaaatcccactagcttgcagggatgttgtgattgaatactcgaagcatgtaatggaattaggaggtttactcttccaacttctctcagaagctttaggtttagactctgagattcttaagaacatggattgtctcaagggtttgcttatgctctgccattattatccaccttgtccacaacctgacctaactttgggcataagtaaacacaccgacaattccttcataacaattcttcttcaagatcaaatcggtggtcttcaagttcttcatcaagattcttgggttgatgtaactcctgttcctggagctcttgtcatcagtatcggtgatttcatgcagctgatcacaaacgataagttcttaagtatggagcatagggtacgggcaaacagagatggaccgcggatttcagttgcttgcttcgttagctcgggagtgtttccaaattccactgtttatggaccgataaaagagcttctttctgatgaaaaccctgcaaagtacagagacatcactataccagaatacactgtaggatacctagcaagcatcttcgatggaaaatcgcatttgtctaagttccggatatgaagaaattacttgtatggcttagttaaaaacagatatgtgtgttttgctgctctcttctcgctcgagaggacatcaactattttgttaataagaaagaattttttacag

SEQ ID NO: 81412 - protein, 381 aa, Arabidopsis thaliana
  peptide (1)..(381): Ceres Seq. ID no. 12659680
  misc_feature (230)..(329): Pfam Name: 2OG-Fe(II) oxygenase superfamily Pfam Description: 2OG-Fe(II) oxygenase superfamily
  misc_feature (17)..(381): Homolog of NCBI NO: 15239868 NR Description: 1-aminocyclopropane-1-carboxylate oxidase; id: At5g43440.1, supported by cDNA: gi_15983808 [Arabidopsis
  misc_feature (17)..(381): Homolog of NCBI NO: 15239870 NR Description: 1-aminocyclopropane-1-carboxylate oxidase; id: At5g43450.1, supported by cDNA: gi_14596164 [Arabidopsis
  misc_feature (17)..(381): Homolog of NCBI NO: 14596165 NR Description: 1-aminocyclopropane-1-carboxylate oxidase
  misc_feature (17)..(381): Homolog of NCBI NO: 15238458 NR Description: 1-aminocyclopropane-1-carboxylate oxidase - like protein id: At5g59530.1 [Arabidopsis thaliana]
  misc_feature (16)..(381): Homolog of NCBI NO: 15238459 NR Description: 1-aminocyclopropane-1-carboxylate oxidase - like protein id: At5g59540.1, supported by cDNA: gi_15983482
  misc_feature (20)..(381): Homolog of NCBI NO: 15219715 NR Description: putative 1-aminocyclopropane-1-carboxylate protein id: At1g04350.1, supported by cDNA: gi_15292974, by cDNA: gi_21281120 [Arabidopsis thaliana]
  misc_feature (24)..(381): Homolog of NCBI NO: 15219718 NR Description: putative 1-aminocyclopropane-1-carboxylate protein id: At1g04380.1 [Arabidopsis thaliana]
  misc_feature (22)..(381): Homolog of NCBI NO: 30679748 NR Description: 2-oxoglutarate-dependent dioxygenase, putative thaliana] >gi|30102640|gb|AAP21238.1| At1g06620 [Arabidopsis
  misc_feature (26)..(381): Homolog of NCBI NO: 15221545 NR Description: oxidoreductase, putative; protein id: supported by cDNA: gi_13878118 [Arabidopsis thaliana]
  misc_feature (26)..(381): Homolog of NCBI NO: 13878119 NR Description: putative oxidoreductase [Arabidopsis thaliana]
SLLPLSTYVDRKKQNIMTEKSAELVRLNELKAFVSTKAGVKGLVDTKITEVPRIFHIPSSSTLSNNKPSDIFGLNLTVPIIDLGDGNTSAARNVLVSKIKEAAENWGFFQVINHGIPLTVLKDIKQGVRRFHEEDPEVKKQYFATDFNTRFAYNTNFDIHYSSPMNWKDSFTCYTCPQDPLKPEEIPLACRDVVIEYSKHVMELGGLLFQLLSEALGLDSEILKNMDCLKGLLMLCHYYPPCPQPDLTLGISKHTDNSFITILLQDQIGGLQVLHQDSWVDVTPVPGALVISIGDFMQLITNDKFLSMEHRVRANRDGPRISVACFVSSGVFPNSTVYGPIKELLSDENPAKYRDITIPEYTVGYLASIFDGKSHLSKFRI

SEQ ID NO: 81413 - protein, 365 aa, Arabidopsis thaliana
  peptide (1)..(365): Ceres Seq. ID no. 12659681
  misc_feature (214)..(313): Pfam Name: 2OG-Fe(II) oxygenase superfamily Pfam Description: 2OG-Fe(II) oxygenase superfamily
  misc_feature (1)..(365): Homolog of NCBI NO: 15239868 NR Description: 1-aminocyclopropane-1-carboxylate oxidase; id: At5g43440.1, supported by cDNA: gi_15983808 [Arabidopsis
  misc_feature (1)..(365): Homolog of NCBI NO: 15239870 NR Description: 1-aminocyclopropane-1-carboxylate oxidase; id: At5g43450.1, supported by cDNA: gi_14596164 [Arabidopsis
  misc_feature (1)..(365): Homolog of NCBI NO: 14596165 NR Description: 1-aminocyclopropane-1-carboxylate oxidase
  misc_feature (1)..(365): Homolog of NCBI NO: 15238458 NR Description: 1-aminocyclopropane-1-carboxylate oxidase - like protein id: At5g59530.1 [Arabidopsis thaliana]
  misc_feature (1)..(365): Homolog of NCBI NO: 15238459 NR Description: 1-aminocyclopropane-1-carboxylate oxidase - like protein id: At5g59540.1, supported by cDNA: gi_15983482
  misc_feature (4)..(365): Homolog of NCBI NO: 15219715 NR Description: putative 1-aminocyclopropane-1-carboxylate protein id: At1g04350.1, supported by cDNA: gi_15292974, by cDNA: gi_21281120 [Arabidopsis thaliana]
  misc_feature (8)..(365): Homolog of NCBI NO: 15219718 NR Description: putative 1-aminocyclopropane-1-carboxylate protein id: At1g04380.1 [Arabidopsis thaliana]
  misc_feature (6)..(365): Homolog of NCBI NO: 30679748 NR Description: 2-oxoglutarate-dependent dioxygenase, putative thaliana] >gi|30102640|gb|AAP21238.1| At1g06620 [Arabidopsis
  misc_feature (10)..(365): Homolog of NCBI NO: 15221545 NR Description: oxidoreductase, putative; protein id: supported by cDNA: gi_13878118 [Arabidopsis thaliana]
  misc_feature (10)..(365): Homolog of NCBI NO: 13878119 NR Description: putative oxidoreductase [Arabidopsis thaliana]
MTEKSAELVRLNELKAFVSTKAGVKGLVDTKITEVPRIFHIPSSSTLSNNKPSDIFGLNLTVPIIDLGDGNTSAARNVLVSKIKEAAENWGFFQVINHGIPLTVLKDIKQGVRRFHEEDPEVKKQYFATDFNTRFAYNTNFDIHYSSPMNWKDSFTCYTCPQDPLKPEEIPLACRDVVIEYSKHVMELGGLLFQLLSEALGLDSEILKNMDCLKGLLMLCHYYPPCPQPDLTLGISKHTDNSFITILLQDQIGGLQVLHQDSWVDVTPVPGALVISIGDFMQLITNDKFLSMEHRVRANRDGPRISVACFVSSGVFPNSTVYGPIKELLSDENPAKYRDITIPEYTVGYLASIFDGKSHLSKFRI

SEQ ID NO: 81414 - protein, 217 aa, Arabidopsis thaliana
  peptide (1)..(217): Ceres Seq. ID no. 12659682
  misc_feature (66)..(165): Pfam Name: 2OG-Fe(II) oxygenase superfamily Pfam Description: 2OG-Fe(II) oxygenase superfamily
  misc_feature (1)..(217): Homolog of NCBI NO: 15239868 NR Description: 1-aminocyclopropane-1-carboxylate oxidase; id: At5g43440.1, supported by cDNA: gi_15983808 [Arabidopsis
  misc_feature (1)..(217): Homolog of NCBI NO: 15239870 NR Description: 1-aminocyclopropane-1-carboxylate oxidase; id: At5g43450.1, supported by cDNA: gi_14596164 [Arabidopsis
  misc_feature (1)..(217): Homolog of NCBI NO: 14596165 NR Description: 1-aminocyclopropane-1-carboxylate oxidase
  misc_feature (1)..(217): Homolog of NCBI NO: 15238458 NR Description: 1-aminocyclopropane-1-carboxylate oxidase - like protein id: At5g59530.1 [Arabidopsis thaliana]
  misc_feature (1)..(217): Homolog of NCBI NO: 15238459 NR Description: 1-aminocyclopropane-1-carboxylate oxidase - like protein id: At5g59540.1, supported by cDNA: gi_15983482
  misc_feature (1)..(217): Homolog of NCBI NO: 15219715 NR Description: putative 1-aminocyclopropane-1-carboxylate protein id: At1g04350.1, supported by cDNA: gi_15292974, by cDNA: gi_21281120 [Arabidopsis thaliana]
  misc_feature (1)..(217): Homolog of NCBI NO: 15219718 NR Description: putative 1-aminocyclopropane-1-carboxylate protein id: At1g04380.1 [Arabidopsis thaliana]
  misc_feature (1)..(217): Homolog of NCBI NO: 30679748 NR Description: 2-oxoglutarate-dependent dioxygenase, putative thaliana] >gi|30102640|gb|AAP21238.1| At1g06620 [Arabidopsis
  misc_feature (1)..(217): Homolog of NCBI NO: 15221545 NR Description: oxidoreductase, putative; protein id: supported by cDNA: gi_13878118 [Arabidopsis thaliana]
  misc_feature (1)..(217): Homolog of NCBI NO: 13878119 NR Description: putative oxidoreductase [Arabidopsis thaliana]
MNWKDSFTCYTCPQDPLKPEEIPLACRDVVIEYSKHVMELGGLLFQLLSEALGLDSEILKNMDCLKGLLMLCHYYPPCPQPDLTLGISKHTDNSFITILLQDQIGGLQVLHQDSWVDVTPVPGALVISIGDFMQLITNDKFLSMEHRVRANRDGPRISVACFVSSGVFPNSTVYGPIKELLSDENPAKYRDITIPEYTVGYLASIFDGKSHLSKFRI

SEQ ID NO: 81415 - DNA, 3788 bp, Arabidopsis thaliana
  misc_feature (1)..(3788): Ceres Seq. ID no. 12659704
  misc_feature: MA Experiment ID: 20000314 Result: Up-regulated in Transcription
  misc_feature: MA Experiment 20000314 PARAMETER Experiment Name: At_14day_Shoots-Roots_Sub_P Parameter: Age (day) Value: 14
  misc_feature: MA Experiment 20000314 PARAMETER Experiment Name: At_14day_Shoots-Roots_Sub_P Parameter: Organism Value: A. thaliana
  misc_feature: MA Experiment 20000314 PARAMETER Experiment Name: At_14day_Shoots-Roots_Sub_P Parameter: Plant Line Value: WS
  misc_feature: MA Experiment 20000314 PARAMETER Experiment Name: At_14day_Shoots-Roots_Sub_P Parameter: Tissue Value: Roots vs. Whole Plant
  misc_feature: MA Experiment ID: 20000315 Result: Down-regulated in Transcription
  misc_feature: MA Experiment 20000315 PARAMETER Experiment Name: At_14day_Shoots-Roots_Sub_P Parameter: Age (day) Value: 14
  misc_feature: MA Experiment 20000315 PARAMETER Experiment Name: At_14day_Shoots-Roots_Sub_P Parameter: Organism Value: A. thaliana
  misc_feature: MA Experiment 20000315 PARAMETER Experiment Name: At_14day_Shoots-Roots_Sub_P Parameter: Plant Line Value: WS
  misc_feature: MA Experiment 20000315 PARAMETER Experiment Name: At_14day_Shoots-Roots_Sub_P Parameter: Tissue Value: Shoots vs. Whole Plant
  misc_feature: MA Experiment ID: 20000327 Result: Up-regulated in Transcription
  misc_feature: MA Experiment 20000327 PARAMETER Experiment Name: At_42deg_Heat_Sub_P Parameter: Age (day) Value: 14
  misc_feature: MA Experiment 20000327 PARAMETER Experiment Name: At_42deg_Heat_Sub_P Parameter: Organism Value: A. thaliana
  misc_feature: MA Experiment 20000327 PARAMETER Experiment Name: At_42deg_Heat_Sub_P Parameter: Plant Line Value: WS
  misc_feature: MA Experiment 20000327 PARAMETER Experiment Name: At_42deg_Heat_Sub_P Parameter: Temperature (deg C) Value: 42 vs. 22
  misc_feature: MA Experiment 20000327 PARAMETER Experiment Name: At_42deg_Heat_Sub_P Parameter: Timepoint (hr) Value: 1
  misc_feature: MA Experiment 20000327 PARAMETER Experiment Name: At_42deg_Heat_Sub_P Parameter: Tissue Value: Aerial
  misc_feature: MA Experiment ID: 20000328 Result: Up-regulated in Transcription
  misc_feature: MA Experiment 20000328 PARAMETER Experiment Name: At_42deg_Heat_Sub_P Parameter: Age (day) Value: 14
  misc_feature: MA Experiment 20000328 PARAMETER Experiment Name: At_42deg_Heat_Sub_P Parameter: Organism Value: A. thaliana
  misc_feature: MA Experiment 20000328 PARAMETER Experiment Name: At_42deg_Heat_Sub_P Parameter: Plant Line Value: WS
  misc_feature: MA Experiment 20000328 PARAMETER Experiment Name: At_42deg_Heat_Sub_P Parameter: Temperature (deg C) Value: 42 vs. 22
  misc_feature: MA Experiment 20000328 PARAMETER Experiment Name: At_42deg_Heat_Sub_P Parameter: Timepoint (hr) Value: 6
  misc_feature: MA Experiment 20000328 PARAMETER Experiment Name: At_42deg_Heat_Sub_P Parameter: Tissue Value: Aerial
  misc_feature: MA Experiment ID: 20000440 Result: Up-regulated in Transcription
  misc_feature: MA Experiment 20000440 PARAMETER Experiment Name: At_Closed-Flower__Sub_P Parameter: Tissue Value: Closed Flower vs. Whole Plant
aatcatctccaggtttgcttcgatctacacggcgtcgtttacacgtctccttcaaatctttcttccttacttctccgatttcaatttcgtgccgttttttttttgagttttccgatcgctgatttcttcaaatatttatcgaattttttttcaatgttttctgtttgtaaattctctgtaattcaattaattgaatcgaataattttgtctctcttgcatttcctcagctccagcttttgttttattagtttctaagattgctttttgtttttagggtttattctcaattcttatatagtttttgaggtttttggtgtattgatttgattcatgtgagtgagtgattgatttagaatctttgttgagctgtgactgtgatttagatttgattcacttcagctataattctttgttttgatgatgattatgataaattcgtaattttgagcttatttgaattcattaactaatttagtatgatgaaatcttaatcaggggaatgtcagagagtactaatgaagatagtggagcaggaagatcatcactggaagagaattcaaatggacaaagaagtcaatcagaagaagcaatcgctgagtggcgttcttctgaacaagttgagaatggaactccttctacatctccaccgtattgggacatcgatgatgatgacgattttggatcaaaaccatctcaactatttgggaaaaatacttggacgattgagaaattttcagatatcaacaaacgagagctccgcggcgatgtttttgaagtcgggggttacaaatggtatatattaatttatccacaagggtgtgatgtttgcaaccatctctctttgtttctatgtgttgcacaccatgaaaagcttcttccaggctggagtcattttgctcagtttactatagctgtgtcgaataaagatccgaagaagtcaaagcattcagatacgttacaccggttttggaagaaagagcatgattggggttggaagaaatttattgagttacctaaattgaaggaagggtttatagatgattctggttgtcttacaattaaagctcaagtgcaggtgatcagagagagagtggaccgaccttttcgctgccttcattataaatatagggaggaacttgttagggtgtatttgggaaatgtagagcaaatttgctggcggtttgtggaagagaaaagaagcaagcttggtaggttgatagaggacaaggcaaaatggaaaagcttctgtgctttctggatggggttggaccaaaattcaaggcgtcgaatgtcccgagagaaaatggatgtgattctaaaaatagttgtaaaacacttctttgtcgagaaggaagttacatctactttggtgatggattccttgtatagtggattgaaggctcttgaaggccaaaataagaacaaggagagtaggccgagactaatggatactgaagaatccacagctccaattgttagcgtggacaaagattcgtttgcattagttgatgatgtgttattactcttagagaaggctgctctggagccattgcctaaaaaagaggaaaagagttctcaaaaccgtacgaaggatgggaatgctggagaggaattcagtagagaagccgttgagcgtgatgataggcgtttaactgaattgggtagacggactgtggagatatttgttcttgcacatatcttcagcaacaaaattgaagttgcataccaagaagctattgcatggaaaaggcaagaagaacttattcgtgaagaagaggaagcgtggctggcagaaagcgaacagaagggcaaaagaggagcatctgaaaaagagaagaaatctaagaagaaacaggcgaaacagaaaaagaacaaaaacaaaggaaaggaaatgaggaaagaagacaaggtgagaacccaaacagaagaaagggaaattgagaaagaggaatgtgtgagagcgatagcagaatcgtcagctgaaaaacctgacacacttggagatgtctctgacgtgtctgattcagtagatagttcagctgaaatacttcagcttgattcagaagatagagagagtagtcctgttcattgggaaatggatgcctcagaggttcatcctccttctgcaggagacactagcagaggaagaggcaattctttttctatacctaatggagttgcagaaagaaagggtctgtccacaatggatgatagttcttcaacctgttctaatgactcgattcaatcaggggtagccaatgggtcatacaaagggaatgtattaaattgccaaagccaaaagtggtttagcaatggaaaaatacaaccaggaaaagtatctgattccaacagtttagccagtgaaaaagagcatcaaccttcaagacttgcatctgaccctaaaaatcagagccattcttctgatatacgcagagttggtgaagctgacatagttatctcccacattcaaaaaccagagagccctaaggaacgtagtcctgttagcaaggatcccaacatgattcagatgaaagagaaaagtgctgcggtactttccccatccagagctgctccttggaatcctccgtctccagtgcaagcaaaaccggagaaaaagggtgtttcaaatgtagaggcggttccaaacaggaaagtcatatctgttaaatcaccttcatcacatcatgcatcaccatctcgtgaagctcagttgcaaacagtgggtcctagagctgatatacagaaaatcgcttctccgaaacctgtggaacaaccagcacctcctatgtcaaggcctttgagtgctcctataatccctccaacgcaagctgcacctgtaatatctgctgttcaaacctcgactgcgtcccttgctcgttcaatgagctcaacagggcgtttaggttcaccgacacatagccaagcttacaatcctcaatcctacaaacatgccatagtgggttcatctggtttcacccacccaagctctcaatcgagtggaacaagcacattgccgccttattcacatccgtctcctatctcagtatcaaatcagtctggtttccctatcaatgttggctcttgggatgtttcttctggtgggctattgtggaccggtggttcgagttcaaccagagatacaacaacaaccatcagcgggaatcacaaaacaaacacttacaacgcacccgtagtaactaccagcatcaggcctactaatgttcagatagggagaacggcacagagtctgatgaccgatgagttccctcaccttgatatcatcaatgatctgcttgcagacgaacacggtacaatggataatagcgtataccgtgtaccacaacagttcaacaaccagtactcatatcatggcggtgcggatctcgggatctctagcaggtctaggagttacagtgatgatggatttcaccagtcttacggtgaatacatgccacattctgcttcttcctcgccatatggtaatgggcaaacacaatcgcaatggcagatggcaaatatggatttctctttaccggctatgaggaaccaagacgatgtatcagcatcagcaacagctacttactcttactttgatttagattcatcaaacccgaatttgtctggaatcaacggctatagggacttcaggccatcgaacggacactgaggtttgggtttaaagagtggcattgcattgtaatgtttattatataaagatggaaagcaaaaaacatttgtgtaaagagagttttcgtcctcttcgtttcaaatgaatccttttttctct

SEQ ID NO: 81416 - protein, 1055 aa, Arabidopsis thaliana
  peptide (1)..(1055): Ceres Seq. ID no. 12659705
  misc_feature (75)..(193): Pfam Name: MATH domain Pfam Description: MATH domain
  misc_feature (240)..(953): Homolog of NCBI NO: 25406769 NR Description: protein F19P19.26 [imported] - Arabidopsis
  misc_feature (1)..(194): Homolog of NCBI NO: 25406769 NR Description: protein F19P19.26 [imported] - Arabidopsis
  misc_feature (99)..(1026): Homolog of NCBI NO: 30678845 NR Description: expressed protein [Arabidopsis thaliana]
  misc_feature (1)..(799): Homolog of NCBI NO: 34910000 NR Description: P0490D09.24 [Oryza sativa (japonica
  misc_feature (355)..(1055): Homolog of NCBI NO: 30678845 NR Description: expressed protein [Arabidopsis thaliana]
  misc_feature (55)..(427): Homolog of NCBI NO: 15242970 NR Description: putative protein; protein id: At5g52330.1 thaliana] >gi|10177399|dbj|BAB10530.1| contains similarity to
  misc_feature (282)..(439): Homolog of NCBI NO: 22328695 NR Description: hypothetical protein; protein id: At4g16045.1
  misc_feature (106)..(192): Homolog of NCBI NO: 22328695 NR Description: hypothetical protein; protein id: At4g16045.1
  misc_feature (220)..(319): Homolog of NCBI NO: 22328695 NR Description: hypothetical protein; protein id: At4g16045.1
  misc_feature (70)..(199): Homolog of NCBI NO: 10998129 NR Description: ubiquitin carboxyl-terminal hydrolase-like
MSESTNEDSGAGRSSLEENSNGQRSQSEEAIAEWRSSEQVENGTPSTSPPYWDIDDDDDFGSKPSQLFGKNTWTIEKFSDINKRELRGDVFEVGGYKWYILIYPQGCDVCNHLSLFLCVAHHEKLLPGWSHFAQFTIAVSNKDPKKSKHSDTLHRFWKKEHDWGWKKFIELPKLKEGFIDDSGCLTIKAQVQVIRERVDRPFRCLHYKYREELVRVYLGNVEQICWRFVEEKRSKLGRLIEDKAKWKSFCAFWMGLDQNSRRRMSREKMDVILKIVVKHFFVEKEVTSTLVMDSLYSGLKALEGQNKNKESRPRLMDTEESTAPIVSVDKDSFALVDDVLLLLEKAALEPLPKKEEKSSQNRTKDGNAGEEFSREAVERDDRRLTELGRRTVEIFVLAHIFSNKIEVAYQEAIAWKRQEELIREEEEAWLAESEQKGKRGASEKEKKSKKKQAKQKKNKNKGKEMRKEDKVRTQTEEREIEKEECVRAIAESSAEKPDTLGDVSDVSDSVDSSAEILQLDSEDRESSPVHWEMDASEVHPPSAGDTSRGRGNSFSIPNGVAERKGLSTMDDSSSTCSNDSIQSGVANGSYKGNVLNCQSQKWFSNGKIQPGKVSDSNSLASEKEHQPSRLASDPKNQSHSSDIRRVGEADIVISHIQKPESPKERSPVSKDPNMIQMKEKSAAVLSPSRAAPWNPPSPVQAKPEKKGVSNVEAVPNRKVISVKSPSSHHASPSREAQLQTVGPRADIQKIASPKPVEQPAPPMSRPLSAPIIPPTQAAPVISAVQTSTASLARSMSSTGRLGSPTHSQAYNPQSYKHAIVGSSGFTHPSSQSSGTSTLPPYSHPSPISVSNQSGFPINVGSWDVSSGGLLWTGGSSSTRDTTTTISGNHKTNTYNAPVVTTSIRPTNVQIGRTAQSLMTDEFPHLDIINDLLADEHGTMDNSVYRVPQQFNNQYSYHGGADLGISSRSRSYSDDGFHQSYGEYMPHSASSSPYGNGQTQSQWQMANMDFSLPAMRNQDDVSASATATYSYFDLDSSNPNLSGINGYRDFRPSNGH

SEQ ID NO: 81417 - protein, 802 aa, Arabidopsis thaliana
  peptide (1)..(802): Ceres Seq. ID no. 12659706
  misc_feature (1)..(700): Homolog of NCBI NO: 25406769 NR Description: protein F19P19.26 [imported] - Arabidopsis
  misc_feature (1)..(773): Homolog of NCBI NO: 30678845 NR Description: expressed protein [Arabidopsis thaliana]
  misc_feature (1)..(546): Homolog of NCBI NO: 34910000 NR Description: P0490D09.24 [Oryza sativa (japonica
  misc_feature (102)..(802): Homolog of NCBI NO: 30678845 NR Description: expressed protein [Arabidopsis thaliana]
  misc_feature (1)..(174): Homolog of NCBI NO: 15242970 NR Description: putative protein; protein id: At5g52330.1 thaliana] >gi|10177399|dbj|BAB10530.1| contains similarity to
  misc_feature (29)..(186): Homolog of NCBI NO: 22328695 NR Description: hypothetical protein; protein id: At4g16045.1
  misc_feature (1)..(66): Homolog of NCBI NO: 22328695 NR Description: hypothetical protein; protein id: At4g16045.1
  misc_feature (120)..(474): Homolog of NCBI NO: 23509704 NR Description: hypothetical protein, conserved [Plasmodium
  misc_feature (47)..(526): Homolog of NCBI NO: 2133786 NR Description: NF-180 - sea lamprey >gi|632549|gb|AAA80106.1|
  misc_feature (91)..(508): Homolog of NCBI NO: 2133786 NR Description: NF-180 - sea lamprey >gi|632549|gb|AAA80106.1|
MGLDQNSRRRMSREKMDVILKIVVKHFFVEKEVTSTLVMDSLYSGLKALEGQNKNKESRPRLMDTEESTAPIVSVDKDSFALVDDVLLLLEKAALEPLPKKEEKSSQNRTKDGNAGEEFSREAVERDDRRLTELGRRTVEIFVLAHIFSNKIEVAYQEAIAWKRQEELIREEEEAWLAESEQKGKRGASEKEKKSKKKQAKQKKNKNKGKEMRKEDKVRTQTEEREIEKEECVRAIAESSAEKPDTLGDVSDVSDSVDSSAEILQLDSEDRESSPVHWEMDASEVHPPSAGDTSRGRGNSFSIPNGVAERKGLSTMDDSSSTCSNDSIQSGVANGSYKGNVLNCQSQKWFSNGKIQPGKVSDSNSLASEKEHQPSRLASDPKNQSHSSDIRRVGEADIVISHIQKPESPKERSPVSKDPNMIQMKEKSAAVLSPSRAAPWNPPSPVQAKPEKKGVSNVEAVPNRKVISVKSPSSHHASPSREAQLQTVGPRADIQKIASPKPVEQPAPPMSRPLSAPIIPPTQAAPVISAVQTSTASLARSMSSTGRLGSPTHSQAYNPQSYKHAIVGSSGFTHPSSQSSGTSTLPPYSHPSPISVSNQSGFPINVGSWDVSSGGLLWTGGSSSTRDTTTTISGNHKTNTYNAPVVTTSIRPTNVQIGRTAQSLMTDEFPHLDIINDLLADEHGTMDNSVYRVPQQFNNQYSYHGGADLGISSRSRSYSDDGFHQSYGEYMPHSASSSPYGNGQTQSQWQMANMDFSLPAMRNQDDVSASATATYSYFDLDSSNPNLSGINGYRDFRPSNGH

SEQ ID NO: 81418 - protein, 792 aa, Arabidopsis thaliana
  peptide (1)..(792): Ceres Seq. ID no. 12659707
  misc_feature (1)..(690): Homolog of NCBI NO: 25406769 NR Description: protein F19P19.26 [imported] - Arabidopsis
  misc_feature (1)..(763): Homolog of NCBI NO: 30678845 NR Description: expressed protein [Arabidopsis thaliana]
  misc_feature (1)..(536): Homolog of NCBI NO: 34910000 NR Description: P0490D09.24 [Oryza sativa (japonica
  misc_feature (92)..(792): Homolog of NCBI NO: 30678845 NR Description: expressed protein [Arabidopsis thaliana]
  misc_feature (1)..(164): Homolog of NCBI NO: 15242970 NR Description: putative protein; protein id: At5g52330.1 thaliana] >gi|10177399|dbj|BAB10530.1| contains similarity to
  misc_feature (19)..(176): Homolog of NCBI NO: 22328695 NR Description: hypothetical protein; protein id: At4g16045.1
  misc_feature (1)..(56): Homolog of NCBI NO: 22328695 NR Description: hypothetical protein; protein id: At4g16045.1
  misc_feature (110)..(464): Homolog of NCBI NO: 23509704 NR Description: hypothetical protein, conserved [Plasmodium
  misc_feature (37)..(516): Homolog of NCBI NO: 2133786 NR Description: NF-180 - sea lamprey >gi|632549|gb|AAA80106.1|
  misc_feature (81)..(498): Homolog of NCBI NO: 2133786 NR Description: NF-180 - sea lamprey >gi|632549|gb|AAA80106.1|
MSREKMDVILKIVVKHFFVEKEVTSTLVMDSLYSGLKALEGQNKNKESRPRLMDTEESTAPIVSVDKDSFALVDDVLLLLEKAALEPLPKKEEKSSQNRTKDGNAGEEFSREAVERDDRRLTELGRRTVEIFVLAHIFSNKIEVAYQEAIAWKRQEELIREEEEAWLAESEQKGKRGASEKEKKSKKKQAKQKKNKNKGKEMRKEDKVRTQTEEREIEKEECVRAIAESSAEKPDTLGDVSDVSDSVDSSAEILQLDSEDRESSPVHWEMDASEVHPPSAGDTSRGRGNSFSIPNGVAERKGLSTMDDSSSTCSNDSIQSGVANGSYKGNVLNCQSQKWFSNGKIQPGKVSDSNSLASEKEHQPSRLASDPKNQSHSSDIRRVGEADIVISHIQKPESPKERSPVSKDPNMIQMKEKSAAVLSPSRAAPWNPPSPVQAKPEKKGVSNVEAVPNRKVISVKSPSSHHASPSREAQLQTVGPRADIQKIASPKPVEQPAPPMSRPLSAPIIPPTQAAPVISAVQTSTASLARSMSSTGRLGSPTHSQAYNPQSYKHAIVGSSGFTHPSSQSSGTSTLPPYSHPSPISVSNQSGFPINVGSWDVSSGGLLWTGGSSSTRDTTTTISGNHKTNTYNAPVVTTSIRPTNVQIGRTAQSLMTDEFPHLDIINDLLADEHGTMDNSVYRVPQQFNNQYSYHGGADLGISSRSRSYSDDGFHQSYGEYMPHSASSSPYGNGQTQSQWQMANMDFSLPAMRNQDDVSASATATYSYFDLDSSNPNLSGINGYRDFRPSNGH

SEQ ID NO: 81419 - DNA, 1479 bp, Arabidopsis thaliana
  misc_feature (1)..(1479): Ceres Seq. ID no. 12659710
  misc_feature: MA Experiment ID: 20000346 Result: Up-regulated in Transcription
  misc_feature: MA Experiment 20000346 PARAMETER Experiment Name: At_2mM_SA_Sub_P Parameter: Age (day) Value: 14
  misc_feature: MA Experiment 20000346 PARAMETER Experiment Name: At_2mM_SA_Sub_P Parameter: Organism Value: A. thaliana
  misc_feature: MA Experiment 20000346 PARAMETER Experiment Name: At_2mM_SA_Sub_P Parameter: Plant Line Value: WS
  misc_feature: MA Experiment 20000346 PARAMETER Experiment Name: At_2mM_SA_Sub_P Parameter: Timepoint (hr) Value: 1
  misc_feature: MA Experiment 20000346 PARAMETER Experiment Name: At_2mM_SA_Sub_P Parameter: Tissue Value: Aerial
  misc_feature: MA Experiment 20000346 PARAMETER Experiment Name: At_2mM_SA_Sub_P Parameter: Treatment Value: 2mM SA vs. No Treatment
  misc_feature: MA Experiment ID: 20000347 Result: Up-regulated in Transcription
  misc_feature: MA Experiment 20000347 PARAMETER Experiment Name: At_2mM_SA_Sub_P Parameter: Age (day) Value: 14
  misc_feature: MA Experiment 20000347 PARAMETER Experiment Name: At_2mM_SA_Sub_P Parameter: Organism Value: A. thaliana
  misc_feature: MA Experiment 20000347 PARAMETER Experiment Name: At_2mM_SA_Sub_P Parameter: Plant Line Value: WS
  misc_feature: MA Experiment 20000347 PARAMETER Experiment Name: At_2mM_SA_Sub_P Parameter: Timepoint (hr) Value: 6
  misc_feature: MA Experiment 20000347 PARAMETER Experiment Name: At_2mM_SA_Sub_P Parameter: Tissue Value: Aerial
  misc_feature: MA Experiment 20000347 PARAMETER Experiment Name: At_2mM_SA_Sub_P Parameter: Treatment Value: 2mM SA vs. No Treatment
  misc_feature: MA Experiment ID: 20000440 Result: Up-regulated in Transcription
  misc_feature: MA Experiment 20000440 PARAMETER Experiment Name: At_Closed-Flower__Sub_P Parameter: Tissue Value: Closed Flower vs. Whole Plant
atgagtgacctccaagcaaacaaagatgcagcggctgtgaatagacagtcttcctcgtcgtcggcggatcttaatgggccatctccgatgagaaagatgatatcggtggcttctattgccgccggtattcagttcggttgggctcttcagctgtctctgctaactccatacgtgcagcttcttggagtcccacacaaatggtcatctttcatatggctctgtggtcctgtctccggcctgcttgtccagccatccgtcggttacttcagcgaccgatgcaagtcaagattcggtcgtcgtcgtcctttcatcgctatgggcgccttacttgtcgccgttgctgtcgtactaatcggatacgcggctgatttcggtcacagcatgggagacaaagtcgacgaacctgtcaagatgcgagccgtagttatcttcgctctcggtttctggatccttgacgtggctaacaacactctccaaggaccttgccgcgcattccttggtgatttagcagctggagacgctaagaaaacacgaacagcaaacgcatttttctccttcttcatggctgttggaaatgttttgggatatgcggccggatcgtacactaacctctacaagatcttccctttcacaatgactaaagcatgcgacatctattgcgcaaatctcaagagctgtttcttcctttccatcactctcctcctagtcgtcaccatcatagctctttggtacgtggaagacaagcaatggtcgcctaaggcagattccgacaacgagaaaactccattctttggtgaaatctttggagctttcaaggtgatgaaacgtccaatgtggatgctattaatcgtcacggccttgaactggatcgcatggttcccttttcttttgtacgatactgattggatgggtcgtgaggtgtacggtggagactcaaaaggagatgacaaaatgaagaaactatacaaccaaggaattcacgttggtgggttgggattgatgcttaactctatcgttcttggattcatgtcacttggtattgaaggtattagtaggaaaatgggaggagctaaaaggctttggggagctgtgaatatcatcctcgccgtgtgtttggcaatgacggttttggttactaaaaaggcagaggagcaccggagaatcgccggtccgatggcccttcctactgatggcatcagagctggagcattgactctctttgcccttcttggaattcctcttgctattacatttagtattccgttcgcgctagcttccataatctctagcagctccggtgccggtcaaggactctctctaggcgttttaaacatgacaatagtgataccacaaatggttgtatcatttggagttggtcctattgatgcgttatttggaggtgggaatttaccaggatttgtggttggagctattgcagcggcaatcagcagtgttgtggcattttccgttttaccataa

SEQ ID NO: 81420 - protein, 492 aa, Arabidopsis thaliana
  peptide (1)..(492): Ceres Seq. ID no. 12659711
  misc_feature (33)..(468): Pfam Name: Sugar (and other) transporter Pfam Description: Sugar (and other) transporter
  misc_feature (1)..(492): Homolog of NCBI NO: 15239921 NR Description: sucrose transporter protein; protein id: [Arabidopsis thaliana] >gi|10178200|dbj|BAB11624.1| sucrose
  misc_feature (1)..(492): Homolog of NCBI NO: 15225986 NR Description: putative sucrose-proton symporter; protein id:
  misc_feature (1)..(492): Homolog of NCBI NO: 15219686 NR Description: sucrose-proton symporter, putative; protein id:
  misc_feature (1)..(492): Homolog of NCBI NO: 15239949 NR Description: sucrose transporter protein; protein id: [Arabidopsis thaliana] >gi|9759315|dbj|BAB09682.1| sucrose
  misc_feature (8)..(492): Homolog of NCBI NO: 18091779 NR Description: sucrose transporter SUC1 [Brassica oleracea]
  misc_feature (8)..(492): Homolog of NCBI NO: 15217601 NR Description: sucrose transport protein SUC1; protein id: supported by cDNA: gi_15146267 [Arabidopsis thaliana]
  misc_feature (1)..(492): Homolog of NCBI NO: 12057172 NR Description: sucrose trasporter [Arabidopsis thaliana]
  misc_feature (1)..(492): Homolog of NCBI NO: 15217602 NR Description: putative sucrose transport protein; protein id: [Arabidopsis thaliana] >gi|25344713|pir||F96741 probable sucrose
  misc_feature (12)..(492): Homolog of NCBI NO: 15219938 NR Description: putative sucrose transport protein, SUC2; protein At1g22710.1, supported by cDNA: 7894., supported by cDNA: supported by cDNA: gi_15293104, supported by cDNA: gi_20147212,
  misc_feature (5)..(492): Homolog of NCBI NO: 18091781 NR Description: sucrose transporter SUC2 [Brassica oleracea]
MSDLQANKDAAAVNRQSSSSSADLNGPSPMRKMISVASIAAGIQFGWALQLSLLTPYVQLLGVPHKWSSFIWLCGPVSGLLVQPSVGYFSDRCKSRFGRRRPFIAMGALLVAVAVVLIGYAADFGHSMGDKVDEPVKMRAVVIFALGFWILDVANNTLQGPCRAFLGDLAAGDAKKTRTANAFFSFFMAVGNVLGYAAGSYTNLYKIFPFTMTKACDIYCANLKSCFFLSITLLLVVTIIALWYVEDKQWSPKADSDNEKTPFFGEIFGAFKVMKRPMWMLLIVTALNWIAWFPFLLYDTDWMGREVYGGDSKGDDKMKKLYNQGIHVGGLGLMLNSIVLGFMSLGIEGISRKMGGAKRLWGAVNIILAVCLAMTVLVTKKAEEHRRIAGPMALPTDGIRAGALTLFALLGIPLAITFSIPFALASIISSSSGAGQGLSLGVLNMTIVIPQMVVSFGVGPIDALFGGGNLPGFVVGAIAAAISSVVAFSVLP

SEQ ID NO: 81421 - protein, 463 aa, Arabidopsis thaliana
  peptide (1)..(463): Ceres Seq. ID no. 12659712
  misc_feature (4)..(439): Pfam Name: Sugar (and other) transporter Pfam Description: Sugar (and other) transporter
  misc_feature (1)..(463): Homolog of NCBI NO: 15239921 NR Description: sucrose transporter protein; protein id: [Arabidopsis thaliana] >gi|10178200|dbj|BAB11624.1| sucrose
  misc_feature (1)..(463): Homolog of NCBI NO: 15225986 NR Description: putative sucrose-proton symporter; protein id:
  misc_feature (1)..(463): Homolog of NCBI NO: 15219686 NR Description: sucrose-proton symporter, putative; protein id:
  misc_feature (1)..(463): Homolog of NCBI NO: 15239949 NR Description: sucrose transporter protein; protein id: [Arabidopsis thaliana] >gi|9759315|dbj|BAB09682.1| sucrose
  misc_feature (1)..(463): Homolog of NCBI NO: 18091779 NR Description: sucrose transporter SUC1 [Brassica oleracea]
  misc_feature (1)..(463): Homolog of NCBI NO: 15217601 NR Description: sucrose transport protein SUC1; protein id: supported by cDNA: gi_15146267 [Arabidopsis thaliana]
  misc_feature (1)..(463): Homolog of NCBI NO: 12057172 NR Description: sucrose trasporter [Arabidopsis thaliana]
  misc_feature (1)..(463): Homolog of NCBI NO: 15217602 NR Description: putative sucrose transport protein; protein id: [Arabidopsis thaliana] >gi|25344713|pir||F96741 probable sucrose
  misc_feature (1)..(463): Homolog of NCBI NO: 15219938 NR Description: putative sucrose transport protein, SUC2; protein At1g22710.1, supported by cDNA: 7894., supported by cDNA: supported by cDNA: gi_15293104, supported by cDNA: gi_20147212,
  misc_feature (1)..(463): Homolog of NCBI NO: 18091781 NR Description: sucrose transporter SUC2 [Brassica oleracea]
MRKMISVASIAAGIQFGWALQLSLLTPYVQLLGVPHKWSSFIWLCGPVSGLLVQPSVGYFSDRCKSRFGRRRPFIAMGALLVAVAVVLIGYAADFGHSMGDKVDEPVKMRAVVIFALGFWILDVANNTLQGPCRAFLGDLAAGDAKKTRTANAFFSFFMAVGNVLGYAAGSYTNLYKIFPFTMTKACDIYCANLKSCFFLSITLLLVVTIIALWYVEDKQWSPKADSDNEKTPFFGEIFGAFKVMKRPMWMLLIVTALNWIAWFPFLLYDTDWMGREVYGGDSKGDDKMKKLYNQGIHVGGLGLMLNSIVLGFMSLGIEGISRKMGGAKRLWGAVNIILAVCLAMTVLVTKKAEEHRRIAGPMALPTDGIRAGALTLFALLGIPLAITFSIPFALASIISSSSGAGQGLSLGVLNMTIVIPQMVVSFGVGPIDALFGGGNLPGFVVGAIAAAISSVVAFSVLP

SEQ ID NO: 81422 - protein, 460 aa, Arabidopsis thaliana
  peptide (1)..(460): Ceres Seq. ID no. 12659713
  misc_feature (1)..(436): Pfam Name: Sugar (and other) transporter Pfam Description: Sugar (and other) transporter
  misc_feature (1)..(460): Homolog of NCBI NO: 15239921 NR Description: sucrose transporter protein; protein id: [Arabidopsis thaliana] >gi|10178200|dbj|BAB11624.1| sucrose
  misc_feature (1)..(460): Homolog of NCBI NO: 15225986 NR Description: putative sucrose-proton symporter; protein id:
  misc_feature (1)..(460): Homolog of NCBI NO: 15219686 NR Description: sucrose-proton symporter, putative; protein id:
  misc_feature (1)..(460): Homolog of NCBI NO: 15239949 NR Description: sucrose transporter protein; protein id: [Arabidopsis thaliana] >gi|9759315|dbj|BAB09682.1| sucrose
  misc_feature (1)..(460): Homolog of NCBI NO: 18091779 NR Description: sucrose transporter SUC1 [Brassica oleracea]
  misc_feature (1)..(460): Homolog of NCBI NO: 15217601 NR Description: sucrose transport protein SUC1; protein id: supported by cDNA: gi_15146267 [Arabidopsis thaliana]
  misc_feature (1)..(460): Homolog of NCBI NO: 12057172 NR Description: sucrose trasporter [Arabidopsis thaliana]
  misc_feature (1)..(460): Homolog of NCBI NO: 15217602 NR Description: putative sucrose transport protein; protein id: [Arabidopsis thaliana] >gi|25344713|pir||F96741 probable sucrose
  misc_feature (1)..(460): Homolog of NCBI NO: 15219938 NR Description: putative sucrose transport protein, SUC2; protein At1g22710.1, supported by cDNA: 7894., supported by cDNA: supported by cDNA: gi_15293104, supported by cDNA: gi_20147212,
  misc_feature (1)..(460): Homolog of NCBI NO: 18091781 NR Description: sucrose transporter SUC2 [Brassica oleracea]
MISVASIAAGIQFGWALQLSLLTPYVQLLGVPHKWSSFIWLCGPVSGLLVQPSVGYFSDRCKSRFGRRRPFIAMGALLVAVAVVLIGYAADFGHSMGDKVDEPVKMRAVVIFALGFWILDVANNTLQGPCRAFLGDLAAGDAKKTRTANAFFSFFMAVGNVLGYAAGSYTNLYKIFPFTMTKACDIYCANLKSCFFLSITLLLVVTIIALWYVEDKQWSPKADSDNEKTPFFGEIFGAFKVMKRPMWMLLIVTALNWIAWFPFLLYDTDWMGREVYGGDSKGDDKMKKLYNQGIHVGGLGLMLNSIVLGFMSLGIEGISRKMGGAKRLWGAVNIILAVCLAMTVLVTKKAEEHRRIAGPMALPTDGIRAGALTLFALLGIPLAITFSIPFALASIISSSSGAGQGLSLGVLNMTIVIPQMVVSFGVGPIDALFGGGNLPGFVVGAIAAAISSVVAFSVLP

SEQ ID NO: 81423 - DNA, 996 bp, Arabidopsis thaliana
  misc_feature (1)..(996): Ceres Seq. ID no. 12659726
  misc_feature: MA Experiment ID: 20000314 Result: Up-regulated in Transcription
  misc_feature: MA Experiment 20000314 PARAMETER Experiment Name: At_14day_Shoots-Roots_Sub_P Parameter: Age (day) Value: 14
  misc_feature: MA Experiment 20000314 PARAMETER Experiment Name: At_14day_Shoots-Roots_Sub_P Parameter: Organism Value: A. thaliana
  misc_feature: MA Experiment 20000314 PARAMETER Experiment Name: At_14day_Shoots-Roots_Sub_P Parameter: Plant Line Value: WS
  misc_feature: MA Experiment 20000314 PARAMETER Experiment Name: At_14day_Shoots-Roots_Sub_P Parameter: Tissue Value: Roots vs. Whole Plant
atggctggaaaaagtgatcttcctgtgatcgcgagagacgacaacctaagtgaagaaacaaaaactctgatctcttcacttcctacataccaagattctcatgtgaagctctgcaagtaccaaggatgttggtattaccacaacactctccaagcagtcatcaactaccaaagaaacttccagccgcaagacaccgacattattctcgcgtctttccccaaatccggtacaacttggctcaaggcactctcagtcgcaatcgtggagagatctaaacagccttttgatgatgatcccctcacacatcctttgctatccgataatcctcatggcatagtaccgttctttgagttcgatatgtatctcaaaacctcaacaccggacttaaccaagttctcaacatcatccccgaggctgttttcgactcacatgcctttacacaccttcaaagagggcctcaagggttctccatgcaaggttgtgtatatgtgcaggaacataaaggatgttttgatatcggattggcatttcaggtccaagtatagcaacaatgaagtatctagaagcactcttgagtcaatgttcgagtcattctgtggcggagttagcttctatggtccgttttgggaccatgctctaagctattggagaggcagcttggaaaaccccaagcatgtccttttcatgaggtacgaggaaatgaaaacagagccgtgtgtccaggtcaagaggcttgccgagtttttggggtttcctttcactaaggaagaagaagatagtggttcgattagcaaactcttggaactatgctctcttggtaatctgagcggtttggaggttaacaaaaccggaaaaacatggatgaactatgactacaaaagctatttccgcaaaggagaagttggtgactggaagaatcatctaactcccgaaatggagaacaaaatcgacatgatcatcgaggagaaattaaaaggttcggacttgaagttctag

SEQ ID NO: 81424 - protein, 331 aa, Arabidopsis thaliana
  peptide (1)..(331): Ceres Seq. ID no. 12659727
  misc_feature (64)..(328): Pfam Name: Sulfotransferase domain Pfam Description: Sulfotransferase domain
  misc_feature (1)..(331): Homolog of NCBI NO: 15239947 NR Description: steroid sulfotransferase-like; protein id:
  misc_feature (12)..(331): Homolog of NCBI NO: 15230602 NR Description: sulfotransferase-like protein; protein id:
  misc_feature (12)..(331): Homolog of NCBI NO: 15230603 NR Description: sulfotransferase-like protein; protein id:
  misc_feature (13)..(330): Homolog of NCBI NO: 15222843 NR Description: steroid sulfotransferase, putative; protein id: supported by cDNA: 150484. [Arabidopsis thaliana]
  misc_feature (13)..(330): Homolog of NCBI NO: 21553545 NR Description: steroid sulfotransferase, putative [Arabidopsis
  misc_feature (4)..(331): Homolog of NCBI NO: 15217849 NR Description: steroid sulfotransferase, putative; protein id: [Arabidopsis thaliana] >gi|25288810|pir||F86407 probable
  misc_feature (133)..(325): Homolog of NCBI NO: 15236162 NR Description: steroid sulfotransferase - like protein; protein At4g26280.1 [Arabidopsis thaliana] >gi|7434975|pir||T06012
  misc_feature (12)..(137): Homolog of NCBI NO: 15236162 NR Description: steroid sulfotransferase - like protein; protein At4g26280.1 [Arabidopsis thaliana] >gi|7434975|pir||T06012
  misc_feature (13)..(331): Homolog of NCBI NO: 15226028 NR Description: putative steroid sulfotransferase; protein id:
  misc_feature (7)..(331): Homolog of NCBI NO: 18395604 NR Description: putative steroid sulfotransferase; protein id: supported by cDNA: 3964., supported by cDNA: gi_20260123 thaliana] >gi|20197902|gb|AAD20077.2| putative steroid putative
MAGKSDLPVIARDDNLSEETKTLISSLPTYQDSHVKLCKYQGCWYYHNTLQAVINYQRNFQPQDTDIILASFPKSGTTWLKALSVAIVERSKQPFDDDPLTHPLLSDNPHGIVPFFEFDMYLKTSTPDLTKFSTSSPRLFSTHMPLHTFKEGLKGSPCKVVYMCRNIKDVLISDWHFRSKYSNNEVSRSTLESMFESFCGGVSFYGPFWDHALSYWRGSLENPKHVLFMRYEEMKTEPCVQVKRLAEFLGFPFTKEEEDSGSISKLLELCSLGNLSGLEVNKTGKTWMNYDYKSYFRKGEVGDWKNHLTPEMENKIDMIIEEKLKGSDLKF

SEQ ID NO: 81425 - protein, 212 aa, Arabidopsis thaliana
  peptide (1)..(212): Ceres Seq. ID no. 12659728
  misc_feature (1)..(209): Pfam Name: Sulfotransferase domain Pfam Description: Sulfotransferase domain
  misc_feature (1)..(212): Homolog of NCBI NO: 15239947 NR Description: steroid sulfotransferase-like; protein id:
  misc_feature (1)..(212): Homolog of NCBI NO: 15230602 NR Description: sulfotransferase-like protein; protein id:
  misc_feature (1)..(212): Homolog of NCBI NO: 15230603 NR Description: sulfotransferase-like protein; protein id:
  misc_feature (1)..(211): Homolog of NCBI NO: 15222843 NR Description: steroid sulfotransferase, putative; protein id: supported by cDNA: 150484. [Arabidopsis thaliana]
  misc_feature (1)..(211): Homolog of NCBI NO: 21553545 NR Description: steroid sulfotransferase, putative [Arabidopsis
  misc_feature (1)..(212): Homolog of NCBI NO: 15217849 NR Description: steroid sulfotransferase, putative; protein id: [Arabidopsis thaliana] >gi|25288810|pir||F86407 probable
  misc_feature (14)..(206): Homolog of NCBI NO: 15236162 NR Description: steroid sulfotransferase - like protein; protein At4g26280.1 [Arabidopsis thaliana] >gi|7434975|pir||T06012
  misc_feature (1)..(18): Homolog of NCBI NO: 15236162 NR Description: steroid sulfotransferase - like protein; protein At4g26280.1 [Arabidopsis thaliana] >gi|7434975|pir||T06012
  misc_feature (1)..(212): Homolog of NCBI NO: 15226028 NR Description: putative steroid sulfotransferase; protein id:
  misc_feature (1)..(212): Homolog of NCBI NO: 18395604 NR Description: putative steroid sulfotransferase; protein id: supported by cDNA: 3964., supported by cDNA: gi_20260123 thaliana] >gi|20197902|gb|AAD20077.2| putative steroid putative
MYLKTSTPDLTKFSTSSPRLFSTHMPLHTFKEGLKGSPCKVVYMCRNIKDVLISDWHFRSKYSNNEVSRSTLESMFESFCGGVSFYGPFWDHALSYWRGSLENPKHVLFMRYEEMKTEPCVQVKRLAEFLGFPFTKEEEDSGSISKLLELCSLGNLSGLEVNKTGKTWMNYDYKSYFRKGEVGDWKNHLTPEMENKIDMIIEEKLKGSDLKF

SEQ ID NO: 81426 - protein, 188 aa, Arabidopsis thaliana
  peptide (1)..(188): Ceres Seq. ID no. 12659729
  misc_feature (1)..(185): Pfam Name: Sulfotransferase domain Pfam Description: Sulfotransferase domain
  misc_feature (1)..(188): Homolog of NCBI NO: 15239947 NR Description: steroid sulfotransferase-like; protein id:
  misc_feature (1)..(188): Homolog of NCBI NO: 15230602 NR Description: sulfotransferase-like protein; protein id:
  misc_feature (1)..(188): Homolog of NCBI NO: 15230603 NR Description: sulfotransferase-like protein; protein id:
  misc_feature (1)..(187): Homolog of NCBI NO: 15222843 NR Description: steroid sulfotransferase, putative; protein id: supported by cDNA: 150484. [Arabidopsis thaliana]
  misc_feature (1)..(187): Homolog of NCBI NO: 21553545 NR Description: steroid sulfotransferase, putative [Arabidopsis
  misc_feature (1)..(188): Homolog of NCBI NO: 15217849 NR Description: steroid sulfotransferase, putative; protein id: [Arabidopsis thaliana] >gi|25288810|pir||F86407 probable
  misc_feature (1)..(182): Homolog of NCBI NO: 15236162 NR Description: steroid sulfotransferase - like protein; protein At4g26280.1 [Arabidopsis thaliana] >gi|7434975|pir||T06012
  misc_feature (1)..(188): Homolog of NCBI NO: 15226028 NR Description: putative steroid sulfotransferase; protein id:
  misc_feature (1)..(188): Homolog of NCBI NO: 18395604 NR Description: putative steroid sulfotransferase; protein id: supported by cDNA: 3964., supported by cDNA: gi_20260123 thaliana] >gi|20197902|gb|AAD20077.2| putative steroid putative
  misc_feature (1)..(188): Homolog of NCBI NO: 30683286 NR Description: sulfotransferase family [Arabidopsis thaliana] Similar to steroid sulfotransferases [Arabidopsis thaliana]
MPLHTFKEGLKGSPCKVVYMCRNIKDVLISDWHFRSKYSNNEVSRSTLESMFESFCGGVSFYGPFWDHALSYWRGSLENPKHVLFMRYEEMKTEPCVQVKRLAEFLGFPFTKEEEDSGSISKLLELCSLGNLSGLEVNKTGKTWMNYDYKSYFRKGEVGDWKNHLTPEMENKIDMIIEEKLKGSDLKF

SEQ ID NO: 81427 - DNA, 1474 bp, Arabidopsis thaliana
  misc_feature (1)..(1474): Ceres Seq. ID no. 12659752
  misc_feature: MA Experiment ID: 20000173 Result: Up-regulated in Transcription
  misc_feature: MA Experiment 20000173 PARAMETER Experiment Name: At_42deg_Heat_P Parameter: Age (day) Value: 14
  misc_feature: MA Experiment 20000173 PARAMETER Experiment Name: At_42deg_Heat_P Parameter: Organism Value: A. thaliana
  misc_feature: MA Experiment 20000173 PARAMETER Experiment Name: At_42deg_Heat_P Parameter: Plant Line Value: WS
  misc_feature: MA Experiment 20000173 PARAMETER Experiment Name: At_42deg_Heat_P Parameter: Temperature (deg C) Value: 42 vs. 22
  misc_feature: MA Experiment 20000173 PARAMETER Experiment Name: At_42deg_Heat_P Parameter: Timepoint (hr) Value: 6
  misc_feature: MA Experiment 20000173 PARAMETER Experiment Name: At_42deg_Heat_P Parameter: Tissue Value: Aerial
  misc_feature: MA Experiment ID: 20000495 Result: Up-regulated in Transcription
  misc_feature: MA Experiment 20000495 PARAMETER Experiment Name: At_Guard_Cells_P Parameter: Harvest Date Value: 8/2/2002
  misc_feature: MA Experiment 20000495 PARAMETER Experiment Name: At_Guard_Cells_P Parameter: Organism Value: A. thaliana
  misc_feature: MA Experiment 20000495 PARAMETER Experiment Name: At_Guard_Cells_P Parameter: Tissue Value: Guard Cells vs. Leaves
  misc_feature: MA Experiment ID: 20000794 Result: Up-regulated in Transcription
  misc_feature: MA Experiment 20000794 PARAMETER Experiment Name: At_Petals_P Parameter: Age (day) Value: 23-25 days
  misc_feature: MA Experiment 20000794 PARAMETER Experiment Name: At_Petals_P Parameter: Plant Line Value: WS
  misc_feature: MA Experiment 20000794 PARAMETER Experiment Name: At_Petals_P Parameter: Tissue Value: Petals vs. Whole plant
  misc_feature: MA Experiment ID: 20001247 Result: Down-regulated in Transcription
  misc_feature: MA Experiment 20001247 PARAMETER Experiment Name: At_Far-red-induction_P Parameter: Age (day) Value: 7
  misc_feature: MA Experiment 20001247 PARAMETER Experiment Name: At_Far-red-induction_P Parameter: Light Value: Far-red vs. White
  misc_feature: MA Experiment 20001247 PARAMETER Experiment Name: At_Far-red-induction_P Parameter: Organism Value: A. thaliana
  misc_feature: MA Experiment 20001247 PARAMETER Experiment Name: At_Far-red-induction_P Parameter: Plant Line Value: Columbia
  misc_feature: MA Experiment 20001247 PARAMETER Experiment Name: At_Far-red-induction_P Parameter: Timepoint (hr) Value: 1
  misc_feature: MA Experiment 20001247 PARAMETER Experiment Name: At_Far-red-induction_P Parameter: Tissue Value: Whole Plant
  misc_feature: MA Experiment ID: 20001905 Result: Up-regulated in Transcription
  misc_feature: MA Experiment 20001905 PARAMETER Experiment Name: At_Drought_Reproduction_P Parameter: Age (day) Value: 40
  misc_feature: MA Experiment 20001905 PARAMETER Experiment Name: At_Drought_Reproduction_P Parameter: Organism Value: A. thaliana
  misc_feature: MA Experiment 20001905 PARAMETER Experiment Name: At_Drought_Reproduction_P Parameter: Plant Line Value: WS
  misc_feature: MA Experiment 20001905 PARAMETER Experiment Name: At_Drought_Reproduction_P Parameter: Timepoint (day) Value: 10
  misc_feature: MA Experiment 20001905 PARAMETER Experiment Name: At_Drought_Reproduction_P Parameter: Tissue Value: Rosettes
  misc_feature: MA Experiment 20001905 PARAMETER Experiment Name: At_Drought_Reproduction_P Parameter: Treatment Value: Drought vs. No Drought
atgacatctccaagcacaagcaagaatcatcgatgcttaaacctaatctcaaaatgcaaatccttacaaaacctcaaacaaatccatgcccaaatcatcacaatcggtctctctcaccacacatatcctctaagtaagctccttcacttatcctccaccgtctgcttatcctacgcactctctatcttacgccaaatccctaatccttccgtcttcctctacaacactctcatctcttccatcgtctccaatcacaattccactcaaacccatctcgcgttttctctctacgatcagattttgagctcaagatccaattttgtcagacccaatgaatttacgtatccttctctcttcaaagcctcaggctttgacgctcaatggcatcgccatgggagggctcttcatgcccacgtcttgaaatttctcgaaccggtgaatcatgatcggtttgtgcaagctgctttagttgggttttacgctaattgtggtaaattgagagaagctaggtctttgtttgagagaattagggaacctgatttggctacttggaacactcttcttgctgcttacgctaattccgaagaaattgatagcgatgaagaggttttgttgttgtttatgagaatgcaagtaagacctaacgagctttctcttgtagctttgattaaatcttgtgcgaatttaggtgaatttgtgagaggtgtttgggctcatgtgtatgtcttgaagaataatctgaccctgaaccagtttgtgggaacttctctgatcgatctttactcgaaatgcggatgtttgagtttcgcacgcaaagtgttcgatgaaatgtctcagagagacgtatcgtgttacaatgcaatgattcgtggtttagcagttcacgggtttggtcaagaaggtattgaattgtacaagagcttgatctctcaaggattagtcccggacagtgcaactttcgtggtgacgatatcagcatgttcgcactcgggtctagtcgacgaaggtctccaaatatttaactcaatgaaagcggtttacgggatcgagcctaaagttgagcattacggatgtttagttgatctactaggccgatccgggaggttagaagaagcggaagaatgcatcaagaagatgccggtgaagccgaatgcgacactatggagatcgtttctagggtcatctcaaacacatggtgactttgagaggggtgagattgcgctaaagcatttgttggggttagaattcgaaaacagcggaaattatgtgctcttgtcgaatatttatgccggagttaaccgttggactgacgtagagaagacccgggaacttatgaaagaccaccgtgtcaataaatctccggggattagtactcttaattaatttacaaatgtaattgaaatttaatctccaaaagtaggaccaaagaagctacaacaacttgttttgtttttctaataaaaaaattgtaaac

SEQ ID NO: 81428 - protein, 460 aa, Arabidopsis thaliana
  peptide (1)..(460): Ceres Seq. ID no. 12659753
  misc_feature (283)..(317): Pfam Name: PPR repeat Pfam Description: PPR repeat
  misc_feature (1)..(460): Homolog of NCBI NO: 15239985 NR Description: putative protein; protein id: At5g43790.1 thaliana] >gi|10177948|dbj|BAB11307.1|
  misc_feature (11)..(457): Homolog of NCBI NO: 7486979 NR Description: hypothetical protein T13K14.230 - Arabidopsis
  misc_feature (8)..(457): Homolog of NCBI NO: 15222513 NR Description: PPR-repeat protein, putative; protein id:
  misc_feature (13)..(457): Homolog of NCBI NO: 15222917 NR Description: hypothetical protein; protein id: At1g50270.1
  misc_feature (10)..(457): Homolog of NCBI NO: 15235115 NR Description: putative protein; protein id: At4g39530.1
  misc_feature (3)..(459): Homolog of NCBI NO: 15218900 NR Description: hypothetical protein; protein id: At1g59720.1
  misc_feature (4)..(460): Homolog of NCBI NO: 34393394 NR Description: putative pentatricopeptide (PPR)
  misc_feature (5)..(459): Homolog of NCBI NO: 8778758 NR Description: T30E16.32 [Arabidopsis thaliana]
  misc_feature (14)..(457): Homolog of NCBI NO: 11281371 NR Description: hypothetical protein T8H10.30 - Arabidopsis >gi|6706414|emb|CAB66100.1| putative protein [Arabidopsis
  misc_feature (14)..(457): Homolog of NCBI NO: 30694644 NR Description: pentatricopeptide (PPR) repeat-containing protein
MTSPSTSKNHRCLNLISKCKSLQNLKQIHAQIITIGLSHHTYPLSKLLHLSSTVCLSYALSILRQIPNPSVFLYNTLISSIVSNHNSTQTHLAFSLYDQILSSRSNFVRPNEFTYPSLFKASGFDAQWHRHGRALHAHVLKFLEPVNHDRFVQAALVGFYANCGKLREARSLFERIREPDLATWNTLLAAYANSEEIDSDEEVLLLFMRMQVRPNELSLVALIKSCANLGEFVRGVWAHVYVLKNNLTLNQFVGTSLIDLYSKCGCLSFARKVFDEMSQRDVSCYNAMIRGLAVHGFGQEGIELYKSLISQGLVPDSATFVVTISACSHSGLVDEGLQIFNSMKAVYGIEPKVEHYGCLVDLLGRSGRLEEAEECIKKMPVKPNATLWRSFLGSSQTHGDFERGEIALKHLLGLEFENSGNYVLLSNIYAGVNRWTDVEKTRELMKDHRVNKSPGISTLN

SEQ ID NO: 81429 - protein, 253 aa, Arabidopsis thaliana
  peptide (1)..(253): Ceres Seq. ID no. 12659754
  misc_feature (76)..(110): Pfam Name: PPR repeat Pfam Description: PPR repeat
  misc_feature (1)..(253): Homolog of NCBI NO: 15239985 NR Description: putative protein; protein id: At5g43790.1 thaliana] >gi|10177948|dbj|BAB11307.1|
  misc_feature (1)..(250): Homolog of NCBI NO: 7486979 NR Description: hypothetical protein T13K14.230 - Arabidopsis
  misc_feature (1)..(250): Homolog of NCBI NO: 15222513 NR Description: PPR-repeat protein, putative; protein id:
  misc_feature (1)..(250): Homolog of NCBI NO: 15222917 NR Description: hypothetical protein; protein id: At1g50270.1
  misc_feature (1)..(250): Homolog of NCBI NO: 15235115 NR Description: putative protein; protein id: At4g39530.1
  misc_feature (1)..(252): Homolog of NCBI NO: 15218900 NR Description: hypothetical protein; protein id: At1g59720.1
  misc_feature (1)..(253): Homolog of NCBI NO: 34393394 NR Description: putative pentatricopeptide (PPR)
  misc_feature (1)..(252): Homolog of NCBI NO: 8778758 NR Description: T30E16.32 [Arabidopsis thaliana]
  misc_feature (1)..(250): Homolog of NCBI NO: 11281371 NR Description: hypothetical protein T8H10.30 - Arabidopsis >gi|6706414|emb|CAB66100.1| putative protein [Arabidopsis
  misc_feature (1)..(250): Homolog of NCBI NO: 30694644 NR Description: pentatricopeptide (PPR) repeat-containing protein
MRMQVRPNELSLVALIKSCANLGEFVRGVWAHVYVLKNNLTLNQFVGTSLIDLYSKCGCLSFARKVFDEMSQRDVSCYNAMIRGLAVHGFGQEGIELYKSLISQGLVPDSATFVVTISACSHSGLVDEGLQIFNSMKAVYGIEPKVEHYGCLVDLLGRSGRLEEAEECIKKMPVKPNATLWRSFLGSSQTHGDFERGEIALKHLLGLEFENSGNYVLLSNIYAGVNRWTDVEKTRELMKDHRVNKSPGISTLN

SEQ ID NO: 81430 - protein, 251 aa, Arabidopsis thaliana
  peptide (1)..(251): Ceres Seq. ID no. 12659755
  misc_feature (74)..(108): Pfam Name: PPR repeat Pfam Description: PPR repeat
  misc_feature (1)..(251): Homolog of NCBI NO: 15239985 NR Description: putative protein; protein id: At5g43790.1 thaliana] >gi|10177948|dbj|BAB11307.1|
  misc_feature (1)..(248): Homolog of NCBI NO: 7486979 NR Description: hypothetical protein T13K14.230 - Arabidopsis
  misc_feature (1)..(248): Homolog of NCBI NO: 15222513 NR Description: PPR-repeat protein, putative; protein id:
  misc_feature (1)..(248): Homolog of NCBI NO: 15222917 NR Description: hypothetical protein; protein id: At1g50270.1
  misc_feature (1)..(248): Homolog of NCBI NO: 15235115 NR Description: putative protein; protein id: At4g39530.1
  misc_feature (1)..(250): Homolog of NCBI NO: 15218900 NR Description: hypothetical protein; protein id: At1g59720.1
  misc_feature (1)..(251): Homolog of NCBI NO: 34393394 NR Description: putative pentatricopeptide (PPR)
  misc_feature (1)..(250): Homolog of NCBI NO: 8778758 NR Description: T30E16.32 [Arabidopsis thaliana]
  misc_feature (1)..(248): Homolog of NCBI NO: 11281371 NR Description: hypothetical protein T8H10.30 - Arabidopsis >gi|6706414|emb|CAB66100.1| putative protein [Arabidopsis
  misc_feature (1)..(248): Homolog of NCBI NO: 30694644 NR Description: pentatricopeptide (PPR) repeat-containing protein
MQVRPNELSLVALIKSCANLGEFVRGVWAHVYVLKNNLTLNQFVGTSLIDLYSKCGCLSFARKVFDEMSQRDVSCYNAMIRGLAVHGFGQEGIELYKSLISQGLVPDSATFVVTISACSHSGLVDEGLQIFNSMKAVYGIEPKVEHYGCLVDLLGRSGRLEEAEECIKKMPVKPNATLWRSFLGSSQTHGDFERGEIALKHLLGLEFENSGNYVLLSNIYAGVNRWTDVEKTRELMKDHRVNKSPGISTLN

SEQ ID NO: 81431 - DNA, 849 bp, Arabidopsis thaliana
  misc_feature (1)..(849): Ceres Seq. ID no. 12659764
  misc_feature: MA Experiment ID: 20000171 Result: Up-regulated in Transcription
  misc_feature: MA Experiment 20000171 PARAMETER Experiment Name: At_42deg_Heat_P Parameter: Age (day) Value: 14
  misc_feature: MA Experiment 20000171 PARAMETER Experiment Name: At_42deg_Heat_P Parameter: Organism Value: A. thaliana
  misc_feature: MA Experiment 20000171 PARAMETER Experiment Name: At_42deg_Heat_P Parameter: Plant Line Value: WS
  misc_feature: MA Experiment 20000171 PARAMETER Experiment Name: At_42deg_Heat_P Parameter: Temperature (deg C) Value: 42 vs. 22
  misc_feature: MA Experiment 20000171 PARAMETER Experiment Name: At_42deg_Heat_P Parameter: Timepoint (hr) Value: 1
  misc_feature: MA Experiment 20000171 PARAMETER Experiment Name: At_42deg_Heat_P Parameter: Tissue Value: Aerial
  misc_feature: MA Experiment ID: 20000267 Result: Up-regulated in Transcription
  misc_feature: MA Experiment 20000267 PARAMETER Experiment Name: At_Drought_P Parameter: Age (day) Value: 7
  misc_feature: MA Experiment 20000267 PARAMETER Experiment Name: At_Drought_P Parameter: Organism Value: A. thaliana
  misc_feature: MA Experiment 20000267 PARAMETER Experiment Name: At_Drought_P Parameter: Plant Line Value: WS
  misc_feature: MA Experiment 20000267 PARAMETER Experiment Name: At_Drought_P Parameter: Timepoint (hr) Value: 6
  misc_feature: MA Experiment 20000267 PARAMETER Experiment Name: At_Drought_P Parameter: Tissue Value: Whole Plant
  misc_feature: MA Experiment 20000267 PARAMETER Experiment Name: At_Drought_P Parameter: Treatment Value: Drought vs. No Drought
  misc_feature: MA Experiment ID: 20000436 Result: Up-regulated in Transcription
  misc_feature: MA Experiment 20000436 PARAMETER Experiment Name: At_Drought_P Parameter: Age (day) Value: 7
  misc_feature: MA Experiment 20000436 PARAMETER Experiment Name: At_Drought_P Parameter: Organism Value: A. thaliana
  misc_feature: MA Experiment 20000436 PARAMETER Experiment Name: At_Drought_P Parameter: Plant Line Value: WS
  misc_feature: MA Experiment 20000436 PARAMETER Experiment Name: At_Drought_P Parameter: Timepoint (hr) Value: 12
  misc_feature: MA Experiment 20000436 PARAMETER Experiment Name: At_Drought_P Parameter: Tissue Value: Whole Plant
  misc_feature: MA Experiment 20000436 PARAMETER Experiment Name: At_Drought_P Parameter: Treatment Value: Drought vs. No Drought
  misc_feature: MA Experiment ID: 20000437 Result: Up-regulated in Transcription
  misc_feature: MA Experiment 20000437 PARAMETER Experiment Name: At_Drought_P Parameter: Age (day) Value: 8
  misc_feature: MA Experiment 20000437 PARAMETER Experiment Name: At_Drought_P Parameter: Organism Value: A. thaliana
  misc_feature: MA Experiment 20000437 PARAMETER Experiment Name: At_Drought_P Parameter: Plant Line Value: WS
  misc_feature: MA Experiment 20000437 PARAMETER Experiment Name: At_Drought_P Parameter: Timepoint (hr) Value: 24
  misc_feature: MA Experiment 20000437 PARAMETER Experiment Name: At_Drought_P Parameter: Tissue Value: Whole Plant
  misc_feature: MA Experiment 20000437 PARAMETER Experiment Name: At_Drought_P Parameter: Treatment Value: Drought vs. No Drought
  misc_feature: MA Experiment ID: 20000453 Result: Up-regulated in Transcription
  misc_feature: MA Experiment 20000453 PARAMETER Experiment Name: At_100uM_ABA_P Parameter: Age (day) Value: 15
  misc_feature: MA Experiment 20000453 PARAMETER Experiment Name: At_100uM_ABA_P Parameter: Organism Value: A. thaliana
  misc_feature: MA Experiment 20000453 PARAMETER Experiment Name: At_100uM_ABA_P Parameter: Plant Line Value: WS
  misc_feature: MA Experiment 20000453 PARAMETER Experiment Name: At_100uM_ABA_P Parameter: Timepoint (hr) Value: 24
  misc_feature: MA Experiment 20000453 PARAMETER Experiment Name: At_100uM_ABA_P Parameter: Tissue Value: Aerial
  misc_feature: MA Experiment 20000453 PARAMETER Experiment Name: At_100uM_ABA_P Parameter: Treatment Value: 100uM ABA vs. No Treatment
  misc_feature: MA Experiment ID: 20000527 Result: Up-regulated in Transcription
  misc_feature: MA Experiment 20000527 PARAMETER Experiment Name: At_10percent_PEG_P Parameter: Age (day) Value: 20
  misc_feature: MA Experiment 20000527 PARAMETER Experiment Name: At_10percent_PEG_P Parameter: Organism Value: A. thaliana
  misc_feature: MA Experiment 20000527 PARAMETER Experiment Name: At_10percent_PEG_P Parameter: Plant Line Value: WS
  misc_feature: MA Experiment 20000527 PARAMETER Experiment Name: At_10percent_PEG_P Parameter: Timepoint (day) Value: 20
  misc_feature: MA Experiment 20000527 PARAMETER Experiment Name: At_10percent_PEG_P Parameter: Tissue Value: Whole Plant
  misc_feature: MA Experiment 20000527 PARAMETER Experiment Name: At_10percent_PEG_P Parameter: Treatment Value: 10percent PEG vs. No Treatment
  misc_feature: MA Experiment ID: 20001451 Result: Up-regulated in Transcription
  misc_feature: MA Experiment 20001451 PARAMETER Experiment Name: At_Far-red-induction_P Parameter: Age (day) Value: 7
  misc_feature: MA Experiment 20001451 PARAMETER Experiment Name: At_Far-red-induction_P Parameter: Light Value: Far-red vs. White
  misc_feature: MA Experiment 20001451 PARAMETER Experiment Name: At_Far-red-induction_P Parameter: Organism Value: A. thaliana
  misc_feature: MA Experiment 20001451 PARAMETER Experiment Name: At_Far-red-induction_P Parameter: Plant Line Value: Columbia
  misc_feature: MA Experiment 20001451 PARAMETER Experiment Name: At_Far-red-induction_P Parameter: Timepoint (hr) Value: 24
  misc_feature: MA Experiment 20001451 PARAMETER Experiment Name: At_Far-red-induction_P Parameter: Tissue Value: Whole Plant
  misc_feature: MA Experiment ID: 20001554 Result: Up-regulated in Transcription
  misc_feature: MA Experiment 20001554 PARAMETER Experiment Name: At_Drought_Soil_Dry_P Parameter: Age (day) Value: 21
  misc_feature: MA Experiment 20001554 PARAMETER Experiment Name: At_Drought_Soil_Dry_P Parameter: Organism Value: A. thaliana
  misc_feature: MA Experiment 20001554 PARAMETER Experiment Name: At_Drought_Soil_Dry_P Parameter: Plant Line Value: WS
  misc_feature: MA Experiment 20001554 PARAMETER Experiment Name: At_Drought_Soil_Dry_P Parameter: Post Timepoint (hr) Value: None
  misc_feature: MA Experiment 20001554 PARAMETER Experiment Name: At_Drought_Soil_Dry_P Parameter: Post-Treatment Value: None
  misc_feature: MA Experiment 20001554 PARAMETER Experiment Name: At_Drought_Soil_Dry_P Parameter: Timepoint (day) Value: 7
  misc_feature: MA Experiment 20001554 PARAMETER Experiment Name: At_Drought_Soil_Dry_P Parameter: Treatment Value: Drought vs. No Drought
  misc_feature: MA Experiment ID: 20001555 Result: Up-regulated in Transcription
  misc_feature: MA Experiment 20001555 PARAMETER Experiment Name: At_Drought_Soil_Dry_P Parameter: Age (day) Value: 24
  misc_feature: MA Experiment 20001555 PARAMETER Experiment Name: At_Drought_Soil_Dry_P Parameter: Organism Value: A. thaliana
  misc_feature: MA Experiment 20001555 PARAMETER Experiment Name: At_Drought_Soil_Dry_P Parameter: Plant Line Value: WS
  misc_feature: MA Experiment 20001555 PARAMETER Experiment Name: At_Drought_Soil_Dry_P Parameter: Post Timepoint (hr) Value: None
  misc_feature: MA Experiment 20001555 PARAMETER Experiment Name: At_Drought_Soil_Dry_P Parameter: Post-Treatment Value: None
  misc_feature: MA Experiment 20001555 PARAMETER Experiment Name: At_Drought_Soil_Dry_P Parameter: Timepoint (day) Value: 10
  misc_feature: MA Experiment 20001555 PARAMETER Experiment Name: At_Drought_Soil_Dry_P Parameter: Treatment Value: Drought vs. No Drought
  misc_feature: MA Experiment ID: 20001556 Result: Up-regulated in Transcription
  misc_feature: MA Experiment 20001556 PARAMETER Experiment Name: At_Drought_Soil_Dry_P Parameter: Age (day) Value: 26
  misc_feature: MA Experiment 20001556 PARAMETER Experiment Name: At_Drought_Soil_Dry_P Parameter: Organism Value: A. thaliana
  misc_feature: MA Experiment 20001556 PARAMETER Experiment Name: At_Drought_Soil_Dry_P Parameter: Plant Line Value: WS
  misc_feature: MA Experiment 20001556 PARAMETER Experiment Name: At_Drought_Soil_Dry_P Parameter: Post Timepoint (hr) Value: None
  misc_feature: MA Experiment 20001556 PARAMETER Experiment Name: At_Drought_Soil_Dry_P Parameter: Post-Treatment Value: None
  misc_feature: MA Experiment 20001556 PARAMETER Experiment Name: At_Drought_Soil_Dry_P Parameter: Timepoint (day) Value: 12
  misc_feature: MA Experiment 20001556 PARAMETER Experiment Name: At_Drought_Soil_Dry_P Parameter: Treatment Value: Drought vs. No Drought
  misc_feature: MA Experiment ID: 20001905 Result: Up-regulated in Transcription
  misc_feature: MA Experiment 20001905 PARAMETER Experiment Name: At_Drought_Reproduction_P Parameter: Age (day) Value: 40
  misc_feature: MA Experiment 20001905 PARAMETER Experiment Name: At_Drought_Reproduction_P Parameter: Organism Value: A. thaliana
  misc_feature: MA Experiment 20001905 PARAMETER Experiment Name: At_Drought_Reproduction_P Parameter: Plant Line Value: WS
  misc_feature: MA Experiment 20001905 PARAMETER Experiment Name: At_Drought_Reproduction_P Parameter: Timepoint (day) Value: 10
  misc_feature: MA Experiment 20001905 PARAMETER Experiment Name: At_Drought_Reproduction_P Parameter: Tissue Value: Rosettes
  misc_feature: MA Experiment 20001905 PARAMETER Experiment Name: At_Drought_Reproduction_P Parameter: Treatment Value: Drought vs. No Drought
atggattataaccttccaattccattagagggtctcaaagaaacgccaccaacggctttcttgacgaaaacatacaacatagtggaggattcaagcacaaacaacatagtttcatggagcagagacaacaacagcttcattgtttgggaaccagagacttttgccctaatttgcctccctagatgctttaagcacaataatttctccagctttgttagacagctcaatacttatgggtttaagaagattgatacagagagatgggaatttgcaaatgagcattttctgaagggagagaggcatcttcttaagaacatcaagagaagaaagacatcatctcaaacgcaaacgcagtcgctagaaggagagatccatgagctgcgaagagacagaatggctttagaagtagaactggttagactgcgacgaaaacaagaaagcgtgaagacatatctgcatttgatggaagagaaactgaaagtcacagaagtaaagcaagaaatgatgatgaatttcttgctaaagaagattaagaaaccgagttttttacagagcttaaggaaacgtaatctgcaaggaatcaagaatcgagagcaaaagcaagaggtgatctcaagccatggtgttgaggataatggaaagtttgttaaagctgagccagaagagtatggtgatgacatcgatgatcaatgtggaggtgtgtttgattatggtgatgagcttcacatagcttcaatggagcatcaaggacaaggggaggatgaaattgaaatggatagtgaaggaatttggaagggtttcgtgttgagtgaggaggagatgtgtgatttagtggaacattttatataa

SEQ ID NO: 81432 - protein, 282 aa, Arabidopsis thaliana
  peptide (1)..(282): Ceres Seq. ID no. 12659765
  misc_feature (18)..(173): Pfam Name: HSF-type DNA-binding Pfam Description: HSF-type DNA-binding
  misc_feature (1)..(282): Homolog of NCBI NO: 15239996 NR Description: heat shock transcription factor-like protein;
  misc_feature (1)..(229): Homolog of NCBI NO: 10177954 NR Description: heat shock transcription factor-like protein
  misc_feature (6)..(205): Homolog of NCBI NO: 28971956 NR Description: putative heat shock transcription factor [Oryza
  misc_feature (6)..(273): Homolog of NCBI NO: 37534406 NR Description: putative auxin-induced protein [Oryza sativa
  misc_feature (6)..(208): Homolog of NCBI NO: 15231071 NR Description: putative heat shock transcription factor; protein At3g51910.1 [Arabidopsis thaliana] >gi|11277183|pir||T49070
  misc_feature (6)..(205): Homolog of NCBI NO: 33087081 NR Description: heat stress protein [Oryza sativa (japonica
  misc_feature (6)..(184): Homolog of NCBI NO: 15225255 NR Description: putative heat shock transcription factor; protein At2g26150.1 [Arabidopsis thaliana] >gi|7485001|pir||T02609
  misc_feature (7)..(203): Homolog of NCBI NO: 729774 NR Description: HEAT SHOCK FACTOR PROTEIN HSF30 (HEAT SHOCK FACTOR 30) (HSTF 30) (HEAT STRESS TRANSCRIPTION FACTOR)
  misc_feature (6)..(259): Homolog of NCBI NO: 15229416 NR Description: heat shock transcription factor-like protein; id: At3g63350.1 [Arabidopsis thaliana] >gi|11277182|pir||T48124
  misc_feature (6)..(240): Homolog of NCBI NO: 15228865 NR Description: putative heat shock protein; protein id: supported by cDNA: gi_15028342, supported by cDNA: gi_19310748
MDYNLPIPLEGLKETPPTAFLTKTYNIVEDSSTNNIVSWSRDNNSFIVWEPETFALICLPRCFKHNNFSSFVRQLNTYGFKKIDTERWEFANEHFLKGERHLLKNIKRRKTSSQTQTQSLEGEIHELRRDRMALEVELVRLRRKQESVKTYLHLMEEKLKVTEVKQEMMMNFLLKKIKKPSFLQSLRKRNLQGIKNREQKQEVISSHGVEDNGKFVKAEPEEYGDDIDDQCGGVFDYGDELHIASMEHQGQGEDEIEMDSEGIWKGFVLSEEEMCDLVEHFI

SEQ ID NO: 81433 - protein, 151 aa, Arabidopsis thaliana
  peptide (1)..(151): Ceres Seq. ID no. 12659766
  misc_feature (1)..(151): Homolog of NCBI NO: 15239996 NR Description: heat shock transcription factor-like protein;
  misc_feature (1)..(98): Homolog of NCBI NO: 10177954 NR Description: heat shock transcription factor-like protein
  misc_feature (1)..(74): Homolog of NCBI NO: 28971956 NR Description: putative heat shock transcription factor [Oryza
  misc_feature (1)..(142): Homolog of NCBI NO: 37534406 NR Description: putative auxin-induced protein [Oryza sativa
  misc_feature (1)..(77): Homolog of NCBI NO: 15231071 NR Description: putative heat shock transcription factor; protein At3g51910.1 [Arabidopsis thaliana] >gi|11277183|pir||T49070
  misc_feature (1)..(74): Homolog of NCBI NO: 33087081 NR Description: heat stress protein [Oryza sativa (japonica
  misc_feature (1)..(53): Homolog of NCBI NO: 15225255 NR Description: putative heat shock transcription factor; protein At2g26150.1 [Arabidopsis thaliana] >gi|7485001|pir||T02609
  misc_feature (1)..(72): Homolog of NCBI NO: 729774 NR Description: HEAT SHOCK FACTOR PROTEIN HSF30 (HEAT SHOCK FACTOR 30) (HSTF 30) (HEAT STRESS TRANSCRIPTION FACTOR)
  misc_feature (1)..(128): Homolog of NCBI NO: 15229416 NR Description: heat shock transcription factor-like protein; id: At3g63350.1 [Arabidopsis thaliana] >gi|11277182|pir||T48124
  misc_feature (1)..(109): Homolog of NCBI NO: 15228865 NR Description: putative heat shock protein; protein id: supported by cDNA: gi_15028342, supported by cDNA: gi_19310748
MALEVELVRLRRKQESVKTYLHLMEEKLKVTEVKQEMMMNFLLKKIKKPSFLQSLRKRNLQGIKNREQKQEVISSHGVEDNGKFVKAEPEEYGDDIDDQCGGVFDYGDELHIASMEHQGQGEDEIEMDSEGIWKGFVLSEEEMCDLVEHFI

SEQ ID NO: 81434 - DNA, 1275 bp, Arabidopsis thaliana
  misc_feature (1)..(1275): Ceres Seq. ID no. 12659771
  misc_feature: MA Experiment ID: 20000315 Result: Up-regulated in Transcription
  misc_feature: MA Experiment 20000315 PARAMETER Experiment Name: At_14day_Shoots-Roots_Sub_P Parameter: Age (day) Value: 14
  misc_feature: MA Experiment 20000315 PARAMETER Experiment Name: At_14day_Shoots-Roots_Sub_P Parameter: Organism Value: A. thaliana
  misc_feature: MA Experiment 20000315 PARAMETER Experiment Name: At_14day_Shoots-Roots_Sub_P Parameter: Plant Line Value: WS
  misc_feature: MA Experiment 20000315 PARAMETER Experiment Name: At_14day_Shoots-Roots_Sub_P Parameter: Tissue Value: Shoots vs. Whole Plant
atggagaacatgtttaggctcatgggaagtgaagattcctccgacagaagacggtgcatttgggttaacggtcctgtaatcgtcggagccgggccatcggggctagccacggcagcctgcctccgcgaggaaggtgttccctttgtggtattggagagagcagattgcatagcttcactatggcaaaaacgaacttacgatagaatcaaacttcatttaccaaagaaagtttgtcaattacccaaaatgcccttcccggaagactacccggaatatccaacaaaacgacagttcatcgagtaccttgagtcctacgcaaacaaattcgaaattactcctcagttcaacgagtgtgtccagtctgctcgatacgacgagacaagtggtctctggcgcatcaagacaacatcttcctcttcctcggggtcggagatggaatatatctgccggtggttagtggtggcgacgggagaaaacgcggagaaagttgttccagagatcgatgggctcacaacggagtttgaaggcgaggtgatccactcgtgtgagtacaaatccggcgagaaatacagaggaaagagtgttcttgtcgtcggatgtggaaactccggcatggaagtctctcttgatctcgcaaatcacaatgctaatgcatccatggttgttcgtagctcggttcatgtgttaccaagagagattttaggcaaatctagttttgaaatctccatgatgttgatgaagtggtttcctctgtggctagtagacaagattctactgattcttgcatggctgattttaggaaatttgacaaagtatggcctaaagaggcccacgatgggcccaatggagctcaagattgtttcaggtaagactccagttctagacatcggagctatggagaaaatcaaatccggtgaagtagaaatcgtcccgggaattaaacggttctctcgtagtcacgtggagctagtagacggtcagagattagatctcgatgcggtggttctggccacgggttaccgtagcaacgtcccatcatggctccaagaaaatgatctgttttcgaaaaacgggttcccgaaatcgccgtttccaaacgcgtggaaagggaaatcgggactttacgcggctggattcacaaggaaaggattggctggagcatcagcagacgccgttaacatcgctcaagatattggaaacgtgtggagagaagaaaccaaacgacagaaaatgagaacacgagtgggtcaccgcagatgcatttcagttgcttag

SEQ ID NO: 81435 - protein, 424 aa, Arabidopsis thaliana
  peptide (1)..(424): Ceres Seq. ID no. 12659772
  misc_feature (24)..(375): Pfam Name: Pyridine nucleotide-disulphide oxidoreductase Pfam Description: Pyridine nucleotide-disulphide oxidoreductase
  misc_feature (1)..(424): Homolog of NCBI NO: 15240026 NR Description: dimethylaniline monooxygenase-like; protein id: [Arabidopsis thaliana] >gi|8953750|dbj|BAA98069.1|
  misc_feature (1)..(424): Homolog of NCBI NO: 15219671 NR Description: putative dimethylaniline monooxygenase; protein At1g04180.1 [Arabidopsis thaliana] >gi|7485875|pir||T00955
  misc_feature (1)..(422): Homolog of NCBI NO: 15235409 NR Description: putative protein; protein id: At4g28720.1
  misc_feature (3)..(422): Homolog of NCBI NO: 15219767 NR Description: putative dimethylaniline monooxygenase; protein At1g04610.1 [Arabidopsis thaliana] >gi|25406796|pir||G86178
  misc_feature (3)..(422): Homolog of NCBI NO: 15225816 NR Description: putative flavin-containing monooxygenase; protein
  misc_feature (21)..(423): Homolog of NCBI NO: 38346518 NR Description: OSJNBa0027H09.13 [Oryza sativa (japonica
  misc_feature (18)..(406): Homolog of NCBI NO: 33147034 NR Description: putative dimethylaniline monooxygenase [Oryza
  misc_feature (13)..(411): Homolog of NCBI NO: 22327064 NR Description: putative protein; protein id: At5g25620.1, by cDNA: gi_17528989, supported by cDNA: gi_21280978 [Arabidopsis >gi|17528990|gb|AAL38705.1| unknown protein [Arabidopsis
  misc_feature (11)..(404): Homolog of NCBI NO: 15010541 NR Description: flavin monoxygenase-like protein floozy [Petunia
  misc_feature (15)..(398): Homolog of NCBI NO: 15235652 NR Description: putative protein; protein id: At4g13260.1
MENMFRLMGSEDSSDRRRCIWVNGPVIVGAGPSGLATAACLREEGVPFVVLERADCIASLWQKRTYDRIKLHLPKKVCQLPKMPFPEDYPEYPTKRQFIEYLESYANKFEITPQFNECVQSARYDETSGLWRIKTTSSSSSGSEMEYICRWLVVATGENAEKVVPEIDGLTTEFEGEVIHSCEYKSGEKYRGKSVLVVGCGNSGMEVSLDLANHNANASMVVRSSVHVLPREILGKSSFEISMMLMKWFPLWLVDKILLILAWLILGNLTKYGLKRPTMGPMELKIVSGKTPVLDIGAMEKIKSGEVEIVPGIKRFSRSHVELVDGQRLDLDAVVLATGYRSNVPSWLQENDLFSKNGFPKSPFPNAWKGKSGLYAAGFTRKGLAGASADAVNIAQDIGNVWREETKRQKMRTRVGHRRCISVA

SEQ ID NO: 81436 - protein, 421 aa, Arabidopsis thaliana
  peptide (1)..(421): Ceres Seq. ID no. 12659773
  misc_feature (21)..(372): Pfam Name: Pyridine nucleotide-disulphide oxidoreductase Pfam Description: Pyridine nucleotide-disulphide oxidoreductase
  misc_feature (1)..(421): Homolog of NCBI NO: 15240026 NR Description: dimethylaniline monooxygenase-like; protein id: [Arabidopsis thaliana] >gi|8953750|dbj|BAA98069.1|
  misc_feature (1)..(421): Homolog of NCBI NO: 15219671 NR Description: putative dimethylaniline monooxygenase; protein At1g04180.1 [Arabidopsis thaliana] >gi|7485875|pir||T00955
  misc_feature (1)..(419): Homolog of NCBI NO: 15235409 NR Description: putative protein; protein id: At4g28720.1
  misc_feature (1)..(419): Homolog of NCBI NO: 15219767 NR Description: putative dimethylaniline monooxygenase; protein At1g04610.1 [Arabidopsis thaliana] >gi|25406796|pir||G86178
  misc_feature (1)..(419): Homolog of NCBI NO: 15225816 NR Description: putative flavin-containing monooxygenase; protein
  misc_feature (18)..(420): Homolog of NCBI NO: 38346518 NR Description: OSJNBa0027H09.13 [Oryza sativa (japonica
  misc_feature (15)..(403): Homolog of NCBI NO: 33147034 NR Description: putative dimethylaniline monooxygenase [Oryza
  misc_feature (10)..(408): Homolog of NCBI NO: 22327064 NR Description: putative protein; protein id: At5g25620.1, by cDNA: gi_17528989, supported by cDNA: gi_21280978 [Arabidopsis >gi|17528990|gb|AAL38705.1| unknown protein [Arabidopsis
  misc_feature (8)..(401): Homolog of NCBI NO: 15010541 NR Description: flavin monoxygenase-like protein floozy [Petunia
  misc_feature (12)..(395): Homolog of NCBI NO: 15235652 NR Description: putative protein; protein id: At4g13260.1
MFRLMGSEDSSDRRRCIWVNGPVIVGAGPSGLATAACLREEGVPFVVLERADCIASLWQKRTYDRIKLHLPKKVCQLPKMPFPEDYPEYPTKRQFIEYLESYANKFEITPQFNECVQSARYDETSGLWRIKTTSSSSSGSEMEYICRWLVVATGENAEKVVPEIDGLTTEFEGEVIHSCEYKSGEKYRGKSVLVVGCGNSGMEVSLDLANHNANASMVVRSSVHVLPREILGKSSFEISMMLMKWFPLWLVDKILLILAWLILGNLTKYGLKRPTMGPMELKIVSGKTPVLDIGAMEKIKSGEVEIVPGIKRFSRSHVELVDGQRLDLDAVVLATGYRSNVPSWLQENDLFSKNGFPKSPFPNAWKGKSGLYAAGFTRKGLAGASADAVNIAQDIGNVWREETKRQKMRTRVGHRRCISVA

SEQ ID NO: 81437 - protein, 417 aa, Arabidopsis thaliana
  peptide (1)..(417): Ceres Seq. ID no. 12659774
  misc_feature (17)..(368): Pfam Name: Pyridine nucleotide-disulphide oxidoreductase Pfam Description: Pyridine nucleotide-disulphide oxidoreductase
  misc_feature (1)..(417): Homolog of NCBI NO: 15240026 NR Description: dimethylaniline monooxygenase-like; protein id: [Arabidopsis thaliana] >gi|8953750|dbj|BAA98069.1|
  misc_feature (1)..(417): Homolog of NCBI NO: 15219671 NR Description: putative dimethylaniline monooxygenase; protein At1g04180.1 [Arabidopsis thaliana] >gi|7485875|pir||T00955
  misc_feature (1)..(415): Homolog of NCBI NO: 15235409 NR Description: putative protein; protein id: At4g28720.1
  misc_feature (1)..(415): Homolog of NCBI NO: 15219767 NR Description: putative dimethylaniline monooxygenase; protein At1g04610.1 [Arabidopsis thaliana] >gi|25406796|pir||G86178
  misc_feature (1)..(415): Homolog of NCBI NO: 15225816 NR Description: putative flavin-containing monooxygenase; protein
  misc_feature (14)..(416): Homolog of NCBI NO: 38346518 NR Description: OSJNBa0027H09.13 [Oryza sativa (japonica
  misc_feature (11)..(399): Homolog of NCBI NO: 33147034 NR Description: putative dimethylaniline monooxygenase [Oryza
  misc_feature (6)..(404): Homolog of NCBI NO: 22327064 NR Description: putative protein; protein id: At5g25620.1, by cDNA: gi_17528989, supported by cDNA: gi_21280978 [Arabidopsis >gi|17528990|gb|AAL38705.1| unknown protein [Arabidopsis
  misc_feature (4)..(397): Homolog of NCBI NO: 15010541 NR Description: flavin monoxygenase-like protein floozy [Petunia
  misc_feature (8)..(391): Homolog of NCBI NO: 15235652 NR Description: putative protein; protein id: At4g13260.1
MGSEDSSDRRRCIWVNGPVIVGAGPSGLATAACLREEGVPFVVLERADCIASLWQKRTYDRIKLHLPKKVCQLPKMPFPEDYPEYPTKRQFIEYLESYANKFEITPQFNECVQSARYDETSGLWRIKTTSSSSSGSEMEYICRWLVVATGENAEKVVPEIDGLTTEFEGEVIHSCEYKSGEKYRGKSVLVVGCGNSGMEVSLDLANHNANASMVVRSSVHVLPREILGKSSFEISMMLMKWFPLWLVDKILLILAWLILGNLTKYGLKRPTMGPMELKIVSGKTPVLDIGAMEKIKSGEVEIVPGIKRFSRSHVELVDGQRLDLDAVVLATGYRSNVPSWLQENDLFSKNGFPKSPFPNAWKGKSGLYAAGFTRKGLAGASADAVNIAQDIGNVWREETKRQKMRTRVGHRRCISVA

SEQ ID NO: 81438 - DNA, 1476 bp, Arabidopsis thaliana
  misc_feature (1)..(1476): Ceres Seq. ID no. 12659790
  misc_feature: MA Experiment ID: 20000211 Result: Up-regulated in Transcription
  misc_feature: MA Experiment 20000211 PARAMETER Experiment Name: At_0.001percent_MeJA__P Parameter: Age (day) Value: 14
  misc_feature: MA Experiment 20000211 PARAMETER Experiment Name: At_0.001percent_MeJA__P Parameter: Organism Value: A. thaliana
  misc_feature: MA Experiment 20000211 PARAMETER Experiment Name: At_0.001percent_MeJA__P Parameter: Plant Line Value: WS
  misc_feature: MA Experiment 20000211 PARAMETER Experiment Name: At_0.001percent_MeJA__P Parameter: Timepoint (hr) Value: 1
  misc_feature: MA Experiment 20000211 PARAMETER Experiment Name: At_0.001percent_MeJA__P Parameter: Tissue Value: Aerial
  misc_feature: MA Experiment 20000211 PARAMETER Experiment Name: At_0.001percent_MeJA__P Parameter: Treatment Value: 0.001percent MeJA vs. No Treatment
  misc_feature: MA Experiment ID: 20000213 Result: Up-regulated in Transcription
  misc_feature: MA Experiment 20000213 PARAMETER Experiment Name: At_4deg_Cold_P Parameter: Timepoint (hr) Value: 2
  misc_feature: MA Experiment ID: 20000438 Result: Up-regulated in Transcription
  misc_feature: MA Experiment 20000438 PARAMETER Experiment Name: At_Shoots__P Parameter: Age (day) Value: 14
  misc_feature: MA Experiment 20000438 PARAMETER Experiment Name: At_Shoots__P Parameter: Tissue Value: Shoots vs. Whole Plant
  misc_feature: MA Experiment ID: 20000439 Result: Up-regulated in Transcription
  misc_feature: MA Experiment 20000439 PARAMETER Experiment Name: At_Roots__P Parameter: Age (day) Value: 14 vs. 21
  misc_feature: MA Experiment 20000439 PARAMETER Experiment Name: At_Roots__P Parameter: Organism Value: A. thaliana
  misc_feature: MA Experiment 20000439 PARAMETER Experiment Name: At_Roots__P Parameter: Tissue Value: Roots vs. Whole Plant
  misc_feature: MA Experiment ID: 20000495 Result: Down-regulated in Transcription
  misc_feature: MA Experiment 20000495 PARAMETER Experiment Name: At_Guard_Cells_P Parameter: Harvest Date Value: 8/2/2002
  misc_feature: MA Experiment 20000495 PARAMETER Experiment Name: At_Guard_Cells_P Parameter: Organism Value: A. thaliana
  misc_feature: MA Experiment 20000495 PARAMETER Experiment Name: At_Guard_Cells_P Parameter: Tissue Value: Guard Cells vs. Leaves
  misc_feature: MA Experiment ID: 20000606 Result: Up-regulated in Transcription
  misc_feature: MA Experiment 20000606 PARAMETER Experiment Name: At_CS8548_Mutant_P Parameter: Age (day) Value: 14
  misc_feature: MA Experiment 20000606 PARAMETER Experiment Name: At_CS8548_Mutant_P Parameter: Plant Line Value: CS8548 vs. wt
  misc_feature: MA Experiment 20000606 PARAMETER Experiment Name: At_CS8548_Mutant_P Parameter: Tissue Value: Whole Plant
  misc_feature: MA Experiment ID: 20001247 Result: Up-regulated in Transcription
  misc_feature: MA Experiment 20001247 PARAMETER Experiment Name: At_Far-red-induction_P Parameter: Age (day) Value: 7
  misc_feature: MA Experiment 20001247 PARAMETER Experiment Name: At_Far-red-induction_P Parameter: Light Value: Far-red vs. White
  misc_feature: MA Experiment 20001247 PARAMETER Experiment Name: At_Far-red-induction_P Parameter: Organism Value: A. thaliana
  misc_feature: MA Experiment 20001247 PARAMETER Experiment Name: At_Far-red-induction_P Parameter: Plant Line Value: Columbia
  misc_feature: MA Experiment 20001247 PARAMETER Experiment Name: At_Far-red-induction_P Parameter: Timepoint (hr) Value: 1
  misc_feature: MA Experiment 20001247 PARAMETER Experiment Name: At_Far-red-induction_P Parameter: Tissue Value: Whole Plant
  misc_feature: MA Experiment ID: 20001248 Result: Down-regulated in Transcription
  misc_feature: MA Experiment 20001248 PARAMETER Experiment Name: At_Far-red-induction_P Parameter: Age (day) Value: 7
  misc_feature: MA Experiment 20001248 PARAMETER Experiment Name: At_Far-red-induction_P Parameter: Light Value: Far-red vs. White
  misc_feature: MA Experiment 20001248 PARAMETER Experiment Name: At_Far-red-induction_P Parameter: Organism Value: A. thaliana
  misc_feature: MA Experiment 20001248 PARAMETER Experiment Name: At_Far-red-induction_P Parameter: Plant Line Value: Columbia
  misc_feature: MA Experiment 20001248 PARAMETER Experiment Name: At_Far-red-induction_P Parameter: Timepoint (hr) Value: 4
  misc_feature: MA Experiment 20001248 PARAMETER Experiment Name: At_Far-red-induction_P Parameter: Tissue Value: Whole Plant
  misc_feature: MA Experiment ID: 20001557 Result: Down-regulated in Transcription
  misc_feature: MA Experiment 20001557 PARAMETER Experiment Name: At_Drought_Soil_Dry_P Parameter: Age (day) Value: 27
  misc_feature: MA Experiment 20001557 PARAMETER Experiment Name: At_Drought_Soil_Dry_P Parameter: Organism Value: A. thaliana
  misc_feature: MA Experiment 20001557 PARAMETER Experiment Name: At_Drought_Soil_Dry_P Parameter: Plant Line Value: WS
  misc_feature: MA Experiment 20001557 PARAMETER Experiment Name: At_Drought_Soil_Dry_P Parameter: Post Timepoint (hr) Value: 3
  misc_feature: MA Experiment 20001557 PARAMETER Experiment Name: At_Drought_Soil_Dry_P Parameter: Post-Treatment Value: Re-Water vs. No Drought
  misc_feature: MA Experiment 20001557 PARAMETER Experiment Name: At_Drought_Soil_Dry_P Parameter: Timepoint (day) Value: 13
  misc_feature: MA Experiment 20001557 PARAMETER Experiment Name: At_Drought_Soil_Dry_P Parameter: Treatment Value: Drought vs. No Drought
atgggagagagagacgacgaagcagaaggtattttagagaaggcgaagattcctttgttaaaggatcaaaatgtggcagaggaggaaaacggagaaataaagaaagagatatggctagagacgaagaagctgtggcgtattgtcggaccagctatattcactagagtcacgaccaacttgatctttgtcatcactcaggctttcgctggccacctcggcgagctagaactcgctgccatctccatcgtcaacaacgtcattatcggcttcaactatagcctcttcattggaatggcgactgcgttggaaacgctgtgcggtcaagcgtttggagcaaagaagtatgacatgtttggagtgtatttgcagcgatcttggattgttcttttcttattctccatcttgctcctcccaatgtacatctttgcgactccgattcttaagttcatgggccagcctgacgacatcgcagagctctccggtatcatctctgtttgggccattcctacacatttctcatttgccttctttttccctatcaaccggttcctccaatgccagcttaaaaattcggtgattgcaatttcttctggagtgtcacttgtagttcacatatttgtgtgctggctttttgtgtacgttcttgaacttggagtcatagggaccatcgctactgctaacgtgtcatggtggctcaatgtctttatcttatttacttacaccacttgcggcggttgtccgctcacttggaccggtttctccatggaatctttcacgagactatgggaattcactaagctctctgcctcttccggcataatggtttgcttggagaattggtattataggatgttaattgtgatgactggaaatttagaggatgcaagaattgacgtagactctatgtctatatgcatgtcgataaatggtttggagatgatggttccacttgctttcttcgcggggaccagcgtacgagtggcaaatgaattaggagcaggcaatggaaaaagagcaagattcgcaatgatcatatcagtgacacaatcgttaatcattggaataatcatttcggtgctcatatattttctgcttgaccaaatcggttggatgttctcttcaagtgaaactgtcctaaaagcagtcaataatctctctattcttttatcctttgcgattcttctcaacagtgtccaaccggttctctccggtgttgcggttggttcgggttggcaatcactagtcgcatttataaatttgggatgctactatttcattggacttccacttggaattgtcatgggctggatgttcaagtttggtgtcaaaggcatttgggcgggtatgatcttcggaggaaccatggttcaaacattgatattgatttttattactatgagatgcgattgggagaaagaggcacaaaacgctaaggttcgtgttaacaaatggtctgtatcagacgcaagaaagtga

SEQ ID NO: 81439 - protein, 491 aa, Arabidopsis thaliana
  peptide (1)..(491): Ceres Seq. ID no. 12659791
  misc_feature (1)..(491): Homolog of NCBI NO: 15240080 NR Description: putative protein; protein id: At5g44050.1 thaliana] >gi|9758564|dbj|BAB09065.1|
  misc_feature (6)..(485): Homolog of NCBI NO: 15238439 NR Description: putative protein; protein id: At5g65380.1, by cDNA: gi_14030730 [Arabidopsis thaliana] emb|CAB89401.1~gene_id:MNA5.11~strong similarity to unknown
  misc_feature (11)..(457): Homolog of NCBI NO: 12231296 NR Description: ripening regulated protein DDTFR18 [Lycopersicon
  misc_feature (12)..(411): Homolog of NCBI NO: 15238161 NR Description: putative protein; protein id: At5g10420.1
  misc_feature (19)..(490): Homolog of NCBI NO: 15223402 NR Description: unknown protein; protein id: At1g33110.1, by cDNA: gi_17065359 [Arabidopsis thaliana] Unknown protein [Arabidopsis thaliana]
  misc_feature (1)..(484): Homolog of NCBI NO: 22329916 NR Description: hypothetical protein; protein id: At1g33080.1, by cDNA: gi_19423993 [Arabidopsis thaliana] unknown protein [Arabidopsis thaliana]
  misc_feature (28)..(490): Homolog of NCBI NO: 15223391 NR Description: hypothetical protein; protein id: At1g33090.1
  misc_feature (119)..(485): Homolog of NCBI NO: 34902422 NR Description: Putative ripening regulated protein [Oryza sativa
  misc_feature (17)..(484): Homolog of NCBI NO: 15220246 NR Description: unknown protein; protein id: At1g47530.1, by cDNA: gi_16604504 [Arabidopsis thaliana]
  misc_feature (17)..(484): Homolog of NCBI NO: 16604505 NR Description: At1g47530/F16N3_20 [Arabidopsis thaliana]
MGERDDEAEGILEKAKIPLLKDQNVAEEENGEIKKEIWLETKKLWRIVGPAIFTRVTTNLIFVITQAFAGHLGELELAAISIVNNVIIGFNYSLFIGMATALETLCGQAFGAKKYDMFGVYLQRSWIVLFLFSILLLPMYIFATPILKFMGQPDDIAELSGIISVWAIPTHFSFAFFFPINRFLQCQLKNSVIAISSGVSLVVHIFVCWLFVYVLELGVIGTIATANVSWWLNVFILFTYTTCGGCPLTWTGFSMESFTRLWEFTKLSASSGIMVCLENWYYRMLIVMTGNLEDARIDVDSMSICMSINGLEMMVPLAFFAGTSVRVANELGAGNGKRARFAMIISVTQSLIIGIIISVLIYFLLDQIGWMFSSSETVLKAVNNLSILLSFAILLNSVQPVLSGVAVGSGWQSLVAFINLGCYYFIGLPLGIVMGWMFKFGVKGIWAGMIFGGTMVQTLILIFITMRCDWEKEAQNAKVRVNKWSVSDARK

SEQ ID NO: 81440 - protein, 394 aa, Arabidopsis thaliana
  peptide (1)..(394): Ceres Seq. ID no. 12659792
  misc_feature (1)..(394): Homolog of NCBI NO: 15240080 NR Description: putative protein; protein id: At5g44050.1 thaliana] >gi|9758564|dbj|BAB09065.1|
  misc_feature (1)..(388): Homolog of NCBI NO: 15238439 NR Description: putative protein; protein id: At5g65380.1, by cDNA: gi_14030730 [Arabidopsis thaliana] emb|CAB89401.1~gene_id:MNA5.11~strong similarity to unknown
  misc_feature (1)..(360): Homolog of NCBI NO: 12231296 NR Description: ripening regulated protein DDTFR18 [Lycopersicon
  misc_feature (1)..(314): Homolog of NCBI NO: 15238161 NR Description: putative protein; protein id: At5g10420.1
  misc_feature (1)..(393): Homolog of NCBI NO: 15223402 NR Description: unknown protein; protein id: At1g33110.1, by cDNA: gi_17065359 [Arabidopsis thaliana] Unknown protein [Arabidopsis thaliana]
  misc_feature (1)..(387): Homolog of NCBI NO: 22329916 NR Description: hypothetical protein; protein id: At1g33080.1, by cDNA: gi_19423993 [Arabidopsis thaliana] unknown protein [Arabidopsis thaliana]
  misc_feature (1)..(393): Homolog of NCBI NO: 15223391 NR Description: hypothetical protein; protein id: At1g33090.1
  misc_feature (22)..(388): Homolog of NCBI NO: 34902422 NR Description: Putative ripening regulated protein [Oryza sativa
  misc_feature (1)..(387): Homolog of NCBI NO: 15220246 NR Description: unknown protein; protein id: At1g47530.1, by cDNA: gi_16604504 [Arabidopsis thaliana]
  misc_feature (1)..(387): Homolog of NCBI NO: 16604505 NR Description: At1g47530/F16N3_20 [Arabidopsis thaliana]
MATALETLCGQAFGAKKYDMFGVYLQRSWIVLFLFSILLLPMYIFATPILKFMGQPDDIAELSGIISVWAIPTHFSFAFFFPINRFLQCQLKNSVIAISSGVSLVVHIFVCWLFVYVLELGVIGTIATANVSWWLNVFILFTYTTCGGCPLTWTGFSMESFTRLWEFTKLSASSGIMVCLENWYYRMLIVMTGNLEDARIDVDSMSICMSINGLEMMVPLAFFAGTSVRVANELGAGNGKRARFAMIISVTQSLIIGIIISVLIYFLLDQIGWMFSSSETVLKAVNNLSILLSFAILLNSVQPVLSGVAVGSGWQSLVAFINLGCYYFIGLPLGIVMGWMFKFGVKGIWAGMIFGGTMVQTLILIFITMRCDWEKEAQNAKVRVNKWSVSDARK

SEQ ID NO: 81441 - protein, 375 aa, Arabidopsis thaliana
  peptide (1)..(375): Ceres Seq. ID no. 12659793
  misc_feature (1)..(375): Homolog of NCBI NO: 15240080 NR Description: putative protein; protein id: At5g44050.1 thaliana] >gi|9758564|dbj|BAB09065.1|
  misc_feature (1)..(369): Homolog of NCBI NO: 15238439 NR Description: putative protein; protein id: At5g65380.1, by cDNA: gi_14030730 [Arabidopsis thaliana] emb|CAB89401.1~gene_id:MNA5.11~strong similarity to unknown
  misc_feature (1)..(341): Homolog of NCBI NO: 12231296 NR Description: ripening regulated protein DDTFR18 [Lycopersicon
  misc_feature (1)..(295): Homolog of NCBI NO: 15238161 NR Description: putative protein; protein id: At5g10420.1
  misc_feature (1)..(374): Homolog of NCBI NO: 15223402 NR Description: unknown protein; protein id: At1g33110.1, by cDNA: gi_17065359 [Arabidopsis thaliana] Unknown protein [Arabidopsis thaliana]
  misc_feature (1)..(368): Homolog of NCBI NO: 22329916 NR Description: hypothetical protein; protein id: At1g33080.1, by cDNA: gi_19423993 [Arabidopsis thaliana] unknown protein [Arabidopsis thaliana]
  misc_feature (1)..(374): Homolog of NCBI NO: 15223391 NR Description: hypothetical protein; protein id: At1g33090.1
  misc_feature (3)..(369): Homolog of NCBI NO: 34902422 NR Description: Putative ripening regulated protein [Oryza sativa
  misc_feature (1)..(368): Homolog of NCBI NO: 15220246 NR Description: unknown protein; protein id: At1g47530.1, by cDNA: gi_16604504 [Arabidopsis thaliana]
  misc_feature (1)..(368): Homolog of NCBI NO: 16604505 NR Description: At1g47530/F16N3_20 [Arabidopsis thaliana]
MFGVYLQRSWIVLFLFSILLLPMYIFATPILKFMGQPDDIAELSGIISVWAIPTHFSFAFFFPINRFLQCQLKNSVIAISSGVSLVVHIFVCWLFVYVLELGVIGTIATANVSWWLNVFILFTYTTCGGCPLTWTGFSMESFTRLWEFTKLSASSGIMVCLENWYYRMLIVMTGNLEDARIDVDSMSICMSINGLEMMVPLAFFAGTSVRVANELGAGNGKRARFAMIISVTQSLIIGIIISVLIYFLLDQIGWMFSSSETVLKAVNNLSILLSFAILLNSVQPVLSGVAVGSGWQSLVAFINLGCYYFIGLPLGIVMGWMFKFGVKGIWAGMIFGGTMVQTLILIFITMRCDWEKEAQNAKVRVNKWSVSDARK

SEQ ID NO: 81442 - DNA, 837 bp, Arabidopsis thaliana
  misc_feature (1)..(837): Ceres Seq. ID no. 12659798
  misc_feature: MA Experiment ID: 20000307 Result: Down-regulated in Transcription
  misc_feature: MA Experiment 20000307 PARAMETER Experiment Name: At_Germinating_Seeds_Sub_P Parameter: Age (hr) Value: 24 vs. 0
  misc_feature: MA Experiment 20000307 PARAMETER Experiment Name: At_Germinating_Seeds_Sub_P Parameter: Organism Value: A. thaliana
  misc_feature: MA Experiment 20000307 PARAMETER Experiment Name: At_Germinating_Seeds_Sub_P Parameter: Plant Line Value: WS
  misc_feature: MA Experiment 20000307 PARAMETER Experiment Name: At_Germinating_Seeds_Sub_P Parameter: Tissue Value: Germinating Seeds
atgaatgtgaaaaaagttccaaacgttcctggatcacctgcactctctgccttgcttaagctcggtgttattggtggacttggactctattgcattggtagtagcatgtacaatgtcgatggaggacaccgtgccatcgtgtttaaccggtttaccggtatcaaagatagggtttatccagagggtactcattttaagataccattgtttgaaagagcaattatctatgatgttcgttctcgaccttacgttgagaatagccaaactggaagtaatgatcttcaaacggtgactattgggcttagggtacttacacgtcctatgggagaccgcttacccgagatttacagaacactcggtcagaattatggagagcgagttcttccttccattatcaatgaaacactgaaagcagtagtggctcagtacaatgcaagccacctcattacacagagagaagctgtgagtagggagatacgcaagattgtgacagagcgagcagctaaatttaacattgctttagatgatgtatctatcacaaacctcaaatttggcaaagagtttactgaagcaatcgagaagaaacaagttgcggctcaggaagcagaacgggctaagttcattgtcgaaaaggccgagcaagacaagaaaagtgctattatccgcgctcagggagaagctaagagtgctcaactcatagggcaagctattgcgaacaatgaagctttcattactctgaggaagattgaagctgcaagagagattgctcagaccatagctaaatcggcgaacaaggtttacctaaactccagtgatctcttaatctccaagcaatga

SEQ ID NO: 81443 - protein, 278 aa, Arabidopsis thaliana
  peptide (1)..(278): Ceres Seq. ID no. 12659799
  misc_feature (1)..(278): Homolog of NCBI NO: 15241424 NR Description: prohibitin; protein id: At5g44140.1 [Arabidopsis
  misc_feature (1)..(278): Homolog of NCBI NO: 15219569 NR Description: putative prohibitin 2; protein id: At1g03860.1, by cDNA: 6208., supported by cDNA: gi_13878108, supported by
  misc_feature (1)..(278): Homolog of NCBI NO: 15235317 NR Description: prohibitin-like protein; protein id: At4g28510.1, by cDNA: 40688., supported by cDNA: gi_20260657, supported by
  misc_feature (1)..(278): Homolog of NCBI NO: 21593626 NR Description: prohibitin-like protein [Arabidopsis thaliana]
  misc_feature (1)..(278): Homolog of NCBI NO: 12751303 NR Description: prohibitin 1-like protein [Brassica napus]
  misc_feature (1)..(278): Homolog of NCBI NO: 15225374 NR Description: putative prohibitin; protein id: At2g20530.1, by cDNA: 6176., supported by cDNA: gi_18252886 [Arabidopsis
  misc_feature (1)..(278): Homolog of NCBI NO: 7716456 NR Description: prohibitin [Zea mays]
  misc_feature (1)..(278): Homolog of NCBI NO: 34394832 NR Description: putative prohibitin [Oryza sativa (japonica
  misc_feature (5)..(278): Homolog of NCBI NO: 7716462 NR Description: prohibitin [Zea mays]
  misc_feature (57)..(278): Homolog of NCBI NO: 34901014 NR Description: putative prohibitin [Oryza sativa (japonica
MNVKKVPNVPGSPALSALLKLGVIGGLGLYCIGSSMYNVDGGHRAIVFNRFTGIKDRVYPEGTHFKIPLFERAIIYDVRSRPYVENSQTGSNDLQTVTIGLRVLTRPMGDRLPEIYRTLGQNYGERVLPSIINETLKAVVAQYNASHLITQREAVSREIRKIVTERAAKFNIALDDVSITNLKFGKEFTEAIEKKQVAAQEAERAKFIVEKAEQDKKSAIIRAQGEAKSAQLIGQAIANNEAFITLRKIEAAREIAQTIAKSANKVYLNSSDLLISKQ

SEQ ID NO: 81444 - protein, 243 aa, Arabidopsis thaliana
  peptide (1)..(243): Ceres Seq. ID no. 12659800
  misc_feature (1)..(243): Homolog of NCBI NO: 15241424 NR Description: prohibitin; protein id: At5g44140.1 [Arabidopsis
  misc_feature (1)..(243): Homolog of NCBI NO: 15219569 NR Description: putative prohibitin 2; protein id: At1g03860.1, by cDNA: 6208., supported by cDNA: gi_13878108, supported by
  misc_feature (1)..(243): Homolog of NCBI NO: 15235317 NR Description: prohibitin-like protein; protein id: At4g28510.1, by cDNA: 40688., supported by cDNA: gi_20260657, supported by
  misc_feature (1)..(243): Homolog of NCBI NO: 21593626 NR Description: prohibitin-like protein [Arabidopsis thaliana]
  misc_feature (1)..(243): Homolog of NCBI NO: 12751303 NR Description: prohibitin 1-like protein [Brassica napus]
  misc_feature (1)..(243): Homolog of NCBI NO: 15225374 NR Description: putative prohibitin; protein id: At2g20530.1, by cDNA: 6176., supported by cDNA: gi_18252886 [Arabidopsis
  misc_feature (1)..(243): Homolog of NCBI NO: 7716456 NR Description: prohibitin [Zea mays]
  misc_feature (1)..(243): Homolog of NCBI NO: 34394832 NR Description: putative prohibitin [Oryza sativa (japonica
  misc_feature (1)..(243): Homolog of NCBI NO: 7716462 NR Description: prohibitin [Zea mays]
  misc_feature (22)..(243): Homolog of NCBI NO: 34901014 NR Description: putative prohibitin [Oryza sativa (japonica
MYNVDGGHRAIVFNRFTGIKDRVYPEGTHFKIPLFERAIIYDVRSRPYVENSQTGSNDLQTVTIGLRVLTRPMGDRLPEIYRTLGQNYGERVLPSIINETLKAVVAQYNASHLITQREAVSREIRKIVTERAAKFNIALDDVSITNLKFGKEFTEAIEKKQVAAQEAERAKFIVEKAEQDKKSAIIRAQGEAKSAQLIGQAIANNEAFITLRKIEAAREIAQTIAKSANKVYLNSSDLLISKQ

SEQ ID NO: 81445 - protein, 171 aa, Arabidopsis thaliana
  peptide (1)..(171): Ceres Seq. ID no. 12659801
  misc_feature (1)..(171): Homolog of NCBI NO: 15241424 NR Description: prohibitin; protein id: At5g44140.1 [Arabidopsis
  misc_feature (1)..(171): Homolog of NCBI NO: 15219569 NR Description: putative prohibitin 2; protein id: At1g03860.1, by cDNA: 6208., supported by cDNA: gi_13878108, supported by
  misc_feature (1)..(171): Homolog of NCBI NO: 15235317 NR Description: prohibitin-like protein; protein id: At4g28510.1, by cDNA: 40688., supported by cDNA: gi_20260657, supported by
  misc_feature (1)..(171): Homolog of NCBI NO: 21593626 NR Description: prohibitin-like protein [Arabidopsis thaliana]
  misc_feature (1)..(171): Homolog of NCBI NO: 12751303 NR Description: prohibitin 1-like protein [Brassica napus]
  misc_feature (1)..(171): Homolog of NCBI NO: 15225374 NR Description: putative prohibitin; protein id: At2g20530.1, by cDNA: 6176., supported by cDNA: gi_18252886 [Arabidopsis
  misc_feature (1)..(171): Homolog of NCBI NO: 7716456 NR Description: prohibitin [Zea mays]
  misc_feature (1)..(171): Homolog of NCBI NO: 34394832 NR Description: putative prohibitin [Oryza sativa (japonica
  misc_feature (1)..(171): Homolog of NCBI NO: 7716462 NR Description: prohibitin [Zea mays]
  misc_feature (1)..(171): Homolog of NCBI NO: 34901014 NR Description: putative prohibitin [Oryza sativa (japonica
MGDRLPEIYRTLGQNYGERVLPSIINETLKAVVAQYNASHLITQREAVSREIRKIVTERAAKFNIALDDVSITNLKFGKEFTEAIEKKQVAAQEAERAKFIVEKAEQDKKSAIIRAQGEAKSAQLIGQAIANNEAFITLRKIEAAREIAQTIAKSANKVYLNSSDLLISKQ

SEQ ID NO: 81446 - DNA, 902 bp, Arabidopsis thaliana
  misc_feature (1)..(902): Ceres Seq. ID no. 12659810
  misc_feature: MA Experiment ID: 20000327 Result: Down-regulated in Transcription
  misc_feature: MA Experiment 20000327 PARAMETER Experiment Name: At_42deg_Heat_Sub_P Parameter: Age (day) Value: 14
  misc_feature: MA Experiment 20000327 PARAMETER Experiment Name: At_42deg_Heat_Sub_P Parameter: Organism Value: A. thaliana
  misc_feature: MA Experiment 20000327 PARAMETER Experiment Name: At_42deg_Heat_Sub_P Parameter: Plant Line Value: WS
  misc_feature: MA Experiment 20000327 PARAMETER Experiment Name: At_42deg_Heat_Sub_P Parameter: Temperature (deg C) Value: 42 vs. 22
  misc_feature: MA Experiment 20000327 PARAMETER Experiment Name: At_42deg_Heat_Sub_P Parameter: Timepoint (hr) Value: 1
  misc_feature: MA Experiment 20000327 PARAMETER Experiment Name: At_42deg_Heat_Sub_P Parameter: Tissue Value: Aerial
  misc_feature: MA Experiment ID: 20000328 Result: Down-regulated in Transcription
  misc_feature: MA Experiment 20000328 PARAMETER Experiment Name: At_42deg_Heat_Sub_P Parameter: Age (day) Value: 14
  misc_feature: MA Experiment 20000328 PARAMETER Experiment Name: At_42deg_Heat_Sub_P Parameter: Organism Value: A. thaliana
  misc_feature: MA Experiment 20000328 PARAMETER Experiment Name: At_42deg_Heat_Sub_P Parameter: Plant Line Value: WS
  misc_feature: MA Experiment 20000328 PARAMETER Experiment Name: At_42deg_Heat_Sub_P Parameter: Temperature (deg C) Value: 42 vs. 22
  misc_feature: MA Experiment 20000328 PARAMETER Experiment Name: At_42deg_Heat_Sub_P Parameter: Timepoint (hr) Value: 6
  misc_feature: MA Experiment 20000328 PARAMETER Experiment Name: At_42deg_Heat_Sub_P Parameter: Tissue Value: Aerial
gaagaagaagagaaatgaaattcacagattctccggtgatcgatctgacggtgaacggcacaaaactctcaatccaacaagacaatggctctatgcacgtcggaacttccgtctggccttgctcactaatcctatccaaattcgctgaacgctggtcaacactagactcatcatcatcaacaacatctccaaatccatacgccgaactcttcgatttccgtcgccgtcgaggaatcgagctaggaacaggatgcggagtcgccggtatggctttttacttactaggtctaacggagatcgtactcacagacatagcaccagtcatgcctgcgctaaaacacaatctgaaacggaacaaaacggcgttaggtaaatctctaaaaacctcgattgtttattggaacaatcgagatcagatctcggcgttgaaaccgccgtttgatttggttattgcggcggatgttgtgtatattgaggaatctgtagggcaattagtgacggcgatggagttgcttgtggcggatgatggtgcggtgttgttaggttatcagattaggtcaccggaagctgataagttgttttgggagttatgcgacatcgtttttaagattgagaaagttcctcatgagcatctgcattctgattatgcttatgaagaaactgatgtttatatctttaggaagaaggtgaagaagaatgaagctgaatcagtgtcatgaagctagttttggttctgtaatgttgttgttacattgatatgtaatttgtttcttgttatagaattcgaattatctcaactatttatattttcttagatattggctactaaaagatgacaaaggctgaaatcaaatttttgtaacgatttttttaagaagtatacaagttttgttgtgtgtttt

SEQ ID NO: 81447 - protein, 238 aa, Arabidopsis thaliana
  peptide (1)..(238): Ceres Seq. ID no. 12659811
  misc_feature (5)..(238): Homolog of NCBI NO: 15241427 NR Description: putative protein; protein id: At5g44170.1, by cDNA: gi_18252936 [Arabidopsis thaliana] gene_id:MLN1.9~pir||T38261~similar to unknown protein
  misc_feature (93)..(238): Homolog of NCBI NO: 28973317 NR Description: unknown protein [Arabidopsis thaliana]
  misc_feature (66)..(237): Homolog of NCBI NO: 21752748 NR Description: unnamed protein product [Homo sapiens]
  misc_feature (66)..(237): Homolog of NCBI NO: 29126226 NR Description: similar to hepatocellular carcinoma-associated
  misc_feature (19)..(238): Homolog of NCBI NO: 15219438 NR Description: tumor-related protein, putative; protein id:
  misc_feature (66)..(237): Homolog of NCBI NO: 13385458 NR Description: RIKEN cDNA 2310038H17 [Mus musculus] unnamed protein product [Mus musculus] unnamed protein product [Mus musculus]
  misc_feature (78)..(233): Homolog of NCBI NO: 33146776 NR Description: unknown protein [Oryza sativa (japonica
  misc_feature (80)..(237): Homolog of NCBI NO: 14388497 NR Description: hypothetical protein [Macaca fascicularis]
  misc_feature (75)..(158): Homolog of NCBI NO: 25407025 NR Description: protein T6D22.22 [imported] - Arabidopsis >gi|8778835|gb|AAF79834.1|AC026875_14 T6D22.22 [Arabidopsis
  misc_feature (66)..(237): Homolog of NCBI NO: 20071260 NR Description: RIKEN cDNA 2310038H17 gene [Mus musculus]
RRREMKFTDSPVIDLTVNGTKLSIQQDNGSMHVGTSVWPCSLILSKFAERWSTLDSSSSTTSPNPYAELFDFRRRRGIELGTGCGVAGMAFYLLGLTEIVLTDIAPVMPALKHNLKRNKTALGKSLKTSIVYWNNRDQISALKPPFDLVIAADVVYIEESVGQLVTAMELLVADDGAVLLGYQIRSPEADKLFWELCDIVFKIEKVPHEHLHSDYAYEETDVYIFRKKVKKNEAESVS

SEQ ID NO: 81448 - protein, 234 aa, Arabidopsis thaliana
  peptide (1)..(234): Ceres Seq. ID no. 12659812
  misc_feature (1)..(234): Homolog of NCBI NO: 15241427 NR Description: putative protein; protein id: At5g44170.1, by cDNA: gi_18252936 [Arabidopsis thaliana] gene_id:MLN1.9~pir||T38261~similar to unknown protein
  misc_feature (89)..(234): Homolog of NCBI NO: 28973317 NR Description: unknown protein [Arabidopsis thaliana]
  misc_feature (62)..(233): Homolog of NCBI NO: 21752748 NR Description: unnamed protein product [Homo sapiens]
  misc_feature (62)..(233): Homolog of NCBI NO: 29126226 NR Description: similar to hepatocellular carcinoma-associated
  misc_feature (15)..(234): Homolog of NCBI NO: 15219438 NR Description: tumor-related protein, putative; protein id:
  misc_feature (62)..(233): Homolog of NCBI NO: 13385458 NR Description: RIKEN cDNA 2310038H17 [Mus musculus] unnamed protein product [Mus musculus] unnamed protein product [Mus musculus]
  misc_feature (74)..(229): Homolog of NCBI NO: 33146776 NR Description: unknown protein [Oryza sativa (japonica
  misc_feature (76)..(233): Homolog of NCBI NO: 14388497 NR Description: hypothetical protein [Macaca fascicularis]
  misc_feature (71)..(154): Homolog of NCBI NO: 25407025 NR Description: protein T6D22.22 [imported] - Arabidopsis >gi|8778835|gb|AAF79834.1|AC026875_14 T6D22.22 [Arabidopsis
  misc_feature (62)..(233): Homolog of NCBI NO: 20071260 NR Description: RIKEN cDNA 2310038H17 gene [Mus musculus]
MKFTDSPVIDLTVNGTKLSIQQDNGSMHVGTSVWPCSLILSKFAERWSTLDSSSSTTSPNPYAELFDFRRRRGIELGTGCGVAGMAFYLLGLTEIVLTDIAPVMPALKHNLKRNKTALGKSLKTSIVYWNNRDQISALKPPFDLVIAADVVYIEESVGQLVTAMELLVADDGAVLLGYQIRSPEADKLFWELCDIVFKIEKVPHEHLHSDYAYEETDVYIFRKKVKKNEAESVS

SEQ ID NO: 81449 - protein, 208 aa, Arabidopsis thaliana
  peptide (1)..(208): Ceres Seq. ID no. 12659813
  misc_feature (1)..(208): Homolog of NCBI NO: 15241427 NR Description: putative protein; protein id: At5g44170.1, by cDNA: gi_18252936 [Arabidopsis thaliana] gene_id:MLN1.9~pir||T38261~similar to unknown protein
  misc_feature (63)..(208): Homolog of NCBI NO: 28973317 NR Description: unknown protein [Arabidopsis thaliana]
  misc_feature (36)..(207): Homolog of NCBI NO: 21752748 NR Description: unnamed protein product [Homo sapiens]
  misc_feature (36)..(207): Homolog of NCBI NO: 29126226 NR Description: similar to hepatocellular carcinoma-associated
  misc_feature (1)..(208): Homolog of NCBI NO: 15219438 NR Description: tumor-related protein, putative; protein id:
  misc_feature (36)..(207): Homolog of NCBI NO: 13385458 NR Description: RIKEN cDNA 2310038H17 [Mus musculus] unnamed protein product [Mus musculus] unnamed protein product [Mus musculus]
  misc_feature (48)..(203): Homolog of NCBI NO: 33146776 NR Description: unknown protein [Oryza sativa (japonica
  misc_feature (50)..(207): Homolog of NCBI NO: 14388497 NR Description: hypothetical protein [Macaca fascicularis]
  misc_feature (45)..(128): Homolog of NCBI NO: 25407025 NR Description: protein T6D22.22 [imported] - Arabidopsis >gi|8778835|gb|AAF79834.1|AC026875_14 T6D22.22 [Arabidopsis
  misc_feature (36)..(207): Homolog of NCBI NO: 20071260 NR Description: RIKEN cDNA 2310038H17 gene [Mus musculus]
MHVGTSVWPCSLILSKFAERWSTLDSSSSTTSPNPYAELFDFRRRRGIELGTGCGVAGMAFYLLGLTEIVLTDIAPVMPALKHNLKRNKTALGKSLKTSIVYWNNRDQISALKPPFDLVIAADVVYIEESVGQLVTAMELLVADDGAVLLGYQIRSPEADKLFWELCDIVFKIEKVPHEHLHSDYAYEETDVYIFRKKVKKNEAESVS

SEQ ID NO: 81450 - DNA, 603 bp, Arabidopsis thaliana
  misc_feature (1)..(603): Ceres Seq. ID no. 12659818
  misc_feature: MA Experiment ID: 20000171 Result: Down-regulated in Transcription
  misc_feature: MA Experiment 20000171 PARAMETER Experiment Name: At_42deg_Heat_P Parameter: Age (day) Value: 14
  misc_feature: MA Experiment 20000171 PARAMETER Experiment Name: At_42deg_Heat_P Parameter: Organism Value: A. thaliana
  misc_feature: MA Experiment 20000171 PARAMETER Experiment Name: At_42deg_Heat_P Parameter: Plant Line Value: WS
  misc_feature: MA Experiment 20000171 PARAMETER Experiment Name: At_42deg_Heat_P Parameter: Temperature (deg C) Value: 42 vs. 22
  misc_feature: MA Experiment 20000171 PARAMETER Experiment Name: At_42deg_Heat_P Parameter: Timepoint (hr) Value: 1
  misc_feature: MA Experiment 20000171 PARAMETER Experiment Name: At_42deg_Heat_P Parameter: Tissue Value: Aerial
  misc_feature: MA Experiment ID: 20000173 Result: Down-regulated in Transcription
  misc_feature: MA Experiment 20000173 PARAMETER Experiment Name: At_42deg_Heat_P Parameter: Age (day) Value: 14
  misc_feature: MA Experiment 20000173 PARAMETER Experiment Name: At_42deg_Heat_P Parameter: Organism Value: A. thaliana
  misc_feature: MA Experiment 20000173 PARAMETER Experiment Name: At_42deg_Heat_P Parameter: Plant Line Value: WS
  misc_feature: MA Experiment 20000173 PARAMETER Experiment Name: At_42deg_Heat_P Parameter: Temperature (deg C) Value: 42 vs. 22
  misc_feature: MA Experiment 20000173 PARAMETER Experiment Name: At_42deg_Heat_P Parameter: Timepoint (hr) Value: 6
  misc_feature: MA Experiment 20000173 PARAMETER Experiment Name: At_42deg_Heat_P Parameter: Tissue Value: Aerial
  misc_feature: MA Experiment ID: 20000182 Result: Up-regulated in Transcription
  misc_feature: MA Experiment 20000182 PARAMETER Experiment Name: At_2mM_SA_P Parameter: Age (day) Value: 14
  misc_feature: MA Experiment 20000182 PARAMETER Experiment Name: At_2mM_SA_P Parameter: Organism Value: A. thaliana
  misc_feature: MA Experiment 20000182 PARAMETER Experiment Name: At_2mM_SA_P Parameter: Plant Line Value: WS
  misc_feature: MA Experiment 20000182 PARAMETER Experiment Name: At_2mM_SA_P Parameter: Timepoint (hr) Value: 6
  misc_feature: MA Experiment 20000182 PARAMETER Experiment Name: At_2mM_SA_P Parameter: Tissue Value: Aerial
  misc_feature: MA Experiment 20000182 PARAMETER Experiment Name: At_2mM_SA_P Parameter: Treatment Value: 2mM SA vs. No Treatment
  misc_feature: MA Experiment ID: 20000184 Result: Down-regulated in Transcription
  misc_feature: MA Experiment 20000184 PARAMETER Experiment Name: At_Shoots__P Parameter: Age (day) Value: 7
  misc_feature: MA Experiment 20000184 PARAMETER Experiment Name: At_Shoots__P Parameter: Tissue Value: Shoots vs. Whole Plant
  misc_feature: MA Experiment ID: 20000439 Result: Down-regulated in Transcription
  misc_feature: MA Experiment 20000439 PARAMETER Experiment Name: At_Roots__P Parameter: Age (day) Value: 14 vs. 21
  misc_feature: MA Experiment 20000439 PARAMETER Experiment Name: At_Roots__P Parameter: Organism Value: A. thaliana
  misc_feature: MA Experiment 20000439 PARAMETER Experiment Name: At_Roots__P Parameter: Tissue Value: Roots vs. Whole Plant
  misc_feature: MA Experiment ID: 20000794 Result: Down-regulated in Transcription
  misc_feature: MA Experiment 20000794 PARAMETER Experiment Name: At_Petals_P Parameter: Age (day) Value: 23-25 days
  misc_feature: MA Experiment 20000794 PARAMETER Experiment Name: At_Petals_P Parameter: Plant Line Value: WS
  misc_feature: MA Experiment 20000794 PARAMETER Experiment Name: At_Petals_P Parameter: Tissue Value: Petals vs. Whole plant
  misc_feature: MA Experiment ID: 20001248 Result: Up-regulated in Transcription
  misc_feature: MA Experiment 20001248 PARAMETER Experiment Name: At_Far-red-induction_P Parameter: Age (day) Value: 7
  misc_feature: MA Experiment 20001248 PARAMETER Experiment Name: At_Far-red-induction_P Parameter: Light Value: Far-red vs. White
  misc_feature: MA Experiment 20001248 PARAMETER Experiment Name: At_Far-red-induction_P Parameter: Organism Value: A. thaliana
  misc_feature: MA Experiment 20001248 PARAMETER Experiment Name: At_Far-red-induction_P Parameter: Plant Line Value: Columbia
  misc_feature: MA Experiment 20001248 PARAMETER Experiment Name: At_Far-red-induction_P Parameter: Timepoint (hr) Value: 4
  misc_feature: MA Experiment 20001248 PARAMETER Experiment Name: At_Far-red-induction_P Parameter: Tissue Value: Whole Plant
  misc_feature: MA Experiment ID: 20001450 Result: Up-regulated in Transcription
  misc_feature: MA Experiment 20001450 PARAMETER Experiment Name: At_Far-red-induction_P Parameter: Age (day) Value: 7
  misc_feature: MA Experiment 20001450 PARAMETER Experiment Name: At_Far-red-induction_P Parameter: Light Value: Far-red vs. White
  misc_feature: MA Experiment 20001450 PARAMETER Experiment Name: At_Far-red-induction_P Parameter: Organism Value: A. thaliana
  misc_feature: MA Experiment 20001450 PARAMETER Experiment Name: At_Far-red-induction_P Parameter: Plant Line Value: Columbia
  misc_feature: MA Experiment 20001450 PARAMETER Experiment Name: At_Far-red-induction_P Parameter: Timepoint (hr) Value: 8
  misc_feature: MA Experiment 20001450 PARAMETER Experiment Name: At_Far-red-induction_P Parameter: Tissue Value: Whole Plant
  misc_feature: MA Experiment ID: 20001451 Result: Up-regulated in Transcription
  misc_feature: MA Experiment 20001451 PARAMETER Experiment Name: At_Far-red-induction_P Parameter: Age (day) Value: 7
  misc_feature: MA Experiment 20001451 PARAMETER Experiment Name: At_Far-red-induction_P Parameter: Light Value: Far-red vs. White
  misc_feature: MA Experiment 20001451 PARAMETER Experiment Name: At_Far-red-induction_P Parameter: Organism Value: A. thaliana
  misc_feature: MA Experiment 20001451 PARAMETER Experiment Name: At_Far-red-induction_P Parameter: Plant Line Value: Columbia
  misc_feature: MA Experiment 20001451 PARAMETER Experiment Name: At_Far-red-induction_P Parameter: Timepoint (hr) Value: 24
  misc_feature: MA Experiment 20001451 PARAMETER Experiment Name: At_Far-red-induction_P Parameter: Tissue Value: Whole Plant
  misc_feature: MA Experiment ID: 20001556 Result: Down-regulated in Transcription
  misc_feature: MA Experiment 20001556 PARAMETER Experiment Name: At_Drought_Soil_Dry_P Parameter: Age (day) Value: 26
  misc_feature: MA Experiment 20001556 PARAMETER Experiment Name: At_Drought_Soil_Dry_P Parameter: Organism Value: A. thaliana
  misc_feature: MA Experiment 20001556 PARAMETER Experiment Name: At_Drought_Soil_Dry_P Parameter: Plant Line Value: WS
  misc_feature: MA Experiment 20001556 PARAMETER Experiment Name: At_Drought_Soil_Dry_P Parameter: Post Timepoint (hr) Value: None
  misc_feature: MA Experiment 20001556 PARAMETER Experiment Name: At_Drought_Soil_Dry_P Parameter: Post-Treatment Value: None
  misc_feature: MA Experiment 20001556 PARAMETER Experiment Name: At_Drought_Soil_Dry_P Parameter: Timepoint (day) Value: 12
  misc_feature: MA Experiment 20001556 PARAMETER Experiment Name: At_Drought_Soil_Dry_P Parameter: Treatment Value: Drought vs. No Drought
  misc_feature: MA Experiment ID: 20001560 Result: Down-regulated in Transcription
  misc_feature: MA Experiment 20001560 PARAMETER Experiment Name: At_Drought_Soil_Dry_P Parameter: Age (day) Value: 28
  misc_feature: MA Experiment 20001560 PARAMETER Experiment Name: At_Drought_Soil_Dry_P Parameter: Organism Value: A. thaliana
  misc_feature: MA Experiment 20001560 PARAMETER Experiment Name: At_Drought_Soil_Dry_P Parameter: Plant Line Value: WS
  misc_feature: MA Experiment 20001560 PARAMETER Experiment Name: At_Drought_Soil_Dry_P Parameter: Post Timepoint (hr) Value: None
  misc_feature: MA Experiment 20001560 PARAMETER Experiment Name: At_Drought_Soil_Dry_P Parameter: Post-Treatment Value: None
  misc_feature: MA Experiment 20001560 PARAMETER Experiment Name: At_Drought_Soil_Dry_P Parameter: Timepoint (day) Value: 14
  misc_feature: MA Experiment 20001560 PARAMETER Experiment Name: At_Drought_Soil_Dry_P Parameter: Treatment Value: Drought vs. No Drought
  misc_feature: MA Experiment ID: 20001768 Result: Up-regulated in Transcription
  misc_feature: MA Experiment 20001768 PARAMETER Experiment Name: At_Far-red-enriched-adult_P Parameter: Age (day) Value: 28
  misc_feature: MA Experiment 20001768 PARAMETER Experiment Name: At_Far-red-enriched-adult_P Parameter: Light Value: Far-red enriched vs. White
  misc_feature: MA Experiment 20001768 PARAMETER Experiment Name: At_Far-red-enriched-adult_P Parameter: Organism Value: A. thaliana
  misc_feature: MA Experiment 20001768 PARAMETER Experiment Name: At_Far-red-enriched-adult_P Parameter: Plant Line Value: Columbia
  misc_feature: MA Experiment 20001768 PARAMETER Experiment Name: At_Far-red-enriched-adult_P Parameter: Timepoint (hr) Value: 1
  misc_feature: MA Experiment 20001768 PARAMETER Experiment Name: At_Far-red-enriched-adult_P Parameter: Tissue Value: Aerial
  misc_feature: MA Experiment ID: 20001769 Result: Up-regulated in Transcription
  misc_feature: MA Experiment 20001769 PARAMETER Experiment Name: At_Far-red-enriched-adult_P Parameter: Age (day) Value: 28
  misc_feature: MA Experiment 20001769 PARAMETER Experiment Name: At_Far-red-enriched-adult_P Parameter: Light Value: Far-red enriched vs. White
  misc_feature: MA Experiment 20001769 PARAMETER Experiment Name: At_Far-red-enriched-adult_P Parameter: Organism Value: A. thaliana
  misc_feature: MA Experiment 20001769 PARAMETER Experiment Name: At_Far-red-enriched-adult_P Parameter: Plant Line Value: Columbia
  misc_feature: MA Experiment 20001769 PARAMETER Experiment Name: At_Far-red-enriched-adult_P Parameter: Timepoint (hr) Value: 4
  misc_feature: MA Experiment 20001769 PARAMETER Experiment Name: At_Far-red-enriched-adult_P Parameter: Tissue Value: Aerial
atggctccaagacaggcgaacggtagaagcattgccgtgagtgaaggcggcggagggaagacgatgacgatgacgacgatgcggaaggaagtgcactttagaggtgtgaggaagcgtccatggggtagatacgcggcggagatccgtgacccgggaaagaaaacccgggtttggctcgggacattcgacacggcggaggaagctgcaagagcttacgacaccgccgctagagagtttcgtggctccaaagcaaagactaatttccctcttcccggagagtctactacggttaacgacggtggcgagaacgattcttacgtcaaccgtacgacggtgacgacggcgcgtgagatgacgcgtcagagatttccgtttgcatgtcaccgggagcgtaaagtcgtcggtggttatgcttctgctggttttttcttcgatccgtcaagagctgcttcgttaagagcagagctttctcgggtttgtccggttcggtttgatccggttaatatcgagttgagtattggtattcgagaaaccgtaaaagttgaaccgagaagagaactaaacctggatcttaacctagctccaccggtggtggacgtttag

SEQ ID NO: 81451 - protein, 200 aa, Arabidopsis thaliana
  peptide (1)..(200): Ceres Seq. ID no. 12659819
  misc_feature (30)..(94): Pfam Name: AP2 domain Pfam Description: AP2 domain
  misc_feature (1)..(200): Homolog of NCBI NO: 15241432 NR Description: ethylene responsive element binding factor 9; id: At5g44210.1 [Arabidopsis thaliana]
  misc_feature (82)..(195): Homolog of NCBI NO: 15219560 NR Description: ethylene responsive element binding factor 10; id: At1g03800.1 [Arabidopsis thaliana] >gi|25406743|pir||E86168
  misc_feature (9)..(92): Homolog of NCBI NO: 15219560 NR Description: ethylene responsive element binding factor 10; id: At1g03800.1 [Arabidopsis thaliana] >gi|25406743|pir||E86168
  misc_feature (29)..(120): Homolog of NCBI NO: 40353323 NR Description: ethylene-responsive element binding factor
  misc_feature (13)..(112): Homolog of NCBI NO: 8809573 NR Description: ethylene-responsive element binding factor
  misc_feature (29)..(196): Homolog of NCBI NO: 20340233 NR Description: ethylene responsive element binding factor 4-like
  misc_feature (29)..(119): Homolog of NCBI NO: 4099921 NR Description: EREBP-3 homolog [Stylosanthes hamata]
  misc_feature (13)..(103): Homolog of NCBI NO: 7489114 NR Description: DNA binding protein EREBP-3 - common tobacco
  misc_feature (29)..(99): Homolog of NCBI NO: 4099914 NR Description: ethylene-responsive element binding protein
  misc_feature (1)..(89): Homolog of NCBI NO: 28274832 NR Description: ethylene response factor 3 [Lycopersicon
MAPRQANGRSIAVSEGGGGKTMTMTTMRKEVHFRGVRKRPWGRYAAEIRDPGKKTRVWLGTFDTAEEAARAYDTAAREFRGSKAKTNFPLPGESTTVNDGGENDSYVNRTTVTTAREMTRQRFPFACHRERKVVGGYASAGFFFDPSRAASLRAELSRVCPVRFDPVNIELSIGIRETVKVEPRRELNLDLNLAPPVVDV

SEQ ID NO: 81452 - protein, 179 aa, Arabidopsis thaliana
  peptide (1)..(179): Ceres Seq. ID no. 12659820
  misc_feature (9)..(73): Pfam Name: AP2 domain Pfam Description: AP2 domain
  misc_feature (1)..(179): Homolog of NCBI NO: 15241432 NR Description: ethylene responsive element binding factor 9; id: At5g44210.1 [Arabidopsis thaliana]
  misc_feature (61)..(174): Homolog of NCBI NO: 15219560 NR Description: ethylene responsive element binding factor 10; id: At1g03800.1 [Arabidopsis thaliana] >gi|25406743|pir||E86168
  misc_feature (1)..(71): Homolog of NCBI NO: 15219560 NR Description: ethylene responsive element binding factor 10; id: At1g03800.1 [Arabidopsis thaliana] >gi|25406743|pir||E86168
  misc_feature (8)..(99): Homolog of NCBI NO: 40353323 NR Description: ethylene-responsive element binding factor
  misc_feature (1)..(91): Homolog of NCBI NO: 8809573 NR Description: ethylene-responsive element binding factor
  misc_feature (8)..(175): Homolog of NCBI NO: 20340233 NR Description: ethylene responsive element binding factor 4-like
  misc_feature (8)..(98): Homolog of NCBI NO: 4099921 NR Description: EREBP-3 homolog [Stylosanthes hamata]
  misc_feature (1)..(82): Homolog of NCBI NO: 7489114 NR Description: DNA binding protein EREBP-3 - common tobacco
  misc_feature (8)..(78): Homolog of NCBI NO: 4099914 NR Description: ethylene-responsive element binding protein
  misc_feature (1)..(68): Homolog of NCBI NO: 28274832 NR Description: ethylene response factor 3 [Lycopersicon
MTMTTMRKEVHFRGVRKRPWGRYAAEIRDPGKKTRVWLGTFDTAEEAARAYDTAAREFRGSKAKTNFPLPGESTTVNDGGENDSYVNRTTVTTAREMTRQRFPFACHRERKVVGGYASAGFFFDPSRAASLRAELSRVCPVRFDPVNIELSIGIRETVKVEPRRELNLDLNLAPPVVDV

SEQ ID NO: 81453 - protein, 177 aa, Arabidopsis thaliana
  peptide (1)..(177): Ceres Seq. ID no. 12659821
  misc_feature (7)..(71): Pfam Name: AP2 domain Pfam Description: AP2 domain
  misc_feature (1)..(177): Homolog of NCBI NO: 15241432 NR Description: ethylene responsive element binding factor 9; id: At5g44210.1 [Arabidopsis thaliana]
  misc_feature (59)..(172): Homolog of NCBI NO: 15219560 NR Description: ethylene responsive element binding factor 10; id: At1g03800.1 [Arabidopsis thaliana] >gi|25406743|pir||E86168
  misc_feature (1)..(69): Homolog of NCBI NO: 15219560 NR Description: ethylene responsive element binding factor 10; id: At1g03800.1 [Arabidopsis thaliana] >gi|25406743|pir||E86168
  misc_feature (6)..(97): Homolog of NCBI NO: 40353323 NR Description: ethylene-responsive element binding factor
  misc_feature (1)..(89): Homolog of NCBI NO: 8809573 NR Description: ethylene-responsive element binding factor
  misc_feature (6)..(173): Homolog of NCBI NO: 20340233 NR Description: ethylene responsive element binding factor 4-like
  misc_feature (6)..(96): Homolog of NCBI NO: 4099921 NR Description: EREBP-3 homolog [Stylosanthes hamata]
  misc_feature (1)..(80): Homolog of NCBI NO: 7489114 NR Description: DNA binding protein EREBP-3 - common tobacco
  misc_feature (6)..(76): Homolog of NCBI NO: 4099914 NR Description: ethylene-responsive element binding protein
  misc_feature (1)..(66): Homolog of NCBI NO: 28274832 NR Description: ethylene response factor 3 [Lycopersicon
MTTMRKEVHFRGVRKRPWGRYAAEIRDPGKKTRVWLGTFDTAEEAARAYDTAAREFRGSKAKTNFPLPGESTTVNDGGENDSYVNRTTVTTAREMTRQRFPFACHRERKVVGGYASAGFFFDPSRAASLRAELSRVCPVRFDPVNIELSIGIRETVKVEPRRELNLDLNLAPPVVDV

SEQ ID NO: 81454 - DNA, 1599 bp, Arabidopsis thaliana
  misc_feature (1)..(1599): Ceres Seq. ID no. 12659847
  misc_feature: MA Experiment ID: 20000314 Result: Up-regulated in Transcription
  misc_feature: MA Experiment 20000314 PARAMETER Experiment Name: At_14day_Shoots-Roots_Sub_P Parameter: Age (day) Value: 14
  misc_feature: MA Experiment 20000314 PARAMETER Experiment Name: At_14day_Shoots-Roots_Sub_P Parameter: Organism Value: A. thaliana
  misc_feature: MA Experiment 20000314 PARAMETER Experiment Name: At_14day_Shoots-Roots_Sub_P Parameter: Plant Line Value: WS
  misc_feature: MA Experiment 20000314 PARAMETER Experiment Name: At_14day_Shoots-Roots_Sub_P Parameter: Tissue Value: Roots vs. Whole Plant
  misc_feature: MA Experiment ID: 20000315 Result: Down-regulated in Transcription
  misc_feature: MA Experiment 20000315 PARAMETER Experiment Name: At_14day_Shoots-Roots_Sub_P Parameter: Age (day) Value: 14
  misc_feature: MA Experiment 20000315 PARAMETER Experiment Name: At_14day_Shoots-Roots_Sub_P Parameter: Organism Value: A. thaliana
  misc_feature: MA Experiment 20000315 PARAMETER Experiment Name: At_14day_Shoots-Roots_Sub_P Parameter: Plant Line Value: WS
  misc_feature: MA Experiment 20000315 PARAMETER Experiment Name: At_14day_Shoots-Roots_Sub_P Parameter: Tissue Value: Shoots vs. Whole Plant
  misc_feature: MA Experiment ID: 20000327 Result: Down-regulated in Transcription
  misc_feature: MA Experiment 20000327 PARAMETER Experiment Name: At_42deg_Heat_Sub_P Parameter: Age (day) Value: 14
  misc_feature: MA Experiment 20000327 PARAMETER Experiment Name: At_42deg_Heat_Sub_P Parameter: Organism Value: A. thaliana
  misc_feature: MA Experiment 20000327 PARAMETER Experiment Name: At_42deg_Heat_Sub_P Parameter: Plant Line Value: WS
  misc_feature: MA Experiment 20000327 PARAMETER Experiment Name: At_42deg_Heat_Sub_P Parameter: Temperature (deg C) Value: 42 vs. 22
  misc_feature: MA Experiment 20000327 PARAMETER Experiment Name: At_42deg_Heat_Sub_P Parameter: Timepoint (hr) Value: 1
  misc_feature: MA Experiment 20000327 PARAMETER Experiment Name: At_42deg_Heat_Sub_P Parameter: Tissue Value: Aerial
  misc_feature: MA Experiment ID: 20000328 Result: Down-regulated in Transcription
  misc_feature: MA Experiment 20000328 PARAMETER Experiment Name: At_42deg_Heat_Sub_P Parameter: Age (day) Value: 14
  misc_feature: MA Experiment 20000328 PARAMETER Experiment Name: At_42deg_Heat_Sub_P Parameter: Organism Value: A. thaliana
  misc_feature: MA Experiment 20000328 PARAMETER Experiment Name: At_42deg_Heat_Sub_P Parameter: Plant Line Value: WS
  misc_feature: MA Experiment 20000328 PARAMETER Experiment Name: At_42deg_Heat_Sub_P Parameter: Temperature (deg C) Value: 42 vs. 22
  misc_feature: MA Experiment 20000328 PARAMETER Experiment Name: At_42deg_Heat_Sub_P Parameter: Timepoint (hr) Value: 6
  misc_feature: MA Experiment 20000328 PARAMETER Experiment Name: At_42deg_Heat_Sub_P Parameter: Tissue Value: Aerial
  misc_feature: MA Experiment ID: 20000332 Result: Up-regulated in Transcription
  misc_feature: MA Experiment 20000332 PARAMETER Experiment Name: At_4deg_Cold_Sub_P Parameter: Age (day) Value: 14
  misc_feature: MA Experiment 20000332 PARAMETER Experiment Name: At_4deg_Cold_Sub_P Parameter: Organism Value: A. thaliana
  misc_feature: MA Experiment 20000332 PARAMETER Experiment Name: At_4deg_Cold_Sub_P Parameter: Plant Line Value: WS
  misc_feature: MA Experiment 20000332 PARAMETER Experiment Name: At_4deg_Cold_Sub_P Parameter: Temperature (deg C) Value: 4 vs. 22
  misc_feature: MA Experiment 20000332 PARAMETER Experiment Name: At_4deg_Cold_Sub_P Parameter: Timepoint (hr) Value: 2
  misc_feature: MA Experiment 20000332 PARAMETER Experiment Name: At_4deg_Cold_Sub_P Parameter: Tissue Value: Aerial
  misc_feature: MA Experiment ID: 20000347 Result: Up-regulated in Transcription
  misc_feature: MA Experiment 20000347 PARAMETER Experiment Name: At_2mM_SA_Sub_P Parameter: Age (day) Value: 14
  misc_feature: MA Experiment 20000347 PARAMETER Experiment Name: At_2mM_SA_Sub_P Parameter: Organism Value: A. thaliana
  misc_feature: MA Experiment 20000347 PARAMETER Experiment Name: At_2mM_SA_Sub_P Parameter: Plant Line Value: WS
  misc_feature: MA Experiment 20000347 PARAMETER Experiment Name: At_2mM_SA_Sub_P Parameter: Timepoint (hr) Value: 6
  misc_feature: MA Experiment 20000347 PARAMETER Experiment Name: At_2mM_SA_Sub_P Parameter: Tissue Value: Aerial
  misc_feature: MA Experiment 20000347 PARAMETER Experiment Name: At_2mM_SA_Sub_P Parameter: Treatment Value: 2mM SA vs. No Treatment
  misc_feature: MA Experiment ID: 20000440 Result: Down-regulated in Transcription
  misc_feature: MA Experiment 20000440 PARAMETER Experiment Name: At_Closed-Flower__Sub_P Parameter: Tissue Value: Closed Flower vs. Whole Plant
  misc_feature: MA Experiment ID: 20000634 Result: Up-regulated in Transcription
  misc_feature: MA Experiment 20000634 PARAMETER Experiment Name: At_10percent_PEG_Sub_P Parameter: Age (day) Value: 12
  misc_feature: MA Experiment 20000634 PARAMETER Experiment Name: At_10percent_PEG_Sub_P Parameter: Organism Value: A. thaliana
  misc_feature: MA Experiment 20000634 PARAMETER Experiment Name: At_10percent_PEG_Sub_P Parameter: Plant Line Value: WS
  misc_feature: MA Experiment 20000634 PARAMETER Experiment Name: At_10percent_PEG_Sub_P Parameter: Timepoint (day) Value: 12
  misc_feature: MA Experiment 20000634 PARAMETER Experiment Name: At_10percent_PEG_Sub_P Parameter: Tissue Value: Whole Plant
  misc_feature: MA Experiment 20000634 PARAMETER Experiment Name: At_10percent_PEG_Sub_P Parameter: Treatment Value: 10% PEG vs. No Treatment
atgagaacacttgaagcttttgctctgtccctgtttcttgtcttcttagtaaaatgggtcaattctgactctagttcttctcctagtaaagatcaatttctgagttgcatgtcgacacattctgattccagcttcataaaccctaaaagcttcatccacaaaccagattcaagagtctacaccgatttctcgcagtctttaatatcacaaaactacagatttctgaccttgaatttcacaagccagaagccgattctgatcgttacaccaagaactgatactgaaatccagagatcattactctgtagcaggaaacttggggtgaaagtaagaaccaaaagcggtggtcatgactatgaaggcctttcttatctctcattacactcgcctttcatcatactcgatctcgttaatgttcgatcgatcgagatcaacctggcagatgaaacagcttgggttggagccggtgccactatcggtgagctttactataaaattgccaaatcaagtaagatccatggcttccctgcaggaacatgccctagtgttggagttggaggtcattttagcggaggagggtttggtgcaatgatgaggaaacatggtttagctgcagataacgttgtggacgcgcgttttgtagacgcaaatgggaggatctacaacagtaggagagaaatgggagaagatttgttctgggccattagaggaggtggagcagctagctttggtgttgtactttcatggaaagtgaagctagttagggttccagaaaaggttacgtgcttcagaaggaacctaccgttgacacagaacatgacgaaaattgttcatagatggcagcaaattgcagcagagcttgacgataatctcttcatccgagtcatcgtttccatttccggaggatcagttcaaactacattccaagcaaattatcttggaggaatcgataaactaattcctctgatgaatcagaagtttccggaattagggttaacgtttcaagactgttcggaaatgacctggatcgattcaataatgtacttcaactggaagaaaggacaaccactagagactcttctggatcgaggacaaagatacaatgatctgtatttcaaagccaaatctgattttgtcaagaaccctattcctgaaatcggtctagaaggtatatggacgaggtttcacgaggtcgaatctccgataatgataatggagccattaggtggtaaaatgtatgagattggtgaaacagagactccattcccacatagaagagggaatctatataatatccagtatatggttaaatggagattgaaggacattggagtgatggagaaacatgtgacatggatgagattgctttataggtatatgagagtttatgtctctgcatcgccaagaggagcttatttgaattaccgagatcttgatttaggtatgaacagaggagttaatacgagctttgaagatgcgaaattatgggggtttaggtattttggaagtaatttcaagagattggctattgttaaagggaagattgatccaaccaatttcttcaggaatgaacaaagtgttcctcctttgattgtctaa

SEQ ID NO: 81455 - protein, 532 aa, Arabidopsis thaliana
  peptide (1)..(532): Ceres Seq. ID no. 12659848
  misc_feature (84)..(241): Pfam Name: FAD binding domain Pfam Description: FAD binding domain
  misc_feature (1)..(532): Homolog of NCBI NO: 15241474 NR Description: FAD-linked oxidoreductase family; protein id: [Arabidopsis thaliana] >gi|10176891|dbj|BAB10121.1| berberine
  misc_feature (5)..(530): Homolog of NCBI NO: 15233424 NR Description: FAD-linked oxidoreductase family; protein id: supported by cDNA: gi_14194126 [Arabidopsis thaliana]
  misc_feature (5)..(530): Homolog of NCBI NO: 14194127 NR Description: AT4g20860/T13K14_20 [Arabidopsis thaliana]
  misc_feature (9)..(454): Homolog of NCBI NO: 24417282 NR Description: unknown [Arabidopsis thaliana]
  misc_feature (2)..(531): Homolog of NCBI NO: 15241494 NR Description: FAD-linked oxidoreductase family; protein id: supported by cDNA: gi_18176301 [Arabidopsis thaliana]
  misc_feature (6)..(531): Homolog of NCBI NO: 15226830 NR Description: FAD-linked oxidoreductase family; protein id: [Arabidopsis thaliana] >gi|7485805|pir||T00461 probable berberine
  misc_feature (7)..(529): Homolog of NCBI NO: 15233411 NR Description: FAD-linked oxidoreductase family; protein id: [Arabidopsis thaliana] >gi|7488294|pir||T10624 reticuline oxidase
  misc_feature (1)..(528): Homolog of NCBI NO: 15220954 NR Description: FAD-linked oxidoreductase family; protein id: supported by cDNA: gi_16323166, supported by cDNA: gi_16323166 thaliana] >gi|16323167|gb|AAL15318.1| At1g30760/T5I8_22
  misc_feature (9)..(532): Homolog of NCBI NO: 16648925 NR Description: berberine bridge enzyme-like protein [Arabidopsis
  misc_feature (9)..(532): Homolog of NCBI NO: 15241478 NR Description: FAD-linked oxidoreductase family; protein id:
MRTLEAFALSLFLVFLVKWVNSDSSSSPSKDQFLSCMSTHSDSSFINPKSFIHKPDSRVYTDFSQSLISQNYRFLTLNFTSQKPILIVTPRTDTEIQRSLLCSRKLGVKVRTKSGGHDYEGLSYLSLHSPFIILDLVNVRSIEINLADETAWVGAGATIGELYYKIAKSSKIHGFPAGTCPSVGVGGHFSGGGFGAMMRKHGLAADNVVDARFVDANGRIYNSRREMGEDLFWAIRGGGAASFGVVLSWKVKLVRVPEKVTCFRRNLPLTQNMTKIVHRWQQIAAELDDNLFIRVIVSISGGSVQTTFQANYLGGIDKLIPLMNQKFPELGLTFQDCSEMTWIDSIMYFNWKKGQPLETLLDRGQRYNDLYFKAKSDFVKNPIPEIGLEGIWTRFHEVESPIMIMEPLGGKMYEIGETETPFPHRRGNLYNIQYMVKWRLKDIGVMEKHVTWMRLLYRYMRVYVSASPRGAYLNYRDLDLGMNRGVNTSFEDAKLWGFRYFGSNFKRLAIVKGKIDPTNFFRNEQSVPPLIV

SEQ ID NO: 81456 - protein, 496 aa, Arabidopsis thaliana
  peptide (1)..(496): Ceres Seq. ID no. 12659849
  misc_feature (48)..(205): Pfam Name: FAD binding domain Pfam Description: FAD binding domain
  misc_feature (1)..(496): Homolog of NCBI NO: 15241474 NR Description: FAD-linked oxidoreductase family; protein id: [Arabidopsis thaliana] >gi|10176891|dbj|BAB10121.1| berberine
  misc_feature (1)..(494): Homolog of NCBI NO: 15233424 NR Description: FAD-linked oxidoreductase family; protein id: supported by cDNA: gi_14194126 [Arabidopsis thaliana]
  misc_feature (1)..(494): Homolog of NCBI NO: 14194127 NR Description: AT4g20860/T13K14_20 [Arabidopsis thaliana]
  misc_feature (1)..(418): Homolog of NCBI NO: 24417282 NR Description: unknown [Arabidopsis thaliana]
  misc_feature (1)..(495): Homolog of NCBI NO: 15241494 NR Description: FAD-linked oxidoreductase family; protein id: supported by cDNA: gi_18176301 [Arabidopsis thaliana]
  misc_feature (1)..(495): Homolog of NCBI NO: 15226830 NR Description: FAD-linked oxidoreductase family; protein id: [Arabidopsis thaliana] >gi|7485805|pir||T00461 probable berberine
  misc_feature (1)..(493): Homolog of NCBI NO: 15233411 NR Description: FAD-linked oxidoreductase family; protein id: [Arabidopsis thaliana] >gi|7488294|pir||T10624 reticuline oxidase
  misc_feature (1)..(492): Homolog of NCBI NO: 15220954 NR Description: FAD-linked oxidoreductase family; protein id: supported by cDNA: gi_16323166, supported by cDNA: gi_16323166 thaliana] >gi|16323167|gb|AAL15318.1| At1g30760/T5I8_22
  misc_feature (1)..(496): Homolog of NCBI NO: 16648925 NR Description: berberine bridge enzyme-like protein [Arabidopsis
  misc_feature (1)..(496): Homolog of NCBI NO: 15241478 NR Description: FAD-linked oxidoreductase family; protein id:
MSTHSDSSFINPKSFIHKPDSRVYTDFSQSLISQNYRFLTLNFTSQKPILIVTPRTDTEIQRSLLCSRKLGVKVRTKSGGHDYEGLSYLSLHSPFIILDLVNVRSIEINLADETAWVGAGATIGELYYKIAKSSKIHGFPAGTCPSVGVGGHFSGGGFGAMMRKHGLAADNVVDARFVDANGRIYNSRREMGEDLFWAIRGGGAASFGVVLSWKVKLVRVPEKVTCFRRNLPLTQNMTKIVHRWQQIAAELDDNLFIRVIVSISGGSVQTTFQANYLGGIDKLIPLMNQKFPELGLTFQDCSEMTWIDSIMYFNWKKGQPLETLLDRGQRYNDLYFKAKSDFVKNPIPEIGLEGIWTRFHEVESPIMIMEPLGGKMYEIGETETPFPHRRGNLYNIQYMVKWRLKDIGVMEKHVTWMRLLYRYMRVYVSASPRGAYLNYRDLDLGMNRGVNTSFEDAKLWGFRYFGSNFKRLAIVKGKIDPTNFFRNEQSVPPLIV

SEQ ID NO: 81457 - protein, 336 aa, Arabidopsis thaliana
  peptide (1)..(336): Ceres Seq. ID no. 12659850
  misc_feature (1)..(336): Homolog of NCBI NO: 15241474 NR Description: FAD-linked oxidoreductase family; protein id: [Arabidopsis thaliana] >gi|10176891|dbj|BAB10121.1| berberine
  misc_feature (1)..(334): Homolog of NCBI NO: 15233424 NR Description: FAD-linked oxidoreductase family; protein id: supported by cDNA: gi_14194126 [Arabidopsis thaliana]
  misc_feature (1)..(334): Homolog of NCBI NO: 14194127 NR Description: AT4g20860/T13K14_20 [Arabidopsis thaliana]
  misc_feature (1)..(258): Homolog of NCBI NO: 24417282 NR Description: unknown [Arabidopsis thaliana]
  misc_feature (1)..(335): Homolog of NCBI NO: 15241494 NR Description: FAD-linked oxidoreductase family; protein id: supported by cDNA: gi_18176301 [Arabidopsis thaliana]
  misc_feature (1)..(335): Homolog of NCBI NO: 15226830 NR Description: FAD-linked oxidoreductase family; protein id: [Arabidopsis thaliana] >gi|7485805|pir||T00461 probable berberine
  misc_feature (1)..(333): Homolog of NCBI NO: 15233411 NR Description: FAD-linked oxidoreductase family; protein id: [Arabidopsis thaliana] >gi|7488294|pir||T10624 reticuline oxidase
  misc_feature (1)..(332): Homolog of NCBI NO: 15220954 NR Description: FAD-linked oxidoreductase family; protein id: supported by cDNA: gi_16323166, supported by cDNA: gi_16323166 thaliana] >gi|16323167|gb|AAL15318.1| At1g30760/T5I8_22
  misc_feature (1)..(336): Homolog of NCBI NO: 16648925 NR Description: berberine bridge enzyme-like protein [Arabidopsis
  misc_feature (1)..(336): Homolog of NCBI NO: 15241478 NR Description: FAD-linked oxidoreductase family; protein id:
MMRKHGLAADNVVDARFVDANGRIYNSRREMGEDLFWAIRGGGAASFGVVLSWKVKLVRVPEKVTCFRRNLPLTQNMTKIVHRWQQIAAELDDNLFIRVIVSISGGSVQTTFQANYLGGIDKLIPLMNQKFPELGLTFQDCSEMTWIDSIMYFNWKKGQPLETLLDRGQRYNDLYFKAKSDFVKNPIPEIGLEGIWTRFHEVESPIMIMEPLGGKMYEIGETETPFPHRRGNLYNIQYMVKWRLKDIGVMEKHVTWMRLLYRYMRVYVSASPRGAYLNYRDLDLGMNRGVNTSFEDAKLWGFRYFGSNFKRLAIVKGKIDPTNFFRNEQSVPPLIV

SEQ ID NO: 81458 - DNA, 1859 bp, Arabidopsis thaliana
  misc_feature (1)..(1859): Ceres Seq. ID no. 12659855
  misc_feature: MA Experiment ID: 20000171 Result: Down-regulated in Transcription
  misc_feature: MA Experiment 20000171 PARAMETER Experiment Name: At_42deg_Heat_P Parameter: Age (day) Value: 14
  misc_feature: MA Experiment 20000171 PARAMETER Experiment Name: At_42deg_Heat_P Parameter: Organism Value: A. thaliana
  misc_feature: MA Experiment 20000171 PARAMETER Experiment Name: At_42deg_Heat_P Parameter: Plant Line Value: WS
  misc_feature: MA Experiment 20000171 PARAMETER Experiment Name: At_42deg_Heat_P Parameter: Temperature (deg C) Value: 42 vs. 22
  misc_feature: MA Experiment 20000171 PARAMETER Experiment Name: At_42deg_Heat_P Parameter: Timepoint (hr) Value: 1
  misc_feature: MA Experiment 20000171 PARAMETER Experiment Name: At_42deg_Heat_P Parameter: Tissue Value: Aerial
  misc_feature: MA Experiment ID: 20000173 Result: Down-regulated in Transcription
  misc_feature: MA Experiment 20000173 PARAMETER Experiment Name: At_42deg_Heat_P Parameter: Age (day) Value: 14
  misc_feature: MA Experiment 20000173 PARAMETER Experiment Name: At_42deg_Heat_P Parameter: Organism Value: A. thaliana
  misc_feature: MA Experiment 20000173 PARAMETER Experiment Name: At_42deg_Heat_P Parameter: Plant Line Value: WS
  misc_feature: MA Experiment 20000173 PARAMETER Experiment Name: At_42deg_Heat_P Parameter: Temperature (deg C) Value: 42 vs. 22
  misc_feature: MA Experiment 20000173 PARAMETER Experiment Name: At_42deg_Heat_P Parameter: Timepoint (hr) Value: 6
  misc_feature: MA Experiment 20000173 PARAMETER Experiment Name: At_42deg_Heat_P Parameter: Tissue Value: Aerial
  misc_feature: MA Experiment ID: 20000180 Result: Up-regulated in Transcription
  misc_feature: MA Experiment 20000180 PARAMETER Experiment Name: At_Germinating_Seeds_P Parameter: Age (hr) Value: 24 vs. 0
  misc_feature: MA Experiment 20000180 PARAMETER Experiment Name: At_Germinating_Seeds_P Parameter: Tissue Value: Germinating Seeds
  misc_feature: MA Experiment ID: 20000234 Result: Down-regulated in Transcription
  misc_feature: MA Experiment 20000234 PARAMETER Experiment Name: At_Siliques_P Parameter: Age (day) Value: 21
  misc_feature: MA Experiment 20000234 PARAMETER Experiment Name: At_Siliques_P Parameter: Organism Value: A. thaliana
  misc_feature: MA Experiment 20000234 PARAMETER Experiment Name: At_Siliques_P Parameter: Plant Line Value: WS
  misc_feature: MA Experiment 20000234 PARAMETER Experiment Name: At_Siliques_P Parameter: Tissue Value: Less Than 5mm Siliques vs. Whole Plant
  misc_feature: MA Experiment ID: 20000265 Result: Up-regulated in Transcription
  misc_feature: MA Experiment 20000265 PARAMETER Experiment Name: At_Open_Flower_P Parameter: Age (day) Value: 21
  misc_feature: MA Experiment 20000265 PARAMETER Experiment Name: At_Open_Flower_P Parameter: Plant Line Value: WS
  misc_feature: MA Experiment 20000265 PARAMETER Experiment Name: At_Open_Flower_P Parameter: Tissue Value: Closed Flower vs. Whole Plant
  misc_feature: MA Experiment ID: 20000267 Result: Down-regulated in Transcription
  misc_feature: MA Experiment 20000267 PARAMETER Experiment Name: At_Drought_P Parameter: Age (day) Value: 7
  misc_feature: MA Experiment 20000267 PARAMETER Experiment Name: At_Drought_P Parameter: Organism Value: A. thaliana
  misc_feature: MA Experiment 20000267 PARAMETER Experiment Name: At_Drought_P Parameter: Plant Line Value: WS
  misc_feature: MA Experiment 20000267 PARAMETER Experiment Name: At_Drought_P Parameter: Timepoint (hr) Value: 6
  misc_feature: MA Experiment 20000267 PARAMETER Experiment Name: At_Drought_P Parameter: Tissue Value: Whole Plant
  misc_feature: MA Experiment 20000267 PARAMETER Experiment Name: At_Drought_P Parameter: Treatment Value: Drought vs. No Drought
  misc_feature: MA Experiment ID: 20000437 Result: Down-regulated in Transcription
  misc_feature: MA Experiment 20000437 PARAMETER Experiment Name: At_Drought_P Parameter: Age (day) Value: 8
  misc_feature: MA Experiment 20000437 PARAMETER Experiment Name: At_Drought_P Parameter: Organism Value: A. thaliana
  misc_feature: MA Experiment 20000437 PARAMETER Experiment Name: At_Drought_P Parameter: Plant Line Value: WS
  misc_feature: MA Experiment 20000437 PARAMETER Experiment Name: At_Drought_P Parameter: Timepoint (hr) Value: 24
  misc_feature: MA Experiment 20000437 PARAMETER Experiment Name: At_Drought_P Parameter: Tissue Value: Whole Plant
  misc_feature: MA Experiment 20000437 PARAMETER Experiment Name: At_Drought_P Parameter: Treatment Value: Drought vs. No Drought
  misc_feature: MA Experiment ID: 20000438 Result: Up-regulated in Transcription
  misc_feature: MA Experiment 20000438 PARAMETER Experiment Name: At_Shoots__P Parameter: Age (day) Value: 14
  misc_feature: MA Experiment 20000438 PARAMETER Experiment Name: At_Shoots__P Parameter: Tissue Value: Shoots vs. Whole Plant
  misc_feature: MA Experiment ID: 20000439 Result: Up-regulated in Transcription
  misc_feature: MA Experiment 20000439 PARAMETER Experiment Name: At_Roots__P Parameter: Age (day) Value: 14 vs. 21
  misc_feature: MA Experiment 20000439 PARAMETER Experiment Name: At_Roots__P Parameter: Organism Value: A. thaliana
  misc_feature: MA Experiment 20000439 PARAMETER Experiment Name: At_Roots__P Parameter: Tissue Value: Roots vs. Whole Plant
  misc_feature: MA Experiment ID: 20000452 Result: Up-regulated in Transcription
  misc_feature: MA Experiment 20000452 PARAMETER Experiment Name: At_CS6879_Shoots-Roots_P Parameter: Age (day) Value: 14
  misc_feature: MA Experiment 20000452 PARAMETER Experiment Name: At_CS6879_Shoots-Roots_P Parameter: Organism Value: A. thaliana
  misc_feature: MA Experiment 20000452 PARAMETER Experiment Name: At_CS6879_Shoots-Roots_P Parameter: Plant Line Value: CS6879 vs. WS
  misc_feature: MA Experiment 20000452 PARAMETER Experiment Name: At_CS6879_Shoots-Roots_P Parameter: Tissue Value: Shoots
  misc_feature: MA Experiment ID: 20000495 Result: Up-regulated in Transcription
  misc_feature: MA Experiment 20000495 PARAMETER Experiment Name: At_Guard_Cells_P Parameter: Harvest Date Value: 8/2/2002
  misc_feature: MA Experiment 20000495 PARAMETER Experiment Name: At_Guard_Cells_P Parameter: Organism Value: A. thaliana
  misc_feature: MA Experiment 20000495 PARAMETER Experiment Name: At_Guard_Cells_P Parameter: Tissue Value: Guard Cells vs. Leaves
  misc_feature: MA Experiment ID: 20000794 Result: Down-regulated in Transcription
  misc_feature: MA Experiment 20000794 PARAMETER Experiment Name: At_Petals_P Parameter: Age (day) Value: 23-25 days
  misc_feature: MA Experiment 20000794 PARAMETER Experiment Name: At_Petals_P Parameter: Plant Line Value: WS
  misc_feature: MA Experiment 20000794 PARAMETER Experiment Name: At_Petals_P Parameter: Tissue Value: Petals vs. Whole plant
  misc_feature: MA Experiment ID: 20001557 Result: Up-regulated in Transcription
  misc_feature: MA Experiment 20001557 PARAMETER Experiment Name: At_Drought_Soil_Dry_P Parameter: Age (day) Value: 27
  misc_feature: MA Experiment 20001557 PARAMETER Experiment Name: At_Drought_Soil_Dry_P Parameter: Organism Value: A. thaliana
  misc_feature: MA Experiment 20001557 PARAMETER Experiment Name: At_Drought_Soil_Dry_P Parameter: Plant Line Value: WS
  misc_feature: MA Experiment 20001557 PARAMETER Experiment Name: At_Drought_Soil_Dry_P Parameter: Post Timepoint (hr) Value: 3
  misc_feature: MA Experiment 20001557 PARAMETER Experiment Name: At_Drought_Soil_Dry_P Parameter: Post-Treatment Value: Re-Water vs. No Drought
  misc_feature: MA Experiment 20001557 PARAMETER Experiment Name: At_Drought_Soil_Dry_P Parameter: Timepoint (day) Value: 13
  misc_feature: MA Experiment 20001557 PARAMETER Experiment Name: At_Drought_Soil_Dry_P Parameter: Treatment Value: Drought vs. No Drought
atttcttcttttacaagaaagaacaatatacaacatttccatcttgaagccttattgtgtgtttagcttctctcttgcatataatattcgctgctaggatgggaaattcaaaaccactccctacaatttcttgtatttcagtttttgctctatatttttcattctacacaataacactaacttcttcaacctccctacaagatgatttcatcaaatgtctttaccgaaacacaaatgtccgttttacactcgacaaaacgttcttcactcctgaaagaaacgcttccatcttcacagaagttcttgaatcgacggctcagaatcaaagatacttgaccaagacaatgcctaaaccgggtttcatatttaaaccggttcacgaatctcacgtccaagcttccgtcatctgttccaagaaacttgagatacattttcgtgtcagaagcggcggtcatgattacgagggcgtgtcttatgtttcacagatcgaaaaaccttttgtattgatcgatttgtcgaaattgagacagatcaatgttgatattaaggacaccagtgcttgggttgaagctggtgctaccgttggtgagctttactacagaattgcagagaagagcaagtttcatggattccctgcaggtgtttacccgagcttaggcatcggtgggcatataacaggcggtgcatacggttccttgatgaggaagtatggtcttgctgcagataatgttctagacgcaaagatcgttgatgctaacggtaaattactcgatagagcctcgatgggcgaggatctgttttgggcaattagaggaggcagtggagggagttttgggataattttgtcatggaaaatcaagcttgttcctgttcctgaaaccctaaccgtcttcacggtcaccaaaacattcgagcaagatagaagtttcaagattctttcaaagtggcaagaaattgcggacaatcttgttgatgagctcttcttacgagtgttcttcactgtatctggaaacaaagcaaacaagacagtgacgatggcctacataggtcagtttcttggcgagaaaggcaccttgatggaggtaatgaagaaggattttccagaacttgggctaactcagaaggattgtatagaaatgagttggatcgattccattatttacaactctggattcccaacaaaccctcctcctcctattgagattctgcttcaagcaaagtctccaatcggaaaagtttacttcaaagggaaatcggatttcgctaaaaaacctattcctgttttagggctcgaagggatgttcaagaagttgcttgaagaagacgcagcgttagtaatttggactccttacggtggaaagatggataaaatccctgaatctgagatcccatttccgcatagaaacggaaccaacttcatgattcaatattacaggagctggtcagatagtgagaaaagaccaaacagacgcaccaaatggatcagagagttgtacggatacatgacgccttacgtctcaagcaatccaagacaagcatatgtgaactacagagatctagacctgggacagaacaaggacaactcaaagtctaacttcatagaagctaaaatatggggagctaattatttcaaagacaatttcaacagattggtgaggattaaatcaaaggttgatccagataacttcttcagacacgagcagagtatcccaactctgcccgtatgaagctaagctcatgacaaccacacacaaccatatgatttgagtaaccaactaggtgttgttatccgattgaaccgtgttttgcaaatttaattacatgtcaaaaaaatatgaatccgtatgaaatcttttaac

SEQ ID NO: 81459 - protein, 542 aa, Arabidopsis thaliana
  peptide (1)..(542): Ceres Seq. ID no. 12659856
  misc_feature (86)..(243): Pfam Name: FAD binding domain Pfam Description: FAD binding domain
  misc_feature (1)..(542): Homolog of NCBI NO: 15241478 NR Description: FAD-linked oxidoreductase family; protein id:
  misc_feature (1)..(542): Homolog of NCBI NO: 16648925 NR Description: berberine bridge enzyme-like protein [Arabidopsis
  misc_feature (1)..(541): Homolog of NCBI NO: 15241476 NR Description: FAD-linked oxidoreductase family; protein id:
  misc_feature (1)..(540): Homolog of NCBI NO: 15241494 NR Description: FAD-linked oxidoreductase family; protein id: supported by cDNA: gi_18176301 [Arabidopsis thaliana]
  misc_feature (14)..(539): Homolog of NCBI NO: 15226830 NR Description: FAD-linked oxidoreductase family; protein id: [Arabidopsis thaliana] >gi|7485805|pir||T00461 probable berberine
  misc_feature (15)..(539): Homolog of NCBI NO: 15220954 NR Description: FAD-linked oxidoreductase family; protein id: supported by cDNA: gi_16323166, supported by cDNA: gi_16323166 thaliana] >gi|16323167|gb|AAL15318.1| At1g30760/T5I8_22
  misc_feature (15)..(434): Homolog of NCBI NO: 25528573 NR Description: hypothetical protein T5I8.22 [imported] - thaliana >gi|4587532|gb|AAD25763.1|AC007060_21 Strong similarity F19I3.2 gi|3033375 putative berberine bridge enzyme from
  misc_feature (11)..(540): Homolog of NCBI NO: 18652400 NR Description: carbohydrate oxidase [Helianthus annuus]
  misc_feature (7)..(540): Homolog of NCBI NO: 13161397 NR Description: CPRD2 [Vigna unguiculata]
  misc_feature (24)..(540): Homolog of NCBI NO: 18652398 NR Description: carbohydrate oxidase [Lactuca sativa]
MGNSKPLPTISCISVFALYFSFYTITLTSSTSLQDDFIKCLYRNTNVRFTLDKTFFTPERNASIFTEVLESTAQNQRYLTKTMPKPGFIFKPVHESHVQASVICSKKLEIHFRVRSGGHDYEGVSYVSQIEKPFVLIDLSKLRQINVDIKDTSAWVEAGATVGELYYRIAEKSKFHGFPAGVYPSLGIGGHITGGAYGSLMRKYGLAADNVLDAKIVDANGKLLDRASMGEDLFWAIRGGSGGSFGIILSWKIKLVPVPETLTVFTVTKTFEQDRSFKILSKWQEIADNLVDELFLRVFFTVSGNKANKTVTMAYIGQFLGEKGTLMEVMKKDFPELGLTQKDCIEMSWIDSIIYNSGFPTNPPPPIEILLQAKSPIGKVYFKGKSDFAKKPIPVLGLEGMFKKLLEEDAALVIWTPYGGKMDKIPESEIPFPHRNGTNFMIQYYRSWSDSEKRPNRRTKWIRELYGYMTPYVSSNPRQAYVNYRDLDLGQNKDNSKSNFIEAKIWGANYFKDNFNRLVRIKSKVDPDNFFRHEQSIPTLPV

SEQ ID NO: 81460 - protein, 460 aa, Arabidopsis thaliana
  peptide (1)..(460): Ceres Seq. ID no. 12659857
  misc_feature (4)..(161): Pfam Name: FAD binding domain Pfam Description: FAD binding domain
  misc_feature (1)..(460): Homolog of NCBI NO: 15241478 NR Description: FAD-linked oxidoreductase family; protein id:
  misc_feature (1)..(460): Homolog of NCBI NO: 16648925 NR Description: berberine bridge enzyme-like protein [Arabidopsis
  misc_feature (1)..(459): Homolog of NCBI NO: 15241476 NR Description: FAD-linked oxidoreductase family; protein id:
  misc_feature (1)..(458): Homolog of NCBI NO: 15241494 NR Description: FAD-linked oxidoreductase family; protein id: supported by cDNA: gi_18176301 [Arabidopsis thaliana]
  misc_feature (1)..(457): Homolog of NCBI NO: 15226830 NR Description: FAD-linked oxidoreductase family; protein id: [Arabidopsis thaliana] >gi|7485805|pir||T00461 probable berberine
  misc_feature (1)..(457): Homolog of NCBI NO: 15220954 NR Description: FAD-linked oxidoreductase family; protein id: supported by cDNA: gi_16323166, supported by cDNA: gi_16323166 thaliana] >gi|16323167|gb|AAL15318.1| At1g30760/T5I8_22
  misc_feature (1)..(352): Homolog of NCBI NO: 25528573 NR Description: hypothetical protein T5I8.22 [imported] - thaliana >gi|4587532|gb|AAD25763.1|AC007060_21 Strong similarity F19I3.2 gi|3033375 putative berberine bridge enzyme from
  misc_feature (1)..(458): Homolog of NCBI NO: 18652400 NR Description: carbohydrate oxidase [Helianthus annuus]
  misc_feature (1)..(458): Homolog of NCBI NO: 13161397 NR Description: CPRD2 [Vigna unguiculata]
  misc_feature (1)..(458): Homolog of NCBI NO: 18652398 NR Description: carbohydrate oxidase [Lactuca sativa]
MPKPGFIFKPVHESHVQASVICSKKLEIHFRVRSGGHDYEGVSYVSQIEKPFVLIDLSKLRQINVDIKDTSAWVEAGATVGELYYRIAEKSKFHGFPAGVYPSLGIGGHITGGAYGSLMRKYGLAADNVLDAKIVDANGKLLDRASMGEDLFWAIRGGSGGSFGIILSWKIKLVPVPETLTVFTVTKTFEQDRSFKILSKWQEIADNLVDELFLRVFFTVSGNKANKTVTMAYIGQFLGEKGTLMEVMKKDFPELGLTQKDCIEMSWIDSIIYNSGFPTNPPPPIEILLQAKSPIGKVYFKGKSDFAKKPIPVLGLEGMFKKLLEEDAALVIWTPYGGKMDKIPESEIPFPHRNGTNFMIQYYRSWSDSEKRPNRRTKWIRELYGYMTPYVSSNPRQAYVNYRDLDLGQNKDNSKSNFIEAKIWGANYFKDNFNRLVRIKSKVDPDNFFRHEQSIPTLPV

SEQ ID NO: 81461 - protein, 342 aa, Arabidopsis thaliana
  peptide (1)..(342): Ceres Seq. ID no. 12659858
  misc_feature (1)..(342): Homolog of NCBI NO: 15241478 NR Description: FAD-linked oxidoreductase family; protein id:
  misc_feature (1)..(342): Homolog of NCBI NO: 16648925 NR Description: berberine bridge enzyme-like protein [Arabidopsis
  misc_feature (1)..(341): Homolog of NCBI NO: 15241476 NR Description: FAD-linked oxidoreductase family; protein id:
  misc_feature (1)..(340): Homolog of NCBI NO: 15241494 NR Description: FAD-linked oxidoreductase family; protein id: supported by cDNA: gi_18176301 [Arabidopsis thaliana]
  misc_feature (1)..(339): Homolog of NCBI NO: 15226830 NR Description: FAD-linked oxidoreductase family; protein id: [Arabidopsis thaliana] >gi|7485805|pir||T00461 probable berberine
  misc_feature (1)..(339): Homolog of NCBI NO: 15220954 NR Description: FAD-linked oxidoreductase family; protein id: supported by cDNA: gi_16323166, supported by cDNA: gi_16323166 thaliana] >gi|16323167|gb|AAL15318.1| At1g30760/T5I8_22
  misc_feature (1)..(234): Homolog of NCBI NO: 25528573 NR Description: hypothetical protein T5I8.22 [imported] - thaliana >gi|4587532|gb|AAD25763.1|AC007060_21 Strong similarity F19I3.2 gi|3033375 putative berberine bridge enzyme from
  misc_feature (1)..(340): Homolog of NCBI NO: 18652400 NR Description: carbohydrate oxidase [Helianthus annuus]
  misc_feature (1)..(340): Homolog of NCBI NO: 13161397 NR Description: CPRD2 [Vigna unguiculata]
  misc_feature (1)..(340): Homolog of NCBI NO: 18652398 NR Description: carbohydrate oxidase [Lactuca sativa]
MRKYGLAADNVLDAKIVDANGKLLDRASMGEDLFWAIRGGSGGSFGIILSWKIKLVPVPETLTVFTVTKTFEQDRSFKILSKWQEIADNLVDELFLRVFFTVSGNKANKTVTMAYIGQFLGEKGTLMEVMKKDFPELGLTQKDCIEMSWIDSIIYNSGFPTNPPPPIEILLQAKSPIGKVYFKGKSDFAKKPIPVLGLEGMFKKLLEEDAALVIWTPYGGKMDKIPESEIPFPHRNGTNFMIQYYRSWSDSEKRPNRRTKWIRELYGYMTPYVSSNPRQAYVNYRDLDLGQNKDNSKSNFIEAKIWGANYFKDNFNRLVRIKSKVDPDNFFRHEQSIPTLPV

SEQ ID NO: 81462 - DNA, 1904 bp, Arabidopsis thaliana
  misc_feature (1)..(1904): Ceres Seq. ID no. 12659859
  misc_feature: MA Experiment ID: 20000169 Result: Down-regulated in Transcription
  misc_feature: MA Experiment 20000169 PARAMETER Experiment Name: At_100uM_ABA_P Parameter: Age (day) Value: 14
  misc_feature: MA Experiment 20000169 PARAMETER Experiment Name: At_100uM_ABA_P Parameter: Organism Value: A. thaliana
  misc_feature: MA Experiment 20000169 PARAMETER Experiment Name: At_100uM_ABA_P Parameter: Plant Line Value: WS
  misc_feature: MA Experiment 20000169 PARAMETER Experiment Name: At_100uM_ABA_P Parameter: Timepoint (hr) Value: 6
  misc_feature: MA Experiment 20000169 PARAMETER Experiment Name: At_100uM_ABA_P Parameter: Tissue Value: Aerial
  misc_feature: MA Experiment 20000169 PARAMETER Experiment Name: At_100uM_ABA_P Parameter: Treatment Value: 100uM ABA vs. No Treatment
  misc_feature: MA Experiment ID: 20000171 Result: Down-regulated in Transcription
  misc_feature: MA Experiment 20000171 PARAMETER Experiment Name: At_42deg_Heat_P Parameter: Age (day) Value: 14
  misc_feature: MA Experiment 20000171 PARAMETER Experiment Name: At_42deg_Heat_P Parameter: Organism Value: A. thaliana
  misc_feature: MA Experiment 20000171 PARAMETER Experiment Name: At_42deg_Heat_P Parameter: Plant Line Value: WS
  misc_feature: MA Experiment 20000171 PARAMETER Experiment Name: At_42deg_Heat_P Parameter: Temperature (deg C) Value: 42 vs. 22
  misc_feature: MA Experiment 20000171 PARAMETER Experiment Name: At_42deg_Heat_P Parameter: Timepoint (hr) Value: 1
  misc_feature: MA Experiment 20000171 PARAMETER Experiment Name: At_42deg_Heat_P Parameter: Tissue Value: Aerial
  misc_feature: MA Experiment ID: 20000173 Result: Down-regulated in Transcription
  misc_feature: MA Experiment 20000173 PARAMETER Experiment Name: At_42deg_Heat_P Parameter: Age (day) Value: 14
  misc_feature: MA Experiment 20000173 PARAMETER Experiment Name: At_42deg_Heat_P Parameter: Organism Value: A. thaliana
  misc_feature: MA Experiment 20000173 PARAMETER Experiment Name: At_42deg_Heat_P Parameter: Plant Line Value: WS
  misc_feature: MA Experiment 20000173 PARAMETER Experiment Name: At_42deg_Heat_P Parameter: Temperature (deg C) Value: 42 vs. 22
  misc_feature: MA Experiment 20000173 PARAMETER Experiment Name: At_42deg_Heat_P Parameter: Timepoint (hr) Value: 6
  misc_feature: MA Experiment 20000173 PARAMETER Experiment Name: At_42deg_Heat_P Parameter: Tissue Value: Aerial
  misc_feature: MA Experiment ID: 20000185 Result: Down-regulated in Transcription
  misc_feature: MA Experiment 20000185 PARAMETER Experiment Name: At_Roots__P Parameter: Age (day) Value: 7 vs. 21
  misc_feature: MA Experiment 20000185 PARAMETER Experiment Name: At_Roots__P Parameter: Organism Value: A. thaliana
  misc_feature: MA Experiment 20000185 PARAMETER Experiment Name: At_Roots__P Parameter: Tissue Value: Roots vs. Whole Plant
  misc_feature: MA Experiment ID: 20000264 Result: Down-regulated in Transcription
  misc_feature: MA Experiment 20000264 PARAMETER Experiment Name: At_Open_Flower_P Parameter: Age (day) Value: 21
  misc_feature: MA Experiment 20000264 PARAMETER Experiment Name: At_Open_Flower_P Parameter: Plant Line Value: WS
  misc_feature: MA Experiment 20000264 PARAMETER Experiment Name: At_Open_Flower_P Parameter: Tissue Value: Open Flower vs. Whole Plant
  misc_feature: MA Experiment ID: 20000265 Result: Up-regulated in Transcription
  misc_feature: MA Experiment 20000265 PARAMETER Experiment Name: At_Open_Flower_P Parameter: Age (day) Value: 21
  misc_feature: MA Experiment 20000265 PARAMETER Experiment Name: At_Open_Flower_P Parameter: Plant Line Value: WS
  misc_feature: MA Experiment 20000265 PARAMETER Experiment Name: At_Open_Flower_P Parameter: Tissue Value: Closed Flower vs. Whole Plant
  misc_feature: MA Experiment ID: 20000286 Result: Up-regulated in Transcription
  misc_feature: MA Experiment 20000286 PARAMETER Experiment Name: At_Open_Flower_P Parameter: Age (day) Value: 21
  misc_feature: MA Experiment 20000286 PARAMETER Experiment Name: At_Open_Flower_P Parameter: Plant Line Value: WS
  misc_feature: MA Experiment 20000286 PARAMETER Experiment Name: At_Open_Flower_P Parameter: Tissue Value: Half Open vs. Whole Plant
  misc_feature: MA Experiment ID: 20000437 Result: Down-regulated in Transcription
  misc_feature: MA Experiment 20000437 PARAMETER Experiment Name: At_Drought_P Parameter: Age (day) Value: 8
  misc_feature: MA Experiment 20000437 PARAMETER Experiment Name: At_Drought_P Parameter: Organism Value: A. thaliana
  misc_feature: MA Experiment 20000437 PARAMETER Experiment Name: At_Drought_P Parameter: Plant Line Value: WS
  misc_feature: MA Experiment 20000437 PARAMETER Experiment Name: At_Drought_P Parameter: Timepoint (hr) Value: 24
  misc_feature: MA Experiment 20000437 PARAMETER Experiment Name: At_Drought_P Parameter: Tissue Value: Whole Plant
  misc_feature: MA Experiment 20000437 PARAMETER Experiment Name: At_Drought_P Parameter: Treatment Value: Drought vs. No Drought
  misc_feature: MA Experiment ID: 20000438 Result: Up-regulated in Transcription
  misc_feature: MA Experiment 20000438 PARAMETER Experiment Name: At_Shoots__P Parameter: Age (day) Value: 14
  misc_feature: MA Experiment 20000438 PARAMETER Experiment Name: At_Shoots__P Parameter: Tissue Value: Shoots vs. Whole Plant
  misc_feature: MA Experiment ID: 20000439 Result: Up-regulated in Transcription
  misc_feature: MA Experiment 20000439 PARAMETER Experiment Name: At_Roots__P Parameter: Age (day) Value: 14 vs. 21
  misc_feature: MA Experiment 20000439 PARAMETER Experiment Name: At_Roots__P Parameter: Organism Value: A. thaliana
  misc_feature: MA Experiment 20000439 PARAMETER Experiment Name: At_Roots__P Parameter: Tissue Value: Roots vs. Whole Plant
  misc_feature: MA Experiment ID: 20000451 Result: Up-regulated in Transcription
  misc_feature: MA Experiment 20000451 PARAMETER Experiment Name: At_CS6879_Shoots-Roots_P Parameter: Age (day) Value: 14
  misc_feature: MA Experiment 20000451 PARAMETER Experiment Name: At_CS6879_Shoots-Roots_P Parameter: Organism Value: A. thaliana
  misc_feature: MA Experiment 20000451 PARAMETER Experiment Name: At_CS6879_Shoots-Roots_P Parameter: Plant Line Value: CS6879 vs. WS
  misc_feature: MA Experiment 20000451 PARAMETER Experiment Name: At_CS6879_Shoots-Roots_P Parameter: Tissue Value: Roots
  misc_feature: MA Experiment ID: 20000495 Result: Up-regulated in Transcription
  misc_feature: MA Experiment 20000495 PARAMETER Experiment Name: At_Guard_Cells_P Parameter: Harvest Date Value: 8/2/2002
  misc_feature: MA Experiment 20000495 PARAMETER Experiment Name: At_Guard_Cells_P Parameter: Organism Value: A. thaliana
  misc_feature: MA Experiment 20000495 PARAMETER Experiment Name: At_Guard_Cells_P Parameter: Tissue Value: Guard Cells vs. Leaves
  misc_feature: MA Experiment ID: 20000573 Result: Down-regulated in Transcription
  misc_feature: MA Experiment 20000573 PARAMETER Experiment Name: At_100uM_ABA_Mutants__P Parameter: Organism Value: A. thaliana
  misc_feature: MA Experiment 20000573 PARAMETER Experiment Name: At_100uM_ABA_Mutants__P Parameter: Plant Line Value: CS22 vs. Ler wt
  misc_feature: MA Experiment 20000573 PARAMETER Experiment Name: At_100uM_ABA_Mutants__P Parameter: Timepoint (hr) Value: N/A
  misc_feature: MA Experiment 20000573 PARAMETER Experiment Name: At_100uM_ABA_Mutants__P Parameter: Tissue Value: Whole Plant
  misc_feature: MA Experiment 20000573 PARAMETER Experiment Name: At_100uM_ABA_Mutants__P Parameter: Treatment Value: None
  misc_feature: MA Experiment ID: 20001248 Result: Down-regulated in Transcription
  misc_feature: MA Experiment 20001248 PARAMETER Experiment Name: At_Far-red-induction_P Parameter: Age (day) Value: 7
  misc_feature: MA Experiment 20001248 PARAMETER Experiment Name: At_Far-red-induction_P Parameter: Light Value: Far-red vs. White
  misc_feature: MA Experiment 20001248 PARAMETER Experiment Name: At_Far-red-induction_P Parameter: Organism Value: A. thaliana
  misc_feature: MA Experiment 20001248 PARAMETER Experiment Name: At_Far-red-induction_P Parameter: Plant Line Value: Columbia
  misc_feature: MA Experiment 20001248 PARAMETER Experiment Name: At_Far-red-induction_P Parameter: Timepoint (hr) Value: 4
  misc_feature: MA Experiment 20001248 PARAMETER Experiment Name: At_Far-red-induction_P Parameter: Tissue Value: Whole Plant
  misc_feature: MA Experiment ID: 20001450 Result: Down-regulated in Transcription
  misc_feature: MA Experiment 20001450 PARAMETER Experiment Name: At_Far-red-induction_P Parameter: Age (day) Value: 7
  misc_feature: MA Experiment 20001450 PARAMETER Experiment Name: At_Far-red-induction_P Parameter: Light Value: Far-red vs. White
  misc_feature: MA Experiment 20001450 PARAMETER Experiment Name: At_Far-red-induction_P Parameter: Organism Value: A. thaliana
  misc_feature: MA Experiment 20001450 PARAMETER Experiment Name: At_Far-red-induction_P Parameter: Plant Line Value: Columbia
  misc_feature: MA Experiment 20001450 PARAMETER Experiment Name: At_Far-red-induction_P Parameter: Timepoint (hr) Value: 8
  misc_feature: MA Experiment 20001450 PARAMETER Experiment Name: At_Far-red-induction_P Parameter: Tissue Value: Whole Plant
  misc_feature: MA Experiment ID: 20001451 Result: Down-regulated in Transcription
  misc_feature: MA Experiment 20001451 PARAMETER Experiment Name: At_Far-red-induction_P Parameter: Age (day) Value: 7
  misc_feature: MA Experiment 20001451 PARAMETER Experiment Name: At_Far-red-induction_P Parameter: Light Value: Far-red vs. White
  misc_feature: MA Experiment 20001451 PARAMETER Experiment Name: At_Far-red-induction_P Parameter: Organism Value: A. thaliana
  misc_feature: MA Experiment 20001451 PARAMETER Experiment Name: At_Far-red-induction_P Parameter: Plant Line Value: Columbia
  misc_feature: MA Experiment 20001451 PARAMETER Experiment Name: At_Far-red-induction_P Parameter: Timepoint (hr) Value: 24
  misc_feature: MA Experiment 20001451 PARAMETER Experiment Name: At_Far-red-induction_P Parameter: Tissue Value: Whole Plant
aacaccacactagtcacacacttaaatgttcttccgcctttgacgccttaatctcatctccacaacccttgcagtcaagttgatgctgttgggatcaaagagtagcaaacaatacgagagcagaagaacttacttatagaaaaaaatgggaatttcaaaaccactccctctattttcgattttagtcctctatttttcactctacaccattacaccaacttcttcattagcctccctccaagatcaattcatcaactgtgtccaaagaaacacacatgtttacttcccacttgagaaaacgttctttgctcctacaaaaaatgtctctatgttcagccaagttcttgaatcgacggctcaaaatctccggttcttgaaaaaatccatgcctaaaccgggattcatattcagccctattcacgagtctcacgtacaagcttccatcatttgttccaagaaactccgaatgcatctccgtgtcagaagcggcggtcacgactacgaaggcttgtcttatgtctctcagatcgataaaccgtttatattgatggatctgtcaaagatgagacaggtcaacattaatattcaagacaacagtgcttgggttcaatctggtgccactgttggtgaactttattacaggattgcggagaagagcaaagtccatgggttcccggcgggtttgtgctcgagcttaggcataggaggacacataacaggcggtgcgtacggttccatgatgcggaaatatggtctaggtgcagacaatgttctagacgcaaagattgttgatgccaacggtaaattactcgatagagccgcgatgggtgaggatacattttgggctattagaggaggcgctggagggagttttgggataattctagcatggaagatcaagcttgttcctgttcctaagaccgtgaccgtctttaccgtcaccaaaacgttacaacaagacgtgggtaacaagattatctcaaagtggcaaagagttgcggacaagcttgttgaagagctattcatcagagtgctcttcaacgtagctggaaccggtgggaacaagactgtgacgacgtcgtacaatgctctgtttcttggcgggaaaggaacgctgatgaacgttatgaagaagagtttccccgagctagggctaacatttaaagattgtatcgaaatgagctggcttgaatccattgcttacatttctggattcccgacccacacgcctactaatgttttgcttcaagggaagtctccgttcccaaaggtcagcttcaaagccaaatcggatttcgtgaaaaccccgattcccgaatccgggcttcaagggatcttcaagaagctacttaaagaagatattccattgatgatatggaatccttacggaggaatgatggcgaaaatccccgaatcccaaatcccttttccgcatcgaaaaggagtcctcttcaaggttcagtacgtaacaagttggctagacagtgacaagagaccgagcagacacatcaactggatcagagatctctatagttacatgacgccttatgtctcaagtaacccacgagaagcttacgtgaactaccgtgatttagacctgggaaggaacacgaaagacgtgaaaacatgcatcaaacaagctcaagtctggggagctaactacttcaaaaacaatttcaacagattgatgatgattaaagcaaaggttgatccagagaacttctttagacacgagcagagcattccacctatgatgtaacgaggtcaatcaaataagaataaattagaagaaaatcagataatggttcttctgtatttcggaaaaatgttattctagctatgcttgtagtagtactatgtttcacctaaaattcgatatgttgcttcttagtacctaattcttc

SEQ ID NO: 81463 - protein, 537 aa, Arabidopsis thaliana
  peptide (1)..(537): Ceres Seq. ID no. 12659860
  misc_feature (84)..(241): Pfam Name: FAD binding domain Pfam Description: FAD binding domain
  misc_feature (1)..(537): Homolog of NCBI NO: 15241494 NR Description: FAD-linked oxidoreductase family; protein id: supported by cDNA: gi_18176301 [Arabidopsis thaliana]
  misc_feature (1)..(536): Homolog of NCBI NO: 15241478 NR Description: FAD-linked oxidoreductase family; protein id:
  misc_feature (1)..(536): Homolog of NCBI NO: 16648925 NR Description: berberine bridge enzyme-like protein [Arabidopsis
  misc_feature (1)..(536): Homolog of NCBI NO: 15241476 NR Description: FAD-linked oxidoreductase family; protein id:
  misc_feature (9)..(534): Homolog of NCBI NO: 15226830 NR Description: FAD-linked oxidoreductase family; protein id: [Arabidopsis thaliana] >gi|7485805|pir||T00461 probable berberine
  misc_feature (10)..(534): Homolog of NCBI NO: 15220954 NR Description: FAD-linked oxidoreductase family; protein id: supported by cDNA: gi_16323166, supported by cDNA: gi_16323166 thaliana] >gi|16323167|gb|AAL15318.1| At1g30760/T5I8_22
  misc_feature (10)..(430): Homolog of NCBI NO: 25528573 NR Description: hypothetical protein T5I8.22 [imported] - thaliana >gi|4587532|gb|AAD25763.1|AC007060_21 Strong similarity F19I3.2 gi|3033375 putative berberine bridge enzyme from
  misc_feature (11)..(536): Homolog of NCBI NO: 18652400 NR Description: carbohydrate oxidase [Helianthus annuus]
  misc_feature (9)..(536): Homolog of NCBI NO: 18652398 NR Description: carbohydrate oxidase [Lactuca sativa]
  misc_feature (5)..(537): Homolog of NCBI NO: 15241474 NR Description: FAD-linked oxidoreductase family; protein id: [Arabidopsis thaliana] >gi|10176891|dbj|BAB10121.1| berberine
MGISKPLPLFSILVLYFSLYTITPTSSLASLQDQFINCVQRNTHVYFPLEKTFFAPTKNVSMFSQVLESTAQNLRFLKKSMPKPGFIFSPIHESHVQASIICSKKLRMHLRVRSGGHDYEGLSYVSQIDKPFILMDLSKMRQVNINIQDNSAWVQSGATVGELYYRIAEKSKVHGFPAGLCSSLGIGGHITGGAYGSMMRKYGLGADNVLDAKIVDANGKLLDRAAMGEDTFWAIRGGAGGSFGIILAWKIKLVPVPKTVTVFTVTKTLQQDVGNKIISKWQRVADKLVEELFIRVLFNVAGTGGNKTVTTSYNALFLGGKGTLMNVMKKSFPELGLTFKDCIEMSWLESIAYISGFPTHTPTNVLLQGKSPFPKVSFKAKSDFVKTPIPESGLQGIFKKLLKEDIPLMIWNPYGGMMAKIPESQIPFPHRKGVLFKVQYVTSWLDSDKRPSRHINWIRDLYSYMTPYVSSNPREAYVNYRDLDLGRNTKDVKTCIKQAQVWGANYFKNNFNRLMMIKAKVDPENFFRHEQSIPPMM

SEQ ID NO: 81464 - protein, 476 aa, Arabidopsis thaliana
  peptide (1)..(476): Ceres Seq. ID no. 12659861
  misc_feature (23)..(180): Pfam Name: FAD binding domain Pfam Description: FAD binding domain
  misc_feature (1)..(476): Homolog of NCBI NO: 15241494 NR Description: FAD-linked oxidoreductase family; protein id: supported by cDNA: gi_18176301 [Arabidopsis thaliana]
  misc_feature (1)..(475): Homolog of NCBI NO: 15241478 NR Description: FAD-linked oxidoreductase family; protein id:
  misc_feature (1)..(475): Homolog of NCBI NO: 16648925 NR Description: berberine bridge enzyme-like protein [Arabidopsis
  misc_feature (1)..(475): Homolog of NCBI NO: 15241476 NR Description: FAD-linked oxidoreductase family; protein id:
  misc_feature (1)..(473): Homolog of NCBI NO: 15226830 NR Description: FAD-linked oxidoreductase family; protein id: [Arabidopsis thaliana] >gi|7485805|pir||T00461 probable berberine
  misc_feature (1)..(473): Homolog of NCBI NO: 15220954 NR Description: FAD-linked oxidoreductase family; protein id: supported by cDNA: gi_16323166, supported by cDNA: gi_16323166 thaliana] >gi|16323167|gb|AAL15318.1| At1g30760/T5I8_22
  misc_feature (1)..(369): Homolog of NCBI NO: 25528573 NR Description: hypothetical protein T5I8.22 [imported] - thaliana >gi|4587532|gb|AAD25763.1|AC007060_21 Strong similarity F19I3.2 gi|3033375 putative berberine bridge enzyme from
  misc_feature (1)..(475): Homolog of NCBI NO: 18652400 NR Description: carbohydrate oxidase [Helianthus annuus]
  misc_feature (1)..(475): Homolog of NCBI NO: 18652398 NR Description: carbohydrate oxidase [Lactuca sativa]
  misc_feature (1)..(476): Homolog of NCBI NO: 15241474 NR Description: FAD-linked oxidoreductase family; protein id: [Arabidopsis thaliana] >gi|10176891|dbj|BAB10121.1| berberine
MFSQVLESTAQNLRFLKKSMPKPGFIFSPIHESHVQASIICSKKLRMHLRVRSGGHDYEGLSYVSQIDKPFILMDLSKMRQVNINIQDNSAWVQSGATVGELYYRIAEKSKVHGFPAGLCSSLGIGGHITGGAYGSMMRKYGLGADNVLDAKIVDANGKLLDRAAMGEDTFWAIRGGAGGSFGIILAWKIKLVPVPKTVTVFTVTKTLQQDVGNKIISKWQRVADKLVEELFIRVLFNVAGTGGNKTVTTSYNALFLGGKGTLMNVMKKSFPELGLTFKDCIEMSWLESIAYISGFPTHTPTNVLLQGKSPFPKVSFKAKSDFVKTPIPESGLQGIFKKLLKEDIPLMIWNPYGGMMAKIPESQIPFPHRKGVLFKVQYVTSWLDSDKRPSRHINWIRDLYSYMTPYVSSNPREAYVNYRDLDLGRNTKDVKTCIKQAQVWGANYFKNNFNRLMMIKAKVDPENFFRHEQSIPPMM

SEQ ID NO: 81465 - protein, 457 aa, Arabidopsis thaliana
  peptide (1)..(457): Ceres Seq. ID no. 12659862
  misc_feature (4)..(161): Pfam Name: FAD binding domain Pfam Description: FAD binding domain
  misc_feature (1)..(457): Homolog of NCBI NO: 15241494 NR Description: FAD-linked oxidoreductase family; protein id: supported by cDNA: gi_18176301 [Arabidopsis thaliana]
  misc_feature (1)..(456): Homolog of NCBI NO: 15241478 NR Description: FAD-linked oxidoreductase family; protein id:
  misc_feature (1)..(456): Homolog of NCBI NO: 16648925 NR Description: berberine bridge enzyme-like protein [Arabidopsis
  misc_feature (1)..(456): Homolog of NCBI NO: 15241476 NR Description: FAD-linked oxidoreductase family; protein id:
  misc_feature (1)..(454): Homolog of NCBI NO: 15226830 NR Description: FAD-linked oxidoreductase family; protein id: [Arabidopsis thaliana] >gi|7485805|pir||T00461 probable berberine
  misc_feature (1)..(454): Homolog of NCBI NO: 15220954 NR Description: FAD-linked oxidoreductase family; protein id: supported by cDNA: gi_16323166, supported by cDNA: gi_16323166 thaliana] >gi|16323167|gb|AAL15318.1| At1g30760/T5I8_22
  misc_feature (1)..(350): Homolog of NCBI NO: 25528573 NR Description: hypothetical protein T5I8.22 [imported] - thaliana >gi|4587532|gb|AAD25763.1|AC007060_21 Strong similarity F19I3.2 gi|3033375 putative berberine bridge enzyme from
  misc_feature (1)..(456): Homolog of NCBI NO: 18652400 NR Description: carbohydrate oxidase [Helianthus annuus]
  misc_feature (1)..(456): Homolog of NCBI NO: 18652398 NR Description: carbohydrate oxidase [Lactuca sativa]
  misc_feature (1)..(457): Homolog of NCBI NO: 15241474 NR Description: FAD-linked oxidoreductase family; protein id: [Arabidopsis thaliana] >gi|10176891|dbj|BAB10121.1| berberine
MPKPGFIFSPIHESHVQASIICSKKLRMHLRVRSGGHDYEGLSYVSQIDKPFILMDLSKMRQVNINIQDNSAWVQSGATVGELYYRIAEKSKVHGFPAGLCSSLGIGGHITGGAYGSMMRKYGLGADNVLDAKIVDANGKLLDRAAMGEDTFWAIRGGAGGSFGIILAWKIKLVPVPKTVTVFTVTKTLQQDVGNKIISKWQRVADKLVEELFIRVLFNVAGTGGNKTVTTSYNALFLGGKGTLMNVMKKSFPELGLTFKDCIEMSWLESIAYISGFPTHTPTNVLLQGKSPFPKVSFKAKSDFVKTPIPESGLQGIFKKLLKEDIPLMIWNPYGGMMAKIPESQIPFPHRKGVLFKVQYVTSWLDSDKRPSRHINWIRDLYSYMTPYVSSNPREAYVNYRDLDLGRNTKDVKTCIKQAQVWGANYFKNNFNRLMMIKAKVDPENFFRHEQSIPPMM

SEQ ID NO: 81466 - DNA, 546 bp, Arabidopsis thaliana
  misc_feature (1)..(546): Ceres Seq. ID no. 12659875
  misc_feature: MA Experiment ID: 20000306 Result: Up-regulated in Transcription
  misc_feature: MA Experiment 20000306 PARAMETER Experiment Name: At_Germinating_Seeds_Sub_P Parameter: Age (hr) Value: 6 vs. 0
  misc_feature: MA Experiment 20000306 PARAMETER Experiment Name: At_Germinating_Seeds_Sub_P Parameter: Organism Value: A. thaliana
  misc_feature: MA Experiment 20000306 PARAMETER Experiment Name: At_Germinating_Seeds_Sub_P Parameter: Plant Line Value: WS
  misc_feature: MA Experiment 20000306 PARAMETER Experiment Name: At_Germinating_Seeds_Sub_P Parameter: Tissue Value: Germinating Seeds
  misc_feature: MA Experiment ID: 20000307 Result: Up-regulated in Transcription
  misc_feature: MA Experiment 20000307 PARAMETER Experiment Name: At_Germinating_Seeds_Sub_P Parameter: Age (hr) Value: 24 vs. 0
  misc_feature: MA Experiment 20000307 PARAMETER Experiment Name: At_Germinating_Seeds_Sub_P Parameter: Organism Value: A. thaliana
  misc_feature: MA Experiment 20000307 PARAMETER Experiment Name: At_Germinating_Seeds_Sub_P Parameter: Plant Line Value: WS
  misc_feature: MA Experiment 20000307 PARAMETER Experiment Name: At_Germinating_Seeds_Sub_P Parameter: Tissue Value: Germinating Seeds
  misc_feature: MA Experiment ID: 20000314 Result: Up-regulated in Transcription
  misc_feature: MA Experiment 20000314 PARAMETER Experiment Name: At_14day_Shoots-Roots_Sub_P Parameter: Age (day) Value: 14
  misc_feature: MA Experiment 20000314 PARAMETER Experiment Name: At_14day_Shoots-Roots_Sub_P Parameter: Organism Value: A. thaliana
  misc_feature: MA Experiment 20000314 PARAMETER Experiment Name: At_14day_Shoots-Roots_Sub_P Parameter: Plant Line Value: WS
  misc_feature: MA Experiment 20000314 PARAMETER Experiment Name: At_14day_Shoots-Roots_Sub_P Parameter: Tissue Value: Roots vs. Whole Plant
  misc_feature: MA Experiment ID: 20000347 Result: Up-regulated in Transcription
  misc_feature: MA Experiment 20000347 PARAMETER Experiment Name: At_2mM_SA_Sub_P Parameter: Age (day) Value: 14
  misc_feature: MA Experiment 20000347 PARAMETER Experiment Name: At_2mM_SA_Sub_P Parameter: Organism Value: A. thaliana
  misc_feature: MA Experiment 20000347 PARAMETER Experiment Name: At_2mM_SA_Sub_P Parameter: Plant Line Value: WS
  misc_feature: MA Experiment 20000347 PARAMETER Experiment Name: At_2mM_SA_Sub_P Parameter: Timepoint (hr) Value: 6
  misc_feature: MA Experiment 20000347 PARAMETER Experiment Name: At_2mM_SA_Sub_P Parameter: Tissue Value: Aerial
  misc_feature: MA Experiment 20000347 PARAMETER Experiment Name: At_2mM_SA_Sub_P Parameter: Treatment Value: 2mM SA vs. No Treatment
atggagatcaataacgagaagaagaaactctcaagacaatcttcttccttcagactacgaagtccaagtctaaacgctcttcgtctccaccgagtctttgacctattcgacaaaaataacgatggattcataaccgtcgaagaactaagtcaagcactctcaagactcggtctcgacgctgatttctccgatctcaagtcaacagttgattctttcatcaaaccggacaaaaccggactccggttcgatgactttgctgcactccacaaaaccttagacgaatctttctttggaggagaaggaagttgctgtgatgggtctccggaatcagatcttgaagaagcttttaatgtgttcgatgaagacggagatggttttatctccgctgtggaattgcaaaaggttttgaagaagcttggattacctgaagcaggagagattgaacaagtggagaagatgattgtctctgttgatagtaatcatgatggtcgcgttgactttttcgaattcaagaacatgatgcaaactgttgttgttccttcttga

SEQ ID NO: 81467 - protein, 181 aa, Arabidopsis thaliana
  peptide (1)..(181): Ceres Seq. ID no. 12659876
  misc_feature (149)..(177): Pfam Name: EF hand Pfam Description: EF hand
  misc_feature (1)..(181): Homolog of NCBI NO: 15241500 NR Description: calmodulin-like protein; protein id: At5g44460.1
  misc_feature (4)..(181): Homolog of NCBI NO: 15233402 NR Description: calcium-binding protein - like; protein id:
  misc_feature (14)..(181): Homolog of NCBI NO: 1168782 NR Description: Calcium-binding protein CAST
  misc_feature (8)..(181): Homolog of NCBI NO: 12003380 NR Description: Avr9/Cf-9 rapidly elicited protein 31 [Nicotiana
  misc_feature (8)..(181): Homolog of NCBI NO: 1168696 NR Description: Calcium-binding allergen Bet v 3 (Bet v III)
  misc_feature (7)..(179): Homolog of NCBI NO: 29467539 NR Description: P0665F09.7 [Oryza sativa (japonica
  misc_feature (7)..(179): Homolog of NCBI NO: 13194672 NR Description: calmodulin-like protein [Pennisetum ciliare]
  misc_feature (14)..(179): Homolog of NCBI NO: 33146667 NR Description: putative Avr9/Cf-9 rapidly elicited protein 31
  misc_feature (15)..(175): Homolog of NCBI NO: 18406202 NR Description: putative calcium binding protein; protein id: supported by cDNA: 31535., supported by cDNA: gi_17065477, by cDNA: gi_20148490, supported by cDNA: gi_9965746 [Arabidopsis
  misc_feature (15)..(175): Homolog of NCBI NO: 25295758 NR Description: probable calcium binding protein [imported] -
MEINNEKKKLSRQSSSFRLRSPSLNALRLHRVFDLFDKNNDGFITVEELSQALSRLGLDADFSDLKSTVDSFIKPDKTGLRFDDFAALHKTLDESFFGGEGSCCDGSPESDLEEAFNVFDEDGDGFISAVELQKVLKKLGLPEAGEIEQVEKMIVSVDSNHDGRVDFFEFKNMMQTVVVPS

SEQ ID NO: 81468 - DNA, 2172 bp, Arabidopsis thaliana
  misc_feature (1)..(2172): Ceres Seq. ID no. 12659900
  misc_feature: MA Experiment ID: 20000180 Result: Down-regulated in Transcription
  misc_feature: MA Experiment 20000180 PARAMETER Experiment Name: At_Germinating_Seeds_P Parameter: Age (hr) Value: 24 vs. 0
  misc_feature: MA Experiment 20000180 PARAMETER Experiment Name: At_Germinating_Seeds_P Parameter: Tissue Value: Germinating Seeds
  misc_feature: MA Experiment ID: 20000227 Result: Up-regulated in Transcription
  misc_feature: MA Experiment 20000227 PARAMETER Experiment Name: At_Root-Tips-vs-Tops_P Parameter: Tissue Value: Root Tips vs. Root Tops
  misc_feature: MA Experiment ID: 20000234 Result: Up-regulated in Transcription
  misc_feature: MA Experiment 20000234 PARAMETER Experiment Name: At_Siliques_P Parameter: Age (day) Value: 21
  misc_feature: MA Experiment 20000234 PARAMETER Experiment Name: At_Siliques_P Parameter: Organism Value: A. thaliana
  misc_feature: MA Experiment 20000234 PARAMETER Experiment Name: At_Siliques_P Parameter: Plant Line Value: WS
  misc_feature: MA Experiment 20000234 PARAMETER Experiment Name: At_Siliques_P Parameter: Tissue Value: Less Than 5mm Siliques vs. Whole Plant
  misc_feature: MA Experiment ID: 20000264 Result: Up-regulated in Transcription
  misc_feature: MA Experiment 20000264 PARAMETER Experiment Name: At_Open_Flower_P Parameter: Age (day) Value: 21
  misc_feature: MA Experiment 20000264 PARAMETER Experiment Name: At_Open_Flower_P Parameter: Plant Line Value: WS
  misc_feature: MA Experiment 20000264 PARAMETER Experiment Name: At_Open_Flower_P Parameter: Tissue Value: Open Flower vs. Whole Plant
  misc_feature: MA Experiment ID: 20000495 Result: Up-regulated in Transcription
  misc_feature: MA Experiment 20000495 PARAMETER Experiment Name: At_Guard_Cells_P Parameter: Harvest Date Value: 8/2/2002
  misc_feature: MA Experiment 20000495 PARAMETER Experiment Name: At_Guard_Cells_P Parameter: Organism Value: A. thaliana
  misc_feature: MA Experiment 20000495 PARAMETER Experiment Name: At_Guard_Cells_P Parameter: Tissue Value: Guard Cells vs. Leaves
  misc_feature: MA Experiment ID: 20001247 Result: Down-regulated in Transcription
  misc_feature: MA Experiment 20001247 PARAMETER Experiment Name: At_Far-red-induction_P Parameter: Age (day) Value: 7
  misc_feature: MA Experiment 20001247 PARAMETER Experiment Name: At_Far-red-induction_P Parameter: Light Value: Far-red vs. White
  misc_feature: MA Experiment 20001247 PARAMETER Experiment Name: At_Far-red-induction_P Parameter: Organism Value: A. thaliana
  misc_feature: MA Experiment 20001247 PARAMETER Experiment Name: At_Far-red-induction_P Parameter: Plant Line Value: Columbia
  misc_feature: MA Experiment 20001247 PARAMETER Experiment Name: At_Far-red-induction_P Parameter: Timepoint (hr) Value: 1
  misc_feature: MA Experiment 20001247 PARAMETER Experiment Name: At_Far-red-induction_P Parameter: Tissue Value: Whole Plant
  misc_feature: MA Experiment ID: 20001451 Result: Down-regulated in Transcription
  misc_feature: MA Experiment 20001451 PARAMETER Experiment Name: At_Far-red-induction_P Parameter: Age (day) Value: 7
  misc_feature: MA Experiment 20001451 PARAMETER Experiment Name: At_Far-red-induction_P Parameter: Light Value: Far-red vs. White
  misc_feature: MA Experiment 20001451 PARAMETER Experiment Name: At_Far-red-induction_P Parameter: Organism Value: A. thaliana
  misc_feature: MA Experiment 20001451 PARAMETER Experiment Name: At_Far-red-induction_P Parameter: Plant Line Value: Columbia
  misc_feature: MA Experiment 20001451 PARAMETER Experiment Name: At_Far-red-induction_P Parameter: Timepoint (hr) Value: 24
  misc_feature: MA Experiment 20001451 PARAMETER Experiment Name: At_Far-red-induction_P Parameter: Tissue Value: Whole Plant
  misc_feature: MA Experiment ID: 20001557 Result: Up-regulated in Transcription
  misc_feature: MA Experiment 20001557 PARAMETER Experiment Name: At_Drought_Soil_Dry_P Parameter: Age (day) Value: 27
  misc_feature: MA Experiment 20001557 PARAMETER Experiment Name: At_Drought_Soil_Dry_P Parameter: Organism Value: A. thaliana
  misc_feature: MA Experiment 20001557 PARAMETER Experiment Name: At_Drought_Soil_Dry_P Parameter: Plant Line Value: WS
  misc_feature: MA Experiment 20001557 PARAMETER Experiment Name: At_Drought_Soil_Dry_P Parameter: Post Timepoint (hr) Value: 3
  misc_feature: MA Experiment 20001557 PARAMETER Experiment Name: At_Drought_Soil_Dry_P Parameter: Post-Treatment Value: Re-Water vs. No Drought
  misc_feature: MA Experiment 20001557 PARAMETER Experiment Name: At_Drought_Soil_Dry_P Parameter: Timepoint (day) Value: 13
  misc_feature: MA Experiment 20001557 PARAMETER Experiment Name: At_Drought_Soil_Dry_P Parameter: Treatment Value: Drought vs. No Drought
  misc_feature: MA Experiment ID: 20001558 Result: Up-regulated in Transcription
  misc_feature: MA Experiment 20001558 PARAMETER Experiment Name: At_Drought_Soil_Dry_P Parameter: Age (day) Value: 27
  misc_feature: MA Experiment 20001558 PARAMETER Experiment Name: At_Drought_Soil_Dry_P Parameter: Organism Value: A. thaliana
  misc_feature: MA Experiment 20001558 PARAMETER Experiment Name: At_Drought_Soil_Dry_P Parameter: Plant Line Value: WS
  misc_feature: MA Experiment 20001558 PARAMETER Experiment Name: At_Drought_Soil_Dry_P Parameter: Post Timepoint (hr) Value: 6
  misc_feature: MA Experiment 20001558 PARAMETER Experiment Name: At_Drought_Soil_Dry_P Parameter: Post-Treatment Value: Re-Water vs. No Drought
  misc_feature: MA Experiment 20001558 PARAMETER Experiment Name: At_Drought_Soil_Dry_P Parameter: Timepoint (day) Value: 13
  misc_feature: MA Experiment 20001558 PARAMETER Experiment Name: At_Drought_Soil_Dry_P Parameter: Treatment Value: Drought vs. No Drought
atggccatgttctcgcatcgtctccgacgaatagttgtcgccgcaccttcctatttccaacgattctccactctatctcgtccctccgatttcactcccgtgccatcgttattaccgagatctgtggtgaagcaatcgacggcaattaatcgatctcccgcgagattgttctcgacgactcagtatcagtatgatccatacactggagaagattctttcatgccggataatgaaggatgcgattttaatcattggttaattacaatgaatttccctaaagataatcttccatctagagaagaaatgatttcgatttttgagcaaacttgcgccaaaggacttgctattagtttggaagaagctaagaagaaaatttatgcaatttgcacaacaagttaccaaggttttcaagcaacaatgactataggagaagtagagaagtttagagatttgcctggtgttcaatacataatacctgattcgtatattgatgttgagaataaggtttatggaggagacaaatatgagaatggagtgatcacacctgggcctgttcctgtccctactaaagaggggtttgattctttaaagaaggagagtaagccggaacaagaggaagctgaaataattctaacgcctccagatgagggtaaaacctcaggacaagtgcaaggtcaaggaagtctaacgcttccagatcagaggagtgtcaaggaaagacaaggaactcttgctctagtacaaggccaaggtcaaagaagtggaatgtctatccttggacaagggcaaggtgaaggaaggcgaatgtctattcctggacaatggcaaagtcgaggtcaaggaaattcatttcaagggagtttcaagcagagccagggaactctgcccgtgcgaaaagggcaaactcaaataagtgatgaaataccttcgttccaaggaaatgttaagcaaagacaagaaatgccaatccatggacaagggcaagctcaacgaagtcaaatgccttcatctcaggggactctaagacaaggacaagctcaaggaagtcaaagaccttccaatcaggtgggttacaaccaaggtcaaggagctcagacgcctccataccaccaaggtcaaggagctcagacgcctccataccaagaatcaccaaacaattacggtcaaggagcatttgtgcaatacaaccaagggccaccacaaggaaacgttgtccaaacgacacaagaaaaatacaaccaaatgggccaagggaattacgctccacagagtggtggaaactatagtcctgcacaaggagcaggaagtccaagatttggatatgggcaaggtcaaggaggtcagttattgtctccatatcgagggaattacaaccaaggccagggaactccgctgccaggacaaggccaagaaggtcaaccttcatatcagatgggtttcagccaaggcttaggagctccggtgcctccgaaccaagtaataccaggcaattatggtcaatgggcatttgtgaactacaaccaaggaccaccacaaggtaactttctccaaggaccacaacaaaatcacaaccaaggaggtcaatggaattacagtccacagaacggtggacactatggtcctgcacagtttggacagtggtatcctggaccccctcaaggtcaaggaattcaatggccccaatatcagcttagttacaatcaaggccaaggaactccattttctggacaatgtcgatgtccaaattgtggaatgacttcataccaggggtataacaatcaaggccaaggaactcatatccctgaacaatgggaaggtcaagattatgcagtgctttcatatcaggctagttacaatcaagcccatggagcacaggcgcctccataccatggaaactacaatcaagcaacaccaggcggttacggtcaaggaacatctgcaaacttcaaccaaagatttccagtgaaccccgcaaattacaatatgcagaacggtggaaactatggtcctccacatggattagcaggaaatccaggatttagacaagggttttctggacaaggacagaatcaaacatttcaacaagacgatcagagaaatgtagcaggtgacttgagaaacaataatcctgtagacccaactgaaaccagaaaaccaaattctcgaatataa

SEQ ID NO: 81469 - protein, 723 aa, Arabidopsis thaliana
  peptide (1)..(723): Ceres Seq. ID no. 12659901
  misc_feature (214)..(680): Pfam Name: High molecular weight glutenin subunit Pfam Description: High molecular weight glutenin subunit
  misc_feature (1)..(373): Homolog of NCBI NO: 15235263 NR Description: DAG-like protein; protein id: At4g20020.1
  misc_feature (17)..(218): Homolog of NCBI NO: 21593052 NR Description: DAG protein, putative [Arabidopsis thaliana]
  misc_feature (17)..(218): Homolog of NCBI NO: 15220382 NR Description: DAG protein, putative; protein id: At1g11430.1, by cDNA: 35647. [Arabidopsis thaliana] T23J18.10 [Arabidopsis thaliana] >gi|26450103|dbj|BAC42171.1|
  misc_feature (23)..(222): Homolog of NCBI NO: 6014904 NR Description: DAG PROTEIN, CHLOROPLAST PRECURSOR
  misc_feature (14)..(201): Homolog of NCBI NO: 38636775 NR Description: putative DAG protein [Oryza sativa (japonica
  misc_feature (228)..(703): Homolog of NCBI NO: 31075344 NR Description: HMW-glutenin [Taeniatherum caput-medusae]
  misc_feature (211)..(689): Homolog of NCBI NO: 38373992 NR Description: HMW glutenin subunit x [Aegilops comosa]
  misc_feature (214)..(680): Homolog of NCBI NO: 19744394 NR Description: high molecular weight glutenin subunit [Aegilops
  misc_feature (488)..(722): Homolog of NCBI NO: 15235263 NR Description: DAG-like protein; protein id: At4g20020.1
  misc_feature (211)..(703): Homolog of NCBI NO: 38373986 NR Description: HMW glutenin subunit x [Aegilops uniaristata]
MAMFSHRLRRIVVAAPSYFQRFSTLSRPSDFTPVPSLLPRSVVKQSTAINRSPARLFSTTQYQYDPYTGEDSFMPDNEGCDFNHWLITMNFPKDNLPSREEMISIFEQTCAKGLAISLEEAKKKIYAICTTSYQGFQATMTIGEVEKFRDLPGVQYIIPDSYIDVENKVYGGDKYENGVITPGPVPVPTKEGFDSLKKESKPEQEEAEIILTPPDEGKTSGQVQGQGSLTLPDQRSVKERQGTLALVQGQGQRSGMSILGQGQGEGRRMSIPGQWQSRGQGNSFQGSFKQSQGTLPVRKGQTQISDEIPSFQGNVKQRQEMPIHGQGQAQRSQMPSSQGTLRQGQAQGSQRPSNQVGYNQGQGAQTPPYHQGQGAQTPPYQESPNNYGQGAFVQYNQGPPQGNVVQTTQEKYNQMGQGNYAPQSGGNYSPAQGAGSPRFGYGQGQGGQLLSPYRGNYNQGQGTPLPGQGQEGQPSYQMGFSQGLGAPVPPNQVIPGNYGQWAFVNYNQGPPQGNFLQGPQQNHNQGGQWNYSPQNGGHYGPAQFGQWYPGPPQGQGIQWPQYQLSYNQGQGTPFSGQCRCPNCGMTSYQGYNNQGQGTHIPEQWEGQDYAVLSYQASYNQAHGAQAPPYHGNYNQATPGGYGQGTSANFNQRFPVNPANYNMQNGGNYGPPHGLAGNPGFRQGFSGQGQNQTFQQDDQRNVAGDLRNNNPVDPTETRKPNSRI

SEQ ID NO: 81470 - protein, 721 aa, Arabidopsis thaliana
  peptide (1)..(721): Ceres Seq. ID no. 12659902
  misc_feature (212)..(678): Pfam Name: High molecular weight glutenin subunit Pfam Description: High molecular weight glutenin subunit
  misc_feature (1)..(371): Homolog of NCBI NO: 15235263 NR Description: DAG-like protein; protein id: At4g20020.1
  misc_feature (15)..(216): Homolog of NCBI NO: 21593052 NR Description: DAG protein, putative [Arabidopsis thaliana]
  misc_feature (15)..(216): Homolog of NCBI NO: 15220382 NR Description: DAG protein, putative; protein id: At1g11430.1, by cDNA: 35647. [Arabidopsis thaliana] T23J18.10 [Arabidopsis thaliana] >gi|26450103|dbj|BAC42171.1|
  misc_feature (21)..(220): Homolog of NCBI NO: 6014904 NR Description: DAG PROTEIN, CHLOROPLAST PRECURSOR
  misc_feature (12)..(199): Homolog of NCBI NO: 38636775 NR Description: putative DAG protein [Oryza sativa (japonica
  misc_feature (226)..(701): Homolog of NCBI NO: 31075344 NR Description: HMW-glutenin [Taeniatherum caput-medusae]
  misc_feature (209)..(687): Homolog of NCBI NO: 38373992 NR Description: HMW glutenin subunit x [Aegilops comosa]
  misc_feature (212)..(678): Homolog of NCBI NO: 19744394 NR Description: high molecular weight glutenin subunit [Aegilops
  misc_feature (486)..(720): Homolog of NCBI NO: 15235263 NR Description: DAG-like protein; protein id: At4g20020.1
  misc_feature (209)..(701): Homolog of NCBI NO: 38373986 NR Description: HMW glutenin subunit x [Aegilops uniaristata]
MFSHRLRRIVVAAPSYFQRFSTLSRPSDFTPVPSLLPRSVVKQSTAINRSPARLFSTTQYQYDPYTGEDSFMPDNEGCDFNHWLITMNFPKDNLPSREEMISIFEQTCAKGLAISLEEAKKKIYAICTTSYQGFQATMTIGEVEKFRDLPGVQYIIPDSYIDVENKVYGGDKYENGVITPGPVPVPTKEGFDSLKKESKPEQEEAEIILTPPDEGKTSGQVQGQGSLTLPDQRSVKERQGTLALVQGQGQRSGMSILGQGQGEGRRMSIPGQWQSRGQGNSFQGSFKQSQGTLPVRKGQTQISDEIPSFQGNVKQRQEMPIHGQGQAQRSQMPSSQGTLRQGQAQGSQRPSNQVGYNQGQGAQTPPYHQGQGAQTPPYQESPNNYGQGAFVQYNQGPPQGNVVQTTQEKYNQMGQGNYAPQSGGNYSPAQGAGSPRFGYGQGQGGQLLSPYRGNYNQGQGTPLPGQGQEGQPSYQMGFSQGLGAPVPPNQVIPGNYGQWAFVNYNQGPPQGNFLQGPQQNHNQGGQWNYSPQNGGHYGPAQFGQWYPGPPQGQGIQWPQYQLSYNQGQGTPFSGQCRCPNCGMTSYQGYNNQGQGTHIPEQWEGQDYAVLSYQASYNQAHGAQAPPYHGNYNQATPGGYGQGTSANFNQRFPVNPANYNMQNGGNYGPPHGLAGNPGFRQGFSGQGQNQTFQQDDQRNVAGDLRNNNPVDPTETRKPNSRI

SEQ ID NO: 81471 - protein, 650 aa, Arabidopsis thaliana
  peptide (1)..(650): Ceres Seq. ID no. 12659903
  misc_feature (141)..(607): Pfam Name: High molecular weight glutenin subunit Pfam Description: High molecular weight glutenin subunit
  misc_feature (1)..(300): Homolog of NCBI NO: 15235263 NR Description: DAG-like protein; protein id: At4g20020.1
  misc_feature (1)..(145): Homolog of NCBI NO: 21593052 NR Description: DAG protein, putative [Arabidopsis thaliana]
  misc_feature (1)..(145): Homolog of NCBI NO: 15220382 NR Description: DAG protein, putative; protein id: At1g11430.1, by cDNA: 35647. [Arabidopsis thaliana] T23J18.10 [Arabidopsis thaliana] >gi|26450103|dbj|BAC42171.1|
  misc_feature (1)..(149): Homolog of NCBI NO: 6014904 NR Description: DAG PROTEIN, CHLOROPLAST PRECURSOR
  misc_feature (1)..(128): Homolog of NCBI NO: 38636775 NR Description: putative DAG protein [Oryza sativa (japonica
  misc_feature (155)..(630): Homolog of NCBI NO: 31075344 NR Description: HMW-glutenin [Taeniatherum caput-medusae]
  misc_feature (138)..(616): Homolog of NCBI NO: 38373992 NR Description: HMW glutenin subunit x [Aegilops comosa]
  misc_feature (141)..(607): Homolog of NCBI NO: 19744394 NR Description: high molecular weight glutenin subunit [Aegilops
  misc_feature (415)..(649): Homolog of NCBI NO: 15235263 NR Description: DAG-like protein; protein id: At4g20020.1
  misc_feature (138)..(630): Homolog of NCBI NO: 38373986 NR Description: HMW glutenin subunit x [Aegilops uniaristata]
MPDNEGCDFNHWLITMNFPKDNLPSREEMISIFEQTCAKGLAISLEEAKKKIYAICTTSYQGFQATMTIGEVEKFRDLPGVQYIIPDSYIDVENKVYGGDKYENGVITPGPVPVPTKEGFDSLKKESKPEQEEAEIILTPPDEGKTSGQVQGQGSLTLPDQRSVKERQGTLALVQGQGQRSGMSILGQGQGEGRRMSIPGQWQSRGQGNSFQGSFKQSQGTLPVRKGQTQISDEIPSFQGNVKQRQEMPIHGQGQAQRSQMPSSQGTLRQGQAQGSQRPSNQVGYNQGQGAQTPPYHQGQGAQTPPYQESPNNYGQGAFVQYNQGPPQGNVVQTTQEKYNQMGQGNYAPQSGGNYSPAQGAGSPRFGYGQGQGGQLLSPYRGNYNQGQGTPLPGQGQEGQPSYQMGFSQGLGAPVPPNQVIPGNYGQWAFVNYNQGPPQGNFLQGPQQNHNQGGQWNYSPQNGGHYGPAQFGQWYPGPPQGQGIQWPQYQLSYNQGQGTPFSGQCRCPNCGMTSYQGYNNQGQGTHIPEQWEGQDYAVLSYQASYNQAHGAQAPPYHGNYNQATPGGYGQGTSANFNQRFPVNPANYNMQNGGNYGPPHGLAGNPGFRQGFSGQGQNQTFQQDDQRNVAGDLRNNNPVDPTETRKPNSRI

SEQ ID NO: 81472 - DNA, 1752 bp, Arabidopsis thaliana
  misc_feature (1)..(1752): Ceres Seq. ID no. 12659952
  misc_feature: MA Experiment ID: 20000315 Result: Down-regulated in Transcription
  misc_feature: MA Experiment 20000315 PARAMETER Experiment Name: At_14day_Shoots-Roots_Sub_P Parameter: Age (day) Value: 14
  misc_feature: MA Experiment 20000315 PARAMETER Experiment Name: At_14day_Shoots-Roots_Sub_P Parameter: Organism Value: A. thaliana
  misc_feature: MA Experiment 20000315 PARAMETER Experiment Name: At_14day_Shoots-Roots_Sub_P Parameter: Plant Line Value: WS
  misc_feature: MA Experiment 20000315 PARAMETER Experiment Name: At_14day_Shoots-Roots_Sub_P Parameter: Tissue Value: Shoots vs. Whole Plant
  misc_feature: MA Experiment ID: 20000328 Result: Down-regulated in Transcription
  misc_feature: MA Experiment 20000328 PARAMETER Experiment Name: At_42deg_Heat_Sub_P Parameter: Age (day) Value: 14
  misc_feature: MA Experiment 20000328 PARAMETER Experiment Name: At_42deg_Heat_Sub_P Parameter: Organism Value: A. thaliana
  misc_feature: MA Experiment 20000328 PARAMETER Experiment Name: At_42deg_Heat_Sub_P Parameter: Plant Line Value: WS
  misc_feature: MA Experiment 20000328 PARAMETER Experiment Name: At_42deg_Heat_Sub_P Parameter: Temperature (deg C) Value: 42 vs. 22
  misc_feature: MA Experiment 20000328 PARAMETER Experiment Name: At_42deg_Heat_Sub_P Parameter: Timepoint (hr) Value: 6
  misc_feature: MA Experiment 20000328 PARAMETER Experiment Name: At_42deg_Heat_Sub_P Parameter: Tissue Value: Aerial
atggctggagtactagctggggaatgttcttacagtgagagtggagtttcatcacactcaaggaattcccatgaaaagcaagaagaggtttcccgctggtattttggaagaaaagaaatagaagagaattcaccgtcaaggttggatggtattgacttaaagaaggaaacatacctccgcaaatcctactgtacatttttgcaggacttgggcatgagattgaaagtttttccaatcagtccccaggttacaatagctacagcgataatcttctgtcatcgattcttctttcgccaatcacatgcaaagaatgacagaaggaccattgcaactgtatgcatgttccttgctggaaaggttgaggaaactccacggcccttgaaagatgttatttttgtctcctatgagattataaacaagaaggatcctggtgcttcccagaaaatcaagcaaaaggaagtatatgagcaacaaaaagagcttatattaaacggagaaaaaattgttctttccactctaggctttgacctcaatgtttatcatccttataaacccctggtagaagcaataaagaaatttaaggttgcacagaatgcacttgcccaagttgcatggaattttgttaatgatggtctacggacatctctctgcctgcaatttaagcctcatcatattgcggctggtgcaatatttcttgcggccaagttccttaaagtgaagttaccatcagatggagagaaggtttggtggcaagaatttgatgtcacacccagacaactggaggatgttagcaaccaaatgcttgagctttatgagcaaaatcgtgtccctgcatctcaaggaagtgaagtcgagagtagtgtaggtggagggtcagctcagcgaccaggctccagaaatgcggtttcaaccgatgagcatgttggttctaggcaaacgtcatcagtacgttcaacccatgaacaatcaaattctgataatcatgggggttcatccaaaggagtattgaatcagaacaatgagaatgggggtggtgaggcagctaatgtcagtgtcgataacaaagaggagatagagagagaaacaaaagaaagcagcctacatcttgaaagccatccagcccataaggacaatgtgagagaagccccccataactctagacctttagttgagggacctgggaaagacaactcagaaagagagggtggagagctacaagatgatggtgctgttcataaatctcgaaatgttgatgtgggtgatgccctaatcagccaatcgccaaaagatttgaaattgcttcgagataaggtgaaggctaaacgagagaaagctaagaagttgctaggtgaaagaacgaggaaaaaggatttgatggatgaggatgatttgattgaaagagaactggaagatgtgcaactagctgttgaggatgaaaagacgaaggaaaggaaagtacagagcaggccaaaggcggagaactctgatctcatgggtacagaacatggtgagattttagatgttaaaggagaagtcaaaaatacagaggaaggtgaaatggtaaacaacaatgtgtccccgatgatgcatagcagaaagagaaaaatgggaagccctcctgaaaagcagtcagaaggaaagagacgccacaatagtgagaatggggaagaaagccataagacgagcagaggtagtagccatcatggtgatagagagcacagaagacactcacaagagaataaccattcataa

SEQ ID NO: 81473 - protein, 583 aa, Arabidopsis thaliana
  peptide (1)..(583): Ceres Seq. ID no. 12659953
  misc_feature (30)..(178): Pfam Name: Cyclin, N-terminal domain Pfam Description: Cyclin, N-terminal domain
  misc_feature (1)..(583): Homolog of NCBI NO: 9759604 NR Description: contains similarity to cyclin~gene_id:K18C1.7
  misc_feature (1)..(583): Homolog of NCBI NO: 30694715 NR Description: cyclin family [Arabidopsis thaliana]
  misc_feature (1)..(383): Homolog of NCBI NO: 30684822 NR Description: cyclin family [Arabidopsis thaliana]
  misc_feature (1)..(383): Homolog of NCBI NO: 7486085 NR Description: hypothetical protein F24J7.161 - Arabidopsis >gi|4582488|emb|CAB40377.1| putative protein [Arabidopsis >gi|7268756|emb|CAB78962.1| putative protein [Arabidopsis
  misc_feature (1)..(408): Homolog of NCBI NO: 15235087 NR Description: putative protein; protein id: At4g19560.1
  misc_feature (307)..(579): Homolog of NCBI NO: 7486085 NR Description: hypothetical protein F24J7.161 - Arabidopsis >gi|4582488|emb|CAB40377.1| putative protein [Arabidopsis >gi|7268756|emb|CAB78962.1| putative protein [Arabidopsis
  misc_feature (307)..(579): Homolog of NCBI NO: 30684822 NR Description: cyclin family [Arabidopsis thaliana]
  misc_feature (29)..(281): Homolog of NCBI NO: 15219592 NR Description: hypothetical protein; protein id: At1g35440.1
  misc_feature (27)..(275): Homolog of NCBI NO: 15217663 NR Description: putative cyclin; protein id: At1g27630.1, by cDNA: 33877., supported by cDNA: gi_12744988 [Arabidopsis >gi|5668773|gb|AAD46000.1|AC005916_12 Contains similarity to
  misc_feature (27)..(275): Homolog of NCBI NO: 21618277 NR Description: putative cyclin [Arabidopsis thaliana]
MAGVLAGECSYSESGVSSHSRNSHEKQEEVSRWYFGRKEIEENSPSRLDGIDLKKETYLRKSYCTFLQDLGMRLKVFPISPQVTIATAIIFCHRFFFRQSHAKNDRRTIATVCMFLAGKVEETPRPLKDVIFVSYEIINKKDPGASQKIKQKEVYEQQKELILNGEKIVLSTLGFDLNVYHPYKPLVEAIKKFKVAQNALAQVAWNFVNDGLRTSLCLQFKPHHIAAGAIFLAAKFLKVKLPSDGEKVWWQEFDVTPRQLEDVSNQMLELYEQNRVPASQGSEVESSVGGGSAQRPGSRNAVSTDEHVGSRQTSSVRSTHEQSNSDNHGGSSKGVLNQNNENGGGEAANVSVDNKEEIERETKESSLHLESHPAHKDNVREAPHNSRPLVEGPGKDNSEREGGELQDDGAVHKSRNVDVGDALISQSPKDLKLLRDKVKAKREKAKKLLGERTRKKDLMDEDDLIERELEDVQLAVEDEKTKERKVQSRPKAENSDLMGTEHGEILDVKGEVKNTEEGEMVNNNVSPMMHSRKRKMGSPPEKQSEGKRRHNSENGEESHKTSRGSSHHGDREHRRHSQENNHS

SEQ ID NO: 81474 - protein, 512 aa, Arabidopsis thaliana
  peptide (1)..(512): Ceres Seq. ID no. 12659954
  misc_feature (1)..(107): Pfam Name: Cyclin, N-terminal domain Pfam Description: Cyclin, N-terminal domain
  misc_feature (1)..(512): Homolog of NCBI NO: 9759604 NR Description: contains similarity to cyclin~gene_id:K18C1.7
  misc_feature (1)..(512): Homolog of NCBI NO: 30694715 NR Description: cyclin family [Arabidopsis thaliana]
  misc_feature (1)..(312): Homolog of NCBI NO: 30684822 NR Description: cyclin family [Arabidopsis thaliana]
  misc_feature (1)..(312): Homolog of NCBI NO: 7486085 NR Description: hypothetical protein F24J7.161 - Arabidopsis >gi|4582488|emb|CAB40377.1| putative protein [Arabidopsis >gi|7268756|emb|CAB78962.1| putative protein [Arabidopsis
  misc_feature (1)..(337): Homolog of NCBI NO: 15235087 NR Description: putative protein; protein id: At4g19560.1
  misc_feature (236)..(508): Homolog of NCBI NO: 7486085 NR Description: hypothetical protein F24J7.161 - Arabidopsis >gi|4582488|emb|CAB40377.1| putative protein [Arabidopsis >gi|7268756|emb|CAB78962.1| putative protein [Arabidopsis
  misc_feature (236)..(508): Homolog of NCBI NO: 30684822 NR Description: cyclin family [Arabidopsis thaliana]
  misc_feature (1)..(210): Homolog of NCBI NO: 15219592 NR Description: hypothetical protein; protein id: At1g35440.1
  misc_feature (1)..(204): Homolog of NCBI NO: 15217663 NR Description: putative cyclin; protein id: At1g27630.1, by cDNA: 33877., supported by cDNA: gi_12744988 [Arabidopsis >gi|5668773|gb|AAD46000.1|AC005916_12 Contains similarity to
  misc_feature (1)..(204): Homolog of NCBI NO: 21618277 NR Description: putative cyclin [Arabidopsis thaliana]
MRLKVFPISPQVTIATAIIFCHRFFFRQSHAKNDRRTIATVCMFLAGKVEETPRPLKDVIFVSYEIINKKDPGASQKIKQKEVYEQQKELILNGEKIVLSTLGFDLNVYHPYKPLVEAIKKFKVAQNALAQVAWNFVNDGLRTSLCLQFKPHHIAAGAIFLAAKFLKVKLPSDGEKVWWQEFDVTPRQLEDVSNQMLELYEQNRVPASQGSEVESSVGGGSAQRPGSRNAVSTDEHVGSRQTSSVRSTHEQSNSDNHGGSSKGVLNQNNENGGGEAANVSVDNKEEIERETKESSLHLESHPAHKDNVREAPHNSRPLVEGPGKDNSEREGGELQDDGAVHKSRNVDVGDALISQSPKDLKLLRDKVKAKREKAKKLLGERTRKKDLMDEDDLIERELEDVQLAVEDEKTKERKVQSRPKAENSDLMGTEHGEILDVKGEVKNTEEGEMVNNNVSPMMHSRKRKMGSPPEKQSEGKRRHNSENGEESHKTSRGSSHHGDREHRRHSQENNHS

SEQ ID NO: 81475 - protein, 470 aa, Arabidopsis thaliana
  peptide (1)..(470): Ceres Seq. ID no. 12659955
  misc_feature (1)..(65): Pfam Name: Cyclin, N-terminal domain Pfam Description: Cyclin, N-terminal domain
  misc_feature (1)..(470): Homolog of NCBI NO: 9759604 NR Description: contains similarity to cyclin~gene_id:K18C1.7
  misc_feature (1)..(470): Homolog of NCBI NO: 30694715 NR Description: cyclin family [Arabidopsis thaliana]
  misc_feature (1)..(270): Homolog of NCBI NO: 30684822 NR Description: cyclin family [Arabidopsis thaliana]
  misc_feature (1)..(270): Homolog of NCBI NO: 7486085 NR Description: hypothetical protein F24J7.161 - Arabidopsis >gi|4582488|emb|CAB40377.1| putative protein [Arabidopsis >gi|7268756|emb|CAB78962.1| putative protein [Arabidopsis
  misc_feature (1)..(295): Homolog of NCBI NO: 15235087 NR Description: putative protein; protein id: At4g19560.1
  misc_feature (194)..(466): Homolog of NCBI NO: 7486085 NR Description: hypothetical protein F24J7.161 - Arabidopsis >gi|4582488|emb|CAB40377.1| putative protein [Arabidopsis >gi|7268756|emb|CAB78962.1| putative protein [Arabidopsis
  misc_feature (194)..(466): Homolog of NCBI NO: 30684822 NR Description: cyclin family [Arabidopsis thaliana]
  misc_feature (1)..(168): Homolog of NCBI NO: 15219592 NR Description: hypothetical protein; protein id: At1g35440.1
  misc_feature (1)..(162): Homolog of NCBI NO: 15217663 NR Description: putative cyclin; protein id: At1g27630.1, by cDNA: 33877., supported by cDNA: gi_12744988 [Arabidopsis >gi|5668773|gb|AAD46000.1|AC005916_12 Contains similarity to
  misc_feature (1)..(162): Homolog of NCBI NO: 21618277 NR Description: putative cyclin [Arabidopsis thaliana]
MFLAGKVEETPRPLKDVIFVSYEIINKKDPGASQKIKQKEVYEQQKELILNGEKIVLSTLGFDLNVYHPYKPLVEAIKKFKVAQNALAQVAWNFVNDGLRTSLCLQFKPHHIAAGAIFLAAKFLKVKLPSDGEKVWWQEFDVTPRQLEDVSNQMLELYEQNRVPASQGSEVESSVGGGSAQRPGSRNAVSTDEHVGSRQTSSVRSTHEQSNSDNHGGSSKGVLNQNNENGGGEAANVSVDNKEEIERETKESSLHLESHPAHKDNVREAPHNSRPLVEGPGKDNSEREGGELQDDGAVHKSRNVDVGDALISQSPKDLKLLRDKVKAKREKAKKLLGERTRKKDLMDEDDLIERELEDVQLAVEDEKTKERKVQSRPKAENSDLMGTEHGEILDVKGEVKNTEEGEMVNNNVSPMMHSRKRKMGSPPEKQSEGKRRHNSENGEESHKTSRGSSHHGDREHRRHSQENNHS

SEQ ID NO: 81476 - DNA, 947 bp, Arabidopsis thaliana
  misc_feature (1)..(947): Ceres Seq. ID no. 12659994
  misc_feature: MA Experiment ID: 20000307 Result: Up-regulated in Transcription
  misc_feature: MA Experiment 20000307 PARAMETER Experiment Name: At_Germinating_Seeds_Sub_P Parameter: Age (hr) Value: 24 vs. 0
  misc_feature: MA Experiment 20000307 PARAMETER Experiment Name: At_Germinating_Seeds_Sub_P Parameter: Organism Value: A. thaliana
  misc_feature: MA Experiment 20000307 PARAMETER Experiment Name: At_Germinating_Seeds_Sub_P Parameter: Plant Line Value: WS
  misc_feature: MA Experiment 20000307 PARAMETER Experiment Name: At_Germinating_Seeds_Sub_P Parameter: Tissue Value: Germinating Seeds
  misc_feature: MA Experiment ID: 20000314 Result: Up-regulated in Transcription
  misc_feature: MA Experiment 20000314 PARAMETER Experiment Name: At_14day_Shoots-Roots_Sub_P Parameter: Age (day) Value: 14
  misc_feature: MA Experiment 20000314 PARAMETER Experiment Name: At_14day_Shoots-Roots_Sub_P Parameter: Organism Value: A. thaliana
  misc_feature: MA Experiment 20000314 PARAMETER Experiment Name: At_14day_Shoots-Roots_Sub_P Parameter: Plant Line Value: WS
  misc_feature: MA Experiment 20000314 PARAMETER Experiment Name: At_14day_Shoots-Roots_Sub_P Parameter: Tissue Value: Roots vs. Whole Plant
  misc_feature: MA Experiment ID: 20000327 Result: Down-regulated in Transcription
  misc_feature: MA Experiment 20000327 PARAMETER Experiment Name: At_42deg_Heat_Sub_P Parameter: Age (day) Value: 14
  misc_feature: MA Experiment 20000327 PARAMETER Experiment Name: At_42deg_Heat_Sub_P Parameter: Organism Value: A. thaliana
  misc_feature: MA Experiment 20000327 PARAMETER Experiment Name: At_42deg_Heat_Sub_P Parameter: Plant Line Value: WS
  misc_feature: MA Experiment 20000327 PARAMETER Experiment Name: At_42deg_Heat_Sub_P Parameter: Temperature (deg C) Value: 42 vs. 22
  misc_feature: MA Experiment 20000327 PARAMETER Experiment Name: At_42deg_Heat_Sub_P Parameter: Timepoint (hr) Value: 1
  misc_feature: MA Experiment 20000327 PARAMETER Experiment Name: At_42deg_Heat_Sub_P Parameter: Tissue Value: Aerial
  misc_feature: MA Experiment ID: 20000328 Result: Down-regulated in Transcription
  misc_feature: MA Experiment 20000328 PARAMETER Experiment Name: At_42deg_Heat_Sub_P Parameter: Age (day) Value: 14
  misc_feature: MA Experiment 20000328 PARAMETER Experiment Name: At_42deg_Heat_Sub_P Parameter: Organism Value: A. thaliana
  misc_feature: MA Experiment 20000328 PARAMETER Experiment Name: At_42deg_Heat_Sub_P Parameter: Plant Line Value: WS
  misc_feature: MA Experiment 20000328 PARAMETER Experiment Name: At_42deg_Heat_Sub_P Parameter: Temperature (deg C) Value: 42 vs. 22
  misc_feature: MA Experiment 20000328 PARAMETER Experiment Name: At_42deg_Heat_Sub_P Parameter: Timepoint (hr) Value: 6
  misc_feature: MA Experiment 20000328 PARAMETER Experiment Name: At_42deg_Heat_Sub_P Parameter: Tissue Value: Aerial
  misc_feature: MA Experiment ID: 20000355 Result: Down-regulated in Transcription
  misc_feature: MA Experiment 20000355 PARAMETER Experiment Name: At_Siliques_Sub_P Parameter: Age (day) Value: 21
  misc_feature: MA Experiment 20000355 PARAMETER Experiment Name: At_Siliques_Sub_P Parameter: Organism Value: A. thaliana
  misc_feature: MA Experiment 20000355 PARAMETER Experiment Name: At_Siliques_Sub_P Parameter: Plant Line Value: WS
  misc_feature: MA Experiment 20000355 PARAMETER Experiment Name: At_Siliques_Sub_P Parameter: Tissue Value: Less Than 5mm Siliques vs. Whole Plant
  misc_feature: MA Experiment ID: 20000440 Result: Down-regulated in Transcription
  misc_feature: MA Experiment 20000440 PARAMETER Experiment Name: At_Closed-Flower__Sub_P Parameter: Tissue Value: Closed Flower vs. Whole Plant
tctctctctctctctctctctctctctctctctctctctctctctctctctctctctctctctctctctctctcctcgggatcaagaaaagtgaagaagaatgagaatgacaagagatggaaaagaacatgaatacaagaaaggtttatggacagtggaagaagacaagatcctcatggattatgtccgaactcatggccagggccactggaaccgcatcgccaagaaaactgggctcaagagatgtgggaaaagctgtaggttgagatggatgaactacttaagccctaatgttaacagaggcaattttactgaccaagaagaagatctcatcatcagactccacaagctcctcggcaacagatggtcgttgatagcgaaaagagttccgggaagaacagacaaccaagtaaagaattactggaacacacatctcagcaagaaacttggtctcggagatcattcaactgccgtcaaagccgcatgcggtgtagagtctccaccgtctatggcccttataaccacaacgtcctcctctcatcaagagatctccggtggaaaaaattcaactctaaggttcgacactttagttgacgaatccaaactcaaaccaaaatccaaactagtccacgcaacaccaactgacgtagaagttgcagctacggttccaaatctgttcgataccttttgggttcttgaagacgacttcgagcttagttcactcactatgatggattttactaatgggtattgcctttgaatatctttgatgattagcttctaaaaagtaattaattatcgaataatagattataatgaacaataataataatatgaatacaattaaatttttttccgaatatttgcttgtagcttttgtactttcttttgtaaaagtaaggatgatcagttgataaaaaaatcttatactagaaagttatttggtt

SEQ ID NO: 81477 - protein, 219 aa, Arabidopsis thaliana
  peptide (1)..(219): Ceres Seq. ID no. 12659995
  misc_feature (14)..(61): Pfam Name: Myb-like DNA-binding domain Pfam Description: Myb-like DNA-binding domain
  misc_feature (1)..(219): Homolog of NCBI NO: 15242649 NR Description: myb-related protein; protein id: At5g40330.1
  misc_feature (1)..(219): Homolog of NCBI NO: 15232860 NR Description: MYB family transcription factor (GL1); protein At3g27920.1, supported by cDNA: gi_20162512 [Arabidopsis >gi|17865662|sp|P27900|GL1_ARATH Trichome differentiation protein
  misc_feature (1)..(219): Homolog of NCBI NO: 15529344 NR Description: glabrous 1 [Arabidopsis thaliana]
  misc_feature (1)..(219): Homolog of NCBI NO: 68888 NR Description: trichome differentiation protein GL1 - thaliana >gi|166780|gb|AAC97387.1| GL1 [Arabidopsis thaliana] glabrous 1 [Arabidopsis thaliana]
  misc_feature (1)..(219): Homolog of NCBI NO: 15529304 NR Description: glabrous 1 [Arabidopsis thaliana]
  misc_feature (1)..(219): Homolog of NCBI NO: 15529322 NR Description: glabrous 1 [Arabidopsis thaliana]
  misc_feature (1)..(219): Homolog of NCBI NO: 9367652 NR Description: Glabrous 1 [Arabidopsis thaliana]
  misc_feature (1)..(208): Homolog of NCBI NO: 15529362 NR Description: glabrous 1 [Arabidopsis lyrata]
  misc_feature (1)..(188): Homolog of NCBI NO: 438453 NR Description: GL1 mutant [Arabidopsis thaliana]
  misc_feature (1)..(175): Homolog of NCBI NO: 9367650 NR Description: Glabrous 1 [Arabidopsis thaliana]
MRMTRDGKEHEYKKGLWTVEEDKILMDYVRTHGQGHWNRIAKKTGLKRCGKSCRLRWMNYLSPNVNRGNFTDQEEDLIIRLHKLLGNRWSLIAKRVPGRTDNQVKNYWNTHLSKKLGLGDHSTAVKAACGVESPPSMALITTTSSSHQEISGGKNSTLRFDTLVDESKLKPKSKLVHATPTDVEVAATVPNLFDTFWVLEDDFELSSLTMMDFTNGYCL

SEQ ID NO: 81478 - protein, 217 aa, Arabidopsis thaliana
  peptide (1)..(217): Ceres Seq. ID no. 12659996
  misc_feature (12)..(59): Pfam Name: Myb-like DNA-binding domain Pfam Description: Myb-like DNA-binding domain
  misc_feature (1)..(217): Homolog of NCBI NO: 15242649 NR Description: myb-related protein; protein id: At5g40330.1
  misc_feature (1)..(217): Homolog of NCBI NO: 15232860 NR Description: MYB family transcription factor (GL1); protein At3g27920.1, supported by cDNA: gi_20162512 [Arabidopsis >gi|17865662|sp|P27900|GL1_ARATH Trichome differentiation protein
  misc_feature (1)..(217): Homolog of NCBI NO: 15529344 NR Description: glabrous 1 [Arabidopsis thaliana]
  misc_feature (1)..(217): Homolog of NCBI NO: 68888 NR Description: trichome differentiation protein GL1 - thaliana >gi|166780|gb|AAC97387.1| GL1 [Arabidopsis thaliana] glabrous 1 [Arabidopsis thaliana]
  misc_feature (1)..(217): Homolog of NCBI NO: 15529304 NR Description: glabrous 1 [Arabidopsis thaliana]
  misc_feature (1)..(217): Homolog of NCBI NO: 15529322 NR Description: glabrous 1 [Arabidopsis thaliana]
  misc_feature (1)..(217): Homolog of NCBI NO: 9367652 NR Description: Glabrous 1 [Arabidopsis thaliana]
  misc_feature (1)..(206): Homolog of NCBI NO: 15529362 NR Description: glabrous 1 [Arabidopsis lyrata]
  misc_feature (1)..(186): Homolog of NCBI NO: 438453 NR Description: GL1 mutant [Arabidopsis thaliana]
  misc_feature (1)..(173): Homolog of NCBI NO: 9367650 NR Description: Glabrous 1 [Arabidopsis thaliana]
MTRDGKEHEYKKGLWTVEEDKILMDYVRTHGQGHWNRIAKKTGLKRCGKSCRLRWMNYLSPNVNRGNFTDQEEDLIIRLHKLLGNRWSLIAKRVPGRTDNQVKNYWNTHLSKKLGLGDHSTAVKAACGVESPPSMALITTTSSSHQEISGGKNSTLRFDTLVDESKLKPKSKLVHATPTDVEVAATVPNLFDTFWVLEDDFELSSLTMMDFTNGYCL

SEQ ID NO: 81479 - protein, 194 aa, Arabidopsis thaliana
  peptide (1)..(194): Ceres Seq. ID no. 12659997
  misc_feature (1)..(36): Pfam Name: Myb-like DNA-binding domain Pfam Description: Myb-like DNA-binding domain
  misc_feature (1)..(194): Homolog of NCBI NO: 15242649 NR Description: myb-related protein; protein id: At5g40330.1
  misc_feature (1)..(194): Homolog of NCBI NO: 15232860 NR Description: MYB family transcription factor (GL1); protein At3g27920.1, supported by cDNA: gi_20162512 [Arabidopsis >gi|17865662|sp|P27900|GL1_ARATH Trichome differentiation protein
  misc_feature (1)..(194): Homolog of NCBI NO: 15529344 NR Description: glabrous 1 [Arabidopsis thaliana]
  misc_feature (1)..(194): Homolog of NCBI NO: 68888 NR Description: trichome differentiation protein GL1 - thaliana >gi|166780|gb|AAC97387.1| GL1 [Arabidopsis thaliana] glabrous 1 [Arabidopsis thaliana]
  misc_feature (1)..(194): Homolog of NCBI NO: 15529304 NR Description: glabrous 1 [Arabidopsis thaliana]
  misc_feature (1)..(194): Homolog of NCBI NO: 15529322 NR Description: glabrous 1 [Arabidopsis thaliana]
  misc_feature (1)..(194): Homolog of NCBI NO: 9367652 NR Description: Glabrous 1 [Arabidopsis thaliana]
  misc_feature (1)..(183): Homolog of NCBI NO: 15529362 NR Description: glabrous 1 [Arabidopsis lyrata]
  misc_feature (1)..(163): Homolog of NCBI NO: 438453 NR Description: GL1 mutant [Arabidopsis thaliana]
  misc_feature (1)..(150): Homolog of NCBI NO: 9367650 NR Description: Glabrous 1 [Arabidopsis thaliana]
MDYVRTHGQGHWNRIAKKTGLKRCGKSCRLRWMNYLSPNVNRGNFTDQEEDLIIRLHKLLGNRWSLIAKRVPGRTDNQVKNYWNTHLSKKLGLGDHSTAVKAACGVESPPSMALITTTSSSHQEISGGKNSTLRFDTLVDESKLKPKSKLVHATPTDVEVAATVPNLFDTFWVLEDDFELSSLTMMDFTNGYCL

SEQ ID NO: 81480 - DNA, 836 bp, Arabidopsis thaliana
  misc_feature (1)..(836): Ceres Seq. ID no. 12660006
  misc_feature: MA Experiment ID: 20000306 Result: Down-regulated in Transcription
  misc_feature: MA Experiment 20000306 PARAMETER Experiment Name: At_Germinating_Seeds_Sub_P Parameter: Age (hr) Value: 6 vs. 0
  misc_feature: MA Experiment 20000306 PARAMETER Experiment Name: At_Germinating_Seeds_Sub_P Parameter: Organism Value: A. thaliana
  misc_feature: MA Experiment 20000306 PARAMETER Experiment Name: At_Germinating_Seeds_Sub_P Parameter: Plant Line Value: WS
  misc_feature: MA Experiment 20000306 PARAMETER Experiment Name: At_Germinating_Seeds_Sub_P Parameter: Tissue Value: Germinating Seeds
  misc_feature: MA Experiment ID: 20000307 Result: Down-regulated in Transcription
  misc_feature: MA Experiment 20000307 PARAMETER Experiment Name: At_Germinating_Seeds_Sub_P Parameter: Age (hr) Value: 24 vs. 0
  misc_feature: MA Experiment 20000307 PARAMETER Experiment Name: At_Germinating_Seeds_Sub_P Parameter: Organism Value: A. thaliana
  misc_feature: MA Experiment 20000307 PARAMETER Experiment Name: At_Germinating_Seeds_Sub_P Parameter: Plant Line Value: WS
  misc_feature: MA Experiment 20000307 PARAMETER Experiment Name: At_Germinating_Seeds_Sub_P Parameter: Tissue Value: Germinating Seeds
  misc_feature: MA Experiment ID: 20000315 Result: Up-regulated in Transcription
  misc_feature: MA Experiment 20000315 PARAMETER Experiment Name: At_14day_Shoots-Roots_Sub_P Parameter: Age (day) Value: 14
  misc_feature: MA Experiment 20000315 PARAMETER Experiment Name: At_14day_Shoots-Roots_Sub_P Parameter: Organism Value: A. thaliana
  misc_feature: MA Experiment 20000315 PARAMETER Experiment Name: At_14day_Shoots-Roots_Sub_P Parameter: Plant Line Value: WS
  misc_feature: MA Experiment 20000315 PARAMETER Experiment Name: At_14day_Shoots-Roots_Sub_P Parameter: Tissue Value: Shoots vs. Whole Plant
  misc_feature: MA Experiment ID: 20000327 Result: Up-regulated in Transcription
  misc_feature: MA Experiment 20000327 PARAMETER Experiment Name: At_42deg_Heat_Sub_P Parameter: Age (day) Value: 14
  misc_feature: MA Experiment 20000327 PARAMETER Experiment Name: At_42deg_Heat_Sub_P Parameter: Organism Value: A. thaliana
  misc_feature: MA Experiment 20000327 PARAMETER Experiment Name: At_42deg_Heat_Sub_P Parameter: Plant Line Value: WS
  misc_feature: MA Experiment 20000327 PARAMETER Experiment Name: At_42deg_Heat_Sub_P Parameter: Temperature (deg C) Value: 42 vs. 22
  misc_feature: MA Experiment 20000327 PARAMETER Experiment Name: At_42deg_Heat_Sub_P Parameter: Timepoint (hr) Value: 1
  misc_feature: MA Experiment 20000327 PARAMETER Experiment Name: At_42deg_Heat_Sub_P Parameter: Tissue Value: Aerial
  misc_feature: MA Experiment ID: 20000355 Result: Down-regulated in Transcription
  misc_feature: MA Experiment 20000355 PARAMETER Experiment Name: At_Siliques_Sub_P Parameter: Age (day) Value: 21
  misc_feature: MA Experiment 20000355 PARAMETER Experiment Name: At_Siliques_Sub_P Parameter: Organism Value: A. thaliana
  misc_feature: MA Experiment 20000355 PARAMETER Experiment Name: At_Siliques_Sub_P Parameter: Plant Line Value: WS
  misc_feature: MA Experiment 20000355 PARAMETER Experiment Name: At_Siliques_Sub_P Parameter: Tissue Value: Less Than 5mm Siliques vs. Whole Plant
  misc_feature: MA Experiment ID: 20000440 Result: Down-regulated in Transcription
  misc_feature: MA Experiment 20000440 PARAMETER Experiment Name: At_Closed-Flower__Sub_P Parameter: Tissue Value: Closed Flower vs. Whole Plant
attacaaagaaaataggtaaaaacaatttctcattagcttacaatggcggatacacaccgtgtcgaccgtactgatagacactttcaatttcagtcgccctatgaaggcggccgaggtcaaggtcagtatgaaggtgaccgtggttacggtggtggcggttacaagagcatgatgcctgaaagtggcccatctagtacccaagtattgtccctgttgattggagtccctgtcgtcggttcgctacttgccttggctggattacttctagctggttcggtgatcggcttaatggttgctttaccactatttctcctcttcagcccggttatagtcccagcggctctaactatcgggcttgcaatgacaggctttttagcctcggggatgttcggtctaaccgggcttagctcaatctcatgggtcatgaactatcttcgtgggacaaggagaactgtgcctgagcaattggagtatgctaagaggagaatggctgatgcggttggctacgcaggacaaaagggcaaagaaatgggccagcatgtgcagaacaaggcccaagatgttaaacaatatgatatttctaagccacatgacactaccactaagggtcatgagactcaggggaggacgacggctgcatgatgagttttcagtatgaacggtagatatgtgttttcactattatgtcgttttttctgcattttcaatatgatgttatgtgttttttttgtttggctttttgttgaaccgtgtatgtgttttatgtttttgtaagcatgaaagatcgcaagtgttgtggtaatatttgaatgtaataatatgataagttgataaa

SEQ ID NO: 81481 - protein, 199 aa, Arabidopsis thaliana
  peptide (1)..(199): Ceres Seq. ID no. 12660007
  misc_feature (50)..(167): Pfam Name: Oleosin Pfam Description: Oleosin
  misc_feature (1)..(199): Homolog of NCBI NO: 15242686 NR Description: oleosin; protein id: At5g40420.1, supported by gi_16209648, supported by cDNA: gi_725259 [Arabidopsis thaliana] Oleosin 21.2 kDa (Oleosin type 2) oleosin, isoform 21K
  misc_feature (1)..(199): Homolog of NCBI NO: 2129658 NR Description: oleosin, 21K - Arabidopsis thaliana
  misc_feature (7)..(184): Homolog of NCBI NO: 1592686 NR Description: oleosin type4 [Arabidopsis thaliana]
  misc_feature (7)..(184): Homolog of NCBI NO: 15232227 NR Description: oleosin; protein id: At3g27660.1, supported by
  misc_feature (7)..(184): Homolog of NCBI NO: 21554017 NR Description: oleosin isoform [Arabidopsis thaliana]
  misc_feature (38)..(197): Homolog of NCBI NO: 15232141 NR Description: oleosin; protein id: At3g01570.1, supported by gi_16649132, supported by cDNA: gi_20148652 [Arabidopsis >gi|6016716|gb|AAF01542.1|AC009325_12 putative oleosin
  misc_feature (33)..(176): Homolog of NCBI NO: 13161005 NR Description: oleosin variant A [Arachis hypogaea]
  misc_feature (38)..(196): Homolog of NCBI NO: 82051 NR Description: lipid body-associated membrane protein - carrot
  misc_feature (33)..(176): Homolog of NCBI NO: 13161008 NR Description: oleosin variant B [Arachis hypogaea]
  misc_feature (26)..(173): Homolog of NCBI NO: 29243355 NR Description: oleosin [Corylus avellana]
MADTHRVDRTDRHFQFQSPYEGGRGQGQYEGDRGYGGGGYKSMMPESGPSSTQVLSLLIGVPVVGSLLALAGLLLAGSVIGLMVALPLFLLFSPVIVPAALTIGLAMTGFLASGMFGLTGLSSISWVMNYLRGTRRTVPEQLEYAKRRMADAVGYAGQKGKEMGQHVQNKAQDVKQYDISKPHDTTTKGHETQGRTTAA

SEQ ID NO: 81482 - protein, 157 aa, Arabidopsis thaliana
  peptide (1)..(157): Ceres Seq. ID no. 12660008
  misc_feature (8)..(125): Pfam Name: Oleosin Pfam Description: Oleosin
  misc_feature (1)..(157): Homolog of NCBI NO: 15242686 NR Description: oleosin; protein id: At5g40420.1, supported by gi_16209648, supported by cDNA: gi_725259 [Arabidopsis thaliana] Oleosin 21.2 kDa (Oleosin type 2) oleosin, isoform 21K
  misc_feature (1)..(157): Homolog of NCBI NO: 2129658 NR Description: oleosin, 21K - Arabidopsis thaliana
  misc_feature (1)..(142): Homolog of NCBI NO: 1592686 NR Description: oleosin type4 [Arabidopsis thaliana]
  misc_feature (1)..(142): Homolog of NCBI NO: 15232227 NR Description: oleosin; protein id: At3g27660.1, supported by
  misc_feature (1)..(142): Homolog of NCBI NO: 21554017 NR Description: oleosin isoform [Arabidopsis thaliana]
  misc_feature (1)..(155): Homolog of NCBI NO: 15232141 NR Description: oleosin; protein id: At3g01570.1, supported by gi_16649132, supported by cDNA: gi_20148652 [Arabidopsis >gi|6016716|gb|AAF01542.1|AC009325_12 putative oleosin
  misc_feature (1)..(134): Homolog of NCBI NO: 13161005 NR Description: oleosin variant A [Arachis hypogaea]
  misc_feature (1)..(154): Homolog of NCBI NO: 82051 NR Description: lipid body-associated membrane protein - carrot
  misc_feature (1)..(134): Homolog of NCBI NO: 13161008 NR Description: oleosin variant B [Arachis hypogaea]
  misc_feature (1)..(131): Homolog of NCBI NO: 29243355 NR Description: oleosin [Corylus avellana]
MMPESGPSSTQVLSLLIGVPVVGSLLALAGLLLAGSVIGLMVALPLFLLFSPVIVPAALTIGLAMTGFLASGMFGLTGLSSISWVMNYLRGTRRTVPEQLEYAKRRMADAVGYAGQKGKEMGQHVQNKAQDVKQYDISKPHDTTTKGHETQGRTTAA

SEQ ID NO: 81483 - protein, 156 aa, Arabidopsis thaliana
  peptide (1)..(156): Ceres Seq. ID no. 12660009
  misc_feature (7)..(124): Pfam Name: Oleosin Pfam Description: Oleosin
  misc_feature (1)..(156): Homolog of NCBI NO: 15242686 NR Description: oleosin; protein id: At5g40420.1, supported by gi_16209648, supported by cDNA: gi_725259 [Arabidopsis thaliana] Oleosin 21.2 kDa (Oleosin type 2) oleosin, isoform 21K
  misc_feature (1)..(156): Homolog of NCBI NO: 2129658 NR Description: oleosin, 21K - Arabidopsis thaliana
  misc_feature (1)..(141): Homolog of NCBI NO: 1592686 NR Description: oleosin type4 [Arabidopsis thaliana]
  misc_feature (1)..(141): Homolog of NCBI NO: 15232227 NR Description: oleosin; protein id: At3g27660.1, supported by
  misc_feature (1)..(141): Homolog of NCBI NO: 21554017 NR Description: oleosin isoform [Arabidopsis thaliana]
  misc_feature (1)..(154): Homolog of NCBI NO: 15232141 NR Description: oleosin; protein id: At3g01570.1, supported by gi_16649132, supported by cDNA: gi_20148652 [Arabidopsis >gi|6016716|gb|AAF01542.1|AC009325_12 putative oleosin
  misc_feature (1)..(133): Homolog of NCBI NO: 13161005 NR Description: oleosin variant A [Arachis hypogaea]
  misc_feature (1)..(153): Homolog of NCBI NO: 82051 NR Description: lipid body-associated membrane protein - carrot
  misc_feature (1)..(133): Homolog of NCBI NO: 13161008 NR Description: oleosin variant B [Arachis hypogaea]
  misc_feature (1)..(130): Homolog of NCBI NO: 29243355 NR Description: oleosin [Corylus avellana]
MPESGPSSTQVLSLLIGVPVVGSLLALAGLLLAGSVIGLMVALPLFLLFSPVIVPAALTIGLAMTGFLASGMFGLTGLSSISWVMNYLRGTRRTVPEQLEYAKRRMADAVGYAGQKGKEMGQHVQNKAQDVKQYDISKPHDTTTKGHETQGRTTAA

SEQ ID NO: 81484 - DNA, 1881 bp, Arabidopsis thaliana
  misc_feature (1)..(1881): Ceres Seq. ID no. 12660018
  misc_feature: MA Experiment ID: 20000234 Result: Down-regulated in Transcription
  misc_feature: MA Experiment 20000234 PARAMETER Experiment Name: At_Siliques_P Parameter: Age (day) Value: 21
  misc_feature: MA Experiment 20000234 PARAMETER Experiment Name: At_Siliques_P Parameter: Organism Value: A. thaliana
  misc_feature: MA Experiment 20000234 PARAMETER Experiment Name: At_Siliques_P Parameter: Plant Line Value: WS
  misc_feature: MA Experiment 20000234 PARAMETER Experiment Name: At_Siliques_P Parameter: Tissue Value: Less Than 5mm Siliques vs. Whole Plant
  misc_feature: MA Experiment ID: 20000439 Result: Up-regulated in Transcription
  misc_feature: MA Experiment 20000439 PARAMETER Experiment Name: At_Roots__P Parameter: Age (day) Value: 14 vs. 21
  misc_feature: MA Experiment 20000439 PARAMETER Experiment Name: At_Roots__P Parameter: Organism Value: A. thaliana
  misc_feature: MA Experiment 20000439 PARAMETER Experiment Name: At_Roots__P Parameter: Tissue Value: Roots vs. Whole Plant
aattcttttttgggtccgtctcttgcgtgactcaagaatcaaacaacacaagtgtcaaagccaccaagaacacaaatcgtcgaaaccccaaagaaaaaagtctcagcaaaatccttctttcatcgtctttcgatttctccaaaaaaatggaagaaattttattcgatgagattctctgcgagatatttacaagactgccatcgtcttcttcttcttcttcttcctcatcatcttcgttaccttctttcgaatcggttcctcttgtctcaaaacgatggcttcgtctctacagagcatcaaagacttccatgtccttacaattcagtcctcacgacacctctgtaattacccttttgccctctatcctcaacaaccatccttgtctctcttccctctctatctatcgcggcgtaaccataggaactaccccaagtcgttcggatgaggagcatctgaaagctgaaaccattttcagcgacgagctaatctcaatcatatcttcttgctgcttcaatctcagaaacctctgtttcttgatcaatccagtttcttcatcttctttggttcctctctctacttctttatctctcacttctctctctatcgaattatggaaaccacaaaactcaggtttcacttggattgctctgttttcatctcttaaagaattatcaatccatgtttgctcaacgagttctccagctttcgatttctatccaaagtctaaacctaacccggaagttgtagagttaggtttggaatcggtttctttatttggaatccaacctgatgataatgatgttacttggttatggaaaagttgcagaaagttaaagaaactgagtctgagatcttgtggaagtattggagaagaaatcggtttgtgtttgaagaatcttgaagagattgagttaagaacatgtaggagtattgttgatgtggttctgcttaaagtatcagagatttgtgaatctttaaagtctctgttgattcatgatggtggaagcaaagatgggttggttcagtttatgagcaatgctagatgttatgatactttggaaagactcgatttacgtctaccgatggatttgaccgatgatcatttagtctctctcgctgcgaatttcaagtgtttgtcgactcttaggcttacaagctgtatctttgtgactggttttagtctaaaggcattggctttaagctttagttcgagtcttgaagagctttctttgcttagctgcaacgcgattgaacgagagcgtggtttgttggcgacaataggacagcatttggggaggttaaggaagctagatttgactcggaacgagtggttattcgataaagaggttgtttcgatgttagcttcttgcaatggtttggttgaggttgttttgagagattgtaagcatttgacaggtgcagtgttggttgctttgaacaaaaactgtgtgaagttgaagactttagacattttaggttgtcggttgattgagcctgatgatgtggaggggtttgtgatgaagacacaatgtttgaagaagcttgtggttgaagagaatcagatcacagaagctatattgaaattggcttcgagtaagtttattgaaactgttgtgtttgattctcttgtttggtaattagttagatggattagtgtttgaataactgtgaagtatatatgggtaagtgtagataacatgaataagatggaaacacaatgatgtacattttcggtgttaagttattgtgtttatttcttctgaacaattgtaaactattatggaatatgcaaaggaaaaataattgtcgtttgtttttataatatttgtaaaccgttttacgaaattttattgaccaatatgtggttttattatttgttta

SEQ ID NO: 81485 - protein, 544 aa, Arabidopsis thaliana
  peptide (1)..(544): Ceres Seq. ID no. 12660019
  misc_feature (49)..(544): Homolog of NCBI NO: 15242713 NR Description: putative protein; protein id: At5g40470.1, by cDNA: gi_16612313 [Arabidopsis thaliana] gene_id:K21I16.4~similar to unknown protein~sp|P34284
  misc_feature (252)..(540): Homolog of NCBI NO: 25151694 NR Description: Rad-51 (Fifty one) like, Short RFS-1, F-box domain
  misc_feature (252)..(540): Homolog of NCBI NO: 25151696 NR Description: Rad-51 (Fifty one) like, Short RFS-1, F-box domain
  misc_feature (252)..(540): Homolog of NCBI NO: 630513 NR Description: hypothetical protein C02F5.7 - Caenorhabditis
  misc_feature (274)..(531): Homolog of NCBI NO: 18414458 NR Description: F-box protein family, AtFBL4; protein id: supported by cDNA: 100411., supported by cDNA: gi_13430831, by cDNA: gi_13605654, supported by cDNA: gi_15810598 [Arabidopsis
  misc_feature (274)..(531): Homolog of NCBI NO: 21536497 NR Description: F-box protein family, AtFBL4 [Arabidopsis
  misc_feature (252)..(501): Homolog of NCBI NO: 12848653 NR Description: unnamed protein product [Mus musculus]
  misc_feature (252)..(501): Homolog of NCBI NO: 38503178 NR Description: F-box/LRR-repeat protein 2-like
  misc_feature (252)..(501): Homolog of NCBI NO: 27734755 NR Description: hypothetical protein MGC15482 [Homo sapiens]
  misc_feature (286)..(526): Homolog of NCBI NO: 12848653 NR Description: unnamed protein product [Mus musculus]
FFFGSVSCVTQESNNTSVKATKNTNRRNPKEKSLSKILLSSSFDFSKKMEEILFDEILCEIFTRLPSSSSSSSSSSSSLPSFESVPLVSKRWLRLYRASKTSMSLQFSPHDTSVITLLPSILNNHPCLSSLSIYRGVTIGTTPSRSDEEHLKAETIFSDELISIISSCCFNLRNLCFLINPVSSSSLVPLSTSLSLTSLSIELWKPQNSGFTWIALFSSLKELSIHVCSTSSPAFDFYPKSKPNPEVVELGLESVSLFGIQPDDNDVTWLWKSCRKLKKLSLRSCGSIGEEIGLCLKNLEEIELRTCRSIVDVVLLKVSEICESLKSLLIHDGGSKDGLVQFMSNARCYDTLERLDLRLPMDLTDDHLVSLAANFKCLSTLRLTSCIFVTGFSLKALALSFSSSLEELSLLSCNAIERERGLLATIGQHLGRLRKLDLTRNEWLFDKEVVSMLASCNGLVEVVLRDCKHLTGAVLVALNKNCVKLKTLDILGCRLIEPDDVEGFVMKTQCLKKLVVEENQITEAILKLASSKFIETVVFDSLVW

SEQ ID NO: 81486 - protein, 496 aa, Arabidopsis thaliana
  peptide (1)..(496): Ceres Seq. ID no. 12660020
  misc_feature (1)..(496): Homolog of NCBI NO: 15242713 NR Description: putative protein; protein id: At5g40470.1, by cDNA: gi_16612313 [Arabidopsis thaliana] gene_id:K21I16.4~similar to unknown protein~sp|P34284
  misc_feature (204)..(492): Homolog of NCBI NO: 25151694 NR Description: Rad-51 (Fifty one) like, Short RFS-1, F-box domain
  misc_feature (204)..(492): Homolog of NCBI NO: 25151696 NR Description: Rad-51 (Fifty one) like, Short RFS-1, F-box domain
  misc_feature (204)..(492): Homolog of NCBI NO: 630513 NR Description: hypothetical protein C02F5.7 - Caenorhabditis
  misc_feature (226)..(483): Homolog of NCBI NO: 18414458 NR Description: F-box protein family, AtFBL4; protein id: supported by cDNA: 100411., supported by cDNA: gi_13430831, by cDNA: gi_13605654, supported by cDNA: gi_15810598 [Arabidopsis
  misc_feature (226)..(483): Homolog of NCBI NO: 21536497 NR Description: F-box protein family, AtFBL4 [Arabidopsis
  misc_feature (204)..(453): Homolog of NCBI NO: 12848653 NR Description: unnamed protein product [Mus musculus]
  misc_feature (204)..(453): Homolog of NCBI NO: 38503178 NR Description: F-box/LRR-repeat protein 2-like
  misc_feature (204)..(453): Homolog of NCBI NO: 27734755 NR Description: hypothetical protein MGC15482 [Homo sapiens]
  misc_feature (238)..(478): Homolog of NCBI NO: 12848653 NR Description: unnamed protein product [Mus musculus]
MEEILFDEILCEIFTRLPSSSSSSSSSSSSLPSFESVPLVSKRWLRLYRASKTSMSLQFSPHDTSVITLLPSILNNHPCLSSLSIYRGVTIGTTPSRSDEEHLKAETIFSDELISIISSCCFNLRNLCFLINPVSSSSLVPLSTSLSLTSLSIELWKPQNSGFTWIALFSSLKELSIHVCSTSSPAFDFYPKSKPNPEVVELGLESVSLFGIQPDDNDVTWLWKSCRKLKKLSLRSCGSIGEEIGLCLKNLEEIELRTCRSIVDVVLLKVSEICESLKSLLIHDGGSKDGLVQFMSNARCYDTLERLDLRLPMDLTDDHLVSLAANFKCLSTLRLTSCIFVTGFSLKALALSFSSSLEELSLLSCNAIERERGLLATIGQHLGRLRKLDLTRNEWLFDKEVVSMLASCNGLVEVVLRDCKHLTGAVLVALNKNCVKLKTLDILGCRLIEPDDVEGFVMKTQCLKKLVVEENQITEAILKLASSKFIETVVFDSLVW

SEQ ID NO: 81487 - protein, 442 aa, Arabidopsis thaliana
  peptide (1)..(442): Ceres Seq. ID no. 12660021
  misc_feature (1)..(442): Homolog of NCBI NO: 15242713 NR Description: putative protein; protein id: At5g40470.1, by cDNA: gi_16612313 [Arabidopsis thaliana] gene_id:K21I16.4~similar to unknown protein~sp|P34284
  misc_feature (150)..(438): Homolog of NCBI NO: 25151694 NR Description: Rad-51 (Fifty one) like, Short RFS-1, F-box domain
  misc_feature (150)..(438): Homolog of NCBI NO: 25151696 NR Description: Rad-51 (Fifty one) like, Short RFS-1, F-box domain
  misc_feature (150)..(438): Homolog of NCBI NO: 630513 NR Description: hypothetical protein C02F5.7 - Caenorhabditis
  misc_feature (172)..(429): Homolog of NCBI NO: 18414458 NR Description: F-box protein family, AtFBL4; protein id: supported by cDNA: 100411., supported by cDNA: gi_13430831, by cDNA: gi_13605654, supported by cDNA: gi_15810598 [Arabidopsis
  misc_feature (172)..(429): Homolog of NCBI NO: 21536497 NR Description: F-box protein family, AtFBL4 [Arabidopsis
  misc_feature (150)..(399): Homolog of NCBI NO: 12848653 NR Description: unnamed protein product [Mus musculus]
  misc_feature (150)..(399): Homolog of NCBI NO: 38503178 NR Description: F-box/LRR-repeat protein 2-like
  misc_feature (150)..(399): Homolog of NCBI NO: 27734755 NR Description: hypothetical protein MGC15482 [Homo sapiens]
  misc_feature (184)..(424): Homolog of NCBI NO: 12848653 NR Description: unnamed protein product [Mus musculus]
MSLQFSPHDTSVITLLPSILNNHPCLSSLSIYRGVTIGTTPSRSDEEHLKAETIFSDELISIISSCCFNLRNLCFLINPVSSSSLVPLSTSLSLTSLSIELWKPQNSGFTWIALFSSLKELSIHVCSTSSPAFDFYPKSKPNPEVVELGLESVSLFGIQPDDNDVTWLWKSCRKLKKLSLRSCGSIGEEIGLCLKNLEEIELRTCRSIVDVVLLKVSEICESLKSLLIHDGGSKDGLVQFMSNARCYDTLERLDLRLPMDLTDDHLVSLAANFKCLSTLRLTSCIFVTGFSLKALALSFSSSLEELSLLSCNAIERERGLLATIGQHLGRLRKLDLTRNEWLFDKEVVSMLASCNGLVEVVLRDCKHLTGAVLVALNKNCVKLKTLDILGCRLIEPDDVEGFVMKTQCLKKLVVEENQITEAILKLASSKFIETVVFDSLVW

SEQ ID NO: 81488 - DNA, 1956 bp, Arabidopsis thaliana
  misc_feature (1)..(1956): Ceres Seq. ID no. 12660029
  misc_feature: MA Experiment ID: 20000166 Result: Up-regulated in Transcription
  misc_feature: MA Experiment 20000166 PARAMETER Experiment Name: At_100uM_ABA_P Parameter: Age (day) Value: 14
  misc_feature: MA Experiment 20000166 PARAMETER Experiment Name: At_100uM_ABA_P Parameter: Organism Value: A. thaliana
  misc_feature: MA Experiment 20000166 PARAMETER Experiment Name: At_100uM_ABA_P Parameter: Plant Line Value: WS
  misc_feature: MA Experiment 20000166 PARAMETER Experiment Name: At_100uM_ABA_P Parameter: Timepoint (hr) Value: 1
  misc_feature: MA Experiment 20000166 PARAMETER Experiment Name: At_100uM_ABA_P Parameter: Tissue Value: Aerial
  misc_feature: MA Experiment 20000166 PARAMETER Experiment Name: At_100uM_ABA_P Parameter: Treatment Value: 100uM ABA vs. No Treatment
aaccgagaacacaagaaattctattaaaaaaaacctaaaaatgggttgctttagcagcaaacaccgaaacacagagagtgatatcatcaatggcagcgtacagagctcaattccgacaaatcaacctgaaaaccatgtctctcgtgatgttctcaagcctcagaaacctccttctcctcaaattccgacaacaacccaatcaaatcatcatcaccaacaagaatccaaacccgttaatcagcaaatcgaaaagaagcacgttctaacacaaccattgaaaccaatcgtttttagagaaacagagacaattctaggcaaaccctttgaagaaataaggaaactttacacgttaggtaaagaattaggtcgaggccaatttggtataacctacacttgcaaagagaattcaacaggcaacacatacgcttgcaaatcaatactcaagaggaaactaacgagaaagcaagacatagatgatgtgaagagagagattcagataatgcagtatttgtctggacaagagaacattgttgagatcaaaggtgcttatgaagatagacaatcgatacatttggtgatggagttgtgtggtggtagtgaattgttcgataggattatagctcaaggacattactctgagaaagcagctgctggtgttattagatcggttttgaatgttgttcagatttgtcatttcatgggagtgattcatcgtgatctcaagcctgagaattttctgctcgctagtactgatgagaatgctatgcttaaagctactgattttggattgtctgtgttcattgaagaagggaaagtttatagggatatagtaggaagtgcttactatgttgctcctgaagtattaagaagaagttatggaaaagaaatcgatatttggagtgcagggattattctatacatcttgctttgtggtgtgcctcctttttggtctgaaactgagaaggggatatttaatgagattataaagggagaaattgattttgatagccaaccatggccttctatatctgagagtgctaaagatcttgtgaggaagttgcttactaaggaccctaagcaacgaatctcagcggcacaagctcttgaacatccttggatcagaggaggagaagcaccggacaagcctattgatagtgctgttttatctcggatgaagcaattccgagcaatgaataagcttaaaaagctagctctaaaggttattgcagagagtctctcggaagaggaaattaaaggtcttaaaaccatgtttgcgaatatggatactgacaaaagcggcacaatcacttatgaagaactgaaaaacgggctagctaaacttggctctaaactcactgaagctgaagtgaagcaactcatggaagccgctgatgtagatggtaatggaacaattgactacatcgaatttatctcagcaacgatgcatagatacagatttgatcgagatgaacacgtattcaaagccttccaatacttcgacaaagacaacagcgggtttatcacaatggatgagttggagtcagccatgaaagagtatggtatgggagatgaagctagcatcaaagaagtcatagcggaagtcgatacagataacgatggaagaataaactatgaagaattttgtgcgatgatgagaagtggtatcacactgccacaacaagggaaaattcttccagtccaatgactgatagataaatcgagaagccttgatagaggaacttaaaaattaattagatatccaacattttttacagccgtgcaaaagagttgctgacttaaactagatactagttgtgttgtccaataaaaacaagtggcctttaatttctttctcttatctgatatgtcttgtccaaagttttggttactttagagtaccagcaaattactttcggagttatacatgtgtgcccaataaagaagttgtagtatagt

SEQ ID NO: 81489 - protein, 567 aa, Arabidopsis thaliana
  peptide (1)..(567): Ceres Seq. ID no. 12660030
  misc_feature (115)..(373): Pfam Name: Protein kinase domain Pfam Description: Protein kinase domain
  misc_feature (14)..(567): Homolog of NCBI NO: 15234656 NR Description: calcium-dependent protein kinase - like protein; id: At4g21940.1, supported by cDNA: gi_17104578 [Arabidopsis
  misc_feature (56)..(565): Homolog of NCBI NO: 15234435 NR Description: putative calcium dependent protein kinase; id: At4g04720.1, supported by cDNA: gi_15292914 [Arabidopsis >gi|25287682|pir||D85059 probable calcium dependent protein
  misc_feature (56)..(565): Homolog of NCBI NO: 15292915 NR Description: putative calcium dependent protein kinase
  misc_feature (15)..(560): Homolog of NCBI NO: 19171502 NR Description: calcium-dependent protein kinase [Lycopersicon
  misc_feature (15)..(559): Homolog of NCBI NO: 7428009 NR Description: calcium-dependent protein kinase (EC 2.7.1.-) 1 -
  misc_feature (62)..(554): Homolog of NCBI NO: 23616997 NR Description: CDP2_ORYSA Calcium-dependent protein kinase
  misc_feature (14)..(554): Homolog of NCBI NO: 13561063 NR Description: protein kinase [Medicago sativa]
  misc_feature (57)..(552): Homolog of NCBI NO: 2827773 NR Description: Calcium-dependent protein kinase (CDPK)
TENTRNSIKKNLKMGCFSSKHRNTESDIINGSVQSSIPTNQPENHVSRDVLKPQKPPSPQIPTTTQSNHHHQQESKPVNQQIEKKHVLTQPLKPIVFRETETILGKPFEEIRKLYTLGKELGRGQFGITYTCKENSTGNTYACKSILKRKLTRKQDIDDVKREIQIMQYLSGQENIVEIKGAYEDRQSIHLVMELCGGSELFDRIIAQGHYSEKAAAGVIRSVLNVVQICHFMGVIHRDLKPENFLLASTDENAMLKATDFGLSVFIEEGKVYRDIVGSAYYVAPEVLRRSYGKEIDIWSAGIILYILLCGVPPFWSETEKGIFNEIIKGEIDFDSQPWPSISESAKDLVRKLLTKDPKQRISAAQALEHPWIRGGEAPDKPIDSAVLSRMKQFRAMNKLKKLALKVIAESLSEEEIKGLKTMFANMDTDKSGTITYEELKNGLAKLGSKLTEAEVKQLMEAADVDGNGTIDYIEFISATMHRYRFDRDEHVFKAFQYFDKDNSGFITMDELESAMKEYGMGDEASIKEVIAEVDTDNDGRINYEEFCAMMRSGITLPQQGKILPVQ

SEQ ID NO: 81490 - protein, 554 aa, Arabidopsis thaliana
  peptide (1)..(554): Ceres Seq. ID no. 12660031
  misc_feature (102)..(360): Pfam Name: Protein kinase domain Pfam Description: Protein kinase domain
  misc_feature (1)..(554): Homolog of NCBI NO: 15234656 NR Description: calcium-dependent protein kinase - like protein; id: At4g21940.1, supported by cDNA: gi_17104578 [Arabidopsis
  misc_feature (43)..(552): Homolog of NCBI NO: 15234435 NR Description: putative calcium dependent protein kinase; id: At4g04720.1, supported by cDNA: gi_15292914 [Arabidopsis >gi|25287682|pir||D85059 probable calcium dependent protein
  misc_feature (43)..(552): Homolog of NCBI NO: 15292915 NR Description: putative calcium dependent protein kinase
  misc_feature (2)..(547): Homolog of NCBI NO: 19171502 NR Description: calcium-dependent protein kinase [Lycopersicon
  misc_feature (2)..(546): Homolog of NCBI NO: 7428009 NR Description: calcium-dependent protein kinase (EC 2.7.1.-) 1 -
  misc_feature (49)..(541): Homolog of NCBI NO: 23616997 NR Description: CDP2_ORYSA Calcium-dependent protein kinase
  misc_feature (1)..(541): Homolog of NCBI NO: 13561063 NR Description: protein kinase [Medicago sativa]
  misc_feature (44)..(539): Homolog of NCBI NO: 2827773 NR Description: Calcium-dependent protein kinase (CDPK)
MGCFSSKHRNTESDIINGSVQSSIPTNQPENHVSRDVLKPQKPPSPQIPTTTQSNHHHQQESKPVNQQIEKKHVLTQPLKPIVFRETETILGKPFEEIRKLYTLGKELGRGQFGITYTCKENSTGNTYACKSILKRKLTRKQDIDDVKREIQIMQYLSGQENIVEIKGAYEDRQSIHLVMELCGGSELFDRIIAQGHYSEKAAAGVIRSVLNVVQICHFMGVIHRDLKPENFLLASTDENAMLKATDFGLSVFIEEGKVYRDIVGSAYYVAPEVLRRSYGKEIDIWSAGIILYILLCGVPPFWSETEKGIFNEIIKGEIDFDSQPWPSISESAKDLVRKLLTKDPKQRISAAQALEHPWIRGGEAPDKPIDSAVLSRMKQFRAMNKLKKLALKVIAESLSEEEIKGLKTMFANMDTDKSGTITYEELKNGLAKLGSKLTEAEVKQLMEAADVDGNGTIDYIEFISATMHRYRFDRDEHVFKAFQYFDKDNSGFITMDELESAMKEYGMGDEASIKEVIAEVDTDNDGRINYEEFCAMMRSGITLPQQGKILPVQ

SEQ ID NO: 81491 - protein, 401 aa, Arabidopsis thaliana
  peptide (1)..(401): Ceres Seq. ID no. 12660032
  misc_feature (1)..(207): Pfam Name: Protein kinase domain Pfam Description: Protein kinase domain
  misc_feature (1)..(401): Homolog of NCBI NO: 15234656 NR Description: calcium-dependent protein kinase - like protein; id: At4g21940.1, supported by cDNA: gi_17104578 [Arabidopsis
  misc_feature (1)..(399): Homolog of NCBI NO: 15234435 NR Description: putative calcium dependent protein kinase; id: At4g04720.1, supported by cDNA: gi_15292914 [Arabidopsis >gi|25287682|pir||D85059 probable calcium dependent protein
  misc_feature (1)..(399): Homolog of NCBI NO: 15292915 NR Description: putative calcium dependent protein kinase
  misc_feature (1)..(394): Homolog of NCBI NO: 19171502 NR Description: calcium-dependent protein kinase [Lycopersicon
  misc_feature (1)..(393): Homolog of NCBI NO: 7428009 NR Description: calcium-dependent protein kinase (EC 2.7.1.-) 1 -
  misc_feature (1)..(388): Homolog of NCBI NO: 23616997 NR Description: CDP2_ORYSA Calcium-dependent protein kinase
  misc_feature (1)..(388): Homolog of NCBI NO: 13561063 NR Description: protein kinase [Medicago sativa]
  misc_feature (1)..(386): Homolog of NCBI NO: 2827773 NR Description: Calcium-dependent protein kinase (CDPK)
MQYLSGQENIVEIKGAYEDRQSIHLVMELCGGSELFDRIIAQGHYSEKAAAGVIRSVLNVVQICHFMGVIHRDLKPENFLLASTDENAMLKATDFGLSVFIEEGKVYRDIVGSAYYVAPEVLRRSYGKEIDIWSAGIILYILLCGVPPFWSETEKGIFNEIIKGEIDFDSQPWPSISESAKDLVRKLLTKDPKQRISAAQALEHPWIRGGEAPDKPIDSAVLSRMKQFRAMNKLKKLALKVIAESLSEEEIKGLKTMFANMDTDKSGTITYEELKNGLAKLGSKLTEAEVKQLMEAADVDGNGTIDYIEFISATMHRYRFDRDEHVFKAFQYFDKDNSGFITMDELESAMKEYGMGDEASIKEVIAEVDTDNDGRINYEEFCAMMRSGITLPQQGKILPVQ

SEQ ID NO: 81492 - DNA, 1191 bp, Arabidopsis thaliana
  misc_feature (1)..(1191): Ceres Seq. ID no. 12660033
  misc_feature: MA Experiment ID: 20000179 Result: Down-regulated in Transcription
  misc_feature: MA Experiment 20000179 PARAMETER Experiment Name: At_Germinating_Seeds_P Parameter: Age (hr) Value: 6 vs. 0
  misc_feature: MA Experiment 20000179 PARAMETER Experiment Name: At_Germinating_Seeds_P Parameter: Tissue Value: Germinating Seeds
  misc_feature: MA Experiment ID: 20000185 Result: Down-regulated in Transcription
  misc_feature: MA Experiment 20000185 PARAMETER Experiment Name: At_Roots__P Parameter: Age (day) Value: 7 vs. 21
  misc_feature: MA Experiment 20000185 PARAMETER Experiment Name: At_Roots__P Parameter: Organism Value: A. thaliana
  misc_feature: MA Experiment 20000185 PARAMETER Experiment Name: At_Roots__P Parameter: Tissue Value: Roots vs. Whole Plant
  misc_feature: MA Experiment ID: 20000438 Result: Down-regulated in Transcription
  misc_feature: MA Experiment 20000438 PARAMETER Experiment Name: At_Shoots__P Parameter: Age (day) Value: 14
  misc_feature: MA Experiment 20000438 PARAMETER Experiment Name: At_Shoots__P Parameter: Tissue Value: Shoots vs. Whole Plant
  misc_feature: MA Experiment ID: 20001248 Result: Up-regulated in Transcription
  misc_feature: MA Experiment 20001248 PARAMETER Experiment Name: At_Far-red-induction_P Parameter: Age (day) Value: 7
  misc_feature: MA Experiment 20001248 PARAMETER Experiment Name: At_Far-red-induction_P Parameter: Light Value: Far-red vs. White
  misc_feature: MA Experiment 20001248 PARAMETER Experiment Name: At_Far-red-induction_P Parameter: Organism Value: A. thaliana
  misc_feature: MA Experiment 20001248 PARAMETER Experiment Name: At_Far-red-induction_P Parameter: Plant Line Value: Columbia
  misc_feature: MA Experiment 20001248 PARAMETER Experiment Name: At_Far-red-induction_P Parameter: Timepoint (hr) Value: 4
  misc_feature: MA Experiment 20001248 PARAMETER Experiment Name: At_Far-red-induction_P Parameter: Tissue Value: Whole Plant
  misc_feature: MA Experiment ID: 20001458 Result: Up-regulated in Transcription
  misc_feature: MA Experiment 20001458 PARAMETER Experiment Name: At_50mM_NH4NO3_L-to-H_P Parameter: Age (day) Value: Undefined
  misc_feature: MA Experiment 20001458 PARAMETER Experiment Name: At_50mM_NH4NO3_L-to-H_P Parameter: Organism Value: Undefined
  misc_feature: MA Experiment 20001458 PARAMETER Experiment Name: At_50mM_NH4NO3_L-to-H_P Parameter: Plant Line Value: Undefined
  misc_feature: MA Experiment 20001458 PARAMETER Experiment Name: At_50mM_NH4NO3_L-to-H_P Parameter: Timepoint (hr) Value: 2
  misc_feature: MA Experiment 20001458 PARAMETER Experiment Name: At_50mM_NH4NO3_L-to-H_P Parameter: Tissue Value: Siliques
  misc_feature: MA Experiment 20001458 PARAMETER Experiment Name: At_50mM_NH4NO3_L-to-H_P Parameter: Treatment Value: 50mM NH4NO3 vs. 100mM Manitol
  misc_feature: MA Experiment ID: 20001557 Result: Up-regulated in Transcription
  misc_feature: MA Experiment 20001557 PARAMETER Experiment Name: At_Drought_Soil_Dry_P Parameter: Age (day) Value: 27
  misc_feature: MA Experiment 20001557 PARAMETER Experiment Name: At_Drought_Soil_Dry_P Parameter: Organism Value: A. thaliana
  misc_feature: MA Experiment 20001557 PARAMETER Experiment Name: At_Drought_Soil_Dry_P Parameter: Plant Line Value: WS
  misc_feature: MA Experiment 20001557 PARAMETER Experiment Name: At_Drought_Soil_Dry_P Parameter: Post Timepoint (hr) Value: 3
  misc_feature: MA Experiment 20001557 PARAMETER Experiment Name: At_Drought_Soil_Dry_P Parameter: Post-Treatment Value: Re-Water vs. No Drought
  misc_feature: MA Experiment 20001557 PARAMETER Experiment Name: At_Drought_Soil_Dry_P Parameter: Timepoint (day) Value: 13
  misc_feature: MA Experiment 20001557 PARAMETER Experiment Name: At_Drought_Soil_Dry_P Parameter: Treatment Value: Drought vs. No Drought
atggctactcattcaaggtttatatacgtgcttcttcttctttcatgcattgtttttgcattgcttgggggtagttgtggagatagtgtggagaataacaatgacgatgatgattgttcttcccggagttggcgtggttgtggtagtttctacggaaaaggtgctaaaagatatggcggtggaggcggaggaggaggtggcggtggaggaggtggtggtgaaggaggtgatgggtatggccatggagaaggatatggtgctggagctggtatgagtggctatggtggtgttggaggaggtggaggaagaggcggcggagaaggtggtggcagtagtgcaaatggaggttctgggcatggaagtggatccggtgctggtgctggtgttggtggaacaactggtggagtaggaggaggtggaggaggcggtggcggtggcggagaaggaggtggttcaagtggaggatcaggtcatgggagtggttctggagctggagctggtgctggagttggtggatcatctgggggagctgggggaggtggaggaggtggtggcggagaaggcggtggtgcgaatggaggttcaggtcatggaagtggggctggtgctggtgctggagttggaggagcagctggtggagtaggaggagggggaggaggcggtggtggagaaggcggtggtgccaatggaggatcaggtcatggaagcggatccggtgctggtggtggagttagtggagcagcaggtggaggaggaggaggaggaggaggtggtggtagcggtggtagtaaagtcggtggaggatatggtcatggtagtggttttggtggtggagttggctttggaaatagtggaggaggaggtggtggtggtggaggaggtggaggtggaggcggtggtggaaatggatctggttatggaagtggtagtggttacggttctggtatgggaaaaggtagtggtagtggtggcggtggtggtggtggtggtggaggtagcggtggaggcaacggaagcggaagtggaagtggagaaggatatggaatgggaggaggagccggaacaggcaatggaggaggagggggagtgggttttggaatgggcattggatttggtattggcattggaggaggaagtggtggtggtaccacttatcaaaccaatcttaccggtgataaaaattctccctag

SEQ ID NO: 81493 - protein, 396 aa, Arabidopsis thaliana
  peptide (1)..(396): Ceres Seq. ID no. 12660034
  misc_feature (67)..(395): Pfam Name: Dehydrin Pfam Description: Dehydrin
  misc_feature (1)..(396): Homolog of NCBI NO: 15234690 NR Description: glycine-rich protein; protein id: At4g22020.1
  misc_feature (10)..(382): Homolog of NCBI NO: 30679126 NR Description: expressed protein [Arabidopsis thaliana]
  misc_feature (1)..(381): Homolog of NCBI NO: 121627 NR Description: GLYCINE-RICH CELL WALL STRUCTURAL PROTEIN 1
  misc_feature (46)..(346): Homolog of NCBI NO: 30679126 NR Description: expressed protein [Arabidopsis thaliana]
  misc_feature (10)..(378): Homolog of NCBI NO: 30679122 NR Description: expressed protein [Arabidopsis thaliana]
  misc_feature (89)..(383): Homolog of NCBI NO: 30679122 NR Description: expressed protein [Arabidopsis thaliana]
  misc_feature (36)..(382): Homolog of NCBI NO: 121627 NR Description: GLYCINE-RICH CELL WALL STRUCTURAL PROTEIN 1
  misc_feature (48)..(371): Homolog of NCBI NO: 34394662 NR Description: putative glycine-rich cell wall structural
  misc_feature (46)..(382): Homolog of NCBI NO: 34898126 NR Description: putative glycine-rich cell wall protein precursor
  misc_feature (46)..(382): Homolog of NCBI NO: 34898126 NR Description: putative glycine-rich cell wall protein precursor
MATHSRFIYVLLLLSCIVFALLGGSCGDSVENNNDDDDCSSRSWRGCGSFYGKGAKRYGGGGGGGGGGGGGGGEGGDGYGHGEGYGAGAGMSGYGGVGGGGGRGGGEGGGSSANGGSGHGSGSGAGAGVGGTTGGVGGGGGGGGGGGEGGGSSGGSGHGSGSGAGAGAGVGGSSGGAGGGGGGGGGEGGGANGGSGHGSGAGAGAGVGGAAGGVGGGGGGGGGEGGGANGGSGHGSGSGAGGGVSGAAGGGGGGGGGGGSGGSKVGGGYGHGSGFGGGVGFGNSGGGGGGGGGGGGGGGGGNGSGYGSGSGYGSGMGKGSGSGGGGGGGGGGSGGGNGSGSGSGEGYGMGGGAGTGNGGGGGVGFGMGIGFGIGIGGGSGGGTTYQTNLTGDKNSP

SEQ ID NO: 81494 - protein, 306 aa, Arabidopsis thaliana
  peptide (1)..(306): Ceres Seq. ID no. 12660035
  misc_feature (1)..(305): Pfam Name: Dehydrin Pfam Description: Dehydrin
  misc_feature (1)..(306): Homolog of NCBI NO: 15234690 NR Description: glycine-rich protein; protein id: At4g22020.1
  misc_feature (1)..(292): Homolog of NCBI NO: 30679126 NR Description: expressed protein [Arabidopsis thaliana]
  misc_feature (1)..(291): Homolog of NCBI NO: 121627 NR Description: GLYCINE-RICH CELL WALL STRUCTURAL PROTEIN 1
  misc_feature (1)..(256): Homolog of NCBI NO: 30679126 NR Description: expressed protein [Arabidopsis thaliana]
  misc_feature (1)..(288): Homolog of NCBI NO: 30679122 NR Description: expressed protein [Arabidopsis thaliana]
  misc_feature (1)..(293): Homolog of NCBI NO: 30679122 NR Description: expressed protein [Arabidopsis thaliana]
  misc_feature (1)..(292): Homolog of NCBI NO: 121627 NR Description: GLYCINE-RICH CELL WALL STRUCTURAL PROTEIN 1
  misc_feature (1)..(281): Homolog of NCBI NO: 34394662 NR Description: putative glycine-rich cell wall structural
  misc_feature (1)..(292): Homolog of NCBI NO: 34898126 NR Description: putative glycine-rich cell wall protein precursor
  misc_feature (1)..(292): Homolog of NCBI NO: 34898126 NR Description: putative glycine-rich cell wall protein precursor
MSGYGGVGGGGGRGGGEGGGSSANGGSGHGSGSGAGAGVGGTTGGVGGGGGGGGGGGEGGGSSGGSGHGSGSGAGAGAGVGGSSGGAGGGGGGGGGEGGGANGGSGHGSGAGAGAGVGGAAGGVGGGGGGGGGEGGGANGGSGHGSGSGAGGGVSGAAGGGGGGGGGGGSGGSKVGGGYGHGSGFGGGVGFGNSGGGGGGGGGGGGGGGGGNGSGYGSGSGYGSGMGKGSGSGGGGGGGGGGSGGGNGSGSGSGEGYGMGGGAGTGNGGGGGVGFGMGIGFGIGIGGGSGGGTTYQTNLTGDKNSP

SEQ ID NO: 81495 - DNA, 1011 bp, Arabidopsis thaliana
  misc_feature (1)..(1011): Ceres Seq. ID no. 12660040
  misc_feature: MA Experiment ID: 20000234 Result: Up-regulated in Transcription
  misc_feature: MA Experiment 20000234 PARAMETER Experiment Name: At_Siliques_P Parameter: Age (day) Value: 21
  misc_feature: MA Experiment 20000234 PARAMETER Experiment Name: At_Siliques_P Parameter: Organism Value: A. thaliana
  misc_feature: MA Experiment 20000234 PARAMETER Experiment Name: At_Siliques_P Parameter: Plant Line Value: WS
  misc_feature: MA Experiment 20000234 PARAMETER Experiment Name: At_Siliques_P Parameter: Tissue Value: Less Than 5mm Siliques vs. Whole Plant
  misc_feature: MA Experiment ID: 20000235 Result: Up-regulated in Transcription
  misc_feature: MA Experiment 20000235 PARAMETER Experiment Name: At_Siliques_P Parameter: Age (day) Value: 21
  misc_feature: MA Experiment 20000235 PARAMETER Experiment Name: At_Siliques_P Parameter: Organism Value: A. thaliana
  misc_feature: MA Experiment 20000235 PARAMETER Experiment Name: At_Siliques_P Parameter: Plant Line Value: WS
  misc_feature: MA Experiment 20000235 PARAMETER Experiment Name: At_Siliques_P Parameter: Tissue Value: 5-10mm Siliques vs. Whole Plant
  misc_feature: MA Experiment ID: 20000286 Result: Up-regulated in Transcription
  misc_feature: MA Experiment 20000286 PARAMETER Experiment Name: At_Open_Flower_P Parameter: Age (day) Value: 21
  misc_feature: MA Experiment 20000286 PARAMETER Experiment Name: At_Open_Flower_P Parameter: Plant Line Value: WS
  misc_feature: MA Experiment 20000286 PARAMETER Experiment Name: At_Open_Flower_P Parameter: Tissue Value: Half Open vs. Whole Plant
  misc_feature: MA Experiment ID: 20001760 Result: Up-regulated in Transcription
  misc_feature: MA Experiment 20001760 PARAMETER Experiment Name: At_50mM_NH4NO3_L-to-H_P Parameter: Timepoint (hr) Value: 2
  misc_feature: MA Experiment 20001760 PARAMETER Experiment Name: At_50mM_NH4NO3_L-to-H_P Parameter: Tissue Value: Siliques
  misc_feature: MA Experiment 20001760 PARAMETER Experiment Name: At_50mM_NH4NO3_L-to-H_P Parameter: Treatment Value: 50mM NH4NO3 vs 100mM Mannitol
atgtatacgagtatatttttcatcttttcctttctttctgtgtcagaagcgcttgtgagaatcccgttgcagatagatcatgccttgtcaacaaacaatgatggagttcagttgaagaacgtaaaggactttctgtactatgggaagatccaaattggcaatccaggccaaactttcactgttctgtttgataccggaagttcttccctttgggtcccgtcagaaaattggctggccaaaactgaaaaccctcgcaatcgttacatatccagtgcctcaagaacctttaaagaaaatggaacaaaggcagagctcaagtatggaaagggttccctcacgggtttcctaagtgttgacaccgttacggttggtgggattagcatcacgtcacagaccttcatagagggcgttaagactccttacaaagagtttttcaagaaaatgccgtttgatggtatattgggactcaggttcacggacccgctcaatttcggtacatctgtttggcactctatggttttccaaggcaaaattgcaaaaaatgtgttctctatctggcttagacggttttctaactctggagaaatcaacggtggagaggtagtatttggaggaatcatcccagcgcatttctccggtgaccatacatacgttgacgtggaagggccaggaaacttcttcgcaatgtccaacatttgggtcggaggaaaaaacaccaacatttgctccagtggctgcaaagctattgttgactccggaagttcaaatattaatgttccaatggattccgctgacgagatccataggtatatcggagtagaaccaaactgcaataattttgagacgctgcctgatgtcacctttacgatcggcggaaaggccttcgtcctcacaccacttgatgtaagtggaacgacattgggcatcccattcatgcgagtctttcacactgtttttgattaccagaacacacttgcagtgaaagttgggttcgctaagtcgactgattag

SEQ ID NO: 81496 - protein, 336 aa, Arabidopsis thaliana
  peptide (1)..(336): Ceres Seq. ID no. 12660041
  misc_feature (11)..(334): Pfam Name: Eukaryotic aspartyl protease Pfam Description: Eukaryotic aspartyl protease
  misc_feature (1)..(336): Homolog of NCBI NO: 11265692 NR Description: aspartic proteinase like protein - Arabidopsis >gi|2961350|emb|CAA18108.1| aspartic proteinase like protein thaliana] >gi|7269050|emb|CAB79160.1| aspartic proteinase like
  misc_feature (1)..(301): Homolog of NCBI NO: 30685656 NR Description: aspartic proteinase like protein [Arabidopsis
  misc_feature (306)..(336): Homolog of NCBI NO: 30685656 NR Description: aspartic proteinase like protein [Arabidopsis
  misc_feature (16)..(274): Homolog of NCBI NO: 1076696 NR Description: cyprosin (EC 3.4.23.-) - cardoon
  misc_feature (257)..(299): Homolog of NCBI NO: 1076696 NR Description: cyprosin (EC 3.4.23.-) - cardoon
  misc_feature (31)..(274): Homolog of NCBI NO: 1665867 NR Description: aspartic proteinase [Centaurea calcitrapa]
  misc_feature (257)..(299): Homolog of NCBI NO: 1665867 NR Description: aspartic proteinase [Centaurea calcitrapa]
  misc_feature (34)..(272): Homolog of NCBI NO: 1168536 NR Description: Phytepsin precursor (Aspartic proteinase)
  misc_feature (34)..(272): Homolog of NCBI NO: 5822248 NR Description: Chain A, Crystal Structure Of Prophytepsin, A Of A Barley Vacuolar Aspartic Proteinase. >gi|5822249|pdb|1QDM|B B, Crystal Structure Of Prophytepsin, A Zymogen Of A Barley
  misc_feature (276)..(299): Homolog of NCBI NO: 1168536 NR Description: Phytepsin precursor (Aspartic proteinase)
MYTSIFFIFSFLSVSEALVRIPLQIDHALSTNNDGVQLKNVKDFLYYGKIQIGNPGQTFTVLFDTGSSSLWVPSENWLAKTENPRNRYISSASRTFKENGTKAELKYGKGSLTGFLSVDTVTVGGISITSQTFIEGVKTPYKEFFKKMPFDGILGLRFTDPLNFGTSVWHSMVFQGKIAKNVFSIWLRRFSNSGEINGGEVVFGGIIPAHFSGDHTYVDVEGPGNFFAMSNIWVGGKNTNICSSGCKAIVDSGSSNINVPMDSADEIHRYIGVEPNCNNFETLPDVTFTIGGKAFVLTPLDVSGTTLGIPFMRVFHTVFDYQNTLAVKVGFAKSTD

SEQ ID NO: 81497 - protein, 189 aa, Arabidopsis thaliana
  peptide (1)..(189): Ceres Seq. ID no. 12660042
  misc_feature (1)..(187): Pfam Name: Eukaryotic aspartyl protease Pfam Description: Eukaryotic aspartyl protease
  misc_feature (1)..(189): Homolog of NCBI NO: 11265692 NR Description: aspartic proteinase like protein - Arabidopsis >gi|2961350|emb|CAA18108.1| aspartic proteinase like protein thaliana] >gi|7269050|emb|CAB79160.1| aspartic proteinase like
  misc_feature (1)..(154): Homolog of NCBI NO: 30685656 NR Description: aspartic proteinase like protein [Arabidopsis
  misc_feature (159)..(189): Homolog of NCBI NO: 30685656 NR Description: aspartic proteinase like protein [Arabidopsis
  misc_feature (1)..(127): Homolog of NCBI NO: 1076696 NR Description: cyprosin (EC 3.4.23.-) - cardoon
  misc_feature (110)..(152): Homolog of NCBI NO: 1076696 NR Description: cyprosin (EC 3.4.23.-) - cardoon
  misc_feature (1)..(127): Homolog of NCBI NO: 1665867 NR Description: aspartic proteinase [Centaurea calcitrapa]
  misc_feature (110)..(152): Homolog of NCBI NO: 1665867 NR Description: aspartic proteinase [Centaurea calcitrapa]
  misc_feature (1)..(125): Homolog of NCBI NO: 1168536 NR Description: Phytepsin precursor (Aspartic proteinase)
  misc_feature (1)..(125): Homolog of NCBI NO: 5822248 NR Description: Chain A, Crystal Structure Of Prophytepsin, A Of A Barley Vacuolar Aspartic Proteinase. >gi|5822249|pdb|1QDM|B B, Crystal Structure Of Prophytepsin, A Zymogen Of A Barley
  misc_feature (129)..(152): Homolog of NCBI NO: 1168536 NR Description: Phytepsin precursor (Aspartic proteinase)
MPFDGILGLRFTDPLNFGTSVWHSMVFQGKIAKNVFSIWLRRFSNSGEINGGEVVFGGIIPAHFSGDHTYVDVEGPGNFFAMSNIWVGGKNTNICSSGCKAIVDSGSSNINVPMDSADEIHRYIGVEPNCNNFETLPDVTFTIGGKAFVLTPLDVSGTTLGIPFMRVFHTVFDYQNTLAVKVGFAKSTD

SEQ ID NO: 81498 - DNA, 1617 bp, Arabidopsis thaliana
  misc_feature (1)..(1617): Ceres Seq. ID no. 12660047
  misc_feature: MA Experiment ID: 20000227 Result: Down-regulated in Transcription
  misc_feature: MA Experiment 20000227 PARAMETER Experiment Name: At_Root-Tips-vs-Tops_P Parameter: Tissue Value: Root Tips vs. Root Tops
  misc_feature: MA Experiment ID: 20000439 Result: Up-regulated in Transcription
  misc_feature: MA Experiment 20000439 PARAMETER Experiment Name: At_Roots__P Parameter: Age (day) Value: 14 vs. 21
  misc_feature: MA Experiment 20000439 PARAMETER Experiment Name: At_Roots__P Parameter: Organism Value: A. thaliana
  misc_feature: MA Experiment 20000439 PARAMETER Experiment Name: At_Roots__P Parameter: Tissue Value: Roots vs. Whole Plant
  misc_feature: MA Experiment ID: 20000496 Result: Down-regulated in Transcription
  misc_feature: MA Experiment 20000496 PARAMETER Experiment Name: At_Guard_Cells_P Parameter: Harvest Date Value: 7/19/2002
  misc_feature: MA Experiment 20000496 PARAMETER Experiment Name: At_Guard_Cells_P Parameter: Organism Value: Canola
  misc_feature: MA Experiment 20000496 PARAMETER Experiment Name: At_Guard_Cells_P Parameter: Tissue Value: Guard Cells vs. Leaves
  misc_feature: MA Experiment ID: 20000527 Result: Down-regulated in Transcription
  misc_feature: MA Experiment 20000527 PARAMETER Experiment Name: At_10percent_PEG_P Parameter: Age (day) Value: 20
  misc_feature: MA Experiment 20000527 PARAMETER Experiment Name: At_10percent_PEG_P Parameter: Organism Value: A. thaliana
  misc_feature: MA Experiment 20000527 PARAMETER Experiment Name: At_10percent_PEG_P Parameter: Plant Line Value: WS
  misc_feature: MA Experiment 20000527 PARAMETER Experiment Name: At_10percent_PEG_P Parameter: Timepoint (day) Value: 20
  misc_feature: MA Experiment 20000527 PARAMETER Experiment Name: At_10percent_PEG_P Parameter: Tissue Value: Whole Plant
  misc_feature: MA Experiment 20000527 PARAMETER Experiment Name: At_10percent_PEG_P Parameter: Treatment Value: 10percent PEG vs. No Treatment
atgttccggtttccagtgagtctaggcggttcacgtgacgaagaccgtcacgatcagatcacaccgttggatgaccatcgtgtggtggttgatgaggttgacttcttctcagagaagagagatagggtttcacgtgagaacatcaacgacgacgacgacgaaggcaataaggttctcatcaaaatggagggttcacgagttgaagaaaacgatcgttccagagatgtcaatatcggtctgaatcttctgaccgcgaatacgggaagcgatgagtcaacggtggatgatggactatcaatggatatggaagataaacgtgcaaagattgagaacgcacaactacaagaagagctcaagaagatgaaaatagagaatcaaaggctaagagatatgttgagccaagcgacgaccaacttcaatgccttacaaatgcaacttgttgccgtcatgaggcaacaagaacaacgtaactcttcacaagatcatctcctggctcaggagagcaaagcagaaggaaggaaacggcaggaactgcaaatcatggtgccaaggcagttcatggaccttgggccgtcgtctggagcagcagagcatggagccgaagtgtcatctgaagagaggacaacggttcgttcaggttctcctccttcgcttctagaaagttccaatccccgagagaacggaaagaggttgcttggaagagaagaaagctcagaggaatcagagtctaacgcctggggaaaccctaacaaagtccccaaacataatccatcctctagcaatagcaatggaaacagaaacggaaatgttattgatcagtcggccgcagaagccaccatgcggaaagcccgtgtctcagttcgtgcccgatctgaagctgccatgataagcgatggatgtcaatggagaaagtacggacaaaaaatggctaaaggaaacccgtgtccgcgggcttattatcgttgcacaatggccggtggatgtccagttcgcaagcaagtgcagcgttgcgcagaagacagatctattctcataaccacctacgaaggaaaccacaaccatccactcccaccagccgctacggccatggcctcaacaaccaccgcagctgcaagcatgctcctctcgggctcaatgtcgagtcaagacggtttaatgaacccaacaaacctcctagctcgagctatcttgccttgctcctcaagcatggctacaatctcagcctccgcaccattcccaaccatcacattggacctcaccaattcacccaacggtaacaaccctaatatgaccactaataacccgttgatgcagttcgctcaacggcccggtttcaacccggcagttttgcctcaagtggttggtcaagctatgtacaataaccaacaacagtccaagttttctggtttacagttaccggctcagccactgcagatcgcggccacttcctcggtggccgagagcgttagtgctgccagtgcagcaattgcgtccgatccaaactttgcggcggctctagcggcagcgatcacgtccattatgaacggttccagtcatcaaaataataacaccaataataataatgtggctacgagcaacaatgacagtaggcaataa

SEQ ID NO: 81499 - protein, 538 aa, Arabidopsis thaliana
  peptide (1)..(538): Ceres Seq. ID no. 12660048
  misc_feature (296)..(356): Pfam Name: WRKY DNA -binding domain Pfam Description: WRKY DNA -binding domain
  misc_feature (1)..(538): Homolog of NCBI NO: 18415833 NR Description: WRKY family transcription factor; protein id: supported by cDNA: gi_15990589 [Arabidopsis thaliana]
  misc_feature (124)..(538): Homolog of NCBI NO: 11357339 NR Description: hypothetical protein AT4g22070 - Arabidopsis >gi|2961352|emb|CAA18110.1| putative protein [Arabidopsis >gi|7269052|emb|CAB79162.1| putative protein [Arabidopsis
  misc_feature (1)..(538): Homolog of NCBI NO: 15233516 NR Description: WRKY family transcription factor; protein id: supported by cDNA: gi_15990593 [Arabidopsis thaliana]
  misc_feature (32)..(515): Homolog of NCBI NO: 34904618 NR Description: putative WRKY DNA binding protein [Oryza sativa
  misc_feature (221)..(528): Homolog of NCBI NO: 18407554 NR Description: WRKY family transcription factor; protein id: supported by cDNA: gi_12658409, supported by cDNA: gi_15810266 thaliana] >gi|20978780|sp|Q9C519|WRK6_ARATH WRKY transcription
  misc_feature (76)..(280): Homolog of NCBI NO: 25404372 NR Description: hypothetical protein F19K23.22 [imported] - thaliana >gi|2160152|gb|AAB60774.1| ESTs
  misc_feature (334)..(528): Homolog of NCBI NO: 25404372 NR Description: hypothetical protein F19K23.22 [imported] - thaliana >gi|2160152|gb|AAB60774.1| ESTs
  misc_feature (109)..(515): Homolog of NCBI NO: 5042446 NR Description: putative WRKY DNA binding protein [Oryza sativa
  misc_feature (301)..(528): Homolog of NCBI NO: 13506739 NR Description: WRKY DNA-binding protein 6 [Arabidopsis thaliana]
  misc_feature (150)..(538): Homolog of NCBI NO: 15234284 NR Description: WRKY family transcription factor; protein id: supported by cDNA: gi_19172391 [Arabidopsis thaliana]
MFRFPVSLGGSRDEDRHDQITPLDDHRVVVDEVDFFSEKRDRVSRENINDDDDEGNKVLIKMEGSRVEENDRSRDVNIGLNLLTANTGSDESTVDDGLSMDMEDKRAKIENAQLQEELKKMKIENQRLRDMLSQATTNFNALQMQLVAVMRQQEQRNSSQDHLLAQESKAEGRKRQELQIMVPRQFMDLGPSSGAAEHGAEVSSEERTTVRSGSPPSLLESSNPRENGKRLLGREESSEESESNAWGNPNKVPKHNPSSSNSNGNRNGNVIDQSAAEATMRKARVSVRARSEAAMISDGCQWRKYGQKMAKGNPCPRAYYRCTMAGGCPVRKQVQRCAEDRSILITTYEGNHNHPLPPAATAMASTTTAAASMLLSGSMSSQDGLMNPTNLLARAILPCSSSMATISASAPFPTITLDLTNSPNGNNPNMTTNNPLMQFAQRPGFNPAVLPQVVGQAMYNNQQQSKFSGLQLPAQPLQIAATSSVAESVSAASAAIASDPNFAAALAAAITSIMNGSSHQNNNTNNNNVATSNNDSRQ

SEQ ID NO: 81500 - protein, 477 aa, Arabidopsis thaliana
  peptide (1)..(477): Ceres Seq. ID no. 12660049
  misc_feature (235)..(295): Pfam Name: WRKY DNA -binding domain Pfam Description: WRKY DNA -binding domain
  misc_feature (1)..(477): Homolog of NCBI NO: 18415833 NR Description: WRKY family transcription factor; protein id: supported by cDNA: gi_15990589 [Arabidopsis thaliana]
  misc_feature (63)..(477): Homolog of NCBI NO: 11357339 NR Description: hypothetical protein AT4g22070 - Arabidopsis >gi|2961352|emb|CAA18110.1| putative protein [Arabidopsis >gi|7269052|emb|CAB79162.1| putative protein [Arabidopsis
  misc_feature (1)..(477): Homolog of NCBI NO: 15233516 NR Description: WRKY family transcription factor; protein id: supported by cDNA: gi_15990593 [Arabidopsis thaliana]
  misc_feature (1)..(454): Homolog of NCBI NO: 34904618 NR Description: putative WRKY DNA binding protein [Oryza sativa
  misc_feature (160)..(467): Homolog of NCBI NO: 18407554 NR Description: WRKY family transcription factor; protein id: supported by cDNA: gi_12658409, supported by cDNA: gi_15810266 thaliana] >gi|20978780|sp|Q9C519|WRK6_ARATH WRKY transcription
  misc_feature (15)..(219): Homolog of NCBI NO: 25404372 NR Description: hypothetical protein F19K23.22 [imported] - thaliana >gi|2160152|gb|AAB60774.1| ESTs
  misc_feature (273)..(467): Homolog of NCBI NO: 25404372 NR Description: hypothetical protein F19K23.22 [imported] - thaliana >gi|2160152|gb|AAB60774.1| ESTs
  misc_feature (48)..(454): Homolog of NCBI NO: 5042446 NR Description: putative WRKY DNA binding protein [Oryza sativa
  misc_feature (240)..(467): Homolog of NCBI NO: 13506739 NR Description: WRKY DNA-binding protein 6 [Arabidopsis thaliana]
  misc_feature (89)..(477): Homolog of NCBI NO: 15234284 NR Description: WRKY family transcription factor; protein id: supported by cDNA: gi_19172391 [Arabidopsis thaliana]
MEGSRVEENDRSRDVNIGLNLLTANTGSDESTVDDGLSMDMEDKRAKIENAQLQEELKKMKIENQRLRDMLSQATTNFNALQMQLVAVMRQQEQRNSSQDHLLAQESKAEGRKRQELQIMVPRQFMDLGPSSGAAEHGAEVSSEERTTVRSGSPPSLLESSNPRENGKRLLGREESSEESESNAWGNPNKVPKHNPSSSNSNGNRNGNVIDQSAAEATMRKARVSVRARSEAAMISDGCQWRKYGQKMAKGNPCPRAYYRCTMAGGCPVRKQVQRCAEDRSILITTYEGNHNHPLPPAATAMASTTTAAASMLLSGSMSSQDGLMNPTNLLARAILPCSSSMATISASAPFPTITLDLTNSPNGNNPNMTTNNPLMQFAQRPGFNPAVLPQVVGQAMYNNQQQSKFSGLQLPAQPLQIAATSSVAESVSAASAAIASDPNFAAALAAAITSIMNGSSHQNNNTNNNNVATSNNDSRQ

SEQ ID NO: 81501 - protein, 439 aa, Arabidopsis thaliana
  peptide (1)..(439): Ceres Seq. ID no. 12660050
  misc_feature (197)..(257): Pfam Name: WRKY DNA -binding domain Pfam Description: WRKY DNA -binding domain
  misc_feature (1)..(439): Homolog of NCBI NO: 18415833 NR Description: WRKY family transcription factor; protein id: supported by cDNA: gi_15990589 [Arabidopsis thaliana]
  misc_feature (25)..(439): Homolog of NCBI NO: 11357339 NR Description: hypothetical protein AT4g22070 - Arabidopsis >gi|2961352|emb|CAA18110.1| putative protein [Arabidopsis >gi|7269052|emb|CAB79162.1| putative protein [Arabidopsis
  misc_feature (1)..(439): Homolog of NCBI NO: 15233516 NR Description: WRKY family transcription factor; protein id: supported by cDNA: gi_15990593 [Arabidopsis thaliana]
  misc_feature (1)..(416): Homolog of NCBI NO: 34904618 NR Description: putative WRKY DNA binding protein [Oryza sativa
  misc_feature (122)..(429): Homolog of NCBI NO: 18407554 NR Description: WRKY family transcription factor; protein id: supported by cDNA: gi_12658409, supported by cDNA: gi_15810266 thaliana] >gi|20978780|sp|Q9C519|WRK6_ARATH WRKY transcription
  misc_feature (1)..(181): Homolog of NCBI NO: 25404372 NR Description: hypothetical protein F19K23.22 [imported] - thaliana >gi|2160152|gb|AAB60774.1| ESTs
  misc_feature (235)..(429): Homolog of NCBI NO: 25404372 NR Description: hypothetical protein F19K23.22 [imported] - thaliana >gi|2160152|gb|AAB60774.1| ESTs
  misc_feature (10)..(416): Homolog of NCBI NO: 5042446 NR Description: putative WRKY DNA binding protein [Oryza sativa
  misc_feature (202)..(429): Homolog of NCBI NO: 13506739 NR Description: WRKY DNA-binding protein 6 [Arabidopsis thaliana]
  misc_feature (51)..(439): Homolog of NCBI NO: 15234284 NR Description: WRKY family transcription factor; protein id: supported by cDNA: gi_19172391 [Arabidopsis thaliana]
MDMEDKRAKIENAQLQEELKKMKIENQRLRDMLSQATTNFNALQMQLVAVMRQQEQRNSSQDHLLAQESKAEGRKRQELQIMVPRQFMDLGPSSGAAEHGAEVSSEERTTVRSGSPPSLLESSNPRENGKRLLGREESSEESESNAWGNPNKVPKHNPSSSNSNGNRNGNVIDQSAAEATMRKARVSVRARSEAAMISDGCQWRKYGQKMAKGNPCPRAYYRCTMAGGCPVRKQVQRCAEDRSILITTYEGNHNHPLPPAATAMASTTTAAASMLLSGSMSSQDGLMNPTNLLARAILPCSSSMATISASAPFPTITLDLTNSPNGNNPNMTTNNPLMQFAQRPGFNPAVLPQVVGQAMYNNQQQSKFSGLQLPAQPLQIAATSSVAESVSAASAAIASDPNFAAALAAAITSIMNGSSHQNNNTNNNNVATSNNDSRQ

SEQ ID NO: 81502 - DNA, 402 bp, Arabidopsis thaliana
  misc_feature (1)..(402): Ceres Seq. ID no. 12660108
  misc_feature: MA Experiment ID: 20000184 Result: Up-regulated in Transcription
  misc_feature: MA Experiment 20000184 PARAMETER Experiment Name: At_Shoots__P Parameter: Age (day) Value: 7
  misc_feature: MA Experiment 20000184 PARAMETER Experiment Name: At_Shoots__P Parameter: Tissue Value: Shoots vs. Whole Plant
  misc_feature: MA Experiment ID: 20000451 Result: Up-regulated in Transcription
  misc_feature: MA Experiment 20000451 PARAMETER Experiment Name: At_CS6879_Shoots-Roots_P Parameter: Age (day) Value: 14
  misc_feature: MA Experiment 20000451 PARAMETER Experiment Name: At_CS6879_Shoots-Roots_P Parameter: Organism Value: A. thaliana
  misc_feature: MA Experiment 20000451 PARAMETER Experiment Name: At_CS6879_Shoots-Roots_P Parameter: Plant Line Value: CS6879 vs. WS
  misc_feature: MA Experiment 20000451 PARAMETER Experiment Name: At_CS6879_Shoots-Roots_P Parameter: Tissue Value: Roots
atggctcttaaagactctcttgcgctcctccttctcttcaacatccttttcttcactctcactactgccactcgcagtaccaattgtcctcctccaccaggaaaacacaacaaacaaaaacctagcccaacacccactaccgggacttgtcctaaagatgccttaaaggtcggtgtttgtgttaacgcactcaacttgttaaacggtttgacccccggaactcctcctgtgactccatgttgcagccttatcgagggtttggtagatcttgaagctgcgatttgtctttgcactgctctcaaggctagtgttcttggcatcaaccttacccttcccatcaacctcagcttgcttctcaatatttgcaacagagaggcatcacgtgacttccaattcccttaa

SEQ ID NO: 81503 - protein, 133 aa, Arabidopsis thaliana
  peptide (1)..(133): Ceres Seq. ID no. 12660109
  misc_feature (50)..(132): Pfam Name: Protease inhibitor/seed storage/LTP family Pfam Description: Protease inhibitor/seed storage/LTP family
  misc_feature (1)..(133): Homolog of NCBI NO: 15235670 NR Description: extensin like protein; protein id: At4g22460.1
  misc_feature (1)..(131): Homolog of NCBI NO: 7484770 NR Description: extensin like protein - black poplar extensin like protein [Populus nigra] >gi|1199774|dbj|BAA11855.1|
  misc_feature (6)..(124): Homolog of NCBI NO: 21360370 NR Description: extensin-like protein [Citrus junos]
  misc_feature (6)..(133): Homolog of NCBI NO: 10798758 NR Description: P-rich protein Nt-SubC29 [Nicotiana tabacum]
  misc_feature (6)..(131): Homolog of NCBI NO: 13561927 NR Description: extensin-like protein [Brassica napus]
  misc_feature (6)..(131): Homolog of NCBI NO: 15221201 NR Description: pEARLI 1-like protein; protein id: At1g12090.1, by cDNA: 5712., supported by cDNA: gi_16648817, supported by
  misc_feature (6)..(131): Homolog of NCBI NO: 15221484 NR Description: similar to 14KD proline-rich protein DC2.15 (sp|P14009); similar to ESTs emb|Z17709 and emb|Z47685; protein
  misc_feature (6)..(130): Homolog of NCBI NO: 18413820 NR Description: pEARLI 1-like protein; protein id: At4g12510.1
  misc_feature (4)..(131): Homolog of NCBI NO: 629597 NR Description: proline-rich protein - rape
  misc_feature (6)..(131): Homolog of NCBI NO: 112697 NR Description: 14 KD PROLINE-RICH PROTEIN DC2.15 PRECURSOR
MALKDSLALLLLFNILFFTLTTATRSTNCPPPPGKHNKQKPSPTPTTGTCPKDALKVGVCVNALNLLNGLTPGTPPVTPCCSLIEGLVDLEAAICLCTALKASVLGINLTLPINLSLLLNICNREASRDFQFP

SEQ ID NO: 81504 - DNA, 874 bp, Arabidopsis thaliana
  misc_feature (1)..(874): Ceres Seq. ID no. 12660121
  misc_feature: MA Experiment ID: 20000166 Result: Up-regulated in Transcription
  misc_feature: MA Experiment 20000166 PARAMETER Experiment Name: At_100uM_ABA_P Parameter: Age (day) Value: 14
  misc_feature: MA Experiment 20000166 PARAMETER Experiment Name: At_100uM_ABA_P Parameter: Organism Value: A. thaliana
  misc_feature: MA Experiment 20000166 PARAMETER Experiment Name: At_100uM_ABA_P Parameter: Plant Line Value: WS
  misc_feature: MA Experiment 20000166 PARAMETER Experiment Name: At_100uM_ABA_P Parameter: Timepoint (hr) Value: 1
  misc_feature: MA Experiment 20000166 PARAMETER Experiment Name: At_100uM_ABA_P Parameter: Tissue Value: Aerial
  misc_feature: MA Experiment 20000166 PARAMETER Experiment Name: At_100uM_ABA_P Parameter: Treatment Value: 100uM ABA vs. No Treatment
  misc_feature: MA Experiment ID: 20000171 Result: Down-regulated in Transcription
  misc_feature: MA Experiment 20000171 PARAMETER Experiment Name: At_42deg_Heat_P Parameter: Age (day) Value: 14
  misc_feature: MA Experiment 20000171 PARAMETER Experiment Name: At_42deg_Heat_P Parameter: Organism Value: A. thaliana
  misc_feature: MA Experiment 20000171 PARAMETER Experiment Name: At_42deg_Heat_P Parameter: Plant Line Value: WS
  misc_feature: MA Experiment 20000171 PARAMETER Experiment Name: At_42deg_Heat_P Parameter: Temperature (deg C) Value: 42 vs. 22
  misc_feature: MA Experiment 20000171 PARAMETER Experiment Name: At_42deg_Heat_P Parameter: Timepoint (hr) Value: 1
  misc_feature: MA Experiment 20000171 PARAMETER Experiment Name: At_42deg_Heat_P Parameter: Tissue Value: Aerial
  misc_feature: MA Experiment ID: 20000173 Result: Down-regulated in Transcription
  misc_feature: MA Experiment 20000173 PARAMETER Experiment Name: At_42deg_Heat_P Parameter: Age (day) Value: 14
  misc_feature: MA Experiment 20000173 PARAMETER Experiment Name: At_42deg_Heat_P Parameter: Organism Value: A. thaliana
  misc_feature: MA Experiment 20000173 PARAMETER Experiment Name: At_42deg_Heat_P Parameter: Plant Line Value: WS
  misc_feature: MA Experiment 20000173 PARAMETER Experiment Name: At_42deg_Heat_P Parameter: Temperature (deg C) Value: 42 vs. 22
  misc_feature: MA Experiment 20000173 PARAMETER Experiment Name: At_42deg_Heat_P Parameter: Timepoint (hr) Value: 6
  misc_feature: MA Experiment 20000173 PARAMETER Experiment Name: At_42deg_Heat_P Parameter: Tissue Value: Aerial
  misc_feature: MA Experiment ID: 20000182 Result: Up-regulated in Transcription
  misc_feature: MA Experiment 20000182 PARAMETER Experiment Name: At_2mM_SA_P Parameter: Age (day) Value: 14
  misc_feature: MA Experiment 20000182 PARAMETER Experiment Name: At_2mM_SA_P Parameter: Organism Value: A. thaliana
  misc_feature: MA Experiment 20000182 PARAMETER Experiment Name: At_2mM_SA_P Parameter: Plant Line Value: WS
  misc_feature: MA Experiment 20000182 PARAMETER Experiment Name: At_2mM_SA_P Parameter: Timepoint (hr) Value: 6
  misc_feature: MA Experiment 20000182 PARAMETER Experiment Name: At_2mM_SA_P Parameter: Tissue Value: Aerial
  misc_feature: MA Experiment 20000182 PARAMETER Experiment Name: At_2mM_SA_P Parameter: Treatment Value: 2mM SA vs. No Treatment
  misc_feature: MA Experiment ID: 20000184 Result: Down-regulated in Transcription
  misc_feature: MA Experiment 20000184 PARAMETER Experiment Name: At_Shoots__P Parameter: Age (day) Value: 7
  misc_feature: MA Experiment 20000184 PARAMETER Experiment Name: At_Shoots__P Parameter: Tissue Value: Shoots vs. Whole Plant
  misc_feature: MA Experiment ID: 20000265 Result: Down-regulated in Transcription
  misc_feature: MA Experiment 20000265 PARAMETER Experiment Name: At_Open_Flower_P Parameter: Age (day) Value: 21
  misc_feature: MA Experiment 20000265 PARAMETER Experiment Name: At_Open_Flower_P Parameter: Plant Line Value: WS
  misc_feature: MA Experiment 20000265 PARAMETER Experiment Name: At_Open_Flower_P Parameter: Tissue Value: Closed Flower vs. Whole Plant
  misc_feature: MA Experiment ID: 20000438 Result: Down-regulated in Transcription
  misc_feature: MA Experiment 20000438 PARAMETER Experiment Name: At_Shoots__P Parameter: Age (day) Value: 14
  misc_feature: MA Experiment 20000438 PARAMETER Experiment Name: At_Shoots__P Parameter: Tissue Value: Shoots vs. Whole Plant
  misc_feature: MA Experiment ID: 20000445 Result: Up-regulated in Transcription
  misc_feature: MA Experiment 20000445 PARAMETER Experiment Name: At_100uM_NAA__P Parameter: Age (day) Value: 14
  misc_feature: MA Experiment 20000445 PARAMETER Experiment Name: At_100uM_NAA__P Parameter: Organism Value: A. thaliana
  misc_feature: MA Experiment 20000445 PARAMETER Experiment Name: At_100uM_NAA__P Parameter: Plant Line Value: WS
  misc_feature: MA Experiment 20000445 PARAMETER Experiment Name: At_100uM_NAA__P Parameter: Timepoint (hr) Value: 6
  misc_feature: MA Experiment 20000445 PARAMETER Experiment Name: At_100uM_NAA__P Parameter: Tissue Value: Aerial
  misc_feature: MA Experiment 20000445 PARAMETER Experiment Name: At_100uM_NAA__P Parameter: Treatment Value: 100uM NAA vs. No Treatment
  misc_feature: MA Experiment ID: 20000456 Result: Up-regulated in Transcription
  misc_feature: MA Experiment 20000456 PARAMETER Experiment Name: At_100uM_BA_P Parameter: Age (day) Value: 14
  misc_feature: MA Experiment 20000456 PARAMETER Experiment Name: At_100uM_BA_P Parameter: Organism Value: A. thaliana
  misc_feature: MA Experiment 20000456 PARAMETER Experiment Name: At_100uM_BA_P Parameter: Plant Line Value: WS
  misc_feature: MA Experiment 20000456 PARAMETER Experiment Name: At_100uM_BA_P Parameter: Timepoint (hr) Value: 6
  misc_feature: MA Experiment 20000456 PARAMETER Experiment Name: At_100uM_BA_P Parameter: Tissue Value: Aerial
  misc_feature: MA Experiment 20000456 PARAMETER Experiment Name: At_100uM_BA_P Parameter: Treatment Value: 100uM BA vs. No Treatment
  misc_feature: MA Experiment ID: 20000574 Result: Up-regulated in Transcription
  misc_feature: MA Experiment 20000574 PARAMETER Experiment Name: At_100uM_ABA_Mutants__P Parameter: Organism Value: A. thaliana
  misc_feature: MA Experiment 20000574 PARAMETER Experiment Name: At_100uM_ABA_Mutants__P Parameter: Plant Line Value: CS23 vs. Ler wt
  misc_feature: MA Experiment 20000574 PARAMETER Experiment Name: At_100uM_ABA_Mutants__P Parameter: Timepoint (hr) Value: N/A
  misc_feature: MA Experiment 20000574 PARAMETER Experiment Name: At_100uM_ABA_Mutants__P Parameter: Tissue Value: Whole Plant
  misc_feature: MA Experiment 20000574 PARAMETER Experiment Name: At_100uM_ABA_Mutants__P Parameter: Treatment Value: None
  misc_feature: MA Experiment ID: 20000709 Result: Up-regulated in Transcription
  misc_feature: MA Experiment 20000709 PARAMETER Experiment Name: At_15mM_NH4NO3_L-to-H_P Parameter: Age (hr) Value: 14
  misc_feature: MA Experiment 20000709 PARAMETER Experiment Name: At_15mM_NH4NO3_L-to-H_P Parameter: Organism Value: A. thaliana
  misc_feature: MA Experiment 20000709 PARAMETER Experiment Name: At_15mM_NH4NO3_L-to-H_P Parameter: Plant Line Value: WS
  misc_feature: MA Experiment 20000709 PARAMETER Experiment Name: At_15mM_NH4NO3_L-to-H_P Parameter: Timepoint (hr) Value: 4
  misc_feature: MA Experiment 20000709 PARAMETER Experiment Name: At_15mM_NH4NO3_L-to-H_P Parameter: Tissue Value: Aerial
  misc_feature: MA Experiment 20000709 PARAMETER Experiment Name: At_15mM_NH4NO3_L-to-H_P Parameter: Treatment Value: 15mM NH4NO3 vs. 30mM Mannitol
  misc_feature: MA Experiment ID: 20001458 Result: Down-regulated in Transcription
  misc_feature: MA Experiment 20001458 PARAMETER Experiment Name: At_50mM_NH4NO3_L-to-H_P Parameter: Age (day) Value: Undefined
  misc_feature: MA Experiment 20001458 PARAMETER Experiment Name: At_50mM_NH4NO3_L-to-H_P Parameter: Organism Value: Undefined
  misc_feature: MA Experiment 20001458 PARAMETER Experiment Name: At_50mM_NH4NO3_L-to-H_P Parameter: Plant Line Value: Undefined
  misc_feature: MA Experiment 20001458 PARAMETER Experiment Name: At_50mM_NH4NO3_L-to-H_P Parameter: Timepoint (hr) Value: 2
  misc_feature: MA Experiment 20001458 PARAMETER Experiment Name: At_50mM_NH4NO3_L-to-H_P Parameter: Tissue Value: Siliques
  misc_feature: MA Experiment 20001458 PARAMETER Experiment Name: At_50mM_NH4NO3_L-to-H_P Parameter: Treatment Value: 50mM NH4NO3 vs. 100mM Manitol
  misc_feature: MA Experiment ID: 20001560 Result: Up-regulated in Transcription
  misc_feature: MA Experiment 20001560 PARAMETER Experiment Name: At_Drought_Soil_Dry_P Parameter: Age (day) Value: 28
  misc_feature: MA Experiment 20001560 PARAMETER Experiment Name: At_Drought_Soil_Dry_P Parameter: Organism Value: A. thaliana
  misc_feature: MA Experiment 20001560 PARAMETER Experiment Name: At_Drought_Soil_Dry_P Parameter: Plant Line Value: WS
  misc_feature: MA Experiment 20001560 PARAMETER Experiment Name: At_Drought_Soil_Dry_P Parameter: Post Timepoint (hr) Value: None
  misc_feature: MA Experiment 20001560 PARAMETER Experiment Name: At_Drought_Soil_Dry_P Parameter: Post-Treatment Value: None
  misc_feature: MA Experiment 20001560 PARAMETER Experiment Name: At_Drought_Soil_Dry_P Parameter: Timepoint (day) Value: 14
  misc_feature: MA Experiment 20001560 PARAMETER Experiment Name: At_Drought_Soil_Dry_P Parameter: Treatment Value: Drought vs. No Drought
atgtcaggagtttacgatagtcaagctgatatctacttagacgcacgacctacttatcccgccgattggtactccaagctcgccgctctctcccaccgtcacaatctcgcttgggacgccggaaccggaaacggccaagctgccatcggaatcgcggaacactacgaaagagtcgttgcgacggacgttagcgagacgatgttgaatctcggaaaaccgcatccgaaagtaacgtaccaccacacgccctcgtcgatgacggaagatgaaatggtagatcttattggaggagagaactctgtggatttgataacggtggctaccgccgtacactggttcgatctcccgagattctacgcgatcgcgaatcgtctcctccgtaaaccaggaggaatcatcgccgtgtggagctacaacactgacatggtggtgaatcccgagttcgactcggtgatgactcggttcatcgctgaaacgttgccgtattgtaaattcccagagagtcagtattttttggacggatataagacgttgccgtttccgtttgagagcgtgggtttgggctcagagggaaagcccatggaactggagatgaagaaaacggtgtcgtttgaaggattcttgcggatgctaagatcgtggtctgccgttggtgctgctaaagaaaaaggagtagacttattgtcggacaatgtagtcaaagagctcgagacggcttggggtggttatgagctggttcgaaccattgtttacaagacgtttatgctcgcaggaaccgttccttagaaactagcttctttttaatttggtatggctaagtctgaaacttgatatcttaagggtatttgaaacctcatgaaataacaaaaacagg

SEQ ID NO: 81505 - protein, 261 aa, Arabidopsis thaliana
  peptide (1)..(261): Ceres Seq. ID no. 12660122
  misc_feature (1)..(261): Homolog of NCBI NO: 15235684 NR Description: putative protein; protein id: At4g22530.1
  misc_feature (25)..(261): Homolog of NCBI NO: 20258825 NR Description: unknown protein [Arabidopsis thaliana]
  misc_feature (1)..(260): Homolog of NCBI NO: 15238280 NR Description: embryonic abundant protein -like; protein id:
  misc_feature (1)..(261): Homolog of NCBI NO: 21594033 NR Description: embryonic abundant protein-like [Arabidopsis
  misc_feature (1)..(261): Homolog of NCBI NO: 15232436 NR Description: embryonic abundant protein -like; protein id: supported by cDNA: 6529., supported by cDNA: gi_17381219, by cDNA: gi_20465822 [Arabidopsis thaliana]
  misc_feature (1)..(258): Homolog of NCBI NO: 18405387 NR Description: expressed protein; protein id: At1g55450.1, by cDNA: gi_14335021 [Arabidopsis thaliana]
  misc_feature (1)..(258): Homolog of NCBI NO: 15233061 NR Description: putative protein; protein id: At3g61210.1
  misc_feature (1)..(258): Homolog of NCBI NO: 34910604 NR Description: putative embryonic abundant protein-like [Oryza
  misc_feature (1)..(222): Homolog of NCBI NO: 34912212 NR Description: P0415C01.8 [Oryza sativa (japonica
  misc_feature (3)..(260): Homolog of NCBI NO: 7484460 NR Description: embryonic abundant protein EMB34 - white spruce
MSGVYDSQADIYLDARPTYPADWYSKLAALSHRHNLAWDAGTGNGQAAIGIAEHYERVVATDVSETMLNLGKPHPKVTYHHTPSSMTEDEMVDLIGGENSVDLITVATAVHWFDLPRFYAIANRLLRKPGGIIAVWSYNTDMVVNPEFDSVMTRFIAETLPYCKFPESQYFLDGYKTLPFPFESVGLGSEGKPMELEMKKTVSFEGFLRMLRSWSAVGAAKEKGVDLLSDNVVKELETAWGGYELVRTIVYKTFMLAGTVP

SEQ ID NO: 81506 - protein, 195 aa, Arabidopsis thaliana
  peptide (1)..(195): Ceres Seq. ID no. 12660123
  misc_feature (1)..(195): Homolog of NCBI NO: 15235684 NR Description: putative protein; protein id: At4g22530.1
  misc_feature (1)..(195): Homolog of NCBI NO: 20258825 NR Description: unknown protein [Arabidopsis thaliana]
  misc_feature (1)..(194): Homolog of NCBI NO: 15238280 NR Description: embryonic abundant protein -like; protein id:
  misc_feature (1)..(195): Homolog of NCBI NO: 21594033 NR Description: embryonic abundant protein-like [Arabidopsis
  misc_feature (1)..(195): Homolog of NCBI NO: 15232436 NR Description: embryonic abundant protein -like; protein id: supported by cDNA: 6529., supported by cDNA: gi_17381219, by cDNA: gi_20465822 [Arabidopsis thaliana]
  misc_feature (1)..(192): Homolog of NCBI NO: 18405387 NR Description: expressed protein; protein id: At1g55450.1, by cDNA: gi_14335021 [Arabidopsis thaliana]
  misc_feature (1)..(192): Homolog of NCBI NO: 15233061 NR Description: putative protein; protein id: At3g61210.1
  misc_feature (1)..(192): Homolog of NCBI NO: 34910604 NR Description: putative embryonic abundant protein-like [Oryza
  misc_feature (1)..(156): Homolog of NCBI NO: 34912212 NR Description: P0415C01.8 [Oryza sativa (japonica
  misc_feature (1)..(194): Homolog of NCBI NO: 7484460 NR Description: embryonic abundant protein EMB34 - white spruce
MLNLGKPHPKVTYHHTPSSMTEDEMVDLIGGENSVDLITVATAVHWFDLPRFYAIANRLLRKPGGIIAVWSYNTDMVVNPEFDSVMTRFIAETLPYCKFPESQYFLDGYKTLPFPFESVGLGSEGKPMELEMKKTVSFEGFLRMLRSWSAVGAAKEKGVDLLSDNVVKELETAWGGYELVRTIVYKTFMLAGTVP

SEQ ID NO: 81507 - protein, 176 aa, Arabidopsis thaliana
  peptide (1)..(176): Ceres Seq. ID no. 12660124
  misc_feature (1)..(176): Homolog of NCBI NO: 15235684 NR Description: putative protein; protein id: At4g22530.1
  misc_feature (1)..(176): Homolog of NCBI NO: 20258825 NR Description: unknown protein [Arabidopsis thaliana]
  misc_feature (1)..(175): Homolog of NCBI NO: 15238280 NR Description: embryonic abundant protein -like; protein id:
  misc_feature (1)..(176): Homolog of NCBI NO: 21594033 NR Description: embryonic abundant protein-like [Arabidopsis
  misc_feature (1)..(176): Homolog of NCBI NO: 15232436 NR Description: embryonic abundant protein -like; protein id: supported by cDNA: 6529., supported by cDNA: gi_17381219, by cDNA: gi_20465822 [Arabidopsis thaliana]
  misc_feature (1)..(173): Homolog of NCBI NO: 18405387 NR Description: expressed protein; protein id: At1g55450.1, by cDNA: gi_14335021 [Arabidopsis thaliana]
  misc_feature (1)..(173): Homolog of NCBI NO: 15233061 NR Description: putative protein; protein id: At3g61210.1
  misc_feature (1)..(173): Homolog of NCBI NO: 34910604 NR Description: putative embryonic abundant protein-like [Oryza
  misc_feature (1)..(137): Homolog of NCBI NO: 34912212 NR Description: P0415C01.8 [Oryza sativa (japonica
  misc_feature (1)..(175): Homolog of NCBI NO: 7484460 NR Description: embryonic abundant protein EMB34 - white spruce
MTEDEMVDLIGGENSVDLITVATAVHWFDLPRFYAIANRLLRKPGGIIAVWSYNTDMVVNPEFDSVMTRFIAETLPYCKFPESQYFLDGYKTLPFPFESVGLGSEGKPMELEMKKTVSFEGFLRMLRSWSAVGAAKEKGVDLLSDNVVKELETAWGGYELVRTIVYKTFMLAGTVP

SEQ ID NO: 81508 - DNA, 2775 bp, Arabidopsis thaliana
  misc_feature (1)..(2775): Ceres Seq. ID no. 12660125
  misc_feature: MA Experiment ID: 20000180 Result: Up-regulated in Transcription
  misc_feature: MA Experiment 20000180 PARAMETER Experiment Name: At_Germinating_Seeds_P Parameter: Age (hr) Value: 24 vs. 0
  misc_feature: MA Experiment 20000180 PARAMETER Experiment Name: At_Germinating_Seeds_P Parameter: Tissue Value: Germinating Seeds
  misc_feature: MA Experiment ID: 20001558 Result: Down-regulated in Transcription
  misc_feature: MA Experiment 20001558 PARAMETER Experiment Name: At_Drought_Soil_Dry_P Parameter: Age (day) Value: 27
  misc_feature: MA Experiment 20001558 PARAMETER Experiment Name: At_Drought_Soil_Dry_P Parameter: Organism Value: A. thaliana
  misc_feature: MA Experiment 20001558 PARAMETER Experiment Name: At_Drought_Soil_Dry_P Parameter: Plant Line Value: WS
  misc_feature: MA Experiment 20001558 PARAMETER Experiment Name: At_Drought_Soil_Dry_P Parameter: Post Timepoint (hr) Value: 6
  misc_feature: MA Experiment 20001558 PARAMETER Experiment Name: At_Drought_Soil_Dry_P Parameter: Post-Treatment Value: Re-Water vs. No Drought
  misc_feature: MA Experiment 20001558 PARAMETER Experiment Name: At_Drought_Soil_Dry_P Parameter: Timepoint (day) Value: 13
  misc_feature: MA Experiment 20001558 PARAMETER Experiment Name: At_Drought_Soil_Dry_P Parameter: Treatment Value: Drought vs. No Drought
  misc_feature: MA Experiment ID: 20001560 Result: Down-regulated in Transcription
  misc_feature: MA Experiment 20001560 PARAMETER Experiment Name: At_Drought_Soil_Dry_P Parameter: Age (day) Value: 28
  misc_feature: MA Experiment 20001560 PARAMETER Experiment Name: At_Drought_Soil_Dry_P Parameter: Organism Value: A. thaliana
  misc_feature: MA Experiment 20001560 PARAMETER Experiment Name: At_Drought_Soil_Dry_P Parameter: Plant Line Value: WS
  misc_feature: MA Experiment 20001560 PARAMETER Experiment Name: At_Drought_Soil_Dry_P Parameter: Post Timepoint (hr) Value: None
  misc_feature: MA Experiment 20001560 PARAMETER Experiment Name: At_Drought_Soil_Dry_P Parameter: Post-Treatment Value: None
  misc_feature: MA Experiment 20001560 PARAMETER Experiment Name: At_Drought_Soil_Dry_P Parameter: Timepoint (day) Value: 14
  misc_feature: MA Experiment 20001560 PARAMETER Experiment Name: At_Drought_Soil_Dry_P Parameter: Treatment Value: Drought vs. No Drought
atctaagtttttccacataaagccatttacaaatattcaagcttactcagtctcacatttaagcaacctctctctctctgattctctctttctctgagaaaaatctcagtttctcagagctctcaggttcttttattcttcttcttcttcgatttcatcccccaaatctgcatgctctggatcttacgaatgttgctttgtagttttatgatctgagatcaaattttaacaaatccgtcaccggagacgaaaatgcgggttaaagagttacatccactttgttgtattactttggagagtcctcacgggattaatagccagtcaccggaagaaccggtgacaacggctttaactaggtcaaggagtttaccggcgaaatcgttgaccggtggatcggaatcggagactgtagctgggatcttatataaatggactaattttggtaaaggatggagatctagatggttcttactccgtaacggaatcttatcttattctaagatccggagaccggagaatttgaatctactttctccggatgatgatgtgaggttaatcggagatatttccggtgaacgtctttcgagaatggatagttgtagtggtcgccggaaacaacaaaaaaccgtcggcattgttcatcttaaggtttcttctttcagagaaagcaagtctgatgatagaaagttctatatattcacagcaacaaagacccttcatttgaggactgattctataactgatagagcagcttggttacaagcattagcatctacaaaatgtatctttcctctgcggtcacttaatggggatttctccttcataccaccaaaggatttgtccatatcaactgagagactaaagaaacggttgcacgaagagggtatgaatgagaatctcgtcaaagagtgcgaacagatcatgctctcagaattttctgaaatgcacggacaagttaaacttttacacgaagaacggactaatttgcttgatgcattgaggcagcttgaggcagctaatctcgaagttggtgcatcagggaagcatgagttttcaagcctaggacgtggaaagtatagtgaatgcagcacaactgcttcatctgatggtaaacaagagtttgaggatgtgtctgaggaagatgaaccttccttccacgacacaaaggagttctttaacgaacctaacattggttctgaatcaaatttagctatttctggacacacggatatcaagagaagaacaaaacttcctgatccagctgaaaaagagaaaggtgttagtctttggtctatgatcaaagacaacgttggaaaggatctcacccgagtttgcctccctgtgtatttcaatgaaccaatatcatccctccaaaaatgttttgaagacttggagtattcgtatcttttggaccgagcatatgaacatggaaaatctgggaatggtctcttaagagccttaaatgttgctgcttttgcggtctctggatatgcttccactgaaggcaggcattgtaagcccttcaatcctttgcttggagaaacctatgaagccgactttcctgaaaagggaatccgtttcttctctgagaaggtcagtcaccatccaactgttatcgcctgccactgtgaaggtaaagggtggaagttttggggtgacactaacctcaggtcaaagttttgggggaggtcgattcaagtcgaacctgttggagttttgactctggagttcgatgatggagaagtatttcagtggagcaaggtaacatcaactatatacaatatcatactaggtaaactctactgtgatcatcatggtgtgatgcaaatccgtgggaaccgccaatattcttgtacgctcaagtttaaggagcaatccattcttgagagaaatccccaccaggtaaacggttttgtagaagacgtagcagggcaaaaagcagcaacaatatttggtaaatgggatgatagcctttactatgttgctggtgatggaatcaacaagtcgaaagtcagtgatcctgcatcaaatgcctcgttactgtggaaaaggaccaagccaccgcctaatgtaactagatacaacttaacctcatttgccattactctgaacgagctaacacctgggttacaggagatacttcctcccacagactctaggctcagaccagatcaacggcatcttgagaatggtgaatatgagaaggcgaacttagagaaacaacggttagaaagaaggcaaagaatgtcgcggcaacttcaagaaagcggttggagaccgagatggtttgagagacaaggtgaaagcgacaccttcaagtacacgggtggttattgggaagcacgagggcataggaactgggatgattgccccgacatcttcggggagttcacagaagagctagcggacgccgcttagaaagcttcttgacttcattccagaagatcttcattcggaccatattggagttgtttacacggcagcacccatctttcgaccatggtttcagttttctgcttgaaagagggcatagaacaaatatcagaaggaggctttggttctatctcctaaaagacgtcctccttttgagtcttagagtgtcactgtaaagtcttatatccttctcttcaattctctatctccctcgtcaaatagttgagattaatgtagtaggttggtcttacattggacaagttccttgtaatccatttgtatttaattattaaaaaaatatatgtcagcaataaaaataaatcccgacaaagactctttcac

SEQ ID NO: 81509 - protein, 721 aa, Arabidopsis thaliana
  peptide (1)..(721): Ceres Seq. ID no. 12660126
  misc_feature (306)..(701): Pfam Name: Oxysterol-binding protein Pfam Description: Oxysterol-binding protein
  misc_feature (33)..(721): Homolog of NCBI NO: 15235381 NR Description: putative SWH1 protein; protein id: At4g12460.1
  misc_feature (303)..(716): Homolog of NCBI NO: 30680662 NR Description: expressed protein [Arabidopsis thaliana]
  misc_feature (53)..(318): Homolog of NCBI NO: 30680662 NR Description: expressed protein [Arabidopsis thaliana]
  misc_feature (303)..(716): Homolog of NCBI NO: 30680665 NR Description: expressed protein [Arabidopsis thaliana]
  misc_feature (53)..(318): Homolog of NCBI NO: 30680665 NR Description: expressed protein [Arabidopsis thaliana]
  misc_feature (328)..(721): Homolog of NCBI NO: 37536736 NR Description: putative oxysterol-binding protein [Oryza sativa
  misc_feature (1)..(310): Homolog of NCBI NO: 37536736 NR Description: putative oxysterol-binding protein [Oryza sativa
  misc_feature (303)..(716): Homolog of NCBI NO: 7486872 NR Description: hypothetical protein T12G13.20 - Arabidopsis >gi|5262191|emb|CAB45788.1| putative protein [Arabidopsis >gi|7267458|emb|CAB81154.1| putative protein [Arabidopsis
  misc_feature (53)..(318): Homolog of NCBI NO: 7486872 NR Description: hypothetical protein T12G13.20 - Arabidopsis >gi|5262191|emb|CAB45788.1| putative protein [Arabidopsis >gi|7267458|emb|CAB81154.1| putative protein [Arabidopsis
  misc_feature (267)..(717): Homolog of NCBI NO: 15224597 NR Description: putative oxysterol-binding protein; protein id:
MRVKELHPLCCITLESPHGINSQSPEEPVTTALTRSRSLPAKSLTGGSESETVAGILYKWTNFGKGWRSRWFLLRNGILSYSKIRRPENLNLLSPDDDVRLIGDISGERLSRMDSCSGRRKQQKTVGIVHLKVSSFRESKSDDRKFYIFTATKTLHLRTDSITDRAAWLQALASTKCIFPLRSLNGDFSFIPPKDLSISTERLKKRLHEEGMNENLVKECEQIMLSEFSEMHGQVKLLHEERTNLLDALRQLEAANLEVGASGKHEFSSLGRGKYSECSTTASSDGKQEFEDVSEEDEPSFHDTKEFFNEPNIGSESNLAISGHTDIKRRTKLPDPAEKEKGVSLWSMIKDNVGKDLTRVCLPVYFNEPISSLQKCFEDLEYSYLLDRAYEHGKSGNGLLRALNVAAFAVSGYASTEGRHCKPFNPLLGETYEADFPEKGIRFFSEKVSHHPTVIACHCEGKGWKFWGDTNLRSKFWGRSIQVEPVGVLTLEFDDGEVFQWSKVTSTIYNIILGKLYCDHHGVMQIRGNRQYSCTLKFKEQSILERNPHQVNGFVEDVAGQKAATIFGKWDDSLYYVAGDGINKSKVSDPASNASLLWKRTKPPPNVTRYNLTSFAITLNELTPGLQEILPPTDSRLRPDQRHLENGEYEKANLEKQRLERRQRMSRQLQESGWRPRWFERQGESDTFKYTGGYWEARGHRNWDDCPDIFGEFTEELADAA

SEQ ID NO: 81510 - protein, 609 aa, Arabidopsis thaliana
  peptide (1)..(609): Ceres Seq. ID no. 12660127
  misc_feature (194)..(589): Pfam Name: Oxysterol-binding protein Pfam Description: Oxysterol-binding protein
  misc_feature (1)..(609): Homolog of NCBI NO: 15235381 NR Description: putative SWH1 protein; protein id: At4g12460.1
  misc_feature (191)..(604): Homolog of NCBI NO: 30680662 NR Description: expressed protein [Arabidopsis thaliana]
  misc_feature (1)..(206): Homolog of NCBI NO: 30680662 NR Description: expressed protein [Arabidopsis thaliana]
  misc_feature (191)..(604): Homolog of NCBI NO: 30680665 NR Description: expressed protein [Arabidopsis thaliana]
  misc_feature (1)..(206): Homolog of NCBI NO: 30680665 NR Description: expressed protein [Arabidopsis thaliana]
  misc_feature (216)..(609): Homolog of NCBI NO: 37536736 NR Description: putative oxysterol-binding protein [Oryza sativa
  misc_feature (1)..(198): Homolog of NCBI NO: 37536736 NR Description: putative oxysterol-binding protein [Oryza sativa
  misc_feature (191)..(604): Homolog of NCBI NO: 7486872 NR Description: hypothetical protein T12G13.20 - Arabidopsis >gi|5262191|emb|CAB45788.1| putative protein [Arabidopsis >gi|7267458|emb|CAB81154.1| putative protein [Arabidopsis
  misc_feature (1)..(206): Homolog of NCBI NO: 7486872 NR Description: hypothetical protein T12G13.20 - Arabidopsis >gi|5262191|emb|CAB45788.1| putative protein [Arabidopsis >gi|7267458|emb|CAB81154.1| putative protein [Arabidopsis
  misc_feature (155)..(605): Homolog of NCBI NO: 15224597 NR Description: putative oxysterol-binding protein; protein id:
MDSCSGRRKQQKTVGIVHLKVSSFRESKSDDRKFYIFTATKTLHLRTDSITDRAAWLQALASTKCIFPLRSLNGDFSFIPPKDLSISTERLKKRLHEEGMNENLVKECEQIMLSEFSEMHGQVKLLHEERTNLLDALRQLEAANLEVGASGKHEFSSLGRGKYSECSTTASSDGKQEFEDVSEEDEPSFHDTKEFFNEPNIGSESNLAISGHTDIKRRTKLPDPAEKEKGVSLWSMIKDNVGKDLTRVCLPVYFNEPISSLQKCFEDLEYSYLLDRAYEHGKSGNGLLRALNVAAFAVSGYASTEGRHCKPFNPLLGETYEADFPEKGIRFFSEKVSHHPTVIACHCEGKGWKFWGDTNLRSKFWGRSIQVEPVGVLTLEFDDGEVFQWSKVTSTIYNIILGKLYCDHHGVMQIRGNRQYSCTLKFKEQSILERNPHQVNGFVEDVAGQKAATIFGKWDDSLYYVAGDGINKSKVSDPASNASLLWKRTKPPPNVTRYNLTSFAITLNELTPGLQEILPPTDSRLRPDQRHLENGEYEKANLEKQRLERRQRMSRQLQESGWRPRWFERQGESDTFKYTGGYWEARGHRNWDDCPDIFGEFTEELADAA

SEQ ID NO: 81511 - protein, 510 aa, Arabidopsis thaliana
  peptide (1)..(510): Ceres Seq. ID no. 12660128
  misc_feature (95)..(490): Pfam Name: Oxysterol-binding protein Pfam Description: Oxysterol-binding protein
  misc_feature (1)..(510): Homolog of NCBI NO: 15235381 NR Description: putative SWH1 protein; protein id: At4g12460.1
  misc_feature (92)..(505): Homolog of NCBI NO: 30680662 NR Description: expressed protein [Arabidopsis thaliana]
  misc_feature (1)..(107): Homolog of NCBI NO: 30680662 NR Description: expressed protein [Arabidopsis thaliana]
  misc_feature (92)..(505): Homolog of NCBI NO: 30680665 NR Description: expressed protein [Arabidopsis thaliana]
  misc_feature (1)..(107): Homolog of NCBI NO: 30680665 NR Description: expressed protein [Arabidopsis thaliana]
  misc_feature (117)..(510): Homolog of NCBI NO: 37536736 NR Description: putative oxysterol-binding protein [Oryza sativa
  misc_feature (1)..(99): Homolog of NCBI NO: 37536736 NR Description: putative oxysterol-binding protein [Oryza sativa
  misc_feature (92)..(505): Homolog of NCBI NO: 7486872 NR Description: hypothetical protein T12G13.20 - Arabidopsis >gi|5262191|emb|CAB45788.1| putative protein [Arabidopsis >gi|7267458|emb|CAB81154.1| putative protein [Arabidopsis
  misc_feature (1)..(107): Homolog of NCBI NO: 7486872 NR Description: hypothetical protein T12G13.20 - Arabidopsis >gi|5262191|emb|CAB45788.1| putative protein [Arabidopsis >gi|7267458|emb|CAB81154.1| putative protein [Arabidopsis
  misc_feature (56)..(506): Homolog of NCBI NO: 15224597 NR Description: putative oxysterol-binding protein; protein id:
MNENLVKECEQIMLSEFSEMHGQVKLLHEERTNLLDALRQLEAANLEVGASGKHEFSSLGRGKYSECSTTASSDGKQEFEDVSEEDEPSFHDTKEFFNEPNIGSESNLAISGHTDIKRRTKLPDPAEKEKGVSLWSMIKDNVGKDLTRVCLPVYFNEPISSLQKCFEDLEYSYLLDRAYEHGKSGNGLLRALNVAAFAVSGYASTEGRHCKPFNPLLGETYEADFPEKGIRFFSEKVSHHPTVIACHCEGKGWKFWGDTNLRSKFWGRSIQVEPVGVLTLEFDDGEVFQWSKVTSTIYNIILGKLYCDHHGVMQIRGNRQYSCTLKFKEQSILERNPHQVNGFVEDVAGQKAATIFGKWDDSLYYVAGDGINKSKVSDPASNASLLWKRTKPPPNVTRYNLTSFAITLNELTPGLQEILPPTDSRLRPDQRHLENGEYEKANLEKQRLERRQRMSRQLQESGWRPRWFERQGESDTFKYTGGYWEARGHRNWDDCPDIFGEFTEELADAA

SEQ ID NO: 81512 - DNA, 2670 bp, Arabidopsis thaliana
  misc_feature (1)..(2670): Ceres Seq. ID no. 12660147
  misc_feature: MA Experiment ID: 20000182 Result: Up-regulated in Transcription
  misc_feature: MA Experiment 20000182 PARAMETER Experiment Name: At_2mM_SA_P Parameter: Age (day) Value: 14
  misc_feature: MA Experiment 20000182 PARAMETER Experiment Name: At_2mM_SA_P Parameter: Organism Value: A. thaliana
  misc_feature: MA Experiment 20000182 PARAMETER Experiment Name: At_2mM_SA_P Parameter: Plant Line Value: WS
  misc_feature: MA Experiment 20000182 PARAMETER Experiment Name: At_2mM_SA_P Parameter: Timepoint (hr) Value: 6
  misc_feature: MA Experiment 20000182 PARAMETER Experiment Name: At_2mM_SA_P Parameter: Tissue Value: Aerial
  misc_feature: MA Experiment 20000182 PARAMETER Experiment Name: At_2mM_SA_P Parameter: Treatment Value: 2mM SA vs. No Treatment
  misc_feature: MA Experiment ID: 20000234 Result: Down-regulated in Transcription
  misc_feature: MA Experiment 20000234 PARAMETER Experiment Name: At_Siliques_P Parameter: Age (day) Value: 21
  misc_feature: MA Experiment 20000234 PARAMETER Experiment Name: At_Siliques_P Parameter: Organism Value: A. thaliana
  misc_feature: MA Experiment 20000234 PARAMETER Experiment Name: At_Siliques_P Parameter: Plant Line Value: WS
  misc_feature: MA Experiment 20000234 PARAMETER Experiment Name: At_Siliques_P Parameter: Tissue Value: Less Than 5mm Siliques vs. Whole Plant
  misc_feature: MA Experiment ID: 20000269 Result: Up-regulated in Transcription
  misc_feature: MA Experiment 20000269 PARAMETER Experiment Name: At_1mM_KNO3_L-vs-H_Roots_P Parameter: Age (day) Value: 7,10,12
  misc_feature: MA Experiment 20000269 PARAMETER Experiment Name: At_1mM_KNO3_L-vs-H_Roots_P Parameter: Organism Value: A. thaliana
  misc_feature: MA Experiment 20000269 PARAMETER Experiment Name: At_1mM_KNO3_L-vs-H_Roots_P Parameter: Plant Line Value: WS
  misc_feature: MA Experiment 20000269 PARAMETER Experiment Name: At_1mM_KNO3_L-vs-H_Roots_P Parameter: Timepoint (day) Value: 7,10,12
  misc_feature: MA Experiment 20000269 PARAMETER Experiment Name: At_1mM_KNO3_L-vs-H_Roots_P Parameter: Tissue Value: Roots
  misc_feature: MA Experiment 20000269 PARAMETER Experiment Name: At_1mM_KNO3_L-vs-H_Roots_P Parameter: Treatment Value: 1mM KNO3 vs. 50mM KNO3
  misc_feature: MA Experiment ID: 20000438 Result: Down-regulated in Transcription
  misc_feature: MA Experiment 20000438 PARAMETER Experiment Name: At_Shoots__P Parameter: Age (day) Value: 14
  misc_feature: MA Experiment 20000438 PARAMETER Experiment Name: At_Shoots__P Parameter: Tissue Value: Shoots vs. Whole Plant
  misc_feature: MA Experiment ID: 20001904 Result: Up-regulated in Transcription
  misc_feature: MA Experiment 20001904 PARAMETER Experiment Name: At_Drought_Reproduction_P Parameter: Age (day) Value: 37
  misc_feature: MA Experiment 20001904 PARAMETER Experiment Name: At_Drought_Reproduction_P Parameter: Organism Value: A. thaliana
  misc_feature: MA Experiment 20001904 PARAMETER Experiment Name: At_Drought_Reproduction_P Parameter: Plant Line Value: WS
  misc_feature: MA Experiment 20001904 PARAMETER Experiment Name: At_Drought_Reproduction_P Parameter: Timepoint (day) Value: 7
  misc_feature: MA Experiment 20001904 PARAMETER Experiment Name: At_Drought_Reproduction_P Parameter: Tissue Value: Rosettes
  misc_feature: MA Experiment 20001904 PARAMETER Experiment Name: At_Drought_Reproduction_P Parameter: Treatment Value: Drought vs. No Drought
  misc_feature: MA Experiment ID: 20001905 Result: Up-regulated in Transcription
  misc_feature: MA Experiment 20001905 PARAMETER Experiment Name: At_Drought_Reproduction_P Parameter: Age (day) Value: 40
  misc_feature: MA Experiment 20001905 PARAMETER Experiment Name: At_Drought_Reproduction_P Parameter: Organism Value: A. thaliana
  misc_feature: MA Experiment 20001905 PARAMETER Experiment Name: At_Drought_Reproduction_P Parameter: Plant Line Value: WS
  misc_feature: MA Experiment 20001905 PARAMETER Experiment Name: At_Drought_Reproduction_P Parameter: Timepoint (day) Value: 10
  misc_feature: MA Experiment 20001905 PARAMETER Experiment Name: At_Drought_Reproduction_P Parameter: Tissue Value: Rosettes
  misc_feature: MA Experiment 20001905 PARAMETER Experiment Name: At_Drought_Reproduction_P Parameter: Treatment Value: Drought vs. No Drought
atgtctgattcgattcaccggagaaaagtttcgaatcctgtaggaaatggaggtcggagctccagaacaagacgaacagctttcagatatgtttccgacaagaataatcgctctaaatcgagtaataaggttttcgagagaagcttctcagagccgagtcttaatcgccaccgcgacggacagagtaatcacttgcggcgaccatcgccgatgagaggtttaccgatggaagaagaaacaaaaccgatcgtttacttgcctaggattcgctctgaggttttcgcttcgtctccgtcgttgttgaacttatattcgccctcgtcttcatctccgatcaatcaagagggtaatacaaaagaagcaccaaaagtaataatcagtgtagcagtagaaggaagtcctggaccggtaagagcaatggttaaactgagttgcaacgtcgaagaaacgatcaaaattgtcgttgacaagtactgtaaagaaggaagaactccaaaactcgatcgagattctgcctttgaattgcatcagtcacatttcagcatccagtgtttggagaaaagagaaataattggagaattaggcagtagaagcttctacatgagaaagaaagctcctgaaaccggaggttcgttcgccgggatttctccagcgagaacgagcctaattccgtcgtcgaatttgatcggatcgtgcatcgctcagttgattgggaaaatcatgaggagaacaagaaggatatggaacatattgtggaaggtctttggtagattggttcttgtgttggttttagagtttgtttcacaaatgttggattctaagctgagattcttccttcaaagatgtgtagtgcttgaacaggcgaagcaagttcatgcacagttagtagtgaaccgctataaccatcttgaacccatcttggttcaccaaactcttcacttcactaaagagttctctaggaatattgtaacctatgttaaaagaatcctcaaggggtttaatggtcatgattctttctcctgggggtgtttagttcggttcttaagccagcataggaagtttaaagaaacggttgacgtgtatattgatatgcataactctgggattcctccaagttcacatgctgtaacctcagtgttaagagcctgtggtaaaatggagaatatggttgatggtaaaccgattcatgctcaggctctgaaaaatggattgtgtggttgtgtttatgttcagacaggtctggtgggtttgtattctagacttggttacattgagctggcaaagaaggcgtttgatgatattgctgagaagaacacagtttcgtggaactcgctattacacgggtatctggaaagcggggaactagatgaggctcgcagagtctttgacaagatccctgagaaagatgctgtgtcatggaatctgattatctcgagctatgcaaaaaaaggtgacatgggcaatgcatgctctttgttttcagcaatgcctttgaaaagtccggcttcttggaatatattgataggcgggtatgtgaattgcagggaaatgaaactagcaagaacctacttcgatgcaatgccccagaagaatggtgtctcttggattacaatgatttcagggtacacaaaattgggagatgttcagtctgctgaggagctctttagactgatgtctaagaaagacaaactcgtctatgatgccatgatagcttgttatactcaaaacggcaagccaaaggatgctctgaagctattcgctcagatgcttgaaaggaattcatatattcagccggatgagatcacactctcaagtgttgtatcagctaattcacagttgggtaataccagttttggtacatgggttgagtcatatataaccgaacatggaatcaagatcgatgatctcttaagtacctctctaattgatctttacatgaaaggcggagactttgccaaggcattcaaaatgttcagcaatctaaacaaaaaggacacagtttcttactctgctatgatcatgggctgcgggataaacggcatggccacagaagcaaacagtttgtttacagctatgattgaaaagaagatccctccaaatgtagtaacattcacaggactattatcagcgtatagccattcaggtcttgttcaagaaggctacaaatgctttaactccatgaaagaccacaacttggaaccctccgctgatcattatgggataatggtggatatgttgggacgagccgggaggctagaagaagcatatgagctgatcaagagtatgccgatgcagccaaatgctggagtttggggagctttgcttttagccagtgggttacacaacaacgttgaatttggagagattgcgtgcagtcactgcgttaaactcgagacagatcctacaggttatctttcgcatcttgctatgatatattcgtctgttggtagatgggacgatgccaggactgttagagacagtataaaagagaagaaactgtctgtaggtagttttttagccggcagcaagatcatagaccgaagcagcagaatcaaaaggtgtctccaatgccaaccggcaaccacattgcagcatgtaaactggaaaacagtaccttatgttgaaaaagaaagacaaaatggtggttcgattgtgtacaaattaaaataa

SEQ ID NO: 81513 - protein, 889 aa, Arabidopsis thaliana
  peptide (1)..(889): Ceres Seq. ID no. 12660148
  misc_feature (502)..(536): Pfam Name: PPR repeat Pfam Description: PPR repeat
  misc_feature (395)..(834): Homolog of NCBI NO: 34905290 NR Description: P0577B11.16 [Oryza sativa (japonica
  misc_feature (337)..(833): Homolog of NCBI NO: 15225457 NR Description: hypothetical protein; protein id: At2g45350.1
  misc_feature (356)..(853): Homolog of NCBI NO: 34900958 NR Description: selenium-binding protein-like [Oryza sativa
  misc_feature (268)..(831): Homolog of NCBI NO: 15227199 NR Description: hypothetical protein; protein id: At2g22410.1, by cDNA: gi_18086348 [Arabidopsis thaliana]
  misc_feature (279)..(881): Homolog of NCBI NO: 15227619 NR Description: hypothetical protein; protein id: At2g29760.1
  misc_feature (414)..(833): Homolog of NCBI NO: 22328738 NR Description: similar to putative selenium-binding protein;
  misc_feature (254)..(828): Homolog of NCBI NO: 9294596 NR Description: gb|AAC35225.1~gene_id:MVC8.5~strong similarity to
  misc_feature (254)..(828): Homolog of NCBI NO: 15233234 NR Description: hypothetical protein; protein id: At3g15930.1
  misc_feature (376)..(833): Homolog of NCBI NO: 15233073 NR Description: hypothetical protein; protein id: At3g21470.1 thaliana] >gi|11994382|dbj|BAB02341.1|
  misc_feature (342)..(839): Homolog of NCBI NO: 34910598 NR Description: P0683B11.6 [Oryza sativa (japonica
MSDSIHRRKVSNPVGNGGRSSRTRRTAFRYVSDKNNRSKSSNKVFERSFSEPSLNRHRDGQSNHLRRPSPMRGLPMEEETKPIVYLPRIRSEVFASSPSLLNLYSPSSSSPINQEGNTKEAPKVIISVAVEGSPGPVRAMVKLSCNVEETIKIVVDKYCKEGRTPKLDRDSAFELHQSHFSIQCLEKREIIGELGSRSFYMRKKAPETGGSFAGISPARTSLIPSSNLIGSCIAQLIGKIMRRTRRIWNILWKVFGRLVLVLVLEFVSQMLDSKLRFFLQRCVVLEQAKQVHAQLVVNRYNHLEPILVHQTLHFTKEFSRNIVTYVKRILKGFNGHDSFSWGCLVRFLSQHRKFKETVDVYIDMHNSGIPPSSHAVTSVLRACGKMENMVDGKPIHAQALKNGLCGCVYVQTGLVGLYSRLGYIELAKKAFDDIAEKNTVSWNSLLHGYLESGELDEARRVFDKIPEKDAVSWNLIISSYAKKGDMGNACSLFSAMPLKSPASWNILIGGYVNCREMKLARTYFDAMPQKNGVSWITMISGYTKLGDVQSAEELFRLMSKKDKLVYDAMIACYTQNGKPKDALKLFAQMLERNSYIQPDEITLSSVVSANSQLGNTSFGTWVESYITEHGIKIDDLLSTSLIDLYMKGGDFAKAFKMFSNLNKKDTVSYSAMIMGCGINGMATEANSLFTAMIEKKIPPNVVTFTGLLSAYSHSGLVQEGYKCFNSMKDHNLEPSADHYGIMVDMLGRAGRLEEAYELIKSMPMQPNAGVWGALLLASGLHNNVEFGEIACSHCVKLETDPTGYLSHLAMIYSSVGRWDDARTVRDSIKEKKLSVGSFLAGSKIIDRSSRIKRCLQCQPATTLQHVNWKTVPYVEKERQNGGSIVYKLK

SEQ ID NO: 81514 - protein, 819 aa, Arabidopsis thaliana
  peptide (1)..(819): Ceres Seq. ID no. 12660149
  misc_feature (432)..(466): Pfam Name: PPR repeat Pfam Description: PPR repeat
  misc_feature (325)..(764): Homolog of NCBI NO: 34905290 NR Description: P0577B11.16 [Oryza sativa (japonica
  misc_feature (267)..(763): Homolog of NCBI NO: 15225457 NR Description: hypothetical protein; protein id: At2g45350.1
  misc_feature (286)..(783): Homolog of NCBI NO: 34900958 NR Description: selenium-binding protein-like [Oryza sativa
  misc_feature (198)..(761): Homolog of NCBI NO: 15227199 NR Description: hypothetical protein; protein id: At2g22410.1, by cDNA: gi_18086348 [Arabidopsis thaliana]
  misc_feature (209)..(811): Homolog of NCBI NO: 15227619 NR Description: hypothetical protein; protein id: At2g29760.1
  misc_feature (344)..(763): Homolog of NCBI NO: 22328738 NR Description: similar to putative selenium-binding protein;
  misc_feature (184)..(758): Homolog of NCBI NO: 9294596 NR Description: gb|AAC35225.1~gene_id:MVC8.5~strong similarity to
  misc_feature (184)..(758): Homolog of NCBI NO: 15233234 NR Description: hypothetical protein; protein id: At3g15930.1
  misc_feature (306)..(763): Homolog of NCBI NO: 15233073 NR Description: hypothetical protein; protein id: At3g21470.1 thaliana] >gi|11994382|dbj|BAB02341.1|
  misc_feature (272)..(769): Homolog of NCBI NO: 34910598 NR Description: P0683B11.6 [Oryza sativa (japonica
MRGLPMEEETKPIVYLPRIRSEVFASSPSLLNLYSPSSSSPINQEGNTKEAPKVIISVAVEGSPGPVRAMVKLSCNVEETIKIVVDKYCKEGRTPKLDRDSAFELHQSHFSIQCLEKREIIGELGSRSFYMRKKAPETGGSFAGISPARTSLIPSSNLIGSCIAQLIGKIMRRTRRIWNILWKVFGRLVLVLVLEFVSQMLDSKLRFFLQRCVVLEQAKQVHAQLVVNRYNHLEPILVHQTLHFTKEFSRNIVTYVKRILKGFNGHDSFSWGCLVRFLSQHRKFKETVDVYIDMHNSGIPPSSHAVTSVLRACGKMENMVDGKPIHAQALKNGLCGCVYVQTGLVGLYSRLGYIELAKKAFDDIAEKNTVSWNSLLHGYLESGELDEARRVFDKIPEKDAVSWNLIISSYAKKGDMGNACSLFSAMPLKSPASWNILIGGYVNCREMKLARTYFDAMPQKNGVSWITMISGYTKLGDVQSAEELFRLMSKKDKLVYDAMIACYTQNGKPKDALKLFAQMLERNSYIQPDEITLSSVVSANSQLGNTSFGTWVESYITEHGIKIDDLLSTSLIDLYMKGGDFAKAFKMFSNLNKKDTVSYSAMIMGCGINGMATEANSLFTAMIEKKIPPNVVTFTGLLSAYSHSGLVQEGYKCFNSMKDHNLEPSADHYGIMVDMLGRAGRLEEAYELIKSMPMQPNAGVWGALLLASGLHNNVEFGEIACSHCVKLETDPTGYLSHLAMIYSSVGRWDDARTVRDSIKEKKLSVGSFLAGSKIIDRSSRIKRCLQCQPATTLQHVNWKTVPYVEKERQNGGSIVYKLK

SEQ ID NO: 81515 - protein, 814 aa, Arabidopsis thaliana
  peptide (1)..(814): Ceres Seq. ID no. 12660150
  misc_feature (427)..(461): Pfam Name: PPR repeat Pfam Description: PPR repeat
  misc_feature (320)..(759): Homolog of NCBI NO: 34905290 NR Description: P0577B11.16 [Oryza sativa (japonica
  misc_feature (262)..(758): Homolog of NCBI NO: 15225457 NR Description: hypothetical protein; protein id: At2g45350.1
  misc_feature (281)..(778): Homolog of NCBI NO: 34900958 NR Description: selenium-binding protein-like [Oryza sativa
  misc_feature (193)..(756): Homolog of NCBI NO: 15227199 NR Description: hypothetical protein; protein id: At2g22410.1, by cDNA: gi_18086348 [Arabidopsis thaliana]
  misc_feature (204)..(806): Homolog of NCBI NO: 15227619 NR Description: hypothetical protein; protein id: At2g29760.1
  misc_feature (339)..(758): Homolog of NCBI NO: 22328738 NR Description: similar to putative selenium-binding protein;
  misc_feature (179)..(753): Homolog of NCBI NO: 9294596 NR Description: gb|AAC35225.1~gene_id:MVC8.5~strong similarity to
  misc_feature (179)..(753): Homolog of NCBI NO: 15233234 NR Description: hypothetical protein; protein id: At3g15930.1
  misc_feature (301)..(758): Homolog of NCBI NO: 15233073 NR Description: hypothetical protein; protein id: At3g21470.1 thaliana] >gi|11994382|dbj|BAB02341.1|
  misc_feature (267)..(764): Homolog of NCBI NO: 34910598 NR Description: P0683B11.6 [Oryza sativa (japonica
MEEETKPIVYLPRIRSEVFASSPSLLNLYSPSSSSPINQEGNTKEAPKVIISVAVEGSPGPVRAMVKLSCNVEETIKIVVDKYCKEGRTPKLDRDSAFELHQSHFSIQCLEKREIIGELGSRSFYMRKKAPETGGSFAGISPARTSLIPSSNLIGSCIAQLIGKIMRRTRRIWNILWKVFGRLVLVLVLEFVSQMLDSKLRFFLQRCVVLEQAKQVHAQLVVNRYNHLEPILVHQTLHFTKEFSRNIVTYVKRILKGFNGHDSFSWGCLVRFLSQHRKFKETVDVYIDMHNSGIPPSSHAVTSVLRACGKMENMVDGKPIHAQALKNGLCGCVYVQTGLVGLYSRLGYIELAKKAFDDIAEKNTVSWNSLLHGYLESGELDEARRVFDKIPEKDAVSWNLIISSYAKKGDMGNACSLFSAMPLKSPASWNILIGGYVNCREMKLARTYFDAMPQKNGVSWITMISGYTKLGDVQSAEELFRLMSKKDKLVYDAMIACYTQNGKPKDALKLFAQMLERNSYIQPDEITLSSVVSANSQLGNTSFGTWVESYITEHGIKIDDLLSTSLIDLYMKGGDFAKAFKMFSNLNKKDTVSYSAMIMGCGINGMATEANSLFTAMIEKKIPPNVVTFTGLLSAYSHSGLVQEGYKCFNSMKDHNLEPSADHYGIMVDMLGRAGRLEEAYELIKSMPMQPNAGVWGALLLASGLHNNVEFGEIACSHCVKLETDPTGYLSHLAMIYSSVGRWDDARTVRDSIKEKKLSVGSFLAGSKIIDRSSRIKRCLQCQPATTLQHVNWKTVPYVEKERQNGGSIVYKLK

SEQ ID NO: 81516 - DNA, 975 bp, Arabidopsis thaliana
  misc_feature (1)..(975): Ceres Seq. ID no. 12660155
  misc_feature: MA Experiment ID: 20000179 Result: Up-regulated in Transcription
  misc_feature: MA Experiment 20000179 PARAMETER Experiment Name: At_Germinating_Seeds_P Parameter: Age (hr) Value: 6 vs. 0
  misc_feature: MA Experiment 20000179 PARAMETER Experiment Name: At_Germinating_Seeds_P Parameter: Tissue Value: Germinating Seeds
  misc_feature: MA Experiment ID: 20000180 Result: Up-regulated in Transcription
  misc_feature: MA Experiment 20000180 PARAMETER Experiment Name: At_Germinating_Seeds_P Parameter: Age (hr) Value: 24 vs. 0
  misc_feature: MA Experiment 20000180 PARAMETER Experiment Name: At_Germinating_Seeds_P Parameter: Tissue Value: Germinating Seeds
  misc_feature: MA Experiment ID: 20000185 Result: Up-regulated in Transcription
  misc_feature: MA Experiment 20000185 PARAMETER Experiment Name: At_Roots__P Parameter: Age (day) Value: 7 vs. 21
  misc_feature: MA Experiment 20000185 PARAMETER Experiment Name: At_Roots__P Parameter: Organism Value: A. thaliana
  misc_feature: MA Experiment 20000185 PARAMETER Experiment Name: At_Roots__P Parameter: Tissue Value: Roots vs. Whole Plant
  misc_feature: MA Experiment ID: 20000439 Result: Up-regulated in Transcription
  misc_feature: MA Experiment 20000439 PARAMETER Experiment Name: At_Roots__P Parameter: Age (day) Value: 14 vs. 21
  misc_feature: MA Experiment 20000439 PARAMETER Experiment Name: At_Roots__P Parameter: Organism Value: A. thaliana
  misc_feature: MA Experiment 20000439 PARAMETER Experiment Name: At_Roots__P Parameter: Tissue Value: Roots vs. Whole Plant
atggatccagtacaatctcatggatcacaaagctctctacctcctcctttccacgcaagagactttcaattacatcttcaacaacagcaacaagagttcttcctccaccatcaccagcaacaaagaaaccaaaccgatggtgaccaacaaggaggatcaggaggaaaccgacaaatcaagatggatcgtgaagagacaagcgacaacatagacaacatagctaacaacagcggtagtgaaggtaaagacatagatatacacggtggttcaggagaaggaggtggtggctccggaggagatcatcagatgacaagaagaccaagaggaagaccagcgggatccaagaacaaaccaaaaccaccgattatcatcacacgggacagcgcaaacgcgcttagaacccacgtgatggagatcggagatggctgcgacttagtcgaaagcgttgccacttttgcacgaagacgccaacgcggcgtttgcgttatgagcggtactggaaatgttactaacgtcactatacgtcagcctggatctcatccttctcctggctcggtagttagtcttcacggaaggttcgagattctatctctctcaggatcttttctccctcctccggctcctcctacagccaccggattgagtgtttacctcgctggaggacaaggacaggtggttggaggaagcgtagttggtccgttgttatgtgctggtcctgtcgttgtcatggctgcgtcttttagcaatgcggcgtacgaaaggttgcctttagaggaagatgagatgcagacgccggttcatggcggaggaggaggaggatcattggagtcgccgccaatgatgggacaacaactgcaacatcagcaacaagctatgtcaggtcatcaagggttaccacctaatcttcttggttcggttcagttgcagcagcaacatgatcagtcttattggtcaacgggacgaccaccgtattga

SEQ ID NO: 81517 - protein, 324 aa, Arabidopsis thaliana
  peptide (1)..(324): Ceres Seq. ID no. 12660156
  misc_feature (1)..(324): Homolog of NCBI NO: 15235815 NR Description: putative DNA binding protein; protein id:
  misc_feature (1)..(324): Homolog of NCBI NO: 15234404 NR Description: putative DNA-binding protein; protein id:
  misc_feature (12)..(324): Homolog of NCBI NO: 15225475 NR Description: putative AT-hook DNA-binding protein; protein id:
  misc_feature (48)..(277): Homolog of NCBI NO: 15226945 NR Description: putative AT-hook DNA-binding protein; protein id:
  misc_feature (70)..(275): Homolog of NCBI NO: 15236657 NR Description: hypothetical protein; protein id: At4g17800.1, by cDNA: gi_17933298, supported by cDNA: gi_20453386 [Arabidopsis
  misc_feature (97)..(324): Homolog of NCBI NO: 15232970 NR Description: putative protein; protein id: At3g60870.1
  misc_feature (63)..(324): Homolog of NCBI NO: 38346718 NR Description: OSJNBa0086O06.16 [Oryza sativa (japonica
  misc_feature (77)..(324): Homolog of NCBI NO: 34905212 NR Description: P0672D01.8 [Oryza sativa (japonica
  misc_feature (55)..(306): Homolog of NCBI NO: 18396925 NR Description: expressed protein; protein id: At3g04570.1, by cDNA: 15781. [Arabidopsis thaliana] hypothetical protein [Arabidopsis thaliana]
  misc_feature (98)..(324): Homolog of NCBI NO: 18414224 NR Description: Expressed protein; protein id: At4g14465.1, by cDNA: 36844. [Arabidopsis thaliana]
MDPVQSHGSQSSLPPPFHARDFQLHLQQQQQEFFLHHHQQQRNQTDGDQQGGSGGNRQIKMDREETSDNIDNIANNSGSEGKDIDIHGGSGEGGGGSGGDHQMTRRPRGRPAGSKNKPKPPIIITRDSANALRTHVMEIGDGCDLVESVATFARRRQRGVCVMSGTGNVTNVTIRQPGSHPSPGSVVSLHGRFEILSLSGSFLPPPAPPTATGLSVYLAGGQGQVVGGSVVGPLLCAGPVVVMAASFSNAAYERLPLEEDEMQTPVHGGGGGGSLESPPMMGQQLQHQQQAMSGHQGLPPNLLGSVQLQQQHDQSYWSTGRPPY

SEQ ID NO: 81518 - protein, 264 aa, Arabidopsis thaliana
  peptide (1)..(264): Ceres Seq. ID no. 12660157
  misc_feature (1)..(264): Homolog of NCBI NO: 15235815 NR Description: putative DNA binding protein; protein id:
  misc_feature (1)..(264): Homolog of NCBI NO: 15234404 NR Description: putative DNA-binding protein; protein id:
  misc_feature (1)..(264): Homolog of NCBI NO: 15225475 NR Description: putative AT-hook DNA-binding protein; protein id:
  misc_feature (1)..(217): Homolog of NCBI NO: 15226945 NR Description: putative AT-hook DNA-binding protein; protein id:
  misc_feature (10)..(215): Homolog of NCBI NO: 15236657 NR Description: hypothetical protein; protein id: At4g17800.1, by cDNA: gi_17933298, supported by cDNA: gi_20453386 [Arabidopsis
  misc_feature (37)..(264): Homolog of NCBI NO: 15232970 NR Description: putative protein; protein id: At3g60870.1
  misc_feature (3)..(264): Homolog of NCBI NO: 38346718 NR Description: OSJNBa0086O06.16 [Oryza sativa (japonica
  misc_feature (17)..(264): Homolog of NCBI NO: 34905212 NR Description: P0672D01.8 [Oryza sativa (japonica
  misc_feature (1)..(246): Homolog of NCBI NO: 18396925 NR Description: expressed protein; protein id: At3g04570.1, by cDNA: 15781. [Arabidopsis thaliana] hypothetical protein [Arabidopsis thaliana]
  misc_feature (38)..(264): Homolog of NCBI NO: 18414224 NR Description: Expressed protein; protein id: At4g14465.1, by cDNA: 36844. [Arabidopsis thaliana]
MDREETSDNIDNIANNSGSEGKDIDIHGGSGEGGGGSGGDHQMTRRPRGRPAGSKNKPKPPIIITRDSANALRTHVMEIGDGCDLVESVATFARRRQRGVCVMSGTGNVTNVTIRQPGSHPSPGSVVSLHGRFEILSLSGSFLPPPAPPTATGLSVYLAGGQGQVVGGSVVGPLLCAGPVVVMAASFSNAAYERLPLEEDEMQTPVHGGGGGGSLESPPMMGQQLQHQQQAMSGHQGLPPNLLGSVQLQQQHDQSYWSTGRPPY

SEQ ID NO: 81519 - protein, 222 aa, Arabidopsis thaliana
  peptide (1)..(222): Ceres Seq. ID no. 12660158
  misc_feature (1)..(222): Homolog of NCBI NO: 15235815 NR Description: putative DNA binding protein; protein id:
  misc_feature (1)..(222): Homolog of NCBI NO: 15234404 NR Description: putative DNA-binding protein; protein id:
  misc_feature (1)..(222): Homolog of NCBI NO: 15225475 NR Description: putative AT-hook DNA-binding protein; protein id:
  misc_feature (1)..(175): Homolog of NCBI NO: 15226945 NR Description: putative AT-hook DNA-binding protein; protein id:
  misc_feature (1)..(173): Homolog of NCBI NO: 15236657 NR Description: hypothetical protein; protein id: At4g17800.1, by cDNA: gi_17933298, supported by cDNA: gi_20453386 [Arabidopsis
  misc_feature (1)..(222): Homolog of NCBI NO: 15232970 NR Description: putative protein; protein id: At3g60870.1
  misc_feature (1)..(222): Homolog of NCBI NO: 38346718 NR Description: OSJNBa0086O06.16 [Oryza sativa (japonica
  misc_feature (1)..(222): Homolog of NCBI NO: 34905212 NR Description: P0672D01.8 [Oryza sativa (japonica
  misc_feature (1)..(204): Homolog of NCBI NO: 18396925 NR Description: expressed protein; protein id: At3g04570.1, by cDNA: 15781. [Arabidopsis thaliana] hypothetical protein [Arabidopsis thaliana]
  misc_feature (1)..(222): Homolog of NCBI NO: 18414224 NR Description: Expressed protein; protein id: At4g14465.1, by cDNA: 36844. [Arabidopsis thaliana]
MTRRPRGRPAGSKNKPKPPIIITRDSANALRTHVMEIGDGCDLVESVATFARRRQRGVCVMSGTGNVTNVTIRQPGSHPSPGSVVSLHGRFEILSLSGSFLPPPAPPTATGLSVYLAGGQGQVVGGSVVGPLLCAGPVVVMAASFSNAAYERLPLEEDEMQTPVHGGGGGGSLESPPMMGQQLQHQQQAMSGHQGLPPNLLGSVQLQQQHDQSYWSTGRPPY

SEQ ID NO: 81520 - DNA, 654 bp, Arabidopsis thaliana
  misc_feature (1)..(654): Ceres Seq. ID no. 12660159
  misc_feature: MA Experiment ID: 20000306 Result: Up-regulated in Transcription
  misc_feature: MA Experiment 20000306 PARAMETER Experiment Name: At_Germinating_Seeds_Sub_P Parameter: Age (hr) Value: 6 vs. 0
  misc_feature: MA Experiment 20000306 PARAMETER Experiment Name: At_Germinating_Seeds_Sub_P Parameter: Organism Value: A. thaliana
  misc_feature: MA Experiment 20000306 PARAMETER Experiment Name: At_Germinating_Seeds_Sub_P Parameter: Plant Line Value: WS
  misc_feature: MA Experiment 20000306 PARAMETER Experiment Name: At_Germinating_Seeds_Sub_P Parameter: Tissue Value: Germinating Seeds
  misc_feature: MA Experiment ID: 20000307 Result: Up-regulated in Transcription
  misc_feature: MA Experiment 20000307 PARAMETER Experiment Name: At_Germinating_Seeds_Sub_P Parameter: Age (hr) Value: 24 vs. 0
  misc_feature: MA Experiment 20000307 PARAMETER Experiment Name: At_Germinating_Seeds_Sub_P Parameter: Organism Value: A. thaliana
  misc_feature: MA Experiment 20000307 PARAMETER Experiment Name: At_Germinating_Seeds_Sub_P Parameter: Plant Line Value: WS
  misc_feature: MA Experiment 20000307 PARAMETER Experiment Name: At_Germinating_Seeds_Sub_P Parameter: Tissue Value: Germinating Seeds
  misc_feature: MA Experiment ID: 20000440 Result: Up-regulated in Transcription
  misc_feature: MA Experiment 20000440 PARAMETER Experiment Name: At_Closed-Flower__Sub_P Parameter: Tissue Value: Closed Flower vs. Whole Plant
atgactgttacggaggacgaaaaaccggttcttgagctgctggtgagagttgaagacgacgatgagaaagggccttatgtgaaattgagtgaggttttagagaaaggtcaagaatcagagcaggagaaggaagaagaaaagactgattcgtcgcggttttggttttgggtcaagctttctcttttattcgcctttcttgctgcattggctgttgtgggttacatttggatcggtccattgatcatggataagggatggctagaaagatatcctgatcaagcagccgtattaagagctgctggtgaagggaattggcttcaccaatttctattagtaaccttaatccggatttctccattcccttacattctttataactactgttctgtagcaactcgtgttaagtatggtccttacatcacgggctctctcttaggcatggtgcctgaggtttttgtcgcaatctacacagggatacttgtaaggacattagcagaagcatcttctgcagaagaacagggtctctcggtaacacaggtgattctcaacattctcggctttttagcaacagtggctacaacgattctcatcacaaagtatgcgaaaagacagctggagacgatgaagaaagaggacgaagcattgttgcagtaa

SEQ ID NO: 81521 - protein, 217 aa, Arabidopsis thaliana
  peptide (1)..(217): Ceres Seq. ID no. 12660160
  misc_feature (1)..(217): Homolog of NCBI NO: 7486891 NR Description: hypothetical protein T12H17.240 - Arabidopsis >gi|2832606|emb|CAA16570.1| predicted protein [Arabidopsis >gi|3292810|emb|CAA19800.1| putative protein [Arabidopsis
  misc_feature (61)..(217): Homolog of NCBI NO: 30685958 NR Description: expressed protein [Arabidopsis thaliana] unknown protein [Arabidopsis thaliana]
  misc_feature (53)..(216): Homolog of NCBI NO: 15234386 NR Description: putative protein; protein id: At4g12000.1, by cDNA: gi_18176120, supported by cDNA: gi_20465310 [Arabidopsis
  misc_feature (10)..(84): Homolog of NCBI NO: 8778630 NR Description: F5O11.19 [Arabidopsis thaliana]
  misc_feature (86)..(157): Homolog of NCBI NO: 8778630 NR Description: F5O11.19 [Arabidopsis thaliana]
  misc_feature (151)..(217): Homolog of NCBI NO: 8778630 NR Description: F5O11.19 [Arabidopsis thaliana]
  misc_feature (61)..(217): Homolog of NCBI NO: 15221330 NR Description: hypothetical protein; protein id: At1g12450.1
  misc_feature (1)..(84): Homolog of NCBI NO: 30685958 NR Description: expressed protein [Arabidopsis thaliana] unknown protein [Arabidopsis thaliana]
  misc_feature (71)..(212): Homolog of NCBI NO: 18395356 NR Description: expressed protein; protein id: At2g02370.1, by cDNA: gi_13605570, supported by cDNA: gi_16323325 [Arabidopsis >gi|13605571|gb|AAK32779.1|AF361611_1 At2g02370/T16F16.16
  misc_feature (86)..(212): Homolog of NCBI NO: 25410981 NR Description: hypothetical protein At2g02370 [imported] -
MTVTEDEKPVLELLVRVEDDDEKGPYVKLSEVLEKGQESEQEKEEEKTDSSRFWFWVKLSLLFAFLAALAVVGYIWIGPLIMDKGWLERYPDQAAVLRAAGEGNWLHQFLLVTLIRISPFPYILYNYCSVATRVKYGPYITGSLLGMVPEVFVAIYTGILVRTLAEASSAEEQGLSVTQVILNILGFLATVATTILITKYAKRQLETMKKEDEALLQ

SEQ ID NO: 81522 - protein, 136 aa, Arabidopsis thaliana
  peptide (1)..(136): Ceres Seq. ID no. 12660161
  misc_feature (1)..(136): Homolog of NCBI NO: 7486891 NR Description: hypothetical protein T12H17.240 - Arabidopsis >gi|2832606|emb|CAA16570.1| predicted protein [Arabidopsis >gi|3292810|emb|CAA19800.1| putative protein [Arabidopsis
  misc_feature (1)..(136): Homolog of NCBI NO: 30685958 NR Description: expressed protein [Arabidopsis thaliana] unknown protein [Arabidopsis thaliana]
  misc_feature (1)..(135): Homolog of NCBI NO: 15234386 NR Description: putative protein; protein id: At4g12000.1, by cDNA: gi_18176120, supported by cDNA: gi_20465310 [Arabidopsis
  misc_feature (5)..(76): Homolog of NCBI NO: 8778630 NR Description: F5O11.19 [Arabidopsis thaliana]
  misc_feature (70)..(136): Homolog of NCBI NO: 8778630 NR Description: F5O11.19 [Arabidopsis thaliana]
  misc_feature (1)..(136): Homolog of NCBI NO: 15221330 NR Description: hypothetical protein; protein id: At1g12450.1
  misc_feature (1)..(131): Homolog of NCBI NO: 18395356 NR Description: expressed protein; protein id: At2g02370.1, by cDNA: gi_13605570, supported by cDNA: gi_16323325 [Arabidopsis >gi|13605571|gb|AAK32779.1|AF361611_1 At2g02370/T16F16.16
  misc_feature (5)..(131): Homolog of NCBI NO: 25410981 NR Description: hypothetical protein At2g02370 [imported] -
  misc_feature (1)..(131): Homolog of NCBI NO: 34913316 NR Description: P0519E12.36 [Oryza sativa (japonica >gi|22093829|dbj|BAC07116.1| hypothetical protein [Oryza sativa
  misc_feature (1)..(124): Homolog of NCBI NO: 16331873 NR Description: hypothetical protein [Synechocystis sp. PCC 6803]
MDKGWLERYPDQAAVLRAAGEGNWLHQFLLVTLIRISPFPYILYNYCSVATRVKYGPYITGSLLGMVPEVFVAIYTGILVRTLAEASSAEEQGLSVTQVILNILGFLATVATTILITKYAKRQLETMKKEDEALLQ

SEQ ID NO: 81523 - DNA, 1509 bp, Arabidopsis thaliana
  misc_feature (1)..(1509): Ceres Seq. ID no. 12660170
  misc_feature: MA Experiment ID: 20000306 Result: Up-regulated in Transcription
  misc_feature: MA Experiment 20000306 PARAMETER Experiment Name: At_Germinating_Seeds_Sub_P Parameter: Age (hr) Value: 6 vs. 0
  misc_feature: MA Experiment 20000306 PARAMETER Experiment Name: At_Germinating_Seeds_Sub_P Parameter: Organism Value: A. thaliana
  misc_feature: MA Experiment 20000306 PARAMETER Experiment Name: At_Germinating_Seeds_Sub_P Parameter: Plant Line Value: WS
  misc_feature: MA Experiment 20000306 PARAMETER Experiment Name: At_Germinating_Seeds_Sub_P Parameter: Tissue Value: Germinating Seeds
  misc_feature: MA Experiment ID: 20000307 Result: Up-regulated in Transcription
  misc_feature: MA Experiment 20000307 PARAMETER Experiment Name: At_Germinating_Seeds_Sub_P Parameter: Age (hr) Value: 24 vs. 0
  misc_feature: MA Experiment 20000307 PARAMETER Experiment Name: At_Germinating_Seeds_Sub_P Parameter: Organism Value: A. thaliana
  misc_feature: MA Experiment 20000307 PARAMETER Experiment Name: At_Germinating_Seeds_Sub_P Parameter: Plant Line Value: WS
  misc_feature: MA Experiment 20000307 PARAMETER Experiment Name: At_Germinating_Seeds_Sub_P Parameter: Tissue Value: Germinating Seeds
  misc_feature: MA Experiment ID: 20000328 Result: Down-regulated in Transcription
  misc_feature: MA Experiment 20000328 PARAMETER Experiment Name: At_42deg_Heat_Sub_P Parameter: Age (day) Value: 14
  misc_feature: MA Experiment 20000328 PARAMETER Experiment Name: At_42deg_Heat_Sub_P Parameter: Organism Value: A. thaliana
  misc_feature: MA Experiment 20000328 PARAMETER Experiment Name: At_42deg_Heat_Sub_P Parameter: Plant Line Value: WS
  misc_feature: MA Experiment 20000328 PARAMETER Experiment Name: At_42deg_Heat_Sub_P Parameter: Temperature (deg C) Value: 42 vs. 22
  misc_feature: MA Experiment 20000328 PARAMETER Experiment Name: At_42deg_Heat_Sub_P Parameter: Timepoint (hr) Value: 6
  misc_feature: MA Experiment 20000328 PARAMETER Experiment Name: At_42deg_Heat_Sub_P Parameter: Tissue Value: Aerial
  misc_feature: MA Experiment ID: 20000347 Result: Up-regulated in Transcription
  misc_feature: MA Experiment 20000347 PARAMETER Experiment Name: At_2mM_SA_Sub_P Parameter: Age (day) Value: 14
  misc_feature: MA Experiment 20000347 PARAMETER Experiment Name: At_2mM_SA_Sub_P Parameter: Organism Value: A. thaliana
  misc_feature: MA Experiment 20000347 PARAMETER Experiment Name: At_2mM_SA_Sub_P Parameter: Plant Line Value: WS
  misc_feature: MA Experiment 20000347 PARAMETER Experiment Name: At_2mM_SA_Sub_P Parameter: Timepoint (hr) Value: 6
  misc_feature: MA Experiment 20000347 PARAMETER Experiment Name: At_2mM_SA_Sub_P Parameter: Tissue Value: Aerial
  misc_feature: MA Experiment 20000347 PARAMETER Experiment Name: At_2mM_SA_Sub_P Parameter: Treatment Value: 2mM SA vs. No Treatment
  misc_feature: MA Experiment ID: 20000355 Result: Up-regulated in Transcription
  misc_feature: MA Experiment 20000355 PARAMETER Experiment Name: At_Siliques_Sub_P Parameter: Age (day) Value: 21
  misc_feature: MA Experiment 20000355 PARAMETER Experiment Name: At_Siliques_Sub_P Parameter: Organism Value: A. thaliana
  misc_feature: MA Experiment 20000355 PARAMETER Experiment Name: At_Siliques_Sub_P Parameter: Plant Line Value: WS
  misc_feature: MA Experiment 20000355 PARAMETER Experiment Name: At_Siliques_Sub_P Parameter: Tissue Value: Less Than 5mm Siliques vs. Whole Plant
atggcagctcctttgttgatgatcatcaagaaccaaacagatcaccgacaagatccgaatccgaacccgacccacctttcctcttcgatccaagaagccaaatcaatcgccaaaatatctctcccactgatcttaaccggtttacttctctactctcgctcaatgatctcaatgctcttcctcggccgtctcaacgatctctctgctctttccggtggctcactcgccctcggcttcgctaacatcacgggttactctctcctctccggtctctctatcggcatggaacccatctgcgttcaagcctttggcgccaaaagattcaaacttttaggccttgctttgcaaagaaccacacttttgcttctcctctgttctcttcccatatctatcctctggctcaacatcaagaagatccttctcttcttcggacaagacgaagaaatctcaaaccaagctgagatctttatcctcttctctctccctgatctgatcctccaatcttttttacatcctatccgtatctacctccgatctcaatcgatcactcttcctctaacctactctgctttcttcgcagtattactccacattccgattaactaccttctcgtttcttctctcggtctcggccttaaaggagtcgccttgggagcaatctggactaatgtcaatctcctagggtttctaatcatctacatagtgttttccggtgtttaccagaagacttggggaggattctcaatggattgctttaaaggatggagatctctaatgaaactagccatccctagctgcgtctcggtttgtttagagtggtggtggtatgaaatcatgattcttctatgtggattgttacttaacccgcaagcaaccgtggcatctatgggaatcttgatccaaaccaccgctttgatctacattttcccttcctctctgagtatcagcgtatcgacacgtgtcgggaatgaattaggtgcgaatcagcctgataaagcgaggatagctgcgagaaccggacttagtttaagccttggtttaggtttattggcaatgtttttcgctttgatggtgaggaattgctgggcaagattgttcacagatgaggaagagattgtgaagttgacttcaatggttttaccgatcatcgggctttgcgagctaggaaactgtcctcagaccacattgtgtggagtgttgagaggaagtgcgagacctaagttaggagcaaacataaacttgtgttgtttctactttgtgggaatgccagtggctgtatggttaagtttctttagcgggtttgacttcaaaggactatggctcggtctatttgcagcacaaggctcgtgcctgatttcgatgctggtcgtgttggctaggactgattgggaagttgaggttcatagagcaaaagaactcatgactagatcatgtgatggtgatgaagatgatggtaatacaccgtttttattggattctttggatatagaagaaaatcttgtcttctag

SEQ ID NO: 81524 - protein, 502 aa, Arabidopsis thaliana
  peptide (1)..(502): Ceres Seq. ID no. 12660171
  misc_feature (1)..(502): Homolog of NCBI NO: 15235905 NR Description: putative protein; protein id: At4g23030.1
  misc_feature (23)..(477): Homolog of NCBI NO: 18406257 NR Description: expressed protein; protein id: At1g58340.1, by cDNA: gi_6520160 [Arabidopsis thaliana]
  misc_feature (23)..(484): Homolog of NCBI NO: 38567909 NR Description: OSJNBa0088I22.5 [Oryza sativa (japonica
  misc_feature (32)..(486): Homolog of NCBI NO: 37536202 NR Description: putative membrane protein [Oryza sativa (japonica group)] >gi|27311284|gb|AAO00710.1| putative membrane protein
  misc_feature (26)..(484): Homolog of NCBI NO: 15242265 NR Description: integral membrane protein-like; protein id:
  misc_feature (26)..(484): Homolog of NCBI NO: 39104576 NR Description: putative integral membrane protein [Arabidopsis
  misc_feature (26)..(473): Homolog of NCBI NO: 15233459 NR Description: putative protein; protein id: At4g29140.1
  misc_feature (26)..(480): Homolog of NCBI NO: 20532318 NR Description: Putative membrane protein [Oryza sativa (japonica group)] >gi|27356666|gb|AAO06955.1| Putative membrane protein
  misc_feature (16)..(473): Homolog of NCBI NO: 15241158 NR Description: putative protein; protein id: At5g19700.1
  misc_feature (31)..(499): Homolog of NCBI NO: 15224891 NR Description: hypothetical protein; protein id: At2g38510.1
MAAPLLMIIKNQTDHRQDPNPNPTHLSSSIQEAKSIAKISLPLILTGLLLYSRSMISMLFLGRLNDLSALSGGSLALGFANITGYSLLSGLSIGMEPICVQAFGAKRFKLLGLALQRTTLLLLLCSLPISILWLNIKKILLFFGQDEEISNQAEIFILFSLPDLILQSFLHPIRIYLRSQSITLPLTYSAFFAVLLHIPINYLLVSSLGLGLKGVALGAIWTNVNLLGFLIIYIVFSGVYQKTWGGFSMDCFKGWRSLMKLAIPSCVSVCLEWWWYEIMILLCGLLLNPQATVASMGILIQTTALIYIFPSSLSISVSTRVGNELGANQPDKARIAARTGLSLSLGLGLLAMFFALMVRNCWARLFTDEEEIVKLTSMVLPIIGLCELGNCPQTTLCGVLRGSARPKLGANINLCCFYFVGMPVAVWLSFFSGFDFKGLWLGLFAAQGSCLISMLVVLARTDWEVEVHRAKELMTRSCDGDEDDGNTPFLLDSLDIEENLVF

SEQ ID NO: 81525 - protein, 496 aa, Arabidopsis thaliana
  peptide (1)..(496): Ceres Seq. ID no. 12660172
  misc_feature (1)..(496): Homolog of NCBI NO: 15235905 NR Description: putative protein; protein id: At4g23030.1
  misc_feature (17)..(471): Homolog of NCBI NO: 18406257 NR Description: expressed protein; protein id: At1g58340.1, by cDNA: gi_6520160 [Arabidopsis thaliana]
  misc_feature (17)..(478): Homolog of NCBI NO: 38567909 NR Description: OSJNBa0088I22.5 [Oryza sativa (japonica
  misc_feature (26)..(480): Homolog of NCBI NO: 37536202 NR Description: putative membrane protein [Oryza sativa (japonica group)] >gi|27311284|gb|AAO00710.1| putative membrane protein
  misc_feature (20)..(478): Homolog of NCBI NO: 15242265 NR Description: integral membrane protein-like; protein id:
  misc_feature (20)..(478): Homolog of NCBI NO: 39104576 NR Description: putative integral membrane protein [Arabidopsis
  misc_feature (20)..(467): Homolog of NCBI NO: 15233459 NR Description: putative protein; protein id: At4g29140.1
  misc_feature (20)..(474): Homolog of NCBI NO: 20532318 NR Description: Putative membrane protein [Oryza sativa (japonica group)] >gi|27356666|gb|AAO06955.1| Putative membrane protein
  misc_feature (10)..(467): Homolog of NCBI NO: 15241158 NR Description: putative protein; protein id: At5g19700.1
  misc_feature (25)..(493): Homolog of NCBI NO: 15224891 NR Description: hypothetical protein; protein id: At2g38510.1
MIIKNQTDHRQDPNPNPTHLSSSIQEAKSIAKISLPLILTGLLLYSRSMISMLFLGRLNDLSALSGGSLALGFANITGYSLLSGLSIGMEPICVQAFGAKRFKLLGLALQRTTLLLLLCSLPISILWLNIKKILLFFGQDEEISNQAEIFILFSLPDLILQSFLHPIRIYLRSQSITLPLTYSAFFAVLLHIPINYLLVSSLGLGLKGVALGAIWTNVNLLGFLIIYIVFSGVYQKTWGGFSMDCFKGWRSLMKLAIPSCVSVCLEWWWYEIMILLCGLLLNPQATVASMGILIQTTALIYIFPSSLSISVSTRVGNELGANQPDKARIAARTGLSLSLGLGLLAMFFALMVRNCWARLFTDEEEIVKLTSMVLPIIGLCELGNCPQTTLCGVLRGSARPKLGANINLCCFYFVGMPVAVWLSFFSGFDFKGLWLGLFAAQGSCLISMLVVLARTDWEVEVHRAKELMTRSCDGDEDDGNTPFLLDSLDIEENLVF

SEQ ID NO: 81526 - protein, 448 aa, Arabidopsis thaliana
  peptide (1)..(448): Ceres Seq. ID no. 12660173
  misc_feature (1)..(448): Homolog of NCBI NO: 15235905 NR Description: putative protein; protein id: At4g23030.1
  misc_feature (1)..(423): Homolog of NCBI NO: 18406257 NR Description: expressed protein; protein id: At1g58340.1, by cDNA: gi_6520160 [Arabidopsis thaliana]
  misc_feature (1)..(430): Homolog of NCBI NO: 38567909 NR Description: OSJNBa0088I22.5 [Oryza sativa (japonica
  misc_feature (1)..(432): Homolog of NCBI NO: 37536202 NR Description: putative membrane protein [Oryza sativa (japonica group)] >gi|27311284|gb|AAO00710.1| putative membrane protein
  misc_feature (1)..(430): Homolog of NCBI NO: 15242265 NR Description: integral membrane protein-like; protein id:
  misc_feature (1)..(430): Homolog of NCBI NO: 39104576 NR Description: putative integral membrane protein [Arabidopsis
  misc_feature (1)..(419): Homolog of NCBI NO: 15233459 NR Description: putative protein; protein id: At4g29140.1
  misc_feature (1)..(426): Homolog of NCBI NO: 20532318 NR Description: Putative membrane protein [Oryza sativa (japonica group)] >gi|27356666|gb|AAO06955.1| Putative membrane protein
  misc_feature (1)..(419): Homolog of NCBI NO: 15241158 NR Description: putative protein; protein id: At5g19700.1
  misc_feature (1)..(445): Homolog of NCBI NO: 15224891 NR Description: hypothetical protein; protein id: At2g38510.1
MISMLFLGRLNDLSALSGGSLALGFANITGYSLLSGLSIGMEPICVQAFGAKRFKLLGLALQRTTLLLLLCSLPISILWLNIKKILLFFGQDEEISNQAEIFILFSLPDLILQSFLHPIRIYLRSQSITLPLTYSAFFAVLLHIPINYLLVSSLGLGLKGVALGAIWTNVNLLGFLIIYIVFSGVYQKTWGGFSMDCFKGWRSLMKLAIPSCVSVCLEWWWYEIMILLCGLLLNPQATVASMGILIQTTALIYIFPSSLSISVSTRVGNELGANQPDKARIAARTGLSLSLGLGLLAMFFALMVRNCWARLFTDEEEIVKLTSMVLPIIGLCELGNCPQTTLCGVLRGSARPKLGANINLCCFYFVGMPVAVWLSFFSGFDFKGLWLGLFAAQGSCLISMLVVLARTDWEVEVHRAKELMTRSCDGDEDDGNTPFLLDSLDIEENLVF

SEQ ID NO: 81527 - DNA, 2808 bp, Arabidopsis thaliana
  misc_feature (1)..(2808): Ceres Seq. ID no. 12660174
  misc_feature: MA Experiment ID: 20000166 Result: Up-regulated in Transcription
  misc_feature: MA Experiment 20000166 PARAMETER Experiment Name: At_100uM_ABA_P Parameter: Age (day) Value: 14
  misc_feature: MA Experiment 20000166 PARAMETER Experiment Name: At_100uM_ABA_P Parameter: Organism Value: A. thaliana
  misc_feature: MA Experiment 20000166 PARAMETER Experiment Name: At_100uM_ABA_P Parameter: Plant Line Value: WS
  misc_feature: MA Experiment 20000166 PARAMETER Experiment Name: At_100uM_ABA_P Parameter: Timepoint (hr) Value: 1
  misc_feature: MA Experiment 20000166 PARAMETER Experiment Name: At_100uM_ABA_P Parameter: Tissue Value: Aerial
  misc_feature: MA Experiment 20000166 PARAMETER Experiment Name: At_100uM_ABA_P Parameter: Treatment Value: 100uM ABA vs. No Treatment
  misc_feature: MA Experiment ID: 20000169 Result: Up-regulated in Transcription
  misc_feature: MA Experiment 20000169 PARAMETER Experiment Name: At_100uM_ABA_P Parameter: Age (day) Value: 14
  misc_feature: MA Experiment 20000169 PARAMETER Experiment Name: At_100uM_ABA_P Parameter: Organism Value: A. thaliana
  misc_feature: MA Experiment 20000169 PARAMETER Experiment Name: At_100uM_ABA_P Parameter: Plant Line Value: WS
  misc_feature: MA Experiment 20000169 PARAMETER Experiment Name: At_100uM_ABA_P Parameter: Timepoint (hr) Value: 6
  misc_feature: MA Experiment 20000169 PARAMETER Experiment Name: At_100uM_ABA_P Parameter: Tissue Value: Aerial
  misc_feature: MA Experiment 20000169 PARAMETER Experiment Name: At_100uM_ABA_P Parameter: Treatment Value: 100uM ABA vs. No Treatment
  misc_feature: MA Experiment ID: 20000180 Result: Down-regulated in Transcription
  misc_feature: MA Experiment 20000180 PARAMETER Experiment Name: At_Germinating_Seeds_P Parameter: Age (hr) Value: 24 vs. 0
  misc_feature: MA Experiment 20000180 PARAMETER Experiment Name: At_Germinating_Seeds_P Parameter: Tissue Value: Germinating Seeds
  misc_feature: MA Experiment ID: 20000182 Result: Up-regulated in Transcription
  misc_feature: MA Experiment 20000182 PARAMETER Experiment Name: At_2mM_SA_P Parameter: Age (day) Value: 14
  misc_feature: MA Experiment 20000182 PARAMETER Experiment Name: At_2mM_SA_P Parameter: Organism Value: A. thaliana
  misc_feature: MA Experiment 20000182 PARAMETER Experiment Name: At_2mM_SA_P Parameter: Plant Line Value: WS
  misc_feature: MA Experiment 20000182 PARAMETER Experiment Name: At_2mM_SA_P Parameter: Timepoint (hr) Value: 6
  misc_feature: MA Experiment 20000182 PARAMETER Experiment Name: At_2mM_SA_P Parameter: Tissue Value: Aerial
  misc_feature: MA Experiment 20000182 PARAMETER Experiment Name: At_2mM_SA_P Parameter: Treatment Value: 2mM SA vs. No Treatment
  misc_feature: MA Experiment ID: 20000185 Result: Up-regulated in Transcription
  misc_feature: MA Experiment 20000185 PARAMETER Experiment Name: At_Roots__P Parameter: Age (day) Value: 7 vs. 21
  misc_feature: MA Experiment 20000185 PARAMETER Experiment Name: At_Roots__P Parameter: Organism Value: A. thaliana
  misc_feature: MA Experiment 20000185 PARAMETER Experiment Name: At_Roots__P Parameter: Tissue Value: Roots vs. Whole Plant
  misc_feature: MA Experiment ID: 20000436 Result: Up-regulated in Transcription
  misc_feature: MA Experiment 20000436 PARAMETER Experiment Name: At_Drought_P Parameter: Age (day) Value: 7
  misc_feature: MA Experiment 20000436 PARAMETER Experiment Name: At_Drought_P Parameter: Organism Value: A. thaliana
  misc_feature: MA Experiment 20000436 PARAMETER Experiment Name: At_Drought_P Parameter: Plant Line Value: WS
  misc_feature: MA Experiment 20000436 PARAMETER Experiment Name: At_Drought_P Parameter: Timepoint (hr) Value: 12
  misc_feature: MA Experiment 20000436 PARAMETER Experiment Name: At_Drought_P Parameter: Tissue Value: Whole Plant
  misc_feature: MA Experiment 20000436 PARAMETER Experiment Name: At_Drought_P Parameter: Treatment Value: Drought vs. No Drought
  misc_feature: MA Experiment ID: 20000437 Result: Up-regulated in Transcription
  misc_feature: MA Experiment 20000437 PARAMETER Experiment Name: At_Drought_P Parameter: Age (day) Value: 8
  misc_feature: MA Experiment 20000437 PARAMETER Experiment Name: At_Drought_P Parameter: Organism Value: A. thaliana
  misc_feature: MA Experiment 20000437 PARAMETER Experiment Name: At_Drought_P Parameter: Plant Line Value: WS
  misc_feature: MA Experiment 20000437 PARAMETER Experiment Name: At_Drought_P Parameter: Timepoint (hr) Value: 24
  misc_feature: MA Experiment 20000437 PARAMETER Experiment Name: At_Drought_P Parameter: Tissue Value: Whole Plant
  misc_feature: MA Experiment 20000437 PARAMETER Experiment Name: At_Drought_P Parameter: Treatment Value: Drought vs. No Drought
  misc_feature: MA Experiment ID: 20000453 Result: Up-regulated in Transcription
  misc_feature: MA Experiment 20000453 PARAMETER Experiment Name: At_100uM_ABA_P Parameter: Age (day) Value: 15
  misc_feature: MA Experiment 20000453 PARAMETER Experiment Name: At_100uM_ABA_P Parameter: Organism Value: A. thaliana
  misc_feature: MA Experiment 20000453 PARAMETER Experiment Name: At_100uM_ABA_P Parameter: Plant Line Value: WS
  misc_feature: MA Experiment 20000453 PARAMETER Experiment Name: At_100uM_ABA_P Parameter: Timepoint (hr) Value: 24
  misc_feature: MA Experiment 20000453 PARAMETER Experiment Name: At_100uM_ABA_P Parameter: Tissue Value: Aerial
  misc_feature: MA Experiment 20000453 PARAMETER Experiment Name: At_100uM_ABA_P Parameter: Treatment Value: 100uM ABA vs. No Treatment
  misc_feature: MA Experiment ID: 20000709 Result: Up-regulated in Transcription
  misc_feature: MA Experiment 20000709 PARAMETER Experiment Name: At_15mM_NH4NO3_L-to-H_P Parameter: Age (hr) Value: 14
  misc_feature: MA Experiment 20000709 PARAMETER Experiment Name: At_15mM_NH4NO3_L-to-H_P Parameter: Organism Value: A. thaliana
  misc_feature: MA Experiment 20000709 PARAMETER Experiment Name: At_15mM_NH4NO3_L-to-H_P Parameter: Plant Line Value: WS
  misc_feature: MA Experiment 20000709 PARAMETER Experiment Name: At_15mM_NH4NO3_L-to-H_P Parameter: Timepoint (hr) Value: 4
  misc_feature: MA Experiment 20000709 PARAMETER Experiment Name: At_15mM_NH4NO3_L-to-H_P Parameter: Tissue Value: Aerial
  misc_feature: MA Experiment 20000709 PARAMETER Experiment Name: At_15mM_NH4NO3_L-to-H_P Parameter: Treatment Value: 15mM NH4NO3 vs. 30mM Mannitol
  misc_feature: MA Experiment ID: 20001556 Result: Up-regulated in Transcription
  misc_feature: MA Experiment 20001556 PARAMETER Experiment Name: At_Drought_Soil_Dry_P Parameter: Age (day) Value: 26
  misc_feature: MA Experiment 20001556 PARAMETER Experiment Name: At_Drought_Soil_Dry_P Parameter: Organism Value: A. thaliana
  misc_feature: MA Experiment 20001556 PARAMETER Experiment Name: At_Drought_Soil_Dry_P Parameter: Plant Line Value: WS
  misc_feature: MA Experiment 20001556 PARAMETER Experiment Name: At_Drought_Soil_Dry_P Parameter: Post Timepoint (hr) Value: None
  misc_feature: MA Experiment 20001556 PARAMETER Experiment Name: At_Drought_Soil_Dry_P Parameter: Post-Treatment Value: None
  misc_feature: MA Experiment 20001556 PARAMETER Experiment Name: At_Drought_Soil_Dry_P Parameter: Timepoint (day) Value: 12
  misc_feature: MA Experiment 20001556 PARAMETER Experiment Name: At_Drought_Soil_Dry_P Parameter: Treatment Value: Drought vs. No Drought
  misc_feature: MA Experiment ID: 20001757 Result: Down-regulated in Transcription
  misc_feature: MA Experiment 20001757 PARAMETER Experiment Name: At_50mM_NH4NO3_L-to-H_P Parameter: Timepoint (hr) Value: 6
  misc_feature: MA Experiment 20001757 PARAMETER Experiment Name: At_50mM_NH4NO3_L-to-H_P Parameter: Tissue Value: Leaf
  misc_feature: MA Experiment 20001757 PARAMETER Experiment Name: At_50mM_NH4NO3_L-to-H_P Parameter: Treatment Value: 50mM NH4NO3 vs 100mM Mannitol
  misc_feature: MA Experiment ID: 20001904 Result: Up-regulated in Transcription
  misc_feature: MA Experiment 20001904 PARAMETER Experiment Name: At_Drought_Reproduction_P Parameter: Age (day) Value: 37
  misc_feature: MA Experiment 20001904 PARAMETER Experiment Name: At_Drought_Reproduction_P Parameter: Organism Value: A. thaliana
  misc_feature: MA Experiment 20001904 PARAMETER Experiment Name: At_Drought_Reproduction_P Parameter: Plant Line Value: WS
  misc_feature: MA Experiment 20001904 PARAMETER Experiment Name: At_Drought_Reproduction_P Parameter: Timepoint (day) Value: 7
  misc_feature: MA Experiment 20001904 PARAMETER Experiment Name: At_Drought_Reproduction_P Parameter: Tissue Value: Rosettes
  misc_feature: MA Experiment 20001904 PARAMETER Experiment Name: At_Drought_Reproduction_P Parameter: Treatment Value: Drought vs. No Drought
  misc_feature: MA Experiment ID: 20001905 Result: Up-regulated in Transcription
  misc_feature: MA Experiment 20001905 PARAMETER Experiment Name: At_Drought_Reproduction_P Parameter: Age (day) Value: 40
  misc_feature: MA Experiment 20001905 PARAMETER Experiment Name: At_Drought_Reproduction_P Parameter: Organism Value: A. thaliana
  misc_feature: MA Experiment 20001905 PARAMETER Experiment Name: At_Drought_Reproduction_P Parameter: Plant Line Value: WS
  misc_feature: MA Experiment 20001905 PARAMETER Experiment Name: At_Drought_Reproduction_P Parameter: Timepoint (day) Value: 10
  misc_feature: MA Experiment 20001905 PARAMETER Experiment Name: At_Drought_Reproduction_P Parameter: Tissue Value: Rosettes
  misc_feature: MA Experiment 20001905 PARAMETER Experiment Name: At_Drought_Reproduction_P Parameter: Treatment Value: Drought vs. No Drought
  misc_feature: MA Experiment ID: 20001910 Result: Up-regulated in Transcription
  misc_feature: MA Experiment 20001910 PARAMETER Experiment Name: At_Drought_Reproduction_P Parameter: Age (day) Value: 37
  misc_feature: MA Experiment 20001910 PARAMETER Experiment Name: At_Drought_Reproduction_P Parameter: Organism Value: A. thaliana
  misc_feature: MA Experiment 20001910 PARAMETER Experiment Name: At_Drought_Reproduction_P Parameter: Plant Line Value: WS
  misc_feature: MA Experiment 20001910 PARAMETER Experiment Name: At_Drought_Reproduction_P Parameter: Timepoint (day) Value: 7
  misc_feature: MA Experiment 20001910 PARAMETER Experiment Name: At_Drought_Reproduction_P Parameter: Tissue Value: Flowers
  misc_feature: MA Experiment 20001910 PARAMETER Experiment Name: At_Drought_Reproduction_P Parameter: Treatment Value: Drought vs. No Drought
atcagagtcggatcttgatgcgactgctcaaacagagtcaccggcgattacgatggccggaaacaactcggaatcgagtctctaccaggttttggtggagtggtgtcagaggatggagacgagtcaagcgagactaagggaggatgttgatgacttattgcttcaggaggagagtcgaaccggtaaggaatcggcgacgggattggagacggacacggagaaagaggctgaggtagaggtggaagcggaggcggcggattcctgggataatccgacggcgacttgggagagagctgtttcaggattctatttcgctgatagtgcgtatcggactttgatggattcaatgggacacgcgattcatgtaacatcagctgcgtctggagaaattacattctggagtcgttctgctgagaatctgtaccattggtatgctgaggaagttgttggctacagaactattgatgtgcttgtaaccgaagaataccgtaattcccttactggtatcaggaatagggtgtgccgtggagagacttggactggtcagtttccgtttcagaagaaaactggtgaactatttatggctttggtgactaaaagccctgtgtatgaaaacggtgagctggttggtgttgttactgtctcgagcgatgcaacccttttcaataggatgcatccactaagtaatgagcatcaacaacaagctcgtagtaataatagacatgaatcaaacttgagaaaacatcagtggcacctcccgaggcctcagatcgctgcagcatcacaggttccagttgtcccacaatattcatcagctgttgcttcaaacctggcgtcgaagcttctaccacagagaaatggagatgattccttcaatggaaatcataattcgaggagccgagatgaaaatgttccggttgttgcctccacaactttcgagaagtatggctcactggcggataagtttttggggaagctgcaaaggaagattactggcagccaaggaaccgaagataatgagcctatcttaagaaacggtatcaataagtcagcatgtggcagtggaggtagttctaaggcttctaatgcagttacctgcacggctttcagagacaatggcaatggaaaaccaaaaagggctgaagttagaatttcagatgtctatggaaatggagctgagggtttgatacataatggagatcgctttcagtatattgggaacctgggacaaagtaaacctcccagaggactagagagtggtttggtgtctggcatgcggggaacaaaaatgtcggacctaaatggtgagatagaagatgcttggaatactcgtcttagtgttgatcccttgccaattctaggagtcaacagcggtaggcaacaaagtcctgtcaaccaaaggaataatagattagttactgattcgtcatgtgagatacgatgggaagatctacaacttggggaggaggtcggaagaggttcatttgctgcggttcatcgtggagtttggaatggatcggatgttgctattaaggtttacttcgatggtgattacaatgcgatgactttgacggagtgcaaaaaggagatcaacattatgaagaaactgagacatccgaatgtgctactatttatgggagcagtatgtacagaagaaaaatctgccataatcatggaatatatgccaagagggagtctcttcaaaatacttcataatacgaatcagccattggacaagaaacgccgtttaagaatggcccttgatgttgctaggggaatgaattacttacaccgcagaaatccgccaattgtacatagagacttgaaatcttccaatctactcgtggacaagaactggaatgtcaaggttggagactttgggttatcaaagtggaagaacgcaaccttcttgagtactaaatccgggaaaggaactccgcagtggatggctcctgaagttctcagaagtgaaccttcgaatgagaagtgtgatgtgttcagctttggagtcatcttatgggagctaatgactacgttagtaccatgggaccgtttgaactctattcaggttgttggagttgttggtttcatggatcgacgattagacttacctgaaggattaaatccccggatcgcatccataatacaggattgttggcaaactgatccagcaaaacgaccgtcgttcgaggaattaattagtcagatgatgagcctgttccgcaaaccagggtcaggtgcgcaagaagaagacgattgagaaggtaaacagtacatggttaaaggatagttcacaaagcaaaggacgtgaaaagaaaacgaaagcatcgtcctgatcacttactatacaaatgtttcattgtgttataccaaactactatttatgttttcattgaaagaaagaaagcaaaaatagctaaatcaaagtaatatacagtagaatcttaggttagtttagttaaactatgcattatataaactgttgtcggtttatgagctaagttgtaaaatgggatctaaaaaggcagaggcgcagaggccagaggaggactcagatgtaatttaagaagtaaaagggtgaaaaagagaaatacgagaaaaactgtgagattgatggtgtcttgtagtgaattgtaatgtagttggttttggtttgatggggtaagagaaggaggagtgacaattcgtaggcattgcttcttttgctttaatattctcttattacagcttcccatcactgcgtcgtctgtagcttctcagcacctaattataagagagagtcagaaccctaaataaaacttttttttc

SEQ ID NO: 81528 - protein, 752 aa, Arabidopsis thaliana
  peptide (1)..(752): Ceres Seq. ID no. 12660175
  misc_feature (107)..(171): Pfam Name: PAS domain Pfam Description: PAS domain
  misc_feature (469)..(742): Homolog of NCBI NO: 18408889 NR Description: putative protein kinase; protein id: At1g67890.1,
  misc_feature (104)..(302): Homolog of NCBI NO: 18408889 NR Description: putative protein kinase; protein id: At1g67890.1,
  misc_feature (469)..(742): Homolog of NCBI NO: 16604649 NR Description: putative protein kinase [Arabidopsis thaliana]
  misc_feature (104)..(302): Homolog of NCBI NO: 16604649 NR Description: putative protein kinase [Arabidopsis thaliana]
  misc_feature (433)..(742): Homolog of NCBI NO: 15230753 NR Description: protein kinase, putative; protein id:
  misc_feature (104)..(304): Homolog of NCBI NO: 15230753 NR Description: protein kinase, putative; protein id:
  misc_feature (469)..(719): Homolog of NCBI NO: 25404682 NR Description: hypothetical protein T23K23.26 [imported] -
  misc_feature (104)..(302): Homolog of NCBI NO: 25404682 NR Description: hypothetical protein T23K23.26 [imported] -
  misc_feature (478)..(719): Homolog of NCBI NO: 15230754 NR Description: protein kinase, putative; protein id: At3g06630.1
  misc_feature (104)..(297): Homolog of NCBI NO: 15230754 NR Description: protein kinase, putative; protein id: At3g06630.1
SESDLDATAQTESPAITMAGNNSESSLYQVLVEWCQRMETSQARLREDVDDLLLQEESRTGKESATGLETDTEKEAEVEVEAEAADSWDNPTATWERAVSGFYFADSAYRTLMDSMGHAIHVTSAASGEITFWSRSAENLYHWYAEEVVGYRTIDVLVTEEYRNSLTGIRNRVCRGETWTGQFPFQKKTGELFMALVTKSPVYENGELVGVVTVSSDATLFNRMHPLSNEHQQQARSNNRHESNLRKHQWHLPRPQIAAASQVPVVPQYSSAVASNLASKLLPQRNGDDSFNGNHNSRSRDENVPVVASTTFEKYGSLADKFLGKLQRKITGSQGTEDNEPILRNGINKSACGSGGSSKASNAVTCTAFRDNGNGKPKRAEVRISDVYGNGAEGLIHNGDRFQYIGNLGQSKPPRGLESGLVSGMRGTKMSDLNGEIEDAWNTRLSVDPLPILGVNSGRQQSPVNQRNNRLVTDSSCEIRWEDLQLGEEVGRGSFAAVHRGVWNGSDVAIKVYFDGDYNAMTLTECKKEINIMKKLRHPNVLLFMGAVCTEEKSAIIMEYMPRGSLFKILHNTNQPLDKKRRLRMALDVARGMNYLHRRNPPIVHRDLKSSNLLVDKNWNVKVGDFGLSKWKNATFLSTKSGKGTPQWMAPEVLRSEPSNEKCDVFSFGVILWELMTTLVPWDRLNSIQVVGVVGFMDRRLDLPEGLNPRIASIIQDCWQTDPAKRPSFEELISQMMSLFRKPGSGAQEEDD

SEQ ID NO: 81529 - protein, 735 aa, Arabidopsis thaliana
  peptide (1)..(735): Ceres Seq. ID no. 12660176
  misc_feature (90)..(154): Pfam Name: PAS domain Pfam Description: PAS domain
  misc_feature (452)..(725): Homolog of NCBI NO: 18408889 NR Description: putative protein kinase; protein id: At1g67890.1,
  misc_feature (87)..(285): Homolog of NCBI NO: 18408889 NR Description: putative protein kinase; protein id: At1g67890.1,
  misc_feature (452)..(725): Homolog of NCBI NO: 16604649 NR Description: putative protein kinase [Arabidopsis thaliana]
  misc_feature (87)..(285): Homolog of NCBI NO: 16604649 NR Description: putative protein kinase [Arabidopsis thaliana]
  misc_feature (416)..(725): Homolog of NCBI NO: 15230753 NR Description: protein kinase, putative; protein id:
  misc_feature (87)..(287): Homolog of NCBI NO: 15230753 NR Description: protein kinase, putative; protein id:
  misc_feature (452)..(702): Homolog of NCBI NO: 25404682 NR Description: hypothetical protein T23K23.26 [imported] -
  misc_feature (87)..(285): Homolog of NCBI NO: 25404682 NR Description: hypothetical protein T23K23.26 [imported] -
  misc_feature (461)..(702): Homolog of NCBI NO: 15230754 NR Description: protein kinase, putative; protein id: At3g06630.1
  misc_feature (87)..(280): Homolog of NCBI NO: 15230754 NR Description: protein kinase, putative; protein id: At3g06630.1
MAGNNSESSLYQVLVEWCQRMETSQARLREDVDDLLLQEESRTGKESATGLETDTEKEAEVEVEAEAADSWDNPTATWERAVSGFYFADSAYRTLMDSMGHAIHVTSAASGEITFWSRSAENLYHWYAEEVVGYRTIDVLVTEEYRNSLTGIRNRVCRGETWTGQFPFQKKTGELFMALVTKSPVYENGELVGVVTVSSDATLFNRMHPLSNEHQQQARSNNRHESNLRKHQWHLPRPQIAAASQVPVVPQYSSAVASNLASKLLPQRNGDDSFNGNHNSRSRDENVPVVASTTFEKYGSLADKFLGKLQRKITGSQGTEDNEPILRNGINKSACGSGGSSKASNAVTCTAFRDNGNGKPKRAEVRISDVYGNGAEGLIHNGDRFQYIGNLGQSKPPRGLESGLVSGMRGTKMSDLNGEIEDAWNTRLSVDPLPILGVNSGRQQSPVNQRNNRLVTDSSCEIRWEDLQLGEEVGRGSFAAVHRGVWNGSDVAIKVYFDGDYNAMTLTECKKEINIMKKLRHPNVLLFMGAVCTEEKSAIIMEYMPRGSLFKILHNTNQPLDKKRRLRMALDVARGMNYLHRRNPPIVHRDLKSSNLLVDKNWNVKVGDFGLSKWKNATFLSTKSGKGTPQWMAPEVLRSEPSNEKCDVFSFGVILWELMTTLVPWDRLNSIQVVGVVGFMDRRLDLPEGLNPRIASIIQDCWQTDPAKRPSFEELISQMMSLFRKPGSGAQEEDD

SEQ ID NO: 81530 - protein, 715 aa, Arabidopsis thaliana
  peptide (1)..(715): Ceres Seq. ID no. 12660177
  misc_feature (70)..(134): Pfam Name: PAS domain Pfam Description: PAS domain
  misc_feature (432)..(705): Homolog of NCBI NO: 18408889 NR Description: putative protein kinase; protein id: At1g67890.1,
  misc_feature (67)..(265): Homolog of NCBI NO: 18408889 NR Description: putative protein kinase; protein id: At1g67890.1,
  misc_feature (432)..(705): Homolog of NCBI NO: 16604649 NR Description: putative protein kinase [Arabidopsis thaliana]
  misc_feature (67)..(265): Homolog of NCBI NO: 16604649 NR Description: putative protein kinase [Arabidopsis thaliana]
  misc_feature (396)..(705): Homolog of NCBI NO: 15230753 NR Description: protein kinase, putative; protein id:
  misc_feature (67)..(267): Homolog of NCBI NO: 15230753 NR Description: protein kinase, putative; protein id:
  misc_feature (432)..(682): Homolog of NCBI NO: 25404682 NR Description: hypothetical protein T23K23.26 [imported] -
  misc_feature (67)..(265): Homolog of NCBI NO: 25404682 NR Description: hypothetical protein T23K23.26 [imported] -
  misc_feature (441)..(682): Homolog of NCBI NO: 15230754 NR Description: protein kinase, putative; protein id: At3g06630.1
  misc_feature (67)..(260): Homolog of NCBI NO: 15230754 NR Description: protein kinase, putative; protein id: At3g06630.1
METSQARLREDVDDLLLQEESRTGKESATGLETDTEKEAEVEVEAEAADSWDNPTATWERAVSGFYFADSAYRTLMDSMGHAIHVTSAASGEITFWSRSAENLYHWYAEEVVGYRTIDVLVTEEYRNSLTGIRNRVCRGETWTGQFPFQKKTGELFMALVTKSPVYENGELVGVVTVSSDATLFNRMHPLSNEHQQQARSNNRHESNLRKHQWHLPRPQIAAASQVPVVPQYSSAVASNLASKLLPQRNGDDSFNGNHNSRSRDENVPVVASTTFEKYGSLADKFLGKLQRKITGSQGTEDNEPILRNGINKSACGSGGSSKASNAVTCTAFRDNGNGKPKRAEVRISDVYGNGAEGLIHNGDRFQYIGNLGQSKPPRGLESGLVSGMRGTKMSDLNGEIEDAWNTRLSVDPLPILGVNSGRQQSPVNQRNNRLVTDSSCEIRWEDLQLGEEVGRGSFAAVHRGVWNGSDVAIKVYFDGDYNAMTLTECKKEINIMKKLRHPNVLLFMGAVCTEEKSAIIMEYMPRGSLFKILHNTNQPLDKKRRLRMALDVARGMNYLHRRNPPIVHRDLKSSNLLVDKNWNVKVGDFGLSKWKNATFLSTKSGKGTPQWMAPEVLRSEPSNEKCDVFSFGVILWELMTTLVPWDRLNSIQVVGVVGFMDRRLDLPEGLNPRIASIIQDCWQTDPAKRPSFEELISQMMSLFRKPGSGAQEEDD

SEQ ID NO: 81531 - DNA, 942 bp, Arabidopsis thaliana
  misc_feature (1)..(942): Ceres Seq. ID no. 12660178
  misc_feature: MA Experiment ID: 20000185 Result: Up-regulated in Transcription
  misc_feature: MA Experiment 20000185 PARAMETER Experiment Name: At_Roots__P Parameter: Age (day) Value: 7 vs. 21
  misc_feature: MA Experiment 20000185 PARAMETER Experiment Name: At_Roots__P Parameter: Organism Value: A. thaliana
  misc_feature: MA Experiment 20000185 PARAMETER Experiment Name: At_Roots__P Parameter: Tissue Value: Roots vs. Whole Plant
  misc_feature: MA Experiment ID: 20000439 Result: Up-regulated in Transcription
  misc_feature: MA Experiment 20000439 PARAMETER Experiment Name: At_Roots__P Parameter: Age (day) Value: 14 vs. 21
  misc_feature: MA Experiment 20000439 PARAMETER Experiment Name: At_Roots__P Parameter: Organism Value: A. thaliana
  misc_feature: MA Experiment 20000439 PARAMETER Experiment Name: At_Roots__P Parameter: Tissue Value: Roots vs. Whole Plant
  misc_feature: MA Experiment ID: 20001557 Result: Up-regulated in Transcription
  misc_feature: MA Experiment 20001557 PARAMETER Experiment Name: At_Drought_Soil_Dry_P Parameter: Age (day) Value: 27
  misc_feature: MA Experiment 20001557 PARAMETER Experiment Name: At_Drought_Soil_Dry_P Parameter: Organism Value: A. thaliana
  misc_feature: MA Experiment 20001557 PARAMETER Experiment Name: At_Drought_Soil_Dry_P Parameter: Plant Line Value: WS
  misc_feature: MA Experiment 20001557 PARAMETER Experiment Name: At_Drought_Soil_Dry_P Parameter: Post Timepoint (hr) Value: 3
  misc_feature: MA Experiment 20001557 PARAMETER Experiment Name: At_Drought_Soil_Dry_P Parameter: Post-Treatment Value: Re-Water vs. No Drought
  misc_feature: MA Experiment 20001557 PARAMETER Experiment Name: At_Drought_Soil_Dry_P Parameter: Timepoint (day) Value: 13
  misc_feature: MA Experiment 20001557 PARAMETER Experiment Name: At_Drought_Soil_Dry_P Parameter: Treatment Value: Drought vs. No Drought
atgctttccacagcagcagaggaagatcctgaaggaggaagcagagaaactaataatggcggcgagacgacaccggacatgcaatggagatcgtggattatcccaatagtagtgattgctaacgtcgtcgttttcgttgttgtaatgtactataatgattgtcctcacaaaagccatcgatgtcttgcaaagttcctcggacgattctcttttgagtctttcaagtctaatcctcttcttggtccttcttcctctacgttggagaaaatgggagctttggcgtgggggaaaatagttcacaagcgtcaagtttggagactattaacatgtatgtggttgcacgctggcgttattcatttgttagcaaacatgtgttgtgttgcctacattggagttcgtctcgagcagcagtttggttttgttcgagtcgggacgatctaccttgtatcgggtttctgtgggagcatattatcttgtttgtttcttgaggatgctatatctgttggtgcctctagtgctttgtttggactcttaggagcaatgttatctgaattgttaatcaactggacaacctatgacaacaagggtgtggctatagtaatgcttttggtgattgttggtgttaacttaggattaggaacacttcctcctgttgataattttgctcatattggaggtttctttggtggttttctactcggttttcttctcttgattcatccgcagttcgaatgggaagaaaaccaagtttctcttatgcctggtaccattgttaaacccaagtacaacacttgccaactcgtgctttgcatagttgcatcgatcgtctttgtcgcagggtttacttctggattggtgatactattcagaggagatagcttgaacagatattgtaagtggtgccataaactaagctactcctctaaatcccaatggacatga

SEQ ID NO: 81532 - protein, 313 aa, Arabidopsis thaliana
  peptide (1)..(313): Ceres Seq. ID no. 12660179
  misc_feature (1)..(313): Homolog of NCBI NO: 15236387 NR Description: putative membrane protein; protein id: At4g23070.1
  misc_feature (14)..(313): Homolog of NCBI NO: 15221690 NR Description: membrane protein, putative; protein id: [Arabidopsis thaliana] >gi|25404407|pir||F96656 probable membrane
  misc_feature (14)..(313): Homolog of NCBI NO: 15222058 NR Description: membrane protein, putative; protein id: supported by cDNA: gi_17529033 [Arabidopsis thaliana] putative membrane protein [Arabidopsis thaliana]
  misc_feature (21)..(312): Homolog of NCBI NO: 15240744 NR Description: membrane protein; protein id: At5g07250.1, by cDNA: gi_16648761, supported by cDNA: gi_20466142 [Arabidopsis
  misc_feature (26)..(313): Homolog of NCBI NO: 25402744 NR Description: protein T12C24.28 [imported] - Arabidopsis >gi|9502383|gb|AAF88090.1|AC025417_18 T12C24.28 [Arabidopsis
  misc_feature (20)..(312): Homolog of NCBI NO: 294845 NR Description: membrane protein [Saccharum hybrid cultivar
  misc_feature (29)..(313): Homolog of NCBI NO: 30693911 NR Description: membrane protein, Rhomboid family [Arabidopsis
  misc_feature (30)..(312): Homolog of NCBI NO: 38344377 NR Description: OSJNBb0032E06.11 [Oryza sativa (japonica
  misc_feature (29)..(313): Homolog of NCBI NO: 11357824 NR Description: hypothetical protein F5K20.80 - Arabidopsis >gi|7629998|emb|CAB88340.1| putative protein [Arabidopsis
  misc_feature (26)..(313): Homolog of NCBI NO: 37536172 NR Description: putative membrane protein [Oryza sativa (japonica group)] >gi|22122915|gb|AAM92298.1| putative membrane protein
MLSTAAEEDPEGGSRETNNGGETTPDMQWRSWIIPIVVIANVVVFVVVMYYNDCPHKSHRCLAKFLGRFSFESFKSNPLLGPSSSTLEKMGALAWGKIVHKRQVWRLLTCMWLHAGVIHLLANMCCVAYIGVRLEQQFGFVRVGTIYLVSGFCGSILSCLFLEDAISVGASSALFGLLGAMLSELLINWTTYDNKGVAIVMLLVIVGVNLGLGTLPPVDNFAHIGGFFGGFLLGFLLLIHPQFEWEENQVSLMPGTIVKPKYNTCQLVLCIVASIVFVAGFTSGLVILFRGDSLNRYCKWCHKLSYSSKSQWT

SEQ ID NO: 81533 - protein, 287 aa, Arabidopsis thaliana
  peptide (1)..(287): Ceres Seq. ID no. 12660180
  misc_feature (1)..(287): Homolog of NCBI NO: 15236387 NR Description: putative membrane protein; protein id: At4g23070.1
  misc_feature (1)..(287): Homolog of NCBI NO: 15221690 NR Description: membrane protein, putative; protein id: [Arabidopsis thaliana] >gi|25404407|pir||F96656 probable membrane
  misc_feature (1)..(287): Homolog of NCBI NO: 15222058 NR Description: membrane protein, putative; protein id: supported by cDNA: gi_17529033 [Arabidopsis thaliana] putative membrane protein [Arabidopsis thaliana]
  misc_feature (1)..(286): Homolog of NCBI NO: 15240744 NR Description: membrane protein; protein id: At5g07250.1, by cDNA: gi_16648761, supported by cDNA: gi_20466142 [Arabidopsis
  misc_feature (1)..(287): Homolog of NCBI NO: 25402744 NR Description: protein T12C24.28 [imported] - Arabidopsis >gi|9502383|gb|AAF88090.1|AC025417_18 T12C24.28 [Arabidopsis
  misc_feature (1)..(286): Homolog of NCBI NO: 294845 NR Description: membrane protein [Saccharum hybrid cultivar
  misc_feature (3)..(287): Homolog of NCBI NO: 30693911 NR Description: membrane protein, Rhomboid family [Arabidopsis
  misc_feature (4)..(286): Homolog of NCBI NO: 38344377 NR Description: OSJNBb0032E06.11 [Oryza sativa (japonica
  misc_feature (3)..(287): Homolog of NCBI NO: 11357824 NR Description: hypothetical protein F5K20.80 - Arabidopsis >gi|7629998|emb|CAB88340.1| putative protein [Arabidopsis
  misc_feature (1)..(287): Homolog of NCBI NO: 37536172 NR Description: putative membrane protein [Oryza sativa (japonica group)] >gi|22122915|gb|AAM92298.1| putative membrane protein
MQWRSWIIPIVVIANVVVFVVVMYYNDCPHKSHRCLAKFLGRFSFESFKSNPLLGPSSSTLEKMGALAWGKIVHKRQVWRLLTCMWLHAGVIHLLANMCCVAYIGVRLEQQFGFVRVGTIYLVSGFCGSILSCLFLEDAISVGASSALFGLLGAMLSELLINWTTYDNKGVAIVMLLVIVGVNLGLGTLPPVDNFAHIGGFFGGFLLGFLLLIHPQFEWEENQVSLMPGTIVKPKYNTCQLVLCIVASIVFVAGFTSGLVILFRGDSLNRYCKWCHKLSYSSKSQWT

SEQ ID NO: 81534 - protein, 265 aa, Arabidopsis thaliana
  peptide (1)..(265): Ceres Seq. ID no. 12660181
  misc_feature (1)..(265): Homolog of NCBI NO: 15236387 NR Description: putative membrane protein; protein id: At4g23070.1
  misc_feature (1)..(265): Homolog of NCBI NO: 15221690 NR Description: membrane protein, putative; protein id: [Arabidopsis thaliana] >gi|25404407|pir||F96656 probable membrane
  misc_feature (1)..(265): Homolog of NCBI NO: 15222058 NR Description: membrane protein, putative; protein id: supported by cDNA: gi_17529033 [Arabidopsis thaliana] putative membrane protein [Arabidopsis thaliana]
  misc_feature (1)..(264): Homolog of NCBI NO: 15240744 NR Description: membrane protein; protein id: At5g07250.1, by cDNA: gi_16648761, supported by cDNA: gi_20466142 [Arabidopsis
  misc_feature (1)..(265): Homolog of NCBI NO: 25402744 NR Description: protein T12C24.28 [imported] - Arabidopsis >gi|9502383|gb|AAF88090.1|AC025417_18 T12C24.28 [Arabidopsis
  misc_feature (1)..(264): Homolog of NCBI NO: 294845 NR Description: membrane protein [Saccharum hybrid cultivar
  misc_feature (1)..(265): Homolog of NCBI NO: 30693911 NR Description: membrane protein, Rhomboid family [Arabidopsis
  misc_feature (1)..(264): Homolog of NCBI NO: 38344377 NR Description: OSJNBb0032E06.11 [Oryza sativa (japonica
  misc_feature (1)..(265): Homolog of NCBI NO: 11357824 NR Description: hypothetical protein F5K20.80 - Arabidopsis >gi|7629998|emb|CAB88340.1| putative protein [Arabidopsis
  misc_feature (1)..(265): Homolog of NCBI NO: 37536172 NR Description: putative membrane protein [Oryza sativa (japonica group)] >gi|22122915|gb|AAM92298.1| putative membrane protein
MYYNDCPHKSHRCLAKFLGRFSFESFKSNPLLGPSSSTLEKMGALAWGKIVHKRQVWRLLTCMWLHAGVIHLLANMCCVAYIGVRLEQQFGFVRVGTIYLVSGFCGSILSCLFLEDAISVGASSALFGLLGAMLSELLINWTTYDNKGVAIVMLLVIVGVNLGLGTLPPVDNFAHIGGFFGGFLLGFLLLIHPQFEWEENQVSLMPGTIVKPKYNTCQLVLCIVASIVFVAGFTSGLVILFRGDSLNRYCKWCHKLSYSSKSQWT

SEQ ID NO: 81535 - DNA, 2125 bp, Arabidopsis thaliana
  misc_feature (1)..(2125): Ceres Seq. ID no. 12660193
  misc_feature: MA Experiment ID: 20000182 Result: Up-regulated in Transcription
  misc_feature: MA Experiment 20000182 PARAMETER Experiment Name: At_2mM_SA_P Parameter: Age (day) Value: 14
  misc_feature: MA Experiment 20000182 PARAMETER Experiment Name: At_2mM_SA_P Parameter: Organism Value: A. thaliana
  misc_feature: MA Experiment 20000182 PARAMETER Experiment Name: At_2mM_SA_P Parameter: Plant Line Value: WS
  misc_feature: MA Experiment 20000182 PARAMETER Experiment Name: At_2mM_SA_P Parameter: Timepoint (hr) Value: 6
  misc_feature: MA Experiment 20000182 PARAMETER Experiment Name: At_2mM_SA_P Parameter: Tissue Value: Aerial
  misc_feature: MA Experiment 20000182 PARAMETER Experiment Name: At_2mM_SA_P Parameter: Treatment Value: 2mM SA vs. No Treatment
  misc_feature: MA Experiment ID: 20000184 Result: Down-regulated in Transcription
  misc_feature: MA Experiment 20000184 PARAMETER Experiment Name: At_Shoots__P Parameter: Age (day) Value: 7
  misc_feature: MA Experiment 20000184 PARAMETER Experiment Name: At_Shoots__P Parameter: Tissue Value: Shoots vs. Whole Plant
  misc_feature: MA Experiment ID: 20000265 Result: Down-regulated in Transcription
  misc_feature: MA Experiment 20000265 PARAMETER Experiment Name: At_Open_Flower_P Parameter: Age (day) Value: 21
  misc_feature: MA Experiment 20000265 PARAMETER Experiment Name: At_Open_Flower_P Parameter: Plant Line Value: WS
  misc_feature: MA Experiment 20000265 PARAMETER Experiment Name: At_Open_Flower_P Parameter: Tissue Value: Closed Flower vs. Whole Plant
  misc_feature: MA Experiment ID: 20000286 Result: Down-regulated in Transcription
  misc_feature: MA Experiment 20000286 PARAMETER Experiment Name: At_Open_Flower_P Parameter: Age (day) Value: 21
  misc_feature: MA Experiment 20000286 PARAMETER Experiment Name: At_Open_Flower_P Parameter: Plant Line Value: WS
  misc_feature: MA Experiment 20000286 PARAMETER Experiment Name: At_Open_Flower_P Parameter: Tissue Value: Half Open vs. Whole Plant
  misc_feature: MA Experiment ID: 20000527 Result: Down-regulated in Transcription
  misc_feature: MA Experiment 20000527 PARAMETER Experiment Name: At_10percent_PEG_P Parameter: Age (day) Value: 20
  misc_feature: MA Experiment 20000527 PARAMETER Experiment Name: At_10percent_PEG_P Parameter: Organism Value: A. thaliana
  misc_feature: MA Experiment 20000527 PARAMETER Experiment Name: At_10percent_PEG_P Parameter: Plant Line Value: WS
  misc_feature: MA Experiment 20000527 PARAMETER Experiment Name: At_10percent_PEG_P Parameter: Timepoint (day) Value: 20
  misc_feature: MA Experiment 20000527 PARAMETER Experiment Name: At_10percent_PEG_P Parameter: Tissue Value: Whole Plant
  misc_feature: MA Experiment 20000527 PARAMETER Experiment Name: At_10percent_PEG_P Parameter: Treatment Value: 10percent PEG vs. No Treatment
  misc_feature: MA Experiment ID: 20000573 Result: Up-regulated in Transcription
  misc_feature: MA Experiment 20000573 PARAMETER Experiment Name: At_100uM_ABA_Mutants__P Parameter: Organism Value: A. thaliana
  misc_feature: MA Experiment 20000573 PARAMETER Experiment Name: At_100uM_ABA_Mutants__P Parameter: Plant Line Value: CS22 vs. Ler wt
  misc_feature: MA Experiment 20000573 PARAMETER Experiment Name: At_100uM_ABA_Mutants__P Parameter: Timepoint (hr) Value: N/A
  misc_feature: MA Experiment 20000573 PARAMETER Experiment Name: At_100uM_ABA_Mutants__P Parameter: Tissue Value: Whole Plant
  misc_feature: MA Experiment 20000573 PARAMETER Experiment Name: At_100uM_ABA_Mutants__P Parameter: Treatment Value: None
  misc_feature: MA Experiment ID: 20000574 Result: Up-regulated in Transcription
  misc_feature: MA Experiment 20000574 PARAMETER Experiment Name: At_100uM_ABA_Mutants__P Parameter: Organism Value: A. thaliana
  misc_feature: MA Experiment 20000574 PARAMETER Experiment Name: At_100uM_ABA_Mutants__P Parameter: Plant Line Value: CS23 vs. Ler wt
  misc_feature: MA Experiment 20000574 PARAMETER Experiment Name: At_100uM_ABA_Mutants__P Parameter: Timepoint (hr) Value: N/A
  misc_feature: MA Experiment 20000574 PARAMETER Experiment Name: At_100uM_ABA_Mutants__P Parameter: Tissue Value: Whole Plant
  misc_feature: MA Experiment 20000574 PARAMETER Experiment Name: At_100uM_ABA_Mutants__P Parameter: Treatment Value: None
  misc_feature: MA Experiment ID: 20000709 Result: Down-regulated in Transcription
  misc_feature: MA Experiment 20000709 PARAMETER Experiment Name: At_15mM_NH4NO3_L-to-H_P Parameter: Age (hr) Value: 14
  misc_feature: MA Experiment 20000709 PARAMETER Experiment Name: At_15mM_NH4NO3_L-to-H_P Parameter: Organism Value: A. thaliana
  misc_feature: MA Experiment 20000709 PARAMETER Experiment Name: At_15mM_NH4NO3_L-to-H_P Parameter: Plant Line Value: WS
  misc_feature: MA Experiment 20000709 PARAMETER Experiment Name: At_15mM_NH4NO3_L-to-H_P Parameter: Timepoint (hr) Value: 4
  misc_feature: MA Experiment 20000709 PARAMETER Experiment Name: At_15mM_NH4NO3_L-to-H_P Parameter: Tissue Value: Aerial
  misc_feature: MA Experiment 20000709 PARAMETER Experiment Name: At_15mM_NH4NO3_L-to-H_P Parameter: Treatment Value: 15mM NH4NO3 vs. 30mM Mannitol
  misc_feature: MA Experiment ID: 20000794 Result: Down-regulated in Transcription
  misc_feature: MA Experiment 20000794 PARAMETER Experiment Name: At_Petals_P Parameter: Age (day) Value: 23-25 days
  misc_feature: MA Experiment 20000794 PARAMETER Experiment Name: At_Petals_P Parameter: Plant Line Value: WS
  misc_feature: MA Experiment 20000794 PARAMETER Experiment Name: At_Petals_P Parameter: Tissue Value: Petals vs. Whole plant
  misc_feature: MA Experiment ID: 20001554 Result: Down-regulated in Transcription
  misc_feature: MA Experiment 20001554 PARAMETER Experiment Name: At_Drought_Soil_Dry_P Parameter: Age (day) Value: 21
  misc_feature: MA Experiment 20001554 PARAMETER Experiment Name: At_Drought_Soil_Dry_P Parameter: Organism Value: A. thaliana
  misc_feature: MA Experiment 20001554 PARAMETER Experiment Name: At_Drought_Soil_Dry_P Parameter: Plant Line Value: WS
  misc_feature: MA Experiment 20001554 PARAMETER Experiment Name: At_Drought_Soil_Dry_P Parameter: Post Timepoint (hr) Value: None
  misc_feature: MA Experiment 20001554 PARAMETER Experiment Name: At_Drought_Soil_Dry_P Parameter: Post-Treatment Value: None
  misc_feature: MA Experiment 20001554 PARAMETER Experiment Name: At_Drought_Soil_Dry_P Parameter: Timepoint (day) Value: 7
  misc_feature: MA Experiment 20001554 PARAMETER Experiment Name: At_Drought_Soil_Dry_P Parameter: Treatment Value: Drought vs. No Drought
  misc_feature: MA Experiment ID: 20001556 Result: Down-regulated in Transcription
  misc_feature: MA Experiment 20001556 PARAMETER Experiment Name: At_Drought_Soil_Dry_P Parameter: Age (day) Value: 26
  misc_feature: MA Experiment 20001556 PARAMETER Experiment Name: At_Drought_Soil_Dry_P Parameter: Organism Value: A. thaliana
  misc_feature: MA Experiment 20001556 PARAMETER Experiment Name: At_Drought_Soil_Dry_P Parameter: Plant Line Value: WS
  misc_feature: MA Experiment 20001556 PARAMETER Experiment Name: At_Drought_Soil_Dry_P Parameter: Post Timepoint (hr) Value: None
  misc_feature: MA Experiment 20001556 PARAMETER Experiment Name: At_Drought_Soil_Dry_P Parameter: Post-Treatment Value: None
  misc_feature: MA Experiment 20001556 PARAMETER Experiment Name: At_Drought_Soil_Dry_P Parameter: Timepoint (day) Value: 12
  misc_feature: MA Experiment 20001556 PARAMETER Experiment Name: At_Drought_Soil_Dry_P Parameter: Treatment Value: Drought vs. No Drought
  misc_feature: MA Experiment ID: 20001557 Result: Down-regulated in Transcription
  misc_feature: MA Experiment 20001557 PARAMETER Experiment Name: At_Drought_Soil_Dry_P Parameter: Age (day) Value: 27
  misc_feature: MA Experiment 20001557 PARAMETER Experiment Name: At_Drought_Soil_Dry_P Parameter: Organism Value: A. thaliana
  misc_feature: MA Experiment 20001557 PARAMETER Experiment Name: At_Drought_Soil_Dry_P Parameter: Plant Line Value: WS
  misc_feature: MA Experiment 20001557 PARAMETER Experiment Name: At_Drought_Soil_Dry_P Parameter: Post Timepoint (hr) Value: 3
  misc_feature: MA Experiment 20001557 PARAMETER Experiment Name: At_Drought_Soil_Dry_P Parameter: Post-Treatment Value: Re-Water vs. No Drought
  misc_feature: MA Experiment 20001557 PARAMETER Experiment Name: At_Drought_Soil_Dry_P Parameter: Timepoint (day) Value: 13
  misc_feature: MA Experiment 20001557 PARAMETER Experiment Name: At_Drought_Soil_Dry_P Parameter: Treatment Value: Drought vs. No Drought
  misc_feature: MA Experiment ID: 20001558 Result: Down-regulated in Transcription
  misc_feature: MA Experiment 20001558 PARAMETER Experiment Name: At_Drought_Soil_Dry_P Parameter: Age (day) Value: 27
  misc_feature: MA Experiment 20001558 PARAMETER Experiment Name: At_Drought_Soil_Dry_P Parameter: Organism Value: A. thaliana
  misc_feature: MA Experiment 20001558 PARAMETER Experiment Name: At_Drought_Soil_Dry_P Parameter: Plant Line Value: WS
  misc_feature: MA Experiment 20001558 PARAMETER Experiment Name: At_Drought_Soil_Dry_P Parameter: Post Timepoint (hr) Value: 6
  misc_feature: MA Experiment 20001558 PARAMETER Experiment Name: At_Drought_Soil_Dry_P Parameter: Post-Treatment Value: Re-Water vs. No Drought
  misc_feature: MA Experiment 20001558 PARAMETER Experiment Name: At_Drought_Soil_Dry_P Parameter: Timepoint (day) Value: 13
  misc_feature: MA Experiment 20001558 PARAMETER Experiment Name: At_Drought_Soil_Dry_P Parameter: Treatment Value: Drought vs. No Drought
  misc_feature: MA Experiment ID: 20001559 Result: Down-regulated in Transcription
  misc_feature: MA Experiment 20001559 PARAMETER Experiment Name: At_Drought_Soil_Dry_P Parameter: Age (day) Value: 28
  misc_feature: MA Experiment 20001559 PARAMETER Experiment Name: At_Drought_Soil_Dry_P Parameter: Organism Value: A. thaliana
  misc_feature: MA Experiment 20001559 PARAMETER Experiment Name: At_Drought_Soil_Dry_P Parameter: Plant Line Value: WS
  misc_feature: MA Experiment 20001559 PARAMETER Experiment Name: At_Drought_Soil_Dry_P Parameter: Post Timepoint (hr) Value: 29
  misc_feature: MA Experiment 20001559 PARAMETER Experiment Name: At_Drought_Soil_Dry_P Parameter: Post-Treatment Value: Re-Water vs. No Drought
  misc_feature: MA Experiment 20001559 PARAMETER Experiment Name: At_Drought_Soil_Dry_P Parameter: Timepoint (day) Value: 14
  misc_feature: MA Experiment 20001559 PARAMETER Experiment Name: At_Drought_Soil_Dry_P Parameter: Treatment Value: Drought vs. No Drought
  misc_feature: MA Experiment ID: 20001560 Result: Down-regulated in Transcription
  misc_feature: MA Experiment 20001560 PARAMETER Experiment Name: At_Drought_Soil_Dry_P Parameter: Age (day) Value: 28
  misc_feature: MA Experiment 20001560 PARAMETER Experiment Name: At_Drought_Soil_Dry_P Parameter: Organism Value: A. thaliana
  misc_feature: MA Experiment 20001560 PARAMETER Experiment Name: At_Drought_Soil_Dry_P Parameter: Plant Line Value: WS
  misc_feature: MA Experiment 20001560 PARAMETER Experiment Name: At_Drought_Soil_Dry_P Parameter: Post Timepoint (hr) Value: None
  misc_feature: MA Experiment 20001560 PARAMETER Experiment Name: At_Drought_Soil_Dry_P Parameter: Post-Treatment Value: None
  misc_feature: MA Experiment 20001560 PARAMETER Experiment Name: At_Drought_Soil_Dry_P Parameter: Timepoint (day) Value: 14
  misc_feature: MA Experiment 20001560 PARAMETER Experiment Name: At_Drought_Soil_Dry_P Parameter: Treatment Value: Drought vs. No Drought
  misc_feature: MA Experiment ID: 20001904 Result: Down-regulated in Transcription
  misc_feature: MA Experiment 20001904 PARAMETER Experiment Name: At_Drought_Reproduction_P Parameter: Age (day) Value: 37
  misc_feature: MA Experiment 20001904 PARAMETER Experiment Name: At_Drought_Reproduction_P Parameter: Organism Value: A. thaliana
  misc_feature: MA Experiment 20001904 PARAMETER Experiment Name: At_Drought_Reproduction_P Parameter: Plant Line Value: WS
  misc_feature: MA Experiment 20001904 PARAMETER Experiment Name: At_Drought_Reproduction_P Parameter: Timepoint (day) Value: 7
  misc_feature: MA Experiment 20001904 PARAMETER Experiment Name: At_Drought_Reproduction_P Parameter: Tissue Value: Rosettes
  misc_feature: MA Experiment 20001904 PARAMETER Experiment Name: At_Drought_Reproduction_P Parameter: Treatment Value: Drought vs. No Drought
atgtctgcttatacctcattaaactttctcttccttctaaccttcttcattggaagcttgagagtttctgcacaattacaagaccctacttacgttggccatgtttgtactaacaggatatcaagaaactccatttacttctcaaatctccaaacacttttgacctctctttcttctaacaatgcttacttctctttgggatctcatagtctcacaaagggtcaaaactccgacatggtgttcggactttatctctgcaaaggagatctctcgccagaatcttgccgtgagtgcgtcatctttgctgctaaagacactcggagtcgatgtccaggtgggaaagagttcttgattcagtatgatgagtgcatgcttggatactcagacaggaatatattcatggatactgtaaccacaactacaataatcacttggaacactcagaaagttacggcggaccaatctgaccggtttaatgatgcagtgctttctctgatgaaaaagtctgcagaggaagcggctaatagtacaagcaagaaattcgcggttaagaagtcggatttcagttcgtctcagtcgctttatgcatcggttcagtgcattcctgatctgactagtgaagattgtgtaatgtgtcttcaacaatccatcaaagaattatatttcaacaaagttggaggaagatttcttgtcccaagttgtaactcaaggtacgaggtttaccccttttacaaggaaactatagagggaactgttcttcctccgccggtttcggctcctccactgccactggtttcaactccttcctttccgcctggaaaaggcaaaaattctacagtgataatcatagcaattgttgtgccagtcgctatctcagttcttatttgtgtagctgtttttagcttccatgcatcaaagagagcaaagaagacttatgatacaccagaagaggatgacatcacaactgcagggtcactgcagtttgatttcaaggttattgaagctgcaacagataagttttcgatgtgtaacaaactcggtcaaggtggatttggacaagtttacaagggcacacttcctaatggagtacaagttgccgtgaagagactatcgaaaacatcaggacaaggtgagaaagagttcaagaacgaagttgttgttgtggcaaagcttcagcacagaaatctggtcaagcttcttggattttgtttggagagagaagagaaaatacttgtctacgagtttgtgtctaataaaagccttgattacttcttgtttgattctagaatgcagagccagctggattggactacacggtacaagatcataggaggaattgctagaggaattctgtatctccatcaagattcacgactcacaatcatacatcgagacctaaaagcgggtaacatccttttggatgctgatatgaacccgaaagttgcagattttggaatggcgaggatttttgaaatagaccaaacagaagcccatacgagaagagtagttggaacctatggttacatgtctcccgagtatgcgatgtatggccaattttcaatgaaatctgatgtctatagcttcggtgtcttagttcttgagattataagcgggaggaaaaatagcagcctctatcagatggatgctagttttggaaacttggttacatatacttggaggctatggagtgacgggtcaccactagacctcgtggattcttcctttcgagatagttatcaaagaaacgaaataattagatgcatccatattgccttattatgtgtccaagaagatactgaaaatcgtccaaccatgtcagcgatcgtccaaatgcttactactagctcgatcgccctcgctgtacctcaaccacctggatttttcttccggagtaatcatgaacaagcaggtccatcgatggataagtcttctctttgttccattgatgctgcatcgattactattttagctcctcgttaaagacaaacttgtttcataaactagaactaactgcaaatttcaacatttggattttggtgttcattttctaatactctaggagattgttactagaattgaggtcacggtgttttgaattgtttgcacataaatgtacaaataattt

SEQ ID NO: 81536 - protein, 659 aa, Arabidopsis thaliana
  peptide (1)..(659): Ceres Seq. ID no. 12660194
  misc_feature (340)..(612): Pfam Name: Protein kinase domain Pfam Description: Protein kinase domain
  misc_feature (313)..(659): Homolog of NCBI NO: 15236447 NR Description: serine /threonine kinase - like protein; protein At4g23280.1 [Arabidopsis thaliana] >gi|7488190|pir||T04845
  misc_feature (1)..(246): Homolog of NCBI NO: 15236447 NR Description: serine /threonine kinase - like protein; protein At4g23280.1 [Arabidopsis thaliana] >gi|7488190|pir||T04845
  misc_feature (270)..(311): Homolog of NCBI NO: 15236447 NR Description: serine /threonine kinase - like protein; protein At4g23280.1 [Arabidopsis thaliana] >gi|7488190|pir||T04845
  misc_feature (318)..(659): Homolog of NCBI NO: 15236453 NR Description: serine/threonine kinase - like protein; protein At4g23310.1 [Arabidopsis thaliana] >gi|7488242|pir||T04848
  misc_feature (14)..(290): Homolog of NCBI NO: 15236453 NR Description: serine/threonine kinase - like protein; protein At4g23310.1 [Arabidopsis thaliana] >gi|7488242|pir||T04848
  misc_feature (264)..(309): Homolog of NCBI NO: 15236453 NR Description: serine/threonine kinase - like protein; protein At4g23310.1 [Arabidopsis thaliana] >gi|7488242|pir||T04848
  misc_feature (1)..(659): Homolog of NCBI NO: 15231262 NR Description: protein kinase - like; protein id: At3g45860.1
  misc_feature (1)..(659): Homolog of NCBI NO: 30686087 NR Description: serine/threonine kinase -related protein
  misc_feature (1)..(659): Homolog of NCBI NO: 24417476 NR Description: unknown [Arabidopsis thaliana]
  misc_feature (1)..(659): Homolog of NCBI NO: 13506745 NR Description: receptor-like protein kinase 4 [Arabidopsis
MSAYTSLNFLFLLTFFIGSLRVSAQLQDPTYVGHVCTNRISRNSIYFSNLQTLLTSLSSNNAYFSLGSHSLTKGQNSDMVFGLYLCKGDLSPESCRECVIFAAKDTRSRCPGGKEFLIQYDECMLGYSDRNIFMDTVTTTTIITWNTQKVTADQSDRFNDAVLSLMKKSAEEAANSTSKKFAVKKSDFSSSQSLYASVQCIPDLTSEDCVMCLQQSIKELYFNKVGGRFLVPSCNSRYEVYPFYKETIEGTVLPPPVSAPPLPLVSTPSFPPGKGKNSTVIIIAIVVPVAISVLICVAVFSFHASKRAKKTYDTPEEDDITTAGSLQFDFKVIEAATDKFSMCNKLGQGGFGQVYKGTLPNGVQVAVKRLSKTSGQGEKEFKNEVVVVAKLQHRNLVKLLGFCLEREEKILVYEFVSNKSLDYFLFDSRMQSQLDWTTRYKIIGGIARGILYLHQDSRLTIIHRDLKAGNILLDADMNPKVADFGMARIFEIDQTEAHTRRVVGTYGYMSPEYAMYGQFSMKSDVYSFGVLVLEIISGRKNSSLYQMDASFGNLVTYTWRLWSDGSPLDLVDSSFRDSYQRNEIIRCIHIALLCVQEDTENRPTMSAIVQMLTTSSIALAVPQPPGFFFRSNHEQAGPSMDKSSLCSIDAASITILAPR

SEQ ID NO: 81537 - protein, 581 aa, Arabidopsis thaliana
  peptide (1)..(581): Ceres Seq. ID no. 12660195
  misc_feature (262)..(534): Pfam Name: Protein kinase domain Pfam Description: Protein kinase domain
  misc_feature (235)..(581): Homolog of NCBI NO: 15236447 NR Description: serine /threonine kinase - like protein; protein At4g23280.1 [Arabidopsis thaliana] >gi|7488190|pir||T04845
  misc_feature (1)..(168): Homolog of NCBI NO: 15236447 NR Description: serine /threonine kinase - like protein; protein At4g23280.1 [Arabidopsis thaliana] >gi|7488190|pir||T04845
  misc_feature (192)..(233): Homolog of NCBI NO: 15236447 NR Description: serine /threonine kinase - like protein; protein At4g23280.1 [Arabidopsis thaliana] >gi|7488190|pir||T04845
  misc_feature (240)..(581): Homolog of NCBI NO: 15236453 NR Description: serine/threonine kinase - like protein; protein At4g23310.1 [Arabidopsis thaliana] >gi|7488242|pir||T04848
  misc_feature (1)..(212): Homolog of NCBI NO: 15236453 NR Description: serine/threonine kinase - like protein; protein At4g23310.1 [Arabidopsis thaliana] >gi|7488242|pir||T04848
  misc_feature (186)..(231): Homolog of NCBI NO: 15236453 NR Description: serine/threonine kinase - like protein; protein At4g23310.1 [Arabidopsis thaliana] >gi|7488242|pir||T04848
  misc_feature (1)..(581): Homolog of NCBI NO: 15231262 NR Description: protein kinase - like; protein id: At3g45860.1
  misc_feature (1)..(581): Homolog of NCBI NO: 30686087 NR Description: serine/threonine kinase -related protein
  misc_feature (1)..(581): Homolog of NCBI NO: 24417476 NR Description: unknown [Arabidopsis thaliana]
  misc_feature (1)..(581): Homolog of NCBI NO: 13506745 NR Description: receptor-like protein kinase 4 [Arabidopsis
MVFGLYLCKGDLSPESCRECVIFAAKDTRSRCPGGKEFLIQYDECMLGYSDRNIFMDTVTTTTIITWNTQKVTADQSDRFNDAVLSLMKKSAEEAANSTSKKFAVKKSDFSSSQSLYASVQCIPDLTSEDCVMCLQQSIKELYFNKVGGRFLVPSCNSRYEVYPFYKETIEGTVLPPPVSAPPLPLVSTPSFPPGKGKNSTVIIIAIVVPVAISVLICVAVFSFHASKRAKKTYDTPEEDDITTAGSLQFDFKVIEAATDKFSMCNKLGQGGFGQVYKGTLPNGVQVAVKRLSKTSGQGEKEFKNEVVVVAKLQHRNLVKLLGFCLEREEKILVYEFVSNKSLDYFLFDSRMQSQLDWTTRYKIIGGIARGILYLHQDSRLTIIHRDLKAGNILLDADMNPKVADFGMARIFEIDQTEAHTRRVVGTYGYMSPEYAMYGQFSMKSDVYSFGVLVLEIISGRKNSSLYQMDASFGNLVTYTWRLWSDGSPLDLVDSSFRDSYQRNEIIRCIHIALLCVQEDTENRPTMSAIVQMLTTSSIALAVPQPPGFFFRSNHEQAGPSMDKSSLCSIDAASITILAPR

SEQ ID NO: 81538 - protein, 536 aa, Arabidopsis thaliana
  peptide (1)..(536): Ceres Seq. ID no. 12660196
  misc_feature (217)..(489): Pfam Name: Protein kinase domain Pfam Description: Protein kinase domain
  misc_feature (190)..(536): Homolog of NCBI NO: 15236447 NR Description: serine /threonine kinase - like protein; protein At4g23280.1 [Arabidopsis thaliana] >gi|7488190|pir||T04845
  misc_feature (1)..(123): Homolog of NCBI NO: 15236447 NR Description: serine /threonine kinase - like protein; protein At4g23280.1 [Arabidopsis thaliana] >gi|7488190|pir||T04845
  misc_feature (147)..(188): Homolog of NCBI NO: 15236447 NR Description: serine /threonine kinase - like protein; protein At4g23280.1 [Arabidopsis thaliana] >gi|7488190|pir||T04845
  misc_feature (195)..(536): Homolog of NCBI NO: 15236453 NR Description: serine/threonine kinase - like protein; protein At4g23310.1 [Arabidopsis thaliana] >gi|7488242|pir||T04848
  misc_feature (1)..(167): Homolog of NCBI NO: 15236453 NR Description: serine/threonine kinase - like protein; protein At4g23310.1 [Arabidopsis thaliana] >gi|7488242|pir||T04848
  misc_feature (141)..(186): Homolog of NCBI NO: 15236453 NR Description: serine/threonine kinase - like protein; protein At4g23310.1 [Arabidopsis thaliana] >gi|7488242|pir||T04848
  misc_feature (1)..(536): Homolog of NCBI NO: 15231262 NR Description: protein kinase - like; protein id: At3g45860.1
  misc_feature (1)..(536): Homolog of NCBI NO: 30686087 NR Description: serine/threonine kinase -related protein
  misc_feature (1)..(536): Homolog of NCBI NO: 24417476 NR Description: unknown [Arabidopsis thaliana]
  misc_feature (1)..(536): Homolog of NCBI NO: 13506745 NR Description: receptor-like protein kinase 4 [Arabidopsis
MLGYSDRNIFMDTVTTTTIITWNTQKVTADQSDRFNDAVLSLMKKSAEEAANSTSKKFAVKKSDFSSSQSLYASVQCIPDLTSEDCVMCLQQSIKELYFNKVGGRFLVPSCNSRYEVYPFYKETIEGTVLPPPVSAPPLPLVSTPSFPPGKGKNSTVIIIAIVVPVAISVLICVAVFSFHASKRAKKTYDTPEEDDITTAGSLQFDFKVIEAATDKFSMCNKLGQGGFGQVYKGTLPNGVQVAVKRLSKTSGQGEKEFKNEVVVVAKLQHRNLVKLLGFCLEREEKILVYEFVSNKSLDYFLFDSRMQSQLDWTTRYKIIGGIARGILYLHQDSRLTIIHRDLKAGNILLDADMNPKVADFGMARIFEIDQTEAHTRRVVGTYGYMSPEYAMYGQFSMKSDVYSFGVLVLEIISGRKNSSLYQMDASFGNLVTYTWRLWSDGSPLDLVDSSFRDSYQRNEIIRCIHIALLCVQEDTENRPTMSAIVQMLTTSSIALAVPQPPGFFFRSNHEQAGPSMDKSSLCSIDAASITILAPR

SEQ ID NO: 81539 - DNA, 2191 bp, Arabidopsis thaliana
  misc_feature (1)..(2191): Ceres Seq. ID no. 12660197
  misc_feature: MA Experiment ID: 20000184 Result: Down-regulated in Transcription
  misc_feature: MA Experiment 20000184 PARAMETER Experiment Name: At_Shoots__P Parameter: Age (day) Value: 7
  misc_feature: MA Experiment 20000184 PARAMETER Experiment Name: At_Shoots__P Parameter: Tissue Value: Shoots vs. Whole Plant
  misc_feature: MA Experiment ID: 20000234 Result: Down-regulated in Transcription
  misc_feature: MA Experiment 20000234 PARAMETER Experiment Name: At_Siliques_P Parameter: Age (day) Value: 21
  misc_feature: MA Experiment 20000234 PARAMETER Experiment Name: At_Siliques_P Parameter: Organism Value: A. thaliana
  misc_feature: MA Experiment 20000234 PARAMETER Experiment Name: At_Siliques_P Parameter: Plant Line Value: WS
  misc_feature: MA Experiment 20000234 PARAMETER Experiment Name: At_Siliques_P Parameter: Tissue Value: Less Than 5mm Siliques vs. Whole Plant
  misc_feature: MA Experiment ID: 20000235 Result: Down-regulated in Transcription
  misc_feature: MA Experiment 20000235 PARAMETER Experiment Name: At_Siliques_P Parameter: Age (day) Value: 21
  misc_feature: MA Experiment 20000235 PARAMETER Experiment Name: At_Siliques_P Parameter: Organism Value: A. thaliana
  misc_feature: MA Experiment 20000235 PARAMETER Experiment Name: At_Siliques_P Parameter: Plant Line Value: WS
  misc_feature: MA Experiment 20000235 PARAMETER Experiment Name: At_Siliques_P Parameter: Tissue Value: 5-10mm Siliques vs. Whole Plant
  misc_feature: MA Experiment ID: 20000438 Result: Down-regulated in Transcription
  misc_feature: MA Experiment 20000438 PARAMETER Experiment Name: At_Shoots__P Parameter: Age (day) Value: 14
  misc_feature: MA Experiment 20000438 PARAMETER Experiment Name: At_Shoots__P Parameter: Tissue Value: Shoots vs. Whole Plant
  misc_feature: MA Experiment ID: 20000456 Result: Up-regulated in Transcription
  misc_feature: MA Experiment 20000456 PARAMETER Experiment Name: At_100uM_BA_P Parameter: Age (day) Value: 14
  misc_feature: MA Experiment 20000456 PARAMETER Experiment Name: At_100uM_BA_P Parameter: Organism Value: A. thaliana
  misc_feature: MA Experiment 20000456 PARAMETER Experiment Name: At_100uM_BA_P Parameter: Plant Line Value: WS
  misc_feature: MA Experiment 20000456 PARAMETER Experiment Name: At_100uM_BA_P Parameter: Timepoint (hr) Value: 6
  misc_feature: MA Experiment 20000456 PARAMETER Experiment Name: At_100uM_BA_P Parameter: Tissue Value: Aerial
  misc_feature: MA Experiment 20000456 PARAMETER Experiment Name: At_100uM_BA_P Parameter: Treatment Value: 100uM BA vs. No Treatment
  misc_feature: MA Experiment ID: 20000495 Result: Down-regulated in Transcription
  misc_feature: MA Experiment 20000495 PARAMETER Experiment Name: At_Guard_Cells_P Parameter: Harvest Date Value: 8/2/2002
  misc_feature: MA Experiment 20000495 PARAMETER Experiment Name: At_Guard_Cells_P Parameter: Organism Value: A. thaliana
  misc_feature: MA Experiment 20000495 PARAMETER Experiment Name: At_Guard_Cells_P Parameter: Tissue Value: Guard Cells vs. Leaves
  misc_feature: MA Experiment ID: 20001904 Result: Down-regulated in Transcription
  misc_feature: MA Experiment 20001904 PARAMETER Experiment Name: At_Drought_Reproduction_P Parameter: Age (day) Value: 37
  misc_feature: MA Experiment 20001904 PARAMETER Experiment Name: At_Drought_Reproduction_P Parameter: Organism Value: A. thaliana
  misc_feature: MA Experiment 20001904 PARAMETER Experiment Name: At_Drought_Reproduction_P Parameter: Plant Line Value: WS
  misc_feature: MA Experiment 20001904 PARAMETER Experiment Name: At_Drought_Reproduction_P Parameter: Timepoint (day) Value: 7
  misc_feature: MA Experiment 20001904 PARAMETER Experiment Name: At_Drought_Reproduction_P Parameter: Tissue Value: Rosettes
  misc_feature: MA Experiment 20001904 PARAMETER Experiment Name: At_Drought_Reproduction_P Parameter: Treatment Value: Drought vs. No Drought
atgtcttctcttatatctttcaacttccttttccttttctcattcctcactagctccttcacagcttctgctcaagatcctttttacttaaatcattattgtccaaatacgacaacttactcaagtaacagcacttactccaccaatctcagaacccttttgtcctctctatcttcacgtaacgcctcttactccaccggattccaaaacgccactgcaggaaaagcccccgacagagtcaccggacttttcctttgccgcggagacgtctcaccggaagtttgccgtaactgcgtagccttttctgtcaatcaaaccttaaatctttgtcccaaggtaagagaagccgtgttttactacgagcaatgtatactcagatattctcacaagaatattctatcgacggccattacaaacgaaggagaatttatcttgagtaacaccaacactatttctcctaatcaaaaacaaatagacgggttcacaagttttgtttcctccacgatgagtgaagctgccggtaaagcagccaacagttctagaaaattatatacggtgaataccgaattgaccgcataccagaatttgtacgggctgcttcagtgcactcctgatcttacaagagcagactgcttgagttgtttgcaaagttccatcaatggaatggctctttccagaataggagcaagactttactggccgagttgtactgcaaggtacgagctttacccgttctacaatgaaagcgccattgaaacaccaccactaccaccaccaccaccaccaccaccaccgagggagtcgttggtgtctactcctccgatatcatcttcttcattacctgggaaaagtgggaactcaacagtgttagtggtagccgttgttgtgctggctgttctgcttttcatagctttagttggttattgtttccttgcaaaaaagaaaaagaagacttttgacacagcatctgcatcggaggtaggagatgatatggcaaccgcagactcactacagctcgactatagaacaatccaaactgcaacaaatgattttgcagagagtaataagattggtcgaggtggttttggtgaggtttacaagggtacattttcaaatgggaaagaagttgcggtgaagagattgtcgaaaaattcaagacaaggcgaagcggagttcaagaccgaggttgttgtagttgccaagcttcaacacagaaatttggttaggcttcttggattttcattacaaggagaggaaagaattttggtctacgagtatatgcctaacaaaagccttgattgcttactatttgaccctacaaagcaaattcagctggactggatgcagcgatacaatatcattggaggaattgctcgggggattctatatcttcatcaagattcacggctcacaatcatacaccgtgaccttaaagcaagtaacattctcctagatgcggatataaatccgaaaattgcagattttggaatggctaggatctttggattggaccaaacccaagataacacaagcagaatagttggtacctacggttacatggctcctgaatatgcgatgcatggccaattctcaatgaaatctgatgtctatagcttcggagtgttagttcttgagattataagtggtaggaagaatagcagcttcggcgagtcagacggtgcacaagacttgctcacacatgcttggaggctttggactaacaaaaaagcattagacctcgtggatccacttatagcagagaattgccagaatagtgaagtggttcgatgcatccatatcggtcttttatgtgttcaagaagatcctgcaaagcgtccggcaatatcaaccgttttcatgatgctcactagtaatactgtgaccttaccagtgcctcggcaaccagggtttttcattcaatgtagagccgtaaaggacccgcttgattcagatcagtctaccacgaccaagtcttttccagcgtctattgatgatgaatcgatcacagatttatatccgcgctaaatatgaccttaaacttcatgcttgtaatcaagcttacgcaaatgtttacatatttgtagaattgtggatgtgatcaaccctaataattttttagttttgatttggtttgttaaaaccatatgtattttgttttgattttttaataatgaataattagtctagtctc

SEQ ID NO: 81540 - protein, 674 aa, Arabidopsis thaliana
  peptide (1)..(674): Ceres Seq. ID no. 12660198
  misc_feature (80)..(134): Pfam Name: Domain of unknown function DUF26 Pfam Description: Domain of unknown function DUF26
  misc_feature (304)..(674): Homolog of NCBI NO: 15236415 NR Description: putative protein; protein id: At4g23160.1
  misc_feature (1)..(285): Homolog of NCBI NO: 15236415 NR Description: putative protein; protein id: At4g23160.1
  misc_feature (1)..(674): Homolog of NCBI NO: 30686073 NR Description: serine/threonine kinase - like protein thaliana] >gi|22136670|gb|AAM91654.1| putative serine/threonine
  misc_feature (1)..(674): Homolog of NCBI NO: 30686087 NR Description: serine/threonine kinase -related protein
  misc_feature (1)..(674): Homolog of NCBI NO: 24417476 NR Description: unknown [Arabidopsis thaliana]
  misc_feature (1)..(674): Homolog of NCBI NO: 13506745 NR Description: receptor-like protein kinase 4 [Arabidopsis
  misc_feature (1)..(674): Homolog of NCBI NO: 7488194 NR Description: probable serine/threonine-specific protein kinase
  misc_feature (1)..(674): Homolog of NCBI NO: 30686059 NR Description: protein kinase - like protein [Arabidopsis >gi|23296342|gb|AAN13047.1| putative protein kinase [Arabidopsis
  misc_feature (39)..(674): Homolog of NCBI NO: 15233387 NR Description: serine/threonine kinase-like protein; protein id:
  misc_feature (330)..(644): Homolog of NCBI NO: 34898846 NR Description: OJ1058_A12.21 [Oryza sativa (japonica
MSSLISFNFLFLFSFLTSSFTASAQDPFYLNHYCPNTTTYSSNSTYSTNLRTLLSSLSSRNASYSTGFQNATAGKAPDRVTGLFLCRGDVSPEVCRNCVAFSVNQTLNLCPKVREAVFYYEQCILRYSHKNILSTAITNEGEFILSNTNTISPNQKQIDGFTSFVSSTMSEAAGKAANSSRKLYTVNTELTAYQNLYGLLQCTPDLTRADCLSCLQSSINGMALSRIGARLYWPSCTARYELYPFYNESAIETPPLPPPPPPPPPRESLVSTPPISSSSLPGKSGNSTVLVVAVVVLAVLLFIALVGYCFLAKKKKKTFDTASASEVGDDMATADSLQLDYRTIQTATNDFAESNKIGRGGFGEVYKGTFSNGKEVAVKRLSKNSRQGEAEFKTEVVVVAKLQHRNLVRLLGFSLQGEERILVYEYMPNKSLDCLLFDPTKQIQLDWMQRYNIIGGIARGILYLHQDSRLTIIHRDLKASNILLDADINPKIADFGMARIFGLDQTQDNTSRIVGTYGYMAPEYAMHGQFSMKSDVYSFGVLVLEIISGRKNSSFGESDGAQDLLTHAWRLWTNKKALDLVDPLIAENCQNSEVVRCIHIGLLCVQEDPAKRPAISTVFMMLTSNTVTLPVPRQPGFFIQCRAVKDPLDSDQSTTTKSFPASIDDESITDLYPR

SEQ ID NO: 81541 - protein, 506 aa, Arabidopsis thaliana
  peptide (1)..(506): Ceres Seq. ID no. 12660199
  misc_feature (136)..(506): Homolog of NCBI NO: 15236415 NR Description: putative protein; protein id: At4g23160.1
  misc_feature (1)..(117): Homolog of NCBI NO: 15236415 NR Description: putative protein; protein id: At4g23160.1
  misc_feature (1)..(506): Homolog of NCBI NO: 30686073 NR Description: serine/threonine kinase - like protein thaliana] >gi|22136670|gb|AAM91654.1| putative serine/threonine
  misc_feature (1)..(506): Homolog of NCBI NO: 30686087 NR Description: serine/threonine kinase -related protein
  misc_feature (1)..(506): Homolog of NCBI NO: 24417476 NR Description: unknown [Arabidopsis thaliana]
  misc_feature (1)..(506): Homolog of NCBI NO: 13506745 NR Description: receptor-like protein kinase 4 [Arabidopsis
  misc_feature (1)..(506): Homolog of NCBI NO: 7488194 NR Description: probable serine/threonine-specific protein kinase
  misc_feature (1)..(506): Homolog of NCBI NO: 30686059 NR Description: protein kinase - like protein [Arabidopsis >gi|23296342|gb|AAN13047.1| putative protein kinase [Arabidopsis
  misc_feature (1)..(506): Homolog of NCBI NO: 15233387 NR Description: serine/threonine kinase-like protein; protein id:
  misc_feature (162)..(476): Homolog of NCBI NO: 34898846 NR Description: OJ1058_A12.21 [Oryza sativa (japonica
MSEAAGKAANSSRKLYTVNTELTAYQNLYGLLQCTPDLTRADCLSCLQSSINGMALSRIGARLYWPSCTARYELYPFYNESAIETPPLPPPPPPPPPRESLVSTPPISSSSLPGKSGNSTVLVVAVVVLAVLLFIALVGYCFLAKKKKKTFDTASASEVGDDMATADSLQLDYRTIQTATNDFAESNKIGRGGFGEVYKGTFSNGKEVAVKRLSKNSRQGEAEFKTEVVVVAKLQHRNLVRLLGFSLQGEERILVYEYMPNKSLDCLLFDPTKQIQLDWMQRYNIIGGIARGILYLHQDSRLTIIHRDLKASNILLDADINPKIADFGMARIFGLDQTQDNTSRIVGTYGYMAPEYAMHGQFSMKSDVYSFGVLVLEIISGRKNSSFGESDGAQDLLTHAWRLWTNKKALDLVDPLIAENCQNSEVVRCIHIGLLCVQEDPAKRPAISTVFMMLTSNTVTLPVPRQPGFFIQCRAVKDPLDSDQSTTTKSFPASIDDESITDLYPR

SEQ ID NO: 81542 - protein, 453 aa, Arabidopsis thaliana
  peptide (1)..(453): Ceres Seq. ID no. 12660200
  misc_feature (83)..(453): Homolog of NCBI NO: 15236415 NR Description: putative protein; protein id: At4g23160.1
  misc_feature (1)..(64): Homolog of NCBI NO: 15236415 NR Description: putative protein; protein id: At4g23160.1
  misc_feature (1)..(453): Homolog of NCBI NO: 30686073 NR Description: serine/threonine kinase - like protein thaliana] >gi|22136670|gb|AAM91654.1| putative serine/threonine
  misc_feature (1)..(453): Homolog of NCBI NO: 30686087 NR Description: serine/threonine kinase -related protein
  misc_feature (1)..(453): Homolog of NCBI NO: 24417476 NR Description: unknown [Arabidopsis thaliana]
  misc_feature (1)..(453): Homolog of NCBI NO: 13506745 NR Description: receptor-like protein kinase 4 [Arabidopsis
  misc_feature (1)..(453): Homolog of NCBI NO: 7488194 NR Description: probable serine/threonine-specific protein kinase
  misc_feature (1)..(453): Homolog of NCBI NO: 30686059 NR Description: protein kinase - like protein [Arabidopsis >gi|23296342|gb|AAN13047.1| putative protein kinase [Arabidopsis
  misc_feature (1)..(453): Homolog of NCBI NO: 15233387 NR Description: serine/threonine kinase-like protein; protein id:
  misc_feature (109)..(423): Homolog of NCBI NO: 34898846 NR Description: OJ1058_A12.21 [Oryza sativa (japonica
MALSRIGARLYWPSCTARYELYPFYNESAIETPPLPPPPPPPPPRESLVSTPPISSSSLPGKSGNSTVLVVAVVVLAVLLFIALVGYCFLAKKKKKTFDTASASEVGDDMATADSLQLDYRTIQTATNDFAESNKIGRGGFGEVYKGTFSNGKEVAVKRLSKNSRQGEAEFKTEVVVVAKLQHRNLVRLLGFSLQGEERILVYEYMPNKSLDCLLFDPTKQIQLDWMQRYNIIGGIARGILYLHQDSRLTIIHRDLKASNILLDADINPKIADFGMARIFGLDQTQDNTSRIVGTYGYMAPEYAMHGQFSMKSDVYSFGVLVLEIISGRKNSSFGESDGAQDLLTHAWRLWTNKKALDLVDPLIAENCQNSEVVRCIHIGLLCVQEDPAKRPAISTVFMMLTSNTVTLPVPRQPGFFIQCRAVKDPLDSDQSTTTKSFPASIDDESITDLYPR

SEQ ID NO: 81543 - DNA, 2157 bp, Arabidopsis thaliana
  misc_feature (1)..(2157): Ceres Seq. ID no. 12660204
  misc_feature: MA Experiment ID: 20000171 Result: Up-regulated in Transcription
  misc_feature: MA Experiment 20000171 PARAMETER Experiment Name: At_42deg_Heat_P Parameter: Age (day) Value: 14
  misc_feature: MA Experiment 20000171 PARAMETER Experiment Name: At_42deg_Heat_P Parameter: Organism Value: A. thaliana
  misc_feature: MA Experiment 20000171 PARAMETER Experiment Name: At_42deg_Heat_P Parameter: Plant Line Value: WS
  misc_feature: MA Experiment 20000171 PARAMETER Experiment Name: At_42deg_Heat_P Parameter: Temperature (deg C) Value: 42 vs. 22
  misc_feature: MA Experiment 20000171 PARAMETER Experiment Name: At_42deg_Heat_P Parameter: Timepoint (hr) Value: 1
  misc_feature: MA Experiment 20000171 PARAMETER Experiment Name: At_42deg_Heat_P Parameter: Tissue Value: Aerial
  misc_feature: MA Experiment ID: 20000182 Result: Up-regulated in Transcription
  misc_feature: MA Experiment 20000182 PARAMETER Experiment Name: At_2mM_SA_P Parameter: Age (day) Value: 14
  misc_feature: MA Experiment 20000182 PARAMETER Experiment Name: At_2mM_SA_P Parameter: Organism Value: A. thaliana
  misc_feature: MA Experiment 20000182 PARAMETER Experiment Name: At_2mM_SA_P Parameter: Plant Line Value: WS
  misc_feature: MA Experiment 20000182 PARAMETER Experiment Name: At_2mM_SA_P Parameter: Timepoint (hr) Value: 6
  misc_feature: MA Experiment 20000182 PARAMETER Experiment Name: At_2mM_SA_P Parameter: Tissue Value: Aerial
  misc_feature: MA Experiment 20000182 PARAMETER Experiment Name: At_2mM_SA_P Parameter: Treatment Value: 2mM SA vs. No Treatment
  misc_feature: MA Experiment ID: 20000184 Result: Down-regulated in Transcription
  misc_feature: MA Experiment 20000184 PARAMETER Experiment Name: At_Shoots__P Parameter: Age (day) Value: 7
  misc_feature: MA Experiment 20000184 PARAMETER Experiment Name: At_Shoots__P Parameter: Tissue Value: Shoots vs. Whole Plant
  misc_feature: MA Experiment ID: 20000234 Result: Down-regulated in Transcription
  misc_feature: MA Experiment 20000234 PARAMETER Experiment Name: At_Siliques_P Parameter: Age (day) Value: 21
  misc_feature: MA Experiment 20000234 PARAMETER Experiment Name: At_Siliques_P Parameter: Organism Value: A. thaliana
  misc_feature: MA Experiment 20000234 PARAMETER Experiment Name: At_Siliques_P Parameter: Plant Line Value: WS
  misc_feature: MA Experiment 20000234 PARAMETER Experiment Name: At_Siliques_P Parameter: Tissue Value: Less Than 5mm Siliques vs. Whole Plant
  misc_feature: MA Experiment ID: 20000235 Result: Down-regulated in Transcription
  misc_feature: MA Experiment 20000235 PARAMETER Experiment Name: At_Siliques_P Parameter: Age (day) Value: 21
  misc_feature: MA Experiment 20000235 PARAMETER Experiment Name: At_Siliques_P Parameter: Organism Value: A. thaliana
  misc_feature: MA Experiment 20000235 PARAMETER Experiment Name: At_Siliques_P Parameter: Plant Line Value: WS
  misc_feature: MA Experiment 20000235 PARAMETER Experiment Name: At_Siliques_P Parameter: Tissue Value: 5-10mm Siliques vs. Whole Plant
  misc_feature: MA Experiment ID: 20000264 Result: Down-regulated in Transcription
  misc_feature: MA Experiment 20000264 PARAMETER Experiment Name: At_Open_Flower_P Parameter: Age (day) Value: 21
  misc_feature: MA Experiment 20000264 PARAMETER Experiment Name: At_Open_Flower_P Parameter: Plant Line Value: WS
  misc_feature: MA Experiment 20000264 PARAMETER Experiment Name: At_Open_Flower_P Parameter: Tissue Value: Open Flower vs. Whole Plant
  misc_feature: MA Experiment ID: 20000265 Result: Down-regulated in Transcription
  misc_feature: MA Experiment 20000265 PARAMETER Experiment Name: At_Open_Flower_P Parameter: Age (day) Value: 21
  misc_feature: MA Experiment 20000265 PARAMETER Experiment Name: At_Open_Flower_P Parameter: Plant Line Value: WS
  misc_feature: MA Experiment 20000265 PARAMETER Experiment Name: At_Open_Flower_P Parameter: Tissue Value: Closed Flower vs. Whole Plant
  misc_feature: MA Experiment ID: 20000286 Result: Down-regulated in Transcription
  misc_feature: MA Experiment 20000286 PARAMETER Experiment Name: At_Open_Flower_P Parameter: Age (day) Value: 21
  misc_feature: MA Experiment 20000286 PARAMETER Experiment Name: At_Open_Flower_P Parameter: Plant Line Value: WS
  misc_feature: MA Experiment 20000286 PARAMETER Experiment Name: At_Open_Flower_P Parameter: Tissue Value: Half Open vs. Whole Plant
  misc_feature: MA Experiment ID: 20000438 Result: Down-regulated in Transcription
  misc_feature: MA Experiment 20000438 PARAMETER Experiment Name: At_Shoots__P Parameter: Age (day) Value: 14
  misc_feature: MA Experiment 20000438 PARAMETER Experiment Name: At_Shoots__P Parameter: Tissue Value: Shoots vs. Whole Plant
  misc_feature: MA Experiment ID: 20000439 Result: Down-regulated in Transcription
  misc_feature: MA Experiment 20000439 PARAMETER Experiment Name: At_Roots__P Parameter: Age (day) Value: 14 vs. 21
  misc_feature: MA Experiment 20000439 PARAMETER Experiment Name: At_Roots__P Parameter: Organism Value: A. thaliana
  misc_feature: MA Experiment 20000439 PARAMETER Experiment Name: At_Roots__P Parameter: Tissue Value: Roots vs. Whole Plant
  misc_feature: MA Experiment ID: 20000495 Result: Down-regulated in Transcription
  misc_feature: MA Experiment 20000495 PARAMETER Experiment Name: At_Guard_Cells_P Parameter: Harvest Date Value: 8/2/2002
  misc_feature: MA Experiment 20000495 PARAMETER Experiment Name: At_Guard_Cells_P Parameter: Organism Value: A. thaliana
  misc_feature: MA Experiment 20000495 PARAMETER Experiment Name: At_Guard_Cells_P Parameter: Tissue Value: Guard Cells vs. Leaves
  misc_feature: MA Experiment ID: 20000709 Result: Down-regulated in Transcription
  misc_feature: MA Experiment 20000709 PARAMETER Experiment Name: At_15mM_NH4NO3_L-to-H_P Parameter: Age (hr) Value: 14
  misc_feature: MA Experiment 20000709 PARAMETER Experiment Name: At_15mM_NH4NO3_L-to-H_P Parameter: Organism Value: A. thaliana
  misc_feature: MA Experiment 20000709 PARAMETER Experiment Name: At_15mM_NH4NO3_L-to-H_P Parameter: Plant Line Value: WS
  misc_feature: MA Experiment 20000709 PARAMETER Experiment Name: At_15mM_NH4NO3_L-to-H_P Parameter: Timepoint (hr) Value: 4
  misc_feature: MA Experiment 20000709 PARAMETER Experiment Name: At_15mM_NH4NO3_L-to-H_P Parameter: Tissue Value: Aerial
  misc_feature: MA Experiment 20000709 PARAMETER Experiment Name: At_15mM_NH4NO3_L-to-H_P Parameter: Treatment Value: 15mM NH4NO3 vs. 30mM Mannitol
  misc_feature: MA Experiment ID: 20000794 Result: Down-regulated in Transcription
  misc_feature: MA Experiment 20000794 PARAMETER Experiment Name: At_Petals_P Parameter: Age (day) Value: 23-25 days
  misc_feature: MA Experiment 20000794 PARAMETER Experiment Name: At_Petals_P Parameter: Plant Line Value: WS
  misc_feature: MA Experiment 20000794 PARAMETER Experiment Name: At_Petals_P Parameter: Tissue Value: Petals vs. Whole plant
  misc_feature: MA Experiment ID: 20001554 Result: Down-regulated in Transcription
  misc_feature: MA Experiment 20001554 PARAMETER Experiment Name: At_Drought_Soil_Dry_P Parameter: Age (day) Value: 21
  misc_feature: MA Experiment 20001554 PARAMETER Experiment Name: At_Drought_Soil_Dry_P Parameter: Organism Value: A. thaliana
  misc_feature: MA Experiment 20001554 PARAMETER Experiment Name: At_Drought_Soil_Dry_P Parameter: Plant Line Value: WS
  misc_feature: MA Experiment 20001554 PARAMETER Experiment Name: At_Drought_Soil_Dry_P Parameter: Post Timepoint (hr) Value: None
  misc_feature: MA Experiment 20001554 PARAMETER Experiment Name: At_Drought_Soil_Dry_P Parameter: Post-Treatment Value: None
  misc_feature: MA Experiment 20001554 PARAMETER Experiment Name: At_Drought_Soil_Dry_P Parameter: Timepoint (day) Value: 7
  misc_feature: MA Experiment 20001554 PARAMETER Experiment Name: At_Drought_Soil_Dry_P Parameter: Treatment Value: Drought vs. No Drought
  misc_feature: MA Experiment ID: 20001556 Result: Down-regulated in Transcription
  misc_feature: MA Experiment 20001556 PARAMETER Experiment Name: At_Drought_Soil_Dry_P Parameter: Age (day) Value: 26
  misc_feature: MA Experiment 20001556 PARAMETER Experiment Name: At_Drought_Soil_Dry_P Parameter: Organism Value: A. thaliana
  misc_feature: MA Experiment 20001556 PARAMETER Experiment Name: At_Drought_Soil_Dry_P Parameter: Plant Line Value: WS
  misc_feature: MA Experiment 20001556 PARAMETER Experiment Name: At_Drought_Soil_Dry_P Parameter: Post Timepoint (hr) Value: None
  misc_feature: MA Experiment 20001556 PARAMETER Experiment Name: At_Drought_Soil_Dry_P Parameter: Post-Treatment Value: None
  misc_feature: MA Experiment 20001556 PARAMETER Experiment Name: At_Drought_Soil_Dry_P Parameter: Timepoint (day) Value: 12
  misc_feature: MA Experiment 20001556 PARAMETER Experiment Name: At_Drought_Soil_Dry_P Parameter: Treatment Value: Drought vs. No Drought
  misc_feature: MA Experiment ID: 20001904 Result: Down-regulated in Transcription
  misc_feature: MA Experiment 20001904 PARAMETER Experiment Name: At_Drought_Reproduction_P Parameter: Age (day) Value: 37
  misc_feature: MA Experiment 20001904 PARAMETER Experiment Name: At_Drought_Reproduction_P Parameter: Organism Value: A. thaliana
  misc_feature: MA Experiment 20001904 PARAMETER Experiment Name: At_Drought_Reproduction_P Parameter: Plant Line Value: WS
  misc_feature: MA Experiment 20001904 PARAMETER Experiment Name: At_Drought_Reproduction_P Parameter: Timepoint (day) Value: 7
  misc_feature: MA Experiment 20001904 PARAMETER Experiment Name: At_Drought_Reproduction_P Parameter: Tissue Value: Rosettes
  misc_feature: MA Experiment 20001904 PARAMETER Experiment Name: At_Drought_Reproduction_P Parameter: Treatment Value: Drought vs. No Drought
  misc_feature: MA Experiment ID: 20001905 Result: Down-regulated in Transcription
  misc_feature: MA Experiment 20001905 PARAMETER Experiment Name: At_Drought_Reproduction_P Parameter: Age (day) Value: 40
  misc_feature: MA Experiment 20001905 PARAMETER Experiment Name: At_Drought_Reproduction_P Parameter: Organism Value: A. thaliana
  misc_feature: MA Experiment 20001905 PARAMETER Experiment Name: At_Drought_Reproduction_P Parameter: Plant Line Value: WS
  misc_feature: MA Experiment 20001905 PARAMETER Experiment Name: At_Drought_Reproduction_P Parameter: Timepoint (day) Value: 10
  misc_feature: MA Experiment 20001905 PARAMETER Experiment Name: At_Drought_Reproduction_P Parameter: Tissue Value: Rosettes
  misc_feature: MA Experiment 20001905 PARAMETER Experiment Name: At_Drought_Reproduction_P Parameter: Treatment Value: Drought vs. No Drought
attcatacttacttgctgtcctaacgtaaatatcatctgtactatcttgaaaatggaattgaagaatctctttccaatcttctggtttgtcctcgtaggctttgctgtggtgtctgcacaagaatgcggcaaaacagggttttttgtaccacaaagtaggtatgaaacaaaccggggccttctcctctcttctcttccttccaatgtttcagctcgaggaggattctacaattcttcgattggccaaggccctgatcgagtgtatgctctggggatgtgcattgaaggtgctgaaccagatgtttgctccgactgtattgaatatgcttctaatctgttattagacacgtgtctcaaccagacagaagcctggcctggccggagaaacggattttgtgtatggtacgatactccaatagttctttttttggatcactcaaggcagaaccgcatttctatatccacaacgtggatgatattacatccaatttaacagagtttgatcaagtgtgggaagagttagcacgtcgtatgatagctagtactacttctccatcatctaaacgcaagtactacgcagcagacgtagcagccttgacagctttccagataatatatgcactaatgcaatgcactccggacttatctttggaggattgccatatctgtttaagacaaagtgttggtgactatgaaacatgctgcaatggaaagcaaggtggcattgtgtaccgagccagctgtgttttccggtgggagctttttcccttctctgaggcttttagtcgtatttcgttggcacctccgcctcaatccccagcatttcccacgcttccggcagtaaccaatacagcgaccaagaaaggtagcataacaatctcgataggaattgtctgggcaatcattattcctactgtcattgttgtcttcttggtactgcttgcgctaggatttgttgtttataggaggaggaaatcataccaaggatccagcactgatatcaccattacacactcactgcaattcgatttcaaagcgattgaagatgcaacaaataaattctcggagagcaacataattggtcgcggtggatttggagaagttttcatgggtgtccttaacggtactgaagttgcaattaagaggctgtcaaaagcatcgagacaaggtgcacgagaattcaaaaatgaggttgttgttgttgcaaaactccatcataggaatcttgttaagcttctcgggttttgtctagaaggagaagagaaaatacttgtttacgagtttgtccccaacaagagcctcgactacttcctctttgaccctacaaagcaagggcagttagactggactaaacgatacaacattatccggggaatcactcgaggaattctgtatcttcatcaagactcacggctcacgatcatacatcgtgacctcaaagccagcaacattctcctagatgcagatatgaacccaaaaattgctgattttggaatggcgagaatttttgggatcgatcaaagtggagctaatacaaaaaaaatagctgggacacgcggttacatgcctccagaatatgtgaggcaaggtcagttctcaacaagatcagatgtttatagtttcggagtcttagttcttgagattatatgtggtcgaaataacagattcatccaccagtcagacactacagttgagaatttggtcacatacgcttggaggttgtggagaaacgattcaccattagaactcgtggatccaaccatttcggagaattgtgaaaccgaagaagtgacaagatgcatccacattgcgttgctgtgtgttcaacacaatcccacagatcgccccagcttgtcgacaatcaacatgatgctcataaacaattcgtatgttttacctgatcctcaacaacctggattcttctttccaataataagcaaccaagaacgagatggcctcgactctatgaacaggtccaatccacaaactatcaatgatgtaaccattacagattttgaacctcgttgaagttgctattccagtgagacattgttccatttgaatgattatgtatctaagtatctttatcattcctacgttgtaatatcagctctctgttttatgggagtcttgacgtataatatccaaaccggtctt

SEQ ID NO: 81544 - protein, 542 aa, Arabidopsis thaliana
  peptide (1)..(542): Ceres Seq. ID no. 12660205
  misc_feature (72)..(126): Pfam Name: Domain of unknown function DUF26 Pfam Description: Domain of unknown function DUF26
  misc_feature (1)..(542): Homolog of NCBI NO: 18416092 NR Description: serine/threonine kinase - like protein; protein At4g23220.1, supported by cDNA: gi_14423417 [Arabidopsis
  misc_feature (76)..(542): Homolog of NCBI NO: 23197688 NR Description: serine/threonine kinase - like protein
  misc_feature (1)..(542): Homolog of NCBI NO: 15233396 NR Description: serine/threonine kinase-like protein (fragment);
  misc_feature (1)..(542): Homolog of NCBI NO: 7488201 NR Description: probable serine/threonine-specific protein kinase
  misc_feature (201)..(542): Homolog of NCBI NO: 15236421 NR Description: serine /threonine kinase - like protein; protein At4g23200.1 [Arabidopsis thaliana] >gi|7488197|pir||T04837
  misc_feature (1)..(145): Homolog of NCBI NO: 15236421 NR Description: serine /threonine kinase - like protein; protein At4g23200.1 [Arabidopsis thaliana] >gi|7488197|pir||T04837
  misc_feature (1)..(508): Homolog of NCBI NO: 30686091 NR Description: serine/threonine kinase - like protein
  misc_feature (1)..(508): Homolog of NCBI NO: 4127461 NR Description: receptor-like protein kinase, RLK3 [Arabidopsis
  misc_feature (1)..(537): Homolog of NCBI NO: 15233387 NR Description: serine/threonine kinase-like protein; protein id:
  misc_feature (1)..(542): Homolog of NCBI NO: 4008012 NR Description: receptor-like protein kinase [Arabidopsis
MVRYSNSSFFGSLKAEPHFYIHNVDDITSNLTEFDQVWEELARRMIASTTSPSSKRKYYAADVAALTAFQIIYALMQCTPDLSLEDCHICLRQSVGDYETCCNGKQGGIVYRASCVFRWELFPFSEAFSRISLAPPPQSPAFPTLPAVTNTATKKGSITISIGIVWAIIIPTVIVVFLVLLALGFVVYRRRKSYQGSSTDITITHSLQFDFKAIEDATNKFSESNIIGRGGFGEVFMGVLNGTEVAIKRLSKASRQGAREFKNEVVVVAKLHHRNLVKLLGFCLEGEEKILVYEFVPNKSLDYFLFDPTKQGQLDWTKRYNIIRGITRGILYLHQDSRLTIIHRDLKASNILLDADMNPKIADFGMARIFGIDQSGANTKKIAGTRGYMPPEYVRQGQFSTRSDVYSFGVLVLEIICGRNNRFIHQSDTTVENLVTYAWRLWRNDSPLELVDPTISENCETEEVTRCIHIALLCVQHNPTDRPSLSTINMMLINNSYVLPDPQQPGFFFPIISNQERDGLDSMNRSNPQTINDVTITDFEPR

SEQ ID NO: 81545 - protein, 498 aa, Arabidopsis thaliana
  peptide (1)..(498): Ceres Seq. ID no. 12660206
  misc_feature (28)..(82): Pfam Name: Domain of unknown function DUF26 Pfam Description: Domain of unknown function DUF26
  misc_feature (1)..(498): Homolog of NCBI NO: 18416092 NR Description: serine/threonine kinase - like protein; protein At4g23220.1, supported by cDNA: gi_14423417 [Arabidopsis
  misc_feature (32)..(498): Homolog of NCBI NO: 23197688 NR Description: serine/threonine kinase - like protein
  misc_feature (1)..(498): Homolog of NCBI NO: 15233396 NR Description: serine/threonine kinase-like protein (fragment);
  misc_feature (1)..(498): Homolog of NCBI NO: 7488201 NR Description: probable serine/threonine-specific protein kinase
  misc_feature (157)..(498): Homolog of NCBI NO: 15236421 NR Description: serine /threonine kinase - like protein; protein At4g23200.1 [Arabidopsis thaliana] >gi|7488197|pir||T04837
  misc_feature (1)..(101): Homolog of NCBI NO: 15236421 NR Description: serine /threonine kinase - like protein; protein At4g23200.1 [Arabidopsis thaliana] >gi|7488197|pir||T04837
  misc_feature (1)..(464): Homolog of NCBI NO: 30686091 NR Description: serine/threonine kinase - like protein
  misc_feature (1)..(464): Homolog of NCBI NO: 4127461 NR Description: receptor-like protein kinase, RLK3 [Arabidopsis
  misc_feature (1)..(493): Homolog of NCBI NO: 15233387 NR Description: serine/threonine kinase-like protein; protein id:
  misc_feature (1)..(498): Homolog of NCBI NO: 4008012 NR Description: receptor-like protein kinase [Arabidopsis
MIASTTSPSSKRKYYAADVAALTAFQIIYALMQCTPDLSLEDCHICLRQSVGDYETCCNGKQGGIVYRASCVFRWELFPFSEAFSRISLAPPPQSPAFPTLPAVTNTATKKGSITISIGIVWAIIIPTVIVVFLVLLALGFVVYRRRKSYQGSSTDITITHSLQFDFKAIEDATNKFSESNIIGRGGFGEVFMGVLNGTEVAIKRLSKASRQGAREFKNEVVVVAKLHHRNLVKLLGFCLEGEEKILVYEFVPNKSLDYFLFDPTKQGQLDWTKRYNIIRGITRGILYLHQDSRLTIIHRDLKASNILLDADMNPKIADFGMARIFGIDQSGANTKKIAGTRGYMPPEYVRQGQFSTRSDVYSFGVLVLEIICGRNNRFIHQSDTTVENLVTYAWRLWRNDSPLELVDPTISENCETEEVTRCIHIALLCVQHNPTDRPSLSTINMMLINNSYVLPDPQQPGFFFPIISNQERDGLDSMNRSNPQTINDVTITDFEPR

SEQ ID NO: 81546 - protein, 467 aa, Arabidopsis thaliana
  peptide (1)..(467): Ceres Seq. ID no. 12660207
  misc_feature (1)..(51): Pfam Name: Domain of unknown function DUF26 Pfam Description: Domain of unknown function DUF26
  misc_feature (1)..(467): Homolog of NCBI NO: 18416092 NR Description: serine/threonine kinase - like protein; protein At4g23220.1, supported by cDNA: gi_14423417 [Arabidopsis
  misc_feature (1)..(467): Homolog of NCBI NO: 23197688 NR Description: serine/threonine kinase - like protein
  misc_feature (1)..(467): Homolog of NCBI NO: 15233396 NR Description: serine/threonine kinase-like protein (fragment);
  misc_feature (1)..(467): Homolog of NCBI NO: 7488201 NR Description: probable serine/threonine-specific protein kinase
  misc_feature (126)..(467): Homolog of NCBI NO: 15236421 NR Description: serine /threonine kinase - like protein; protein At4g23200.1 [Arabidopsis thaliana] >gi|7488197|pir||T04837
  misc_feature (1)..(70): Homolog of NCBI NO: 15236421 NR Description: serine /threonine kinase - like protein; protein At4g23200.1 [Arabidopsis thaliana] >gi|7488197|pir||T04837
  misc_feature (1)..(433): Homolog of NCBI NO: 30686091 NR Description: serine/threonine kinase - like protein
  misc_feature (1)..(433): Homolog of NCBI NO: 4127461 NR Description: receptor-like protein kinase, RLK3 [Arabidopsis
  misc_feature (1)..(462): Homolog of NCBI NO: 15233387 NR Description: serine/threonine kinase-like protein; protein id:
  misc_feature (1)..(467): Homolog of NCBI NO: 4008012 NR Description: receptor-like protein kinase [Arabidopsis
MQCTPDLSLEDCHICLRQSVGDYETCCNGKQGGIVYRASCVFRWELFPFSEAFSRISLAPPPQSPAFPTLPAVTNTATKKGSITISIGIVWAIIIPTVIVVFLVLLALGFVVYRRRKSYQGSSTDITITHSLQFDFKAIEDATNKFSESNIIGRGGFGEVFMGVLNGTEVAIKRLSKASRQGAREFKNEVVVVAKLHHRNLVKLLGFCLEGEEKILVYEFVPNKSLDYFLFDPTKQGQLDWTKRYNIIRGITRGILYLHQDSRLTIIHRDLKASNILLDADMNPKIADFGMARIFGIDQSGANTKKIAGTRGYMPPEYVRQGQFSTRSDVYSFGVLVLEIICGRNNRFIHQSDTTVENLVTYAWRLWRNDSPLELVDPTISENCETEEVTRCIHIALLCVQHNPTDRPSLSTINMMLINNSYVLPDPQQPGFFFPIISNQERDGLDSMNRSNPQTINDVTITDFEPR

SEQ ID NO: 81547 - DNA, 1731 bp, Arabidopsis thaliana
  misc_feature (1)..(1731): Ceres Seq. ID no. 12660245
  misc_feature: MA Experiment ID: 20000180 Result: Up-regulated in Transcription
  misc_feature: MA Experiment 20000180 PARAMETER Experiment Name: At_Germinating_Seeds_P Parameter: Age (hr) Value: 24 vs. 0
  misc_feature: MA Experiment 20000180 PARAMETER Experiment Name: At_Germinating_Seeds_P Parameter: Tissue Value: Germinating Seeds
  misc_feature: MA Experiment ID: 20000182 Result: Down-regulated in Transcription
  misc_feature: MA Experiment 20000182 PARAMETER Experiment Name: At_2mM_SA_P Parameter: Age (day) Value: 14
  misc_feature: MA Experiment 20000182 PARAMETER Experiment Name: At_2mM_SA_P Parameter: Organism Value: A. thaliana
  misc_feature: MA Experiment 20000182 PARAMETER Experiment Name: At_2mM_SA_P Parameter: Plant Line Value: WS
  misc_feature: MA Experiment 20000182 PARAMETER Experiment Name: At_2mM_SA_P Parameter: Timepoint (hr) Value: 6
  misc_feature: MA Experiment 20000182 PARAMETER Experiment Name: At_2mM_SA_P Parameter: Tissue Value: Aerial
  misc_feature: MA Experiment 20000182 PARAMETER Experiment Name: At_2mM_SA_P Parameter: Treatment Value: 2mM SA vs. No Treatment
  misc_feature: MA Experiment ID: 20000185 Result: Down-regulated in Transcription
  misc_feature: MA Experiment 20000185 PARAMETER Experiment Name: At_Roots__P Parameter: Age (day) Value: 7 vs. 21
  misc_feature: MA Experiment 20000185 PARAMETER Experiment Name: At_Roots__P Parameter: Organism Value: A. thaliana
  misc_feature: MA Experiment 20000185 PARAMETER Experiment Name: At_Roots__P Parameter: Tissue Value: Roots vs. Whole Plant
  misc_feature: MA Experiment ID: 20000227 Result: Down-regulated in Transcription
  misc_feature: MA Experiment 20000227 PARAMETER Experiment Name: At_Root-Tips-vs-Tops_P Parameter: Tissue Value: Root Tips vs. Root Tops
  misc_feature: MA Experiment ID: 20001248 Result: Down-regulated in Transcription
  misc_feature: MA Experiment 20001248 PARAMETER Experiment Name: At_Far-red-induction_P Parameter: Age (day) Value: 7
  misc_feature: MA Experiment 20001248 PARAMETER Experiment Name: At_Far-red-induction_P Parameter: Light Value: Far-red vs. White
  misc_feature: MA Experiment 20001248 PARAMETER Experiment Name: At_Far-red-induction_P Parameter: Organism Value: A. thaliana
  misc_feature: MA Experiment 20001248 PARAMETER Experiment Name: At_Far-red-induction_P Parameter: Plant Line Value: Columbia
  misc_feature: MA Experiment 20001248 PARAMETER Experiment Name: At_Far-red-induction_P Parameter: Timepoint (hr) Value: 4
  misc_feature: MA Experiment 20001248 PARAMETER Experiment Name: At_Far-red-induction_P Parameter: Tissue Value: Whole Plant
  misc_feature: MA Experiment ID: 20001450 Result: Down-regulated in Transcription
  misc_feature: MA Experiment 20001450 PARAMETER Experiment Name: At_Far-red-induction_P Parameter: Age (day) Value: 7
  misc_feature: MA Experiment 20001450 PARAMETER Experiment Name: At_Far-red-induction_P Parameter: Light Value: Far-red vs. White
  misc_feature: MA Experiment 20001450 PARAMETER Experiment Name: At_Far-red-induction_P Parameter: Organism Value: A. thaliana
  misc_feature: MA Experiment 20001450 PARAMETER Experiment Name: At_Far-red-induction_P Parameter: Plant Line Value: Columbia
  misc_feature: MA Experiment 20001450 PARAMETER Experiment Name: At_Far-red-induction_P Parameter: Timepoint (hr) Value: 8
  misc_feature: MA Experiment 20001450 PARAMETER Experiment Name: At_Far-red-induction_P Parameter: Tissue Value: Whole Plant
atggcttttcctgccgctgctacttatcccacccatttccaaggcggcgctcttcatctgggtaggaccgatcattgcctcttcggtttctaccctcaaaccatttcctctgtgaattctcggagagcttctgtttccatcaagtgccaatctacggagccaaagacgaatggtaacatattggacaatgcgagcaaccttttgacaaattttttaagtggtggaagtttggggtcaatgcctactgctgaaggctctgtctctgatttgtttggaaagcctctctttttatctctttacgactggttcttggagcatggaggaatttataaacttgcgtttggtccaaaagcctttgttgtcatctcagatcccattattgcaaggcatgtcctccgggaaaatgctttttcttatgacaagggagttcttgctgagatcttagagccgattatgggaaaagggttaataccggctgatctagatacgtggaagttaagaagaagagctatcactcccgcattccataaattgtatctagaggccatggtcaaagtatttagtgactgttcggagaaaatgatattgaaatctgagaaactcataagggagaaagaaacttcaagcggggaggacaccattgagttggatctggaagcagaattctcgagtctggctcttgatattataggtcttagcgtgttcaactacgattttggctctgtcacaaaagagtcccctgtgatcaaggcagtttatggaactcttttcgaggcagagcatcggtctactttctacttcccttattggaactttcctccagctagatggatagttccgaggcaacgaaagttccaaagcgatctgaagattataaacgattgccttgatggcctcattcaaaatgctaaagagacaagacaggaaacagatgttgagaagctccaggaaagggactacactaatctcaaggatgcaagtcttttgcggttcttagtcgatatgcgcggtgttgacattgatgaccggcagctgagggatgacttgatgactatgctaattgctggtcatgagacaacagcagcagtacttacttgggctgttttccttctgtcacaaaatcctgaaaaaattaggaaagctcaagctgagattgatgctgtgcttggtcaaggtccacccacttatgaatcaatgaaaaagctcgagtacatacgactgatcgttgtagaagtccttcgtctctttcctcagccacctttgctcatcagacgcactctcaaaccagaaacattacccggaggacacaaaggggaaaaagaaggtcataaagttccaaaagggactgatatcttcatttctgtgtataatctccatagatctccatacttttgggataatccccacgattttgagcctgagaggtttttaagaacaaaggagagcaatggaattgaaggatgggctggctttgatccatctcgtagccccggggcactatatccgaatgagataatagcagactttgcattcttaccatttggtggaggaccaagaaaatgcattggagaccagtttgcactaatggaatcgaccgtcgcactagctatgttgtttcagaaattcgatgtggagctgcgtggaacgccagaatctgttgaactcgtgagcggcgcaacgattcatgccaaaaatgggatgtggtgcaaactaaagagaagatcaaagtga

SEQ ID NO: 81548 - protein, 576 aa, Arabidopsis thaliana; identical to SEQ ID NO: 44982
  peptide (1)..(576): Ceres Seq. ID no. 12660246
  misc_feature (1)..(576): Homolog of NCBI NO: 7427576 NR Description: probable cytochrome P450 - Arabidopsis thaliana cytochrome P450 like protein [Arabidopsis thaliana]
  misc_feature (1)..(576): Homolog of NCBI NO: 30683137 NR Description: cytochrome p450, putative [Arabidopsis thaliana] Cytochrome P450 97B3 >gi|17065198|gb|AAL32753.1| cytochrome P450 thaliana] >gi|27311953|gb|AAO00942.1| cytochrome P450

SEQ ID NO: 81549 - protein, 497 aa, Arabidopsis thaliana; identical to SEQ ID NO: 44983
  peptide (1)..(497): Ceres Seq. ID no. 12660247
  misc_feature (1)..(497): Homolog of NCBI NO: 7427576 NR Description: probable cytochrome P450 - Arabidopsis thaliana cytochrome P450 like protein [Arabidopsis thaliana]
  misc_feature (1)..(497): Homolog of NCBI NO: 30683137 NR Description: cytochrome p450, putative [Arabidopsis thaliana] Cytochrome P450 97B3 >gi|17065198|gb|AAL32753.1| cytochrome P450 thaliana] >gi|27311953|gb|AAO00942.1| cytochrome P450

SEQ ID NO: 81550 - protein, 425 aa, Arabidopsis thaliana
  peptide (1)..(425): Ceres Seq. ID no. 12660248
  misc_feature (1)..(425): Homolog of NCBI NO: 7427576 NR Description: probable cytochrome P450 - Arabidopsis thaliana cytochrome P450 like protein [Arabidopsis thaliana]
  misc_feature (1)..(425): Homolog of NCBI NO: 30683137 NR Description: cytochrome p450, putative [Arabidopsis thaliana] Cytochrome P450 97B3 >gi|17065198|gb|AAL32753.1| cytochrome P450 thaliana] >gi|27311953|gb|AAO00942.1| cytochrome P450
MGKGLIPADLDTWKLRRRAITPAFHKLYLEAMVKVFSDCSEKMILKSEKLIREKETSSGEDTIELDLEAEFSSLALDIIGLSVFNYDFGSVTKESPVIKAVYGTLFEAEHRSTFYFPYWNFPPARWIVPRQRKFQSDLKIINDCLDGLIQNAKETRQETDVEKLQERDYTNLKDASLLRFLVDMRGVDIDDRQLRDDLMTMLIAGHETTAAVLTWAVFLLSQNPEKIRKAQAEIDAVLGQGPPTYESMKKLEYIRLIVVEVLRLFPQPPLLIRRTLKPETLPGGHKGEKEGHKVPKGTDIFISVYNLHRSPYFWDNPHDFEPERFLRTKESNGIEGWAGFDPSRSPGALYPNEIIADFAFLPFGGGPRKCIGDQFALMESTVALAMLFQKFDVELRGTPESVELVSGATIHAKNGMWCKLKRRSK

SEQ ID NO: 81551 - DNA, 975 bp, Arabidopsis thaliana
  misc_feature (1)..(975): Ceres Seq. ID no. 12660281
  misc_feature: MA Experiment ID: 20000234 Result: Down-regulated in Transcription
  misc_feature: MA Experiment 20000234 PARAMETER Experiment Name: At_Siliques_P Parameter: Age (day) Value: 21
  misc_feature: MA Experiment 20000234 PARAMETER Experiment Name: At_Siliques_P Parameter: Organism Value: A. thaliana
  misc_feature: MA Experiment 20000234 PARAMETER Experiment Name: At_Siliques_P Parameter: Plant Line Value: WS
  misc_feature: MA Experiment 20000234 PARAMETER Experiment Name: At_Siliques_P Parameter: Tissue Value: Less Than 5mm Siliques vs. Whole Plant
  misc_feature: MA Experiment ID: 20000437 Result: Up-regulated in Transcription
  misc_feature: MA Experiment 20000437 PARAMETER Experiment Name: At_Drought_P Parameter: Age (day) Value: 8
  misc_feature: MA Experiment 20000437 PARAMETER Experiment Name: At_Drought_P Parameter: Organism Value: A. thaliana
  misc_feature: MA Experiment 20000437 PARAMETER Experiment Name: At_Drought_P Parameter: Plant Line Value: WS
  misc_feature: MA Experiment 20000437 PARAMETER Experiment Name: At_Drought_P Parameter: Timepoint (hr) Value: 24
  misc_feature: MA Experiment 20000437 PARAMETER Experiment Name: At_Drought_P Parameter: Tissue Value: Whole Plant
  misc_feature: MA Experiment 20000437 PARAMETER Experiment Name: At_Drought_P Parameter: Treatment Value: Drought vs. No Drought
atggagatagcaaaggcgagttcgcagttgcgtgctacggagagcgtaacgcggatatttggagaaaacaacccgttcctccagagcaaggagattcataaatatgtccggaacttgacttcccgatttgttggtcccgagggtttaaaaacaagattaattcatgacattgacaatttgttacgaaatgatgttgagaacggagcacgaaacggttctttcgacgttagagaggcaacaatcaagatggtgggtgaacttattgcaaagaaaataatgggtgaaacggaatccgaggccgtaaaagaactcgggttatgctggagtgctttccgaaccagttggtttcagttttcttacaacattcctggaacaactgtttatcgactcgtgaaggctcggaggaaggctgcgaagctgctaaaggccttgattctgaagaagaaagcatcaaaagaaggacttggcgatttcttagatataatatttgatgaaatggaaaaggatgggaccgctttagatatagacaaagccgtaaacttaatattcgtcttcttcatactctcccaagagacaactcctggtgttcaaggagcggttgtgaagcttgtagcagaccaccccagcgttatggaagaattgcagagagagcacgaggcgattgttcaaaatcgagctgataaagacactggagtcacatgggaagaatacaaatctatgacatttactcacatggttatcaaagagtctcttcggtttactagtacacaacctacagtgcacagaatacctgatcaggacgttcagattggagctcaagctaggtctttccggaaaatgttggatattttggtaaatacagttgttgaacttgagcctcacgctttgaagatgttcaataatgatgtcgatcagaagatgttagatctacaatataatgtaatgcacaaaaattttcaaagagattgtagctaa

SEQ ID NO: 81552 - protein, 324 aa, Arabidopsis thaliana
  peptide (1)..(324): Ceres Seq. ID no. 12660282
  misc_feature (113)..(271): Pfam Name: Cytochrome P450 Pfam Description: Cytochrome P450
  misc_feature (1)..(324): Homolog of NCBI NO: 15233770 NR Description: cytochrome P450 like protein; protein id:
  misc_feature (1)..(271): Homolog of NCBI NO: 15233767 NR Description: steroid 22-alpha-hydroxylase(cytochrome p450), protein id: At4g15300.1 [Arabidopsis thaliana]
  misc_feature (1)..(272): Homolog of NCBI NO: 2190554 NR Description: Similar to Arabidopsis cytochrome P450 CYP90
  misc_feature (1)..(272): Homolog of NCBI NO: 6686409 NR Description: F1E22.5 [Arabidopsis thaliana]
  misc_feature (1)..(272): Homolog of NCBI NO: 15218776 NR Description: cytochrome P450, putative; protein id:
  misc_feature (1)..(271): Homolog of NCBI NO: 18700149 NR Description: At4g15396 [Arabidopsis thaliana]
  misc_feature (1)..(271): Homolog of NCBI NO: 30683237 NR Description: cytochrome P450 -related [Arabidopsis thaliana]
  misc_feature (1)..(271): Homolog of NCBI NO: 30683232 NR Description: cytochrome P450 -related [Arabidopsis thaliana] unknown protein [Arabidopsis thaliana]
  misc_feature (1)..(271): Homolog of NCBI NO: 9294334 NR Description: cytochrome P450-like protein [Arabidopsis
  misc_feature (1)..(271): Homolog of NCBI NO: 15230741 NR Description: cytochrome P450, putative; protein id:
MEIAKASSQLRATESVTRIFGENNPFLQSKEIHKYVRNLTSRFVGPEGLKTRLIHDIDNLLRNDVENGARNGSFDVREATIKMVGELIAKKIMGETESEAVKELGLCWSAFRTSWFQFSYNIPGTTVYRLVKARRKAAKLLKALILKKKASKEGLGDFLDIIFDEMEKDGTALDIDKAVNLIFVFFILSQETTPGVQGAVVKLVADHPSVMEELQREHEAIVQNRADKDTGVTWEEYKSMTFTHMVIKESLRFTSTQPTVHRIPDQDVQIGAQARSFRKMLDILVNTVVELEPHALKMFNNDVDQKMLDLQYNVMHKNFQRDCS

SEQ ID NO: 81553 - protein, 242 aa, Arabidopsis thaliana
  peptide (1)..(242): Ceres Seq. ID no. 12660283
  misc_feature (31)..(189): Pfam Name: Cytochrome P450 Pfam Description: Cytochrome P450
  misc_feature (1)..(242): Homolog of NCBI NO: 15233770 NR Description: cytochrome P450 like protein; protein id:
  misc_feature (1)..(189): Homolog of NCBI NO: 15233767 NR Description: steroid 22-alpha-hydroxylase(cytochrome p450), protein id: At4g15300.1 [Arabidopsis thaliana]
  misc_feature (1)..(190): Homolog of NCBI NO: 2190554 NR Description: Similar to Arabidopsis cytochrome P450 CYP90
  misc_feature (1)..(190): Homolog of NCBI NO: 6686409 NR Description: F1E22.5 [Arabidopsis thaliana]
  misc_feature (1)..(190): Homolog of NCBI NO: 15218776 NR Description: cytochrome P450, putative; protein id:
  misc_feature (1)..(189): Homolog of NCBI NO: 18700149 NR Description: At4g15396 [Arabidopsis thaliana]
  misc_feature (1)..(189): Homolog of NCBI NO: 30683237 NR Description: cytochrome P450 -related [Arabidopsis thaliana]
  misc_feature (1)..(189): Homolog of NCBI NO: 30683232 NR Description: cytochrome P450 -related [Arabidopsis thaliana] unknown protein [Arabidopsis thaliana]
  misc_feature (1)..(189): Homolog of NCBI NO: 9294334 NR Description: cytochrome P450-like protein [Arabidopsis
  misc_feature (1)..(189): Homolog of NCBI NO: 15230741 NR Description: cytochrome P450, putative; protein id:
MVGELIAKKIMGETESEAVKELGLCWSAFRTSWFQFSYNIPGTTVYRLVKARRKAAKLLKALILKKKASKEGLGDFLDIIFDEMEKDGTALDIDKAVNLIFVFFILSQETTPGVQGAVVKLVADHPSVMEELQREHEAIVQNRADKDTGVTWEEYKSMTFTHMVIKESLRFTSTQPTVHRIPDQDVQIGAQARSFRKMLDILVNTVVELEPHALKMFNNDVDQKMLDLQYNVMHKNFQRDCS

SEQ ID NO: 81554 - protein, 232 aa, Arabidopsis thaliana
  peptide (1)..(232): Ceres Seq. ID no. 12660284
  misc_feature (21)..(179): Pfam Name: Cytochrome P450 Pfam Description: Cytochrome P450
  misc_feature (1)..(232): Homolog of NCBI NO: 15233770 NR Description: cytochrome P450 like protein; protein id:
  misc_feature (1)..(179): Homolog of NCBI NO: 15233767 NR Description: steroid 22-alpha-hydroxylase(cytochrome p450), protein id: At4g15300.1 [Arabidopsis thaliana]
  misc_feature (1)..(180): Homolog of NCBI NO: 2190554 NR Description: Similar to Arabidopsis cytochrome P450 CYP90
  misc_feature (1)..(180): Homolog of NCBI NO: 6686409 NR Description: F1E22.5 [Arabidopsis thaliana]
  misc_feature (1)..(180): Homolog of NCBI NO: 15218776 NR Description: cytochrome P450, putative; protein id:
  misc_feature (1)..(179): Homolog of NCBI NO: 18700149 NR Description: At4g15396 [Arabidopsis thaliana]
  misc_feature (1)..(179): Homolog of NCBI NO: 30683237 NR Description: cytochrome P450 -related [Arabidopsis thaliana]
  misc_feature (1)..(179): Homolog of NCBI NO: 30683232 NR Description: cytochrome P450 -related [Arabidopsis thaliana] unknown protein [Arabidopsis thaliana]
  misc_feature (1)..(179): Homolog of NCBI NO: 9294334 NR Description: cytochrome P450-like protein [Arabidopsis
  misc_feature (1)..(179): Homolog of NCBI NO: 15230741 NR Description: cytochrome P450, putative; protein id:
MGETESEAVKELGLCWSAFRTSWFQFSYNIPGTTVYRLVKARRKAAKLLKALILKKKASKEGLGDFLDIIFDEMEKDGTALDIDKAVNLIFVFFILSQETTPGVQGAVVKLVADHPSVMEELQREHEAIVQNRADKDTGVTWEEYKSMTFTHMVIKESLRFTSTQPTVHRIPDQDVQIGAQARSFRKMLDILVNTVVELEPHALKMFNNDVDQKMLDLQYNVMHKNFQRDCS

SEQ ID NO: 81555 - DNA, 1584 bp, Arabidopsis thaliana
  misc_feature (1)..(1584): Ceres Seq. ID no. 12660297
  misc_feature: MA Experiment ID: 20000184 Result: Up-regulated in Transcription
  misc_feature: MA Experiment 20000184 PARAMETER Experiment Name: At_Shoots__P Parameter: Age (day) Value: 7
  misc_feature: MA Experiment 20000184 PARAMETER Experiment Name: At_Shoots__P Parameter: Tissue Value: Shoots vs. Whole Plant
  misc_feature: MA Experiment ID: 20000185 Result: Up-regulated in Transcription
  misc_feature: MA Experiment 20000185 PARAMETER Experiment Name: At_Roots__P Parameter: Age (day) Value: 7 vs. 21
  misc_feature: MA Experiment 20000185 PARAMETER Experiment Name: At_Roots__P Parameter: Organism Value: A. thaliana
  misc_feature: MA Experiment 20000185 PARAMETER Experiment Name: At_Roots__P Parameter: Tissue Value: Roots vs. Whole Plant
  misc_feature: MA Experiment ID: 20000439 Result: Up-regulated in Transcription
  misc_feature: MA Experiment 20000439 PARAMETER Experiment Name: At_Roots__P Parameter: Age (day) Value: 14 vs. 21
  misc_feature: MA Experiment 20000439 PARAMETER Experiment Name: At_Roots__P Parameter: Organism Value: A. thaliana
  misc_feature: MA Experiment 20000439 PARAMETER Experiment Name: At_Roots__P Parameter: Tissue Value: Roots vs. Whole Plant
  misc_feature: MA Experiment ID: 20000527 Result: Down-regulated in Transcription
  misc_feature: MA Experiment 20000527 PARAMETER Experiment Name: At_10percent_PEG_P Parameter: Age (day) Value: 20
  misc_feature: MA Experiment 20000527 PARAMETER Experiment Name: At_10percent_PEG_P Parameter: Organism Value: A. thaliana
  misc_feature: MA Experiment 20000527 PARAMETER Experiment Name: At_10percent_PEG_P Parameter: Plant Line Value: WS
  misc_feature: MA Experiment 20000527 PARAMETER Experiment Name: At_10percent_PEG_P Parameter: Timepoint (day) Value: 20
  misc_feature: MA Experiment 20000527 PARAMETER Experiment Name: At_10percent_PEG_P Parameter: Tissue Value: Whole Plant
  misc_feature: MA Experiment 20000527 PARAMETER Experiment Name: At_10percent_PEG_P Parameter: Treatment Value: 10percent PEG vs. No Treatment
  misc_feature: MA Experiment ID: 20001451 Result: Up-regulated in Transcription
  misc_feature: MA Experiment 20001451 PARAMETER Experiment Name: At_Far-red-induction_P Parameter: Age (day) Value: 7
  misc_feature: MA Experiment 20001451 PARAMETER Experiment Name: At_Far-red-induction_P Parameter: Light Value: Far-red vs. White
  misc_feature: MA Experiment 20001451 PARAMETER Experiment Name: At_Far-red-induction_P Parameter: Organism Value: A. thaliana
  misc_feature: MA Experiment 20001451 PARAMETER Experiment Name: At_Far-red-induction_P Parameter: Plant Line Value: Columbia
  misc_feature: MA Experiment 20001451 PARAMETER Experiment Name: At_Far-red-induction_P Parameter: Timepoint (hr) Value: 24
  misc_feature: MA Experiment 20001451 PARAMETER Experiment Name: At_Far-red-induction_P Parameter: Tissue Value: Whole Plant
atgatagcaatcatcgttgagttccaaaacttctttatcttcatccttctatgcctcttctcactcctctgtcactctctcttcttcaagaaaccaaaagactcacgaagctttgttctgccttcaagccctccttctcttccaatcatcggccatcttcaccttctcctctctgtcctaactcacaagtctcttcagaaactctcctccaagtacggacctcttctccttatccgcatcttctatgtacccatcattcttgtctcctcttcctctatggcctacgagatcttcaaggcccatgacgtgaacgtctcttctcgcggtattattgctcttgatgagtctctcatgtttggggcttctggcatcttgaacgctccctatggagattactggaagttcatgaagaagctcatggccactaagctactccgaccgcaagtgctggagcggtcacgaggtgttcgtgttgaagagctacatagattttacaggagcattcttgataaggcgacgaagaatgagagcgttgagatcggtaaggaagcgatgaagctcatgaacaacaccttgtgtaaactgatcatgggaaggagtttttcagaggacaacggtgaatcaaatagagtcaggggcttggttgatgaaacctatgccttgtccgagaagatattcttggcagctatattgcgcagacctcttgcaaaacttcggatctcactattcaagaaagagataatgggtgtctccaacaaattcgatgagctactagagaggatccttcaggaacgcaaagagaatttggaagagaagaataatgaaggtatggatatgatggacgtgttgttggaagcttatggagatgaaaacgctgagtataagatcacatggaagcatatcaaggcatttttcgtggagtttttcattggagggactgatacctcagtgcaaacaacacaatgggcaatggccgagatgatcaataacgctaacgttcttgagagactgagagaagaaatcgtctccgttgtaggggaaacaaggttgatccaagaaacagatttaccaaacctaccttatttgcaagcagtggttaaggaagttctaagattgcacccaccatcaccggtcttaatacggaagttccaagaaaaatgtgaggtcaaaggattttacataccggagaagacaacactcattgttaatgtttacgctataatgagagattctgattcttgggaagatcctgagaaatttaagccagagaggtttctaacttcttcaagatcaggggaagaggatgaaaaagagcttaagtttcttccttttggcagcggaaggagaggatgtcctggagcaaaccttggttctatatttgtaggaaccgcaataggagtgatggtgcagtgctttgactggaaaatcaaagaagataaggtcaacatggaagagacttttgaaggaatgaccctgaaaatggttcatccgcttacttgcactccgttcttcgaacccaacctttatcttttgcttttaatctctaaatttccgtgtctgatacttagctttggagcttgttaa

SEQ ID NO: 81556 - protein, 527 aa, Arabidopsis thaliana
  peptide (1)..(527): Ceres Seq. ID no. 12660298
  misc_feature (1)..(527): Homolog of NCBI NO: 15233794 NR Description: cytochrome p450 family; protein id: At4g15360.1
  misc_feature (1)..(502): Homolog of NCBI NO: 9294003 NR Description: cytochrome P450-like protein [Arabidopsis
  misc_feature (4)..(502): Homolog of NCBI NO: 15231047 NR Description: cytochrome P450, putative; protein id: At3g20090.1
  misc_feature (1)..(502): Homolog of NCBI NO: 15231052 NR Description: cytochrome p450 family; protein id: At3g20130.1
  misc_feature (1)..(502): Homolog of NCBI NO: 15232418 NR Description: cytochrome P450, putative; protein id: At3g20950.1
  misc_feature (13)..(502): Homolog of NCBI NO: 15233774 NR Description: cytochrome p450 family; protein id: At4g15350.1
  misc_feature (1)..(502): Homolog of NCBI NO: 30685997 NR Description: cytochrome P450 family [Arabidopsis thaliana]
  misc_feature (12)..(502): Homolog of NCBI NO: 9293969 NR Description: cytochrome P450-like protein [Arabidopsis
  misc_feature (13)..(502): Homolog of NCBI NO: 7430617 NR Description: cytochrome P450 - Arabidopsis thaliana
  misc_feature (103)..(502): Homolog of NCBI NO: 30686008 NR Description: cytochrome P450 family [Arabidopsis thaliana]
MIAIIVEFQNFFIFILLCLFSLLCHSLFFKKPKDSRSFVLPSSPPSLPIIGHLHLLLSVLTHKSLQKLSSKYGPLLLIRIFYVPIILVSSSSMAYEIFKAHDVNVSSRGIIALDESLMFGASGILNAPYGDYWKFMKKLMATKLLRPQVLERSRGVRVEELHRFYRSILDKATKNESVEIGKEAMKLMNNTLCKLIMGRSFSEDNGESNRVRGLVDETYALSEKIFLAAILRRPLAKLRISLFKKEIMGVSNKFDELLERILQERKENLEEKNNEGMDMMDVLLEAYGDENAEYKITWKHIKAFFVEFFIGGTDTSVQTTQWAMAEMINNANVLERLREEIVSVVGETRLIQETDLPNLPYLQAVVKEVLRLHPPSPVLIRKFQEKCEVKGFYIPEKTTLIVNVYAIMRDSDSWEDPEKFKPERFLTSSRSGEEDEKELKFLPFGSGRRGCPGANLGSIFVGTAIGVMVQCFDWKIKEDKVNMEETFEGMTLKMVHPLTCTPFFEPNLYLLLLISKFPCLILSFGAC

SEQ ID NO: 81557 - protein, 435 aa, Arabidopsis thaliana
  peptide (1)..(435): Ceres Seq. ID no. 12660299
  misc_feature (1)..(435): Homolog of NCBI NO: 15233794 NR Description: cytochrome p450 family; protein id: At4g15360.1
  misc_feature (1)..(410): Homolog of NCBI NO: 9294003 NR Description: cytochrome P450-like protein [Arabidopsis
  misc_feature (1)..(410): Homolog of NCBI NO: 15231047 NR Description: cytochrome P450, putative; protein id: At3g20090.1
  misc_feature (1)..(410): Homolog of NCBI NO: 15231052 NR Description: cytochrome p450 family; protein id: At3g20130.1
  misc_feature (1)..(410): Homolog of NCBI NO: 15232418 NR Description: cytochrome P450, putative; protein id: At3g20950.1
  misc_feature (1)..(410): Homolog of NCBI NO: 15233774 NR Description: cytochrome p450 family; protein id: At4g15350.1
  misc_feature (1)..(410): Homolog of NCBI NO: 30685997 NR Description: cytochrome P450 family [Arabidopsis thaliana]
  misc_feature (1)..(410): Homolog of NCBI NO: 9293969 NR Description: cytochrome P450-like protein [Arabidopsis
  misc_feature (1)..(410): Homolog of NCBI NO: 7430617 NR Description: cytochrome P450 - Arabidopsis thaliana
  misc_feature (11)..(410): Homolog of NCBI NO: 30686008 NR Description: cytochrome P450 family [Arabidopsis thaliana]
MAYEIFKAHDVNVSSRGIIALDESLMFGASGILNAPYGDYWKFMKKLMATKLLRPQVLERSRGVRVEELHRFYRSILDKATKNESVEIGKEAMKLMNNTLCKLIMGRSFSEDNGESNRVRGLVDETYALSEKIFLAAILRRPLAKLRISLFKKEIMGVSNKFDELLERILQERKENLEEKNNEGMDMMDVLLEAYGDENAEYKITWKHIKAFFVEFFIGGTDTSVQTTQWAMAEMINNANVLERLREEIVSVVGETRLIQETDLPNLPYLQAVVKEVLRLHPPSPVLIRKFQEKCEVKGFYIPEKTTLIVNVYAIMRDSDSWEDPEKFKPERFLTSSRSGEEDEKELKFLPFGSGRRGCPGANLGSIFVGTAIGVMVQCFDWKIKEDKVNMEETFEGMTLKMVHPLTCTPFFEPNLYLLLLISKFPCLILSFGAC

SEQ ID NO: 81558 - protein, 410 aa, Arabidopsis thaliana
  peptide (1)..(410): Ceres Seq. ID no. 12660300
  misc_feature (1)..(410): Homolog of NCBI NO: 15233794 NR Description: cytochrome p450 family; protein id: At4g15360.1
  misc_feature (1)..(385): Homolog of NCBI NO: 9294003 NR Description: cytochrome P450-like protein [Arabidopsis
  misc_feature (1)..(385): Homolog of NCBI NO: 15231047 NR Description: cytochrome P450, putative; protein id: At3g20090.1
  misc_feature (1)..(385): Homolog of NCBI NO: 15231052 NR Description: cytochrome p450 family; protein id: At3g20130.1
  misc_feature (1)..(385): Homolog of NCBI NO: 15232418 NR Description: cytochrome P450, putative; protein id: At3g20950.1
  misc_feature (1)..(385): Homolog of NCBI NO: 15233774 NR Description: cytochrome p450 family; protein id: At4g15350.1
  misc_feature (1)..(385): Homolog of NCBI NO: 30685997 NR Description: cytochrome P450 family [Arabidopsis thaliana]
  misc_feature (1)..(385): Homolog of NCBI NO: 9293969 NR Description: cytochrome P450-like protein [Arabidopsis
  misc_feature (1)..(385): Homolog of NCBI NO: 7430617 NR Description: cytochrome P450 - Arabidopsis thaliana
  misc_feature (1)..(385): Homolog of NCBI NO: 30686008 NR Description: cytochrome P450 family [Arabidopsis thaliana]
MFGASGILNAPYGDYWKFMKKLMATKLLRPQVLERSRGVRVEELHRFYRSILDKATKNESVEIGKEAMKLMNNTLCKLIMGRSFSEDNGESNRVRGLVDETYALSEKIFLAAILRRPLAKLRISLFKKEIMGVSNKFDELLERILQERKENLEEKNNEGMDMMDVLLEAYGDENAEYKITWKHIKAFFVEFFIGGTDTSVQTTQWAMAEMINNANVLERLREEIVSVVGETRLIQETDLPNLPYLQAVVKEVLRLHPPSPVLIRKFQEKCEVKGFYIPEKTTLIVNVYAIMRDSDSWEDPEKFKPERFLTSSRSGEEDEKELKFLPFGSGRRGCPGANLGSIFVGTAIGVMVQCFDWKIKEDKVNMEETFEGMTLKMVHPLTCTPFFEPNLYLLLLISKFPCLILSFGAC

SEQ ID NO: 81559 - DNA, 1584 bp, Arabidopsis thaliana
  misc_feature (1)..(1584): Ceres Seq. ID no. 12660301
  misc_feature: MA Experiment ID: 20000180 Result: Down-regulated in Transcription
  misc_feature: MA Experiment 20000180 PARAMETER Experiment Name: At_Germinating_Seeds_P Parameter: Age (hr) Value: 24 vs. 0
  misc_feature: MA Experiment 20000180 PARAMETER Experiment Name: At_Germinating_Seeds_P Parameter: Tissue Value: Germinating Seeds
  misc_feature: MA Experiment ID: 20000185 Result: Up-regulated in Transcription
  misc_feature: MA Experiment 20000185 PARAMETER Experiment Name: At_Roots__P Parameter: Age (day) Value: 7 vs. 21
  misc_feature: MA Experiment 20000185 PARAMETER Experiment Name: At_Roots__P Parameter: Organism Value: A. thaliana
  misc_feature: MA Experiment 20000185 PARAMETER Experiment Name: At_Roots__P Parameter: Tissue Value: Roots vs. Whole Plant
  misc_feature: MA Experiment ID: 20000437 Result: Down-regulated in Transcription
  misc_feature: MA Experiment 20000437 PARAMETER Experiment Name: At_Drought_P Parameter: Age (day) Value: 8
  misc_feature: MA Experiment 20000437 PARAMETER Experiment Name: At_Drought_P Parameter: Organism Value: A. thaliana
  misc_feature: MA Experiment 20000437 PARAMETER Experiment Name: At_Drought_P Parameter: Plant Line Value: WS
  misc_feature: MA Experiment 20000437 PARAMETER Experiment Name: At_Drought_P Parameter: Timepoint (hr) Value: 24
  misc_feature: MA Experiment 20000437 PARAMETER Experiment Name: At_Drought_P Parameter: Tissue Value: Whole Plant
  misc_feature: MA Experiment 20000437 PARAMETER Experiment Name: At_Drought_P Parameter: Treatment Value: Drought vs. No Drought
  misc_feature: MA Experiment ID: 20000439 Result: Up-regulated in Transcription
  misc_feature: MA Experiment 20000439 PARAMETER Experiment Name: At_Roots__P Parameter: Age (day) Value: 14 vs. 21
  misc_feature: MA Experiment 20000439 PARAMETER Experiment Name: At_Roots__P Parameter: Organism Value: A. thaliana
  misc_feature: MA Experiment 20000439 PARAMETER Experiment Name: At_Roots__P Parameter: Tissue Value: Roots vs. Whole Plant
atggcagcaatgaacatgattgactttcaaaactgcttcatctttatcctcctatgtctcttctcacgactctgttattctcacttcttcaagaaaccaaaggaccctcgccttcactttgatttacctccgagccctccgtctcttcccatcatcggtcatctgcaccttcttctctctgttctactccacagatctttacaaaaactctccaccaagtacggatctattctctatctccgagtctttaggttccctgtagtcctcatctcgtcagcctcaattgcatatgagatcttcagggcacacgacctgaacatctcgtaccgcggtttcactccgaccgatgattcactttttgccggatctttcagctttatctctgctccctatggagattattggaagttcatgaagaaggtcctagttacaaacgtttttgggccccaagcacacgagcagtcacgaggtgtccgtgcagatgtgctagagcggttttatgggaatctgttcgataaagcgataaagaagcagagcgtggagatatgtgctgaagcgttgaagttatctaactccagcatctgcaagatgatcatggggaggagttgttcagaggagagattcagggctttggctaccgagttagatgttttgacaaagaagctcttctttgcaaacatgttgcgagcatggtttaagaagcttgttgtctctctgtttaaaaaagaaactacagttatttcctacagattcgatgagctgctcgaaagcattcttgtggaacacgaaaagaaactggacgtgcatcatcaacgtacggacttgatggacgcattgttggcagcttatcgggatgaaaatgcagagtataagatcacaaggaaccatatcaagtcaattattgcggatcttttatttgcaggcactgaaaaccaagtgcagacaatacaatgggcaatggcagagatcattaacaaccctaacgttcttgagagactgagaggagaaatcgatagcgtggtaggaaagtcaaggttgattcaagaaacggatttaccaaagctcccttatttgcaagctgtggttaaggaaacgataagactgcacccgccggggcctttcttcttaaggttcacaaaagaagggtgtaggatcagagggttctatgtaccagagaacacgtcagtcgttgttaacgtttatgctgtgatgagggatcctgatgcttgggaggatcctcttgtgtttaagccagagaggttcttagcttcttcaagagcagaacaagaggaggagagaagagagaaagaaattaagtaccttccttttggaagcggaagaagaagttgtcccggagaaaatctagcttatgtcattatgggaactgcaattggagtgatggtgcagggttttgagtggagaaccacagaagagaaaattaacatggacgaggctgttgtaggactgagcttgaccatggctcatcctcttaagatcattcctgttgctcgaacctcaaactctttaacttcgagtttgcaaaaatgtttgtgagttttcacatattatgtatgatagttgaag

SEQ ID NO: 81560 - protein, 517 aa, Arabidopsis thaliana
  peptide (1)..(517): Ceres Seq. ID no. 12660302
  misc_feature (1)..(517): Homolog of NCBI NO: 15233799 NR Description: cytochrome p450 family; protein id: At4g15380.1 thaliana] >gi|22136622|gb|AAM91630.1| putative cytochrome P450
  misc_feature (41)..(517): Homolog of NCBI NO: 25282582 NR Description: cytochrome P450 like protein [imported] - thaliana >gi|5280994|emb|CAB45999.1| cytochrome P450 like protein thaliana] >gi|7268285|emb|CAB78580.1| cytochrome P450 like
  misc_feature (41)..(474): Homolog of NCBI NO: 7430615 NR Description: cytochrome P450 - Arabidopsis thaliana
  misc_feature (1)..(512): Homolog of NCBI NO: 18402480 NR Description: cytochrome P450, putative; protein id: supported by cDNA: 147792. [Arabidopsis thaliana]
  misc_feature (1)..(512): Homolog of NCBI NO: 19699361 NR Description: AT3g20080/MAL21_9 [Arabidopsis thaliana]
  misc_feature (4)..(512): Homolog of NCBI NO: 21553493 NR Description: cytochrome P450, putative [Arabidopsis thaliana]
  misc_feature (14)..(509): Homolog of NCBI NO: 15233774 NR Description: cytochrome p450 family; protein id: At4g15350.1
  misc_feature (1)..(504): Homolog of NCBI NO: 15231052 NR Description: cytochrome p450 family; protein id: At3g20130.1
  misc_feature (4)..(504): Homolog of NCBI NO: 15231049 NR Description: cytochrome p450 family; protein id: At3g20100.1, by cDNA: 149380., supported by cDNA: gi_15215771 [Arabidopsis
  misc_feature (11)..(504): Homolog of NCBI NO: 9293969 NR Description: cytochrome P450-like protein [Arabidopsis
MAAMNMIDFQNCFIFILLCLFSRLCYSHFFKKPKDPRLHFDLPPSPPSLPIIGHLHLLLSVLLHRSLQKLSTKYGSILYLRVFRFPVVLISSASIAYEIFRAHDLNISYRGFTPTDDSLFAGSFSFISAPYGDYWKFMKKVLVTNVFGPQAHEQSRGVRADVLERFYGNLFDKAIKKQSVEICAEALKLSNSSICKMIMGRSCSEERFRALATELDVLTKKLFFANMLRAWFKKLVVSLFKKETTVISYRFDELLESILVEHEKKLDVHHQRTDLMDALLAAYRDENAEYKITRNHIKSIIADLLFAGTENQVQTIQWAMAEIINNPNVLERLRGEIDSVVGKSRLIQETDLPKLPYLQAVVKETIRLHPPGPFFLRFTKEGCRIRGFYVPENTSVVVNVYAVMRDPDAWEDPLVFKPERFLASSRAEQEEERREKEIKYLPFGSGRRSCPGENLAYVIMGTAIGVMVQGFEWRTTEEKINMDEAVVGLSLTMAHPLKIIPVARTSNSLTSSLQKCL

SEQ ID NO: 81561 - protein, 514 aa, Arabidopsis thaliana
  peptide (1)..(514): Ceres Seq. ID no. 12660303
  misc_feature (1)..(514): Homolog of NCBI NO: 15233799 NR Description: cytochrome p450 family; protein id: At4g15380.1 thaliana] >gi|22136622|gb|AAM91630.1| putative cytochrome P450
  misc_feature (38)..(514): Homolog of NCBI NO: 25282582 NR Description: cytochrome P450 like protein [imported] - thaliana >gi|5280994|emb|CAB45999.1| cytochrome P450 like protein thaliana] >gi|7268285|emb|CAB78580.1| cytochrome P450 like
  misc_feature (38)..(471): Homolog of NCBI NO: 7430615 NR Description: cytochrome P450 - Arabidopsis thaliana
  misc_feature (1)..(509): Homolog of NCBI NO: 18402480 NR Description: cytochrome P450, putative; protein id: supported by cDNA: 147792. [Arabidopsis thaliana]
  misc_feature (1)..(509): Homolog of NCBI NO: 19699361 NR Description: AT3g20080/MAL21_9 [Arabidopsis thaliana]
  misc_feature (1)..(509): Homolog of NCBI NO: 21553493 NR Description: cytochrome P450, putative [Arabidopsis thaliana]
  misc_feature (11)..(506): Homolog of NCBI NO: 15233774 NR Description: cytochrome p450 family; protein id: At4g15350.1
  misc_feature (1)..(501): Homolog of NCBI NO: 15231052 NR Description: cytochrome p450 family; protein id: At3g20130.1
  misc_feature (1)..(501): Homolog of NCBI NO: 15231049 NR Description: cytochrome p450 family; protein id: At3g20100.1, by cDNA: 149380., supported by cDNA: gi_15215771 [Arabidopsis
  misc_feature (8)..(501): Homolog of NCBI NO: 9293969 NR Description: cytochrome P450-like protein [Arabidopsis
MNMIDFQNCFIFILLCLFSRLCYSHFFKKPKDPRLHFDLPPSPPSLPIIGHLHLLLSVLLHRSLQKLSTKYGSILYLRVFRFPVVLISSASIAYEIFRAHDLNISYRGFTPTDDSLFAGSFSFISAPYGDYWKFMKKVLVTNVFGPQAHEQSRGVRADVLERFYGNLFDKAIKKQSVEICAEALKLSNSSICKMIMGRSCSEERFRALATELDVLTKKLFFANMLRAWFKKLVVSLFKKETTVISYRFDELLESILVEHEKKLDVHHQRTDLMDALLAAYRDENAEYKITRNHIKSIIADLLFAGTENQVQTIQWAMAEIINNPNVLERLRGEIDSVVGKSRLIQETDLPKLPYLQAVVKETIRLHPPGPFFLRFTKEGCRIRGFYVPENTSVVVNVYAVMRDPDAWEDPLVFKPERFLASSRAEQEEERREKEIKYLPFGSGRRSCPGENLAYVIMGTAIGVMVQGFEWRTTEEKINMDEAVVGLSLTMAHPLKIIPVARTSNSLTSSLQKCL

SEQ ID NO: 81562 - protein, 512 aa, Arabidopsis thaliana
  peptide (1)..(512): Ceres Seq. ID no. 12660304
  misc_feature (1)..(512): Homolog of NCBI NO: 15233799 NR Description: cytochrome p450 family; protein id: At4g15380.1 thaliana] >gi|22136622|gb|AAM91630.1| putative cytochrome P450
  misc_feature (36)..(512): Homolog of NCBI NO: 25282582 NR Description: cytochrome P450 like protein [imported] - thaliana >gi|5280994|emb|CAB45999.1| cytochrome P450 like protein thaliana] >gi|7268285|emb|CAB78580.1| cytochrome P450 like
  misc_feature (36)..(469): Homolog of NCBI NO: 7430615 NR Description: cytochrome P450 - Arabidopsis thaliana
  misc_feature (1)..(507): Homolog of NCBI NO: 18402480 NR Description: cytochrome P450, putative; protein id: supported by cDNA: 147792. [Arabidopsis thaliana]
  misc_feature (1)..(507): Homolog of NCBI NO: 19699361 NR Description: AT3g20080/MAL21_9 [Arabidopsis thaliana]
  misc_feature (1)..(507): Homolog of NCBI NO: 21553493 NR Description: cytochrome P450, putative [Arabidopsis thaliana]
  misc_feature (9)..(504): Homolog of NCBI NO: 15233774 NR Description: cytochrome p450 family; protein id: At4g15350.1
  misc_feature (1)..(499): Homolog of NCBI NO: 15231052 NR Description: cytochrome p450 family; protein id: At3g20130.1
  misc_feature (1)..(499): Homolog of NCBI NO: 15231049 NR Description: cytochrome p450 family; protein id: At3g20100.1, by cDNA: 149380., supported by cDNA: gi_15215771 [Arabidopsis
  misc_feature (6)..(499): Homolog of NCBI NO: 9293969 NR Description: cytochrome P450-like protein [Arabidopsis
MIDFQNCFIFILLCLFSRLCYSHFFKKPKDPRLHFDLPPSPPSLPIIGHLHLLLSVLLHRSLQKLSTKYGSILYLRVFRFPVVLISSASIAYEIFRAHDLNISYRGFTPTDDSLFAGSFSFISAPYGDYWKFMKKVLVTNVFGPQAHEQSRGVRADVLERFYGNLFDKAIKKQSVEICAEALKLSNSSICKMIMGRSCSEERFRALATELDVLTKKLFFANMLRAWFKKLVVSLFKKETTVISYRFDELLESILVEHEKKLDVHHQRTDLMDALLAAYRDENAEYKITRNHIKSIIADLLFAGTENQVQTIQWAMAEIINNPNVLERLRGEIDSVVGKSRLIQETDLPKLPYLQAVVKETIRLHPPGPFFLRFTKEGCRIRGFYVPENTSVVVNVYAVMRDPDAWEDPLVFKPERFLASSRAEQEEERREKEIKYLPFGSGRRSCPGENLAYVIMGTAIGVMVQGFEWRTTEEKINMDEAVVGLSLTMAHPLKIIPVARTSNSLTSSLQKCL

SEQ ID NO: 81563 - DNA, 1362 bp, Arabidopsis thaliana
  misc_feature (1)..(1362): Ceres Seq. ID no. 12660305
  misc_feature: MA Experiment ID: 20000227 Result: Down-regulated in Transcription
  misc_feature: MA Experiment 20000227 PARAMETER Experiment Name: At_Root-Tips-vs-Tops_P Parameter: Tissue Value: Root Tips vs. Root Tops
  misc_feature: MA Experiment ID: 20000439 Result: Up-regulated in Transcription
  misc_feature: MA Experiment 20000439 PARAMETER Experiment Name: At_Roots__P Parameter: Age (day) Value: 14 vs. 21
  misc_feature: MA Experiment 20000439 PARAMETER Experiment Name: At_Roots__P Parameter: Organism Value: A. thaliana
  misc_feature: MA Experiment 20000439 PARAMETER Experiment Name: At_Roots__P Parameter: Tissue Value: Roots vs. Whole Plant
  misc_feature: MA Experiment ID: 20000451 Result: Up-regulated in Transcription
  misc_feature: MA Experiment 20000451 PARAMETER Experiment Name: At_CS6879_Shoots-Roots_P Parameter: Age (day) Value: 14
  misc_feature: MA Experiment 20000451 PARAMETER Experiment Name: At_CS6879_Shoots-Roots_P Parameter: Organism Value: A. thaliana
  misc_feature: MA Experiment 20000451 PARAMETER Experiment Name: At_CS6879_Shoots-Roots_P Parameter: Plant Line Value: CS6879 vs. WS
  misc_feature: MA Experiment 20000451 PARAMETER Experiment Name: At_CS6879_Shoots-Roots_P Parameter: Tissue Value: Roots
atggtagaggtttatgagttctgggccgtgatagtttcactcatagtggtaaagctgtgtcactggatctaccagtggaaaaatccaaaaggaaatggaaaacttcctccaggatctatgggttatccaatcatcggagagactttcgagttcatgaagcttcatgatgctattcagttaccaacattcgttaaggagaaattactcaggacaagcttatttggaggcaaagttatcatttcgactgatattggattgaacatggagatcgcaaagacaaatcatattcccggtatgccgaagagcttagagcggttatttggggcaaccaacttgtttgtgaataaggatactcataaacatgcccgcagcttgacaaaccagtttttaggttcgcaagctttaaaattaaggatgattcaagacatcgatttcttggctcgcacacacatgaaggaaggagctaggaaaggctgccttgacgtcaaggaaactgcaagcaagaaagtaatgggagagatggaaccagaggcagcaaaggaactcacactctgttggacatttttcccaagggattggtttcgattcgcttggaatttcccggggactggtgtctatcgcatagtgaaggcaagaaatcgtatgatgaaggttataaaggagacagtagttaaaaaaagagcatcaggaaagaaattgggggagtttttcgagaccatctttggagatacggaaagtgtaactatgagcatagagattgcgactgagtacatatttactctgtttgtgcttgctaacgaaacaacaccaggggtccttgcggcaacaataaagctcataagtgataaccctaaagtcatgcaggagttacggagagaacatgaaggaatcgtccaagataagattaagaaggatgagacagctgacctaacttgggaagactacaaatcaatgacttttacccagatggtgataaatgagtcgcttaggatcacaagcacggtaccaacggtgcttagaataattgatcatgagatccaatttggtgattatacaattccggctggttggatctttatgggttatccttatgtgcatttcaatccagagaagtatgatgaccctttagcttttaatccatggcgctggaagggaaaagacttgagcacgatcgtctccaagacttaccttccctttggctctggtactagactatgtgtgggagctgaattcgttaagttgcaaatggccatttttatccatcatttgtttagatacaggtggtcaatgaaggcagagactactttacttcgaagatttatacttgtgcttccacgtggatctgatgttcaaatctcataa

SEQ ID NO: 81564 - protein, 453 aa, Arabidopsis thaliana
  peptide (1)..(453): Ceres Seq. ID no. 12660306
  misc_feature (1)..(452): Homolog of NCBI NO: 30683237 NR Description: cytochrome P450 -related [Arabidopsis thaliana]
  misc_feature (1)..(384): Homolog of NCBI NO: 30683232 NR Description: cytochrome P450 -related [Arabidopsis thaliana] unknown protein [Arabidopsis thaliana]
  misc_feature (38)..(452): Homolog of NCBI NO: 18700149 NR Description: At4g15396 [Arabidopsis thaliana]
  misc_feature (1)..(451): Homolog of NCBI NO: 15218776 NR Description: cytochrome P450, putative; protein id:
  misc_feature (1)..(425): Homolog of NCBI NO: 6686409 NR Description: F1E22.5 [Arabidopsis thaliana]
  misc_feature (151)..(453): Homolog of NCBI NO: 15233767 NR Description: steroid 22-alpha-hydroxylase(cytochrome p450), protein id: At4g15300.1 [Arabidopsis thaliana]
  misc_feature (11)..(182): Homolog of NCBI NO: 15233767 NR Description: steroid 22-alpha-hydroxylase(cytochrome p450), protein id: At4g15300.1 [Arabidopsis thaliana]
  misc_feature (11)..(425): Homolog of NCBI NO: 2190554 NR Description: Similar to Arabidopsis cytochrome P450 CYP90
  misc_feature (64)..(453): Homolog of NCBI NO: 9294334 NR Description: cytochrome P450-like protein [Arabidopsis
  misc_feature (66)..(453): Homolog of NCBI NO: 15230741 NR Description: cytochrome P450, putative; protein id:
MVEVYEFWAVIVSLIVVKLCHWIYQWKNPKGNGKLPPGSMGYPIIGETFEFMKLHDAIQLPTFVKEKLLRTSLFGGKVIISTDIGLNMEIAKTNHIPGMPKSLERLFGATNLFVNKDTHKHARSLTNQFLGSQALKLRMIQDIDFLARTHMKEGARKGCLDVKETASKKVMGEMEPEAAKELTLCWTFFPRDWFRFAWNFPGTGVYRIVKARNRMMKVIKETVVKKRASGKKLGEFFETIFGDTESVTMSIEIATEYIFTLFVLANETTPGVLAATIKLISDNPKVMQELRREHEGIVQDKIKKDETADLTWEDYKSMTFTQMVINESLRITSTVPTVLRIIDHEIQFGDYTIPAGWIFMGYPYVHFNPEKYDDPLAFNPWRWKGKDLSTIVSKTYLPFGSGTRLCVGAEFVKLQMAIFIHHLFRYRWSMKAETTLLRRFILVLPRGSDVQIS

SEQ ID NO: 81565 - protein, 414 aa, Arabidopsis thaliana
  peptide (1)..(414): Ceres Seq. ID no. 12660307
  misc_feature (1)..(413): Homolog of NCBI NO: 30683237 NR Description: cytochrome P450 -related [Arabidopsis thaliana]
  misc_feature (1)..(345): Homolog of NCBI NO: 30683232 NR Description: cytochrome P450 -related [Arabidopsis thaliana] unknown protein [Arabidopsis thaliana]
  misc_feature (1)..(413): Homolog of NCBI NO: 18700149 NR Description: At4g15396 [Arabidopsis thaliana]
  misc_feature (1)..(412): Homolog of NCBI NO: 15218776 NR Description: cytochrome P450, putative; protein id:
  misc_feature (1)..(386): Homolog of NCBI NO: 6686409 NR Description: F1E22.5 [Arabidopsis thaliana]
  misc_feature (112)..(414): Homolog of NCBI NO: 15233767 NR Description: steroid 22-alpha-hydroxylase(cytochrome p450), protein id: At4g15300.1 [Arabidopsis thaliana]
  misc_feature (1)..(143): Homolog of NCBI NO: 15233767 NR Description: steroid 22-alpha-hydroxylase(cytochrome p450), protein id: At4g15300.1 [Arabidopsis thaliana]
  misc_feature (1)..(386): Homolog of NCBI NO: 2190554 NR Description: Similar to Arabidopsis cytochrome P450 CYP90
  misc_feature (25)..(414): Homolog of NCBI NO: 9294334 NR Description: cytochrome P450-like protein [Arabidopsis
  misc_feature (27)..(414): Homolog of NCBI NO: 15230741 NR Description: cytochrome P450, putative; protein id:
MGYPIIGETFEFMKLHDAIQLPTFVKEKLLRTSLFGGKVIISTDIGLNMEIAKTNHIPGMPKSLERLFGATNLFVNKDTHKHARSLTNQFLGSQALKLRMIQDIDFLARTHMKEGARKGCLDVKETASKKVMGEMEPEAAKELTLCWTFFPRDWFRFAWNFPGTGVYRIVKARNRMMKVIKETVVKKRASGKKLGEFFETIFGDTESVTMSIEIATEYIFTLFVLANETTPGVLAATIKLISDNPKVMQELRREHEGIVQDKIKKDETADLTWEDYKSMTFTQMVINESLRITSTVPTVLRIIDHEIQFGDYTIPAGWIFMGYPYVHFNPEKYDDPLAFNPWRWKGKDLSTIVSKTYLPFGSGTRLCVGAEFVKLQMAIFIHHLFRYRWSMKAETTLLRRFILVLPRGSDVQIS

SEQ ID NO: 81566 - protein, 402 aa, Arabidopsis thaliana
  peptide (1)..(402): Ceres Seq. ID no. 12660308
  misc_feature (1)..(401): Homolog of NCBI NO: 30683237 NR Description: cytochrome P450 -related [Arabidopsis thaliana]
  misc_feature (1)..(333): Homolog of NCBI NO: 30683232 NR Description: cytochrome P450 -related [Arabidopsis thaliana] unknown protein [Arabidopsis thaliana]
  misc_feature (1)..(401): Homolog of NCBI NO: 18700149 NR Description: At4g15396 [Arabidopsis thaliana]
  misc_feature (1)..(400): Homolog of NCBI NO: 15218776 NR Description: cytochrome P450, putative; protein id:
  misc_feature (1)..(374): Homolog of NCBI NO: 6686409 NR Description: F1E22.5 [Arabidopsis thaliana]
  misc_feature (100)..(402): Homolog of NCBI NO: 15233767 NR Description: steroid 22-alpha-hydroxylase(cytochrome p450), protein id: At4g15300.1 [Arabidopsis thaliana]
  misc_feature (1)..(131): Homolog of NCBI NO: 15233767 NR Description: steroid 22-alpha-hydroxylase(cytochrome p450), protein id: At4g15300.1 [Arabidopsis thaliana]
  misc_feature (1)..(374): Homolog of NCBI NO: 2190554 NR Description: Similar to Arabidopsis cytochrome P450 CYP90
  misc_feature (13)..(402): Homolog of NCBI NO: 9294334 NR Description: cytochrome P450-like protein [Arabidopsis
  misc_feature (15)..(402): Homolog of NCBI NO: 15230741 NR Description: cytochrome P450, putative; protein id:
MKLHDAIQLPTFVKEKLLRTSLFGGKVIISTDIGLNMEIAKTNHIPGMPKSLERLFGATNLFVNKDTHKHARSLTNQFLGSQALKLRMIQDIDFLARTHMKEGARKGCLDVKETASKKVMGEMEPEAAKELTLCWTFFPRDWFRFAWNFPGTGVYRIVKARNRMMKVIKETVVKKRASGKKLGEFFETIFGDTESVTMSIEIATEYIFTLFVLANETTPGVLAATIKLISDNPKVMQELRREHEGIVQDKIKKDETADLTWEDYKSMTFTQMVINESLRITSTVPTVLRIIDHEIQFGDYTIPAGWIFMGYPYVHFNPEKYDDPLAFNPWRWKGKDLSTIVSKTYLPFGSGTRLCVGAEFVKLQMAIFIHHLFRYRWSMKAETTLLRRFILVLPRGSDVQIS

SEQ ID NO: 81567 - DNA, 1410 bp, Arabidopsis thaliana
  misc_feature (1)..(1410): Ceres Seq. ID no. 12660309
  misc_feature: MA Experiment ID: 20000451 Result: Up-regulated in Transcription
  misc_feature: MA Experiment 20000451 PARAMETER Experiment Name: At_CS6879_Shoots-Roots_P Parameter: Age (day) Value: 14
  misc_feature: MA Experiment 20000451 PARAMETER Experiment Name: At_CS6879_Shoots-Roots_P Parameter: Organism Value: A. thaliana
  misc_feature: MA Experiment 20000451 PARAMETER Experiment Name: At_CS6879_Shoots-Roots_P Parameter: Plant Line Value: CS6879 vs. WS
  misc_feature: MA Experiment 20000451 PARAMETER Experiment Name: At_CS6879_Shoots-Roots_P Parameter: Tissue Value: Roots
atggtagatctttatgagttctgggctgtgatagtttcactcatagtggtgaagctgtgtcactcgatctatcagtggaggaatccaaaaagtaatggagaacttcctccaggatctatgggttatccaatcattggagagactttcgagttcatgaagcctcatgacgctattcagttaccaacattcgtgaaggagaaagtactcaggacaagcttatttggaggaaaagttataatttcgactgatattgggttgaacatggagatagcaaagacaaatcatattcctggtatgccgaagagcttagcgcggctatttggggcaaacaacttgttcgtgaataaggatactcataaacatgcccgcagcttgacaaaccagtttttaggttcgcaagctttgaaattaagaatgcttcaagacatcgatttcttggttcgcacacacctgaaggaaggagctaggaaaggcagccttgacatcaaggaaacgacaagcaagatcattattgaatgtcttgcgaagaaagtaatgggggagatggaaccagatgcagcaaaagaactcacactctgttggacatttttcccaagggaatggtttggattcgcttggaatatcccggggactggtgtctatcgaatggtgaaggcaagaaatcggatgatgaaggtactaaaggagacggtacttaagaaaagagcatcaggagaggaattgggggactttttcaagactatctttggagatactgaaagaggcgtgaaaactataagtttagagagtgccaccgagtacatatttactctgtttttgcttgctaacgaaacaacaccagcggtccttgcggctacaataaagctcataagtgaccatcctaaagtgatgcaagagttacagagagagcatgaaggaattgtccgagataagattgagaaaaatgagaaagctgacctaacatgggaagactacaaatcaatgacttttacccagatggtgataaatgagtcgcttaggatcacaagcacggtaccgacggtgcttagaataattgatcatgagtttcaatttggtgagtatacaattccagcaggttggatctttatgggttatccttatgtgcatttcaatgcagaaaagtatgatgaccctttagcatttaatccatggcgctggaagggaaaagacttgagcgcgattgtctccaggacttacattccctttggctcgggttctagactatgtgtaggagctgaatttgttaagttgaagatggccatttttatccatcatttgtctagatacaggtggtcaatgaagacagagactactttacttcgaagatttgtacttatacttccacgtggatcagatgttcaaatcttagaagacaccaaagctaaataa

SEQ ID NO: 81568 - protein, 469 aa, Arabidopsis thaliana
  peptide (1)..(469): Ceres Seq. ID no. 12660310
  misc_feature (1)..(469): Homolog of NCBI NO: 30683237 NR Description: cytochrome P450 -related [Arabidopsis thaliana]
  misc_feature (38)..(469): Homolog of NCBI NO: 18700149 NR Description: At4g15396 [Arabidopsis thaliana]
  misc_feature (1)..(394): Homolog of NCBI NO: 30683232 NR Description: cytochrome P450 -related [Arabidopsis thaliana] unknown protein [Arabidopsis thaliana]
  misc_feature (1)..(467): Homolog of NCBI NO: 15218776 NR Description: cytochrome P450, putative; protein id:
  misc_feature (1)..(435): Homolog of NCBI NO: 6686409 NR Description: F1E22.5 [Arabidopsis thaliana]
  misc_feature (11)..(435): Homolog of NCBI NO: 2190554 NR Description: Similar to Arabidopsis cytochrome P450 CYP90
  misc_feature (1)..(467): Homolog of NCBI NO: 9294334 NR Description: cytochrome P450-like protein [Arabidopsis
  misc_feature (70)..(467): Homolog of NCBI NO: 15233767 NR Description: steroid 22-alpha-hydroxylase(cytochrome p450), protein id: At4g15300.1 [Arabidopsis thaliana]
  misc_feature (66)..(467): Homolog of NCBI NO: 15230741 NR Description: cytochrome P450, putative; protein id:
  misc_feature (8)..(462): Homolog of NCBI NO: 30695347 NR Description: cytochrome p450 family [Arabidopsis thaliana]
MVDLYEFWAVIVSLIVVKLCHSIYQWRNPKSNGELPPGSMGYPIIGETFEFMKPHDAIQLPTFVKEKVLRTSLFGGKVIISTDIGLNMEIAKTNHIPGMPKSLARLFGANNLFVNKDTHKHARSLTNQFLGSQALKLRMLQDIDFLVRTHLKEGARKGSLDIKETTSKIIIECLAKKVMGEMEPDAAKELTLCWTFFPREWFGFAWNIPGTGVYRMVKARNRMMKVLKETVLKKRASGEELGDFFKTIFGDTERGVKTISLESATEYIFTLFLLANETTPAVLAATIKLISDHPKVMQELQREHEGIVRDKIEKNEKADLTWEDYKSMTFTQMVINESLRITSTVPTVLRIIDHEFQFGEYTIPAGWIFMGYPYVHFNAEKYDDPLAFNPWRWKGKDLSAIVSRTYIPFGSGSRLCVGAEFVKLKMAIFIHHLSRYRWSMKTETTLLRRFVLILPRGSDVQILEDTKAK

SEQ ID NO: 81569 - protein, 430 aa, Arabidopsis thaliana
  peptide (1)..(430): Ceres Seq. ID no. 12660311
  misc_feature (1)..(430): Homolog of NCBI NO: 30683237 NR Description: cytochrome P450 -related [Arabidopsis thaliana]
  misc_feature (1)..(430): Homolog of NCBI NO: 18700149 NR Description: At4g15396 [Arabidopsis thaliana]
  misc_feature (1)..(355): Homolog of NCBI NO: 30683232 NR Description: cytochrome P450 -related [Arabidopsis thaliana] unknown protein [Arabidopsis thaliana]
  misc_feature (1)..(428): Homolog of NCBI NO: 15218776 NR Description: cytochrome P450, putative; protein id:
  misc_feature (1)..(396): Homolog of NCBI NO: 6686409 NR Description: F1E22.5 [Arabidopsis thaliana]
  misc_feature (1)..(396): Homolog of NCBI NO: 2190554 NR Description: Similar to Arabidopsis cytochrome P450 CYP90
  misc_feature (1)..(428): Homolog of NCBI NO: 9294334 NR Description: cytochrome P450-like protein [Arabidopsis
  misc_feature (31)..(428): Homolog of NCBI NO: 15233767 NR Description: steroid 22-alpha-hydroxylase(cytochrome p450), protein id: At4g15300.1 [Arabidopsis thaliana]
  misc_feature (27)..(428): Homolog of NCBI NO: 15230741 NR Description: cytochrome P450, putative; protein id:
  misc_feature (1)..(423): Homolog of NCBI NO: 30695347 NR Description: cytochrome p450 family [Arabidopsis thaliana]
MGYPIIGETFEFMKPHDAIQLPTFVKEKVLRTSLFGGKVIISTDIGLNMEIAKTNHIPGMPKSLARLFGANNLFVNKDTHKHARSLTNQFLGSQALKLRMLQDIDFLVRTHLKEGARKGSLDIKETTSKIIIECLAKKVMGEMEPDAAKELTLCWTFFPREWFGFAWNIPGTGVYRMVKARNRMMKVLKETVLKKRASGEELGDFFKTIFGDTERGVKTISLESATEYIFTLFLLANETTPAVLAATIKLISDHPKVMQELQREHEGIVRDKIEKNEKADLTWEDYKSMTFTQMVINESLRITSTVPTVLRIIDHEFQFGEYTIPAGWIFMGYPYVHFNAEKYDDPLAFNPWRWKGKDLSAIVSRTYIPFGSGSRLCVGAEFVKLKMAIFIHHLSRYRWSMKTETTLLRRFVLILPRGSDVQILEDTKAK

SEQ ID NO: 81570 - protein, 418 aa, Arabidopsis thaliana
  peptide (1)..(418): Ceres Seq. ID no. 12660312
  misc_feature (1)..(418): Homolog of NCBI NO: 30683237 NR Description: cytochrome P450 -related [Arabidopsis thaliana]
  misc_feature (1)..(418): Homolog of NCBI NO: 18700149 NR Description: At4g15396 [Arabidopsis thaliana]
  misc_feature (1)..(343): Homolog of NCBI NO: 30683232 NR Description: cytochrome P450 -related [Arabidopsis thaliana] unknown protein [Arabidopsis thaliana]
  misc_feature (1)..(416): Homolog of NCBI NO: 15218776 NR Description: cytochrome P450, putative; protein id:
  misc_feature (1)..(384): Homolog of NCBI NO: 6686409 NR Description: F1E22.5 [Arabidopsis thaliana]
  misc_feature (1)..(384): Homolog of NCBI NO: 2190554 NR Description: Similar to Arabidopsis cytochrome P450 CYP90
  misc_feature (1)..(416): Homolog of NCBI NO: 9294334 NR Description: cytochrome P450-like protein [Arabidopsis
  misc_feature (19)..(416): Homolog of NCBI NO: 15233767 NR Description: steroid 22-alpha-hydroxylase(cytochrome p450), protein id: At4g15300.1 [Arabidopsis thaliana]
  misc_feature (15)..(416): Homolog of NCBI NO: 15230741 NR Description: cytochrome P450, putative; protein id:
  misc_feature (1)..(411): Homolog of NCBI NO: 30695347 NR Description: cytochrome p450 family [Arabidopsis thaliana]
MKPHDAIQLPTFVKEKVLRTSLFGGKVIISTDIGLNMEIAKTNHIPGMPKSLARLFGANNLFVNKDTHKHARSLTNQFLGSQALKLRMLQDIDFLVRTHLKEGARKGSLDIKETTSKIIIECLAKKVMGEMEPDAAKELTLCWTFFPREWFGFAWNIPGTGVYRMVKARNRMMKVLKETVLKKRASGEELGDFFKTIFGDTERGVKTISLESATEYIFTLFLLANETTPAVLAATIKLISDHPKVMQELQREHEGIVRDKIEKNEKADLTWEDYKSMTFTQMVINESLRITSTVPTVLRIIDHEFQFGEYTIPAGWIFMGYPYVHFNAEKYDDPLAFNPWRWKGKDLSAIVSRTYIPFGSGSRLCVGAEFVKLKMAIFIHHLSRYRWSMKTETTLLRRFVLILPRGSDVQILEDTKAK

SEQ ID NO: 81571 - DNA, 1455 bp, Arabidopsis thaliana
  misc_feature (1)..(1455): Ceres Seq. ID no. 12660334
  misc_feature: MA Experiment ID: 20000307 Result: Up-regulated in Transcription
  misc_feature: MA Experiment 20000307 PARAMETER Experiment Name: At_Germinating_Seeds_Sub_P Parameter: Age (hr) Value: 24 vs. 0
  misc_feature: MA Experiment 20000307 PARAMETER Experiment Name: At_Germinating_Seeds_Sub_P Parameter: Organism Value: A. thaliana
  misc_feature: MA Experiment 20000307 PARAMETER Experiment Name: At_Germinating_Seeds_Sub_P Parameter: Plant Line Value: WS
  misc_feature: MA Experiment 20000307 PARAMETER Experiment Name: At_Germinating_Seeds_Sub_P Parameter: Tissue Value: Germinating Seeds
  misc_feature: MA Experiment ID: 20000328 Result: Up-regulated in Transcription
  misc_feature: MA Experiment 20000328 PARAMETER Experiment Name: At_42deg_Heat_Sub_P Parameter: Age (day) Value: 14
  misc_feature: MA Experiment 20000328 PARAMETER Experiment Name: At_42deg_Heat_Sub_P Parameter: Organism Value: A. thaliana
  misc_feature: MA Experiment 20000328 PARAMETER Experiment Name: At_42deg_Heat_Sub_P Parameter: Plant Line Value: WS
  misc_feature: MA Experiment 20000328 PARAMETER Experiment Name: At_42deg_Heat_Sub_P Parameter: Temperature (deg C) Value: 42 vs. 22
  misc_feature: MA Experiment 20000328 PARAMETER Experiment Name: At_42deg_Heat_Sub_P Parameter: Timepoint (hr) Value: 6
  misc_feature: MA Experiment 20000328 PARAMETER Experiment Name: At_42deg_Heat_Sub_P Parameter: Tissue Value: Aerial
  misc_feature: MA Experiment ID: 20000348 Result: Up-regulated in Transcription
  misc_feature: MA Experiment 20000348 PARAMETER Experiment Name: At_100uM_ABA_Sub_P Parameter: Age (day) Value: 14
  misc_feature: MA Experiment 20000348 PARAMETER Experiment Name: At_100uM_ABA_Sub_P Parameter: Organism Value: A. thaliana
  misc_feature: MA Experiment 20000348 PARAMETER Experiment Name: At_100uM_ABA_Sub_P Parameter: Plant Line Value: WS
  misc_feature: MA Experiment 20000348 PARAMETER Experiment Name: At_100uM_ABA_Sub_P Parameter: Timepoint (hr) Value: 1
  misc_feature: MA Experiment 20000348 PARAMETER Experiment Name: At_100uM_ABA_Sub_P Parameter: Tissue Value: Aerial
  misc_feature: MA Experiment 20000348 PARAMETER Experiment Name: At_100uM_ABA_Sub_P Parameter: Treatment Value: 100uM ABA vs. No Treatment
  misc_feature: MA Experiment ID: 20000355 Result: Up-regulated in Transcription
  misc_feature: MA Experiment 20000355 PARAMETER Experiment Name: At_Siliques_Sub_P Parameter: Age (day) Value: 21
  misc_feature: MA Experiment 20000355 PARAMETER Experiment Name: At_Siliques_Sub_P Parameter: Organism Value: A. thaliana
  misc_feature: MA Experiment 20000355 PARAMETER Experiment Name: At_Siliques_Sub_P Parameter: Plant Line Value: WS
  misc_feature: MA Experiment 20000355 PARAMETER Experiment Name: At_Siliques_Sub_P Parameter: Tissue Value: Less Than 5mm Siliques vs. Whole Plant
  misc_feature: MA Experiment ID: 20000440 Result: Up-regulated in Transcription
  misc_feature: MA Experiment 20000440 PARAMETER Experiment Name: At_Closed-Flower__Sub_P Parameter: Tissue Value: Closed Flower vs. Whole Plant
atggtgttcgaaacttgtccatctccaaacccaattcatgtaatgctcgtctcgtttcaaggacaaggccacgtcaaccctcttcttcgtctcggcaagttaattgcttcaaagggtttactcgttaccttcgttacaacggagctttggggcaagaaaatgagacaagccaacaaaatcgttgacggtgaacttaaaccggttggttccggttcaatccggtttgagttctttgatgaagaatgggcagaggatgatgaccggagagctgatttctctttgtacattgctcacctagagagcgttgggatacgagaagtgtctaagcttgtgagaagatacgaggaagcgaacgagcctgtctcgtgtcttatcaataacccgtttatcccatgggtctgccacgtggcggaagagttcaacattccttgtgcggttctctgggttcagtcttgtgcttgtttctctgcttattaccattaccaagatggctctgtttcattccctacggaaacagagcctgagctcgatgtgaagcttccttgtgttcctgtcttgaagaacgacgagattcctagctttctccatccttcttctaggttcacgggttttcgacaagcgattcttgggcaattcaagaatctgagcaagtccttctgtgttctaatcgattcttttgactcattggaacaagaagttatcgattacatgtcaagtctttgtccggttaaaaccgttggaccgcttttcaaagttgctaggacagttacttctgacgtaagcggtgacatttgcaaatcaacagataaatgcctcgagtggttagactcgaggcctaaatcgtcagttgtctacatttcgttcgggacagttgcatatttgaagcaagaacagatcgaagagatcgctcacggagttttgaagtcgggtttatcgttcttgtgggtgattagacctccaccacacgatctgaaggtcgagacacatgtcttgcctcaagaacttaaagagagtagtgctaaaggtaaagggatgattgtggattggtgcccacaagagcaagtcttgtctcatccttcagtggcatgcttcgtgactcattgtggatggaactcgacaatggaatctttgtcttcaggtgttccggtggtttgttgtccgcaatggggagatcaagtgactgatgcagtgtatttgatcgatgttttcaagaccggggttagactaggccgtggagcgaccgaggagagggtagtgccaagggaggaagtggcggagaagcttttggaagcgacagttggggagaaggcagaggagttgagaaagaacgctttgaaatggaaggcggaggcggaagcagcggtggctccaggaggttcgtcggataagaattttagggagtttgtggagaagttaggtgcgggagtaacgaagactaaagataatggatactag

SEQ ID NO: 81572 - protein, 484 aa, Arabidopsis thaliana; identical to SEQ ID NO: 36413
  peptide (1)..(484): Ceres Seq. ID no. 12660335
  misc_feature (32)..(480): Pfam Name: UDP-glucoronosyl and UDP-glucosyl transferase Pfam Description: UDP-glucoronosyl and UDP-glucosyl transferase
  misc_feature (1)..(484): Homolog of NCBI NO: 7433899 NR Description: probable indole-3-acetate
  misc_feature (1)..(484): Homolog of NCBI NO: 30683281 NR Description: UDP-glycosyltransferase family [Arabidopsis
  misc_feature (1)..(484): Homolog of NCBI NO: 25082972 NR Description: indole-3-acetate beta-glucosyltransferase like
  misc_feature (13)..(483): Homolog of NCBI NO: 15234616 NR Description: UDP-glycosyltransferase, putative; protein id: supported by cDNA: 35383., supported by cDNA: gi_16323084,
  misc_feature (13)..(483): Homolog of NCBI NO: 21593030 NR Description: indole-3-acetate beta-glucosyltransferase like
  misc_feature (4)..(483): Homolog of NCBI NO: 9794913 NR Description: UDP-glucose:sinapate glucosyltransferase
  misc_feature (1)..(483): Homolog of NCBI NO: 15233091 NR Description: UDP-glucosyltransferase, putative; protein id:
  misc_feature (1)..(483): Homolog of NCBI NO: 20259348 NR Description: putative UDP-glucose:indole-3-acetate beta-D-
  misc_feature (13)..(482): Homolog of NCBI NO: 15234619 NR Description: indole-3-acetate beta-glucosyltransferase like protein id: At4g15500.1 [Arabidopsis thaliana]
  misc_feature (12)..(472): Homolog of NCBI NO: 13431605 NR Description: Limonoid UDP-glucosyltransferase (Limonoid

SEQ ID NO: 81573 - protein, 470 aa, Arabidopsis thaliana
  peptide (1)..(470): Ceres Seq. ID no. 12660336
  misc_feature (18)..(466): Pfam Name: UDP-glucoronosyl and UDP-glucosyl transferase Pfam Description: UDP-glucoronosyl and UDP-glucosyl transferase
  misc_feature (1)..(470): Homolog of NCBI NO: 7433899 NR Description: probable indole-3-acetate
  misc_feature (1)..(470): Homolog of NCBI NO: 30683281 NR Description: UDP-glycosyltransferase family [Arabidopsis
  misc_feature (1)..(470): Homolog of NCBI NO: 25082972 NR Description: indole-3-acetate beta-glucosyltransferase like
  misc_feature (1)..(469): Homolog of NCBI NO: 15234616 NR Description: UDP-glycosyltransferase, putative; protein id: supported by cDNA: 35383., supported by cDNA: gi_16323084,
  misc_feature (1)..(469): Homolog of NCBI NO: 21593030 NR Description: indole-3-acetate beta-glucosyltransferase like
  misc_feature (1)..(469): Homolog of NCBI NO: 9794913 NR Description: UDP-glucose:sinapate glucosyltransferase
  misc_feature (1)..(469): Homolog of NCBI NO: 15233091 NR Description: UDP-glucosyltransferase, putative; protein id:
  misc_feature (1)..(469): Homolog of NCBI NO: 20259348 NR Description: putative UDP-glucose:indole-3-acetate beta-D-
  misc_feature (1)..(468): Homolog of NCBI NO: 15234619 NR Description: indole-3-acetate beta-glucosyltransferase like protein id: At4g15500.1 [Arabidopsis thaliana]
  misc_feature (1)..(458): Homolog of NCBI NO: 13431605 NR Description: Limonoid UDP-glucosyltransferase (Limonoid
MLVSFQGQGHVNPLLRLGKLIASKGLLVTFVTTELWGKKMRQANKIVDGELKPVGSGSIRFEFFDEEWAEDDDRRADFSLYIAHLESVGIREVSKLVRRYEEANEPVSCLINNPFIPWVCHVAEEFNIPCAVLWVQSCACFSAYYHYQDGSVSFPTETEPELDVKLPCVPVLKNDEIPSFLHPSSRFTGFRQAILGQFKNLSKSFCVLIDSFDSLEQEVIDYMSSLCPVKTVGPLFKVARTVTSDVSGDICKSTDKCLEWLDSRPKSSVVYISFGTVAYLKQEQIEEIAHGVLKSGLSFLWVIRPPPHDLKVETHVLPQELKESSAKGKGMIVDWCPQEQVLSHPSVACFVTHCGWNSTMESLSSGVPVVCCPQWGDQVTDAVYLIDVFKTGVRLGRGATEERVVPREEVAEKLLEATVGEKAEELRKNALKWKAEAEAAVAPGGSSDKNFREFVEKLGAGVTKTKDNGY

SEQ ID NO: 81574 - protein, 431 aa, Arabidopsis thaliana
  peptide (1)..(431): Ceres Seq. ID no. 12660337
  misc_feature (1)..(427): Pfam Name: UDP-glucoronosyl and UDP-glucosyl transferase Pfam Description: UDP-glucoronosyl and UDP-glucosyl transferase
  misc_feature (1)..(431): Homolog of NCBI NO: 7433899 NR Description: probable indole-3-acetate
  misc_feature (1)..(431): Homolog of NCBI NO: 30683281 NR Description: UDP-glycosyltransferase family [Arabidopsis
  misc_feature (1)..(431): Homolog of NCBI NO: 25082972 NR Description: indole-3-acetate beta-glucosyltransferase like
  misc_feature (1)..(430): Homolog of NCBI NO: 15234616 NR Description: UDP-glycosyltransferase, putative; protein id: supported by cDNA: 35383., supported by cDNA: gi_16323084,
  misc_feature (1)..(430): Homolog of NCBI NO: 21593030 NR Description: indole-3-acetate beta-glucosyltransferase like
  misc_feature (1)..(430): Homolog of NCBI NO: 9794913 NR Description: UDP-glucose:sinapate glucosyltransferase
  misc_feature (1)..(430): Homolog of NCBI NO: 15233091 NR Description: UDP-glucosyltransferase, putative; protein id:
  misc_feature (1)..(430): Homolog of NCBI NO: 20259348 NR Description: putative UDP-glucose:indole-3-acetate beta-D-
  misc_feature (1)..(429): Homolog of NCBI NO: 15234619 NR Description: indole-3-acetate beta-glucosyltransferase like protein id: At4g15500.1 [Arabidopsis thaliana]
  misc_feature (1)..(419): Homolog of NCBI NO: 13431605 NR Description: Limonoid UDP-glucosyltransferase (Limonoid
MRQANKIVDGELKPVGSGSIRFEFFDEEWAEDDDRRADFSLYIAHLESVGIREVSKLVRRYEEANEPVSCLINNPFIPWVCHVAEEFNIPCAVLWVQSCACFSAYYHYQDGSVSFPTETEPELDVKLPCVPVLKNDEIPSFLHPSSRFTGFRQAILGQFKNLSKSFCVLIDSFDSLEQEVIDYMSSLCPVKTVGPLFKVARTVTSDVSGDICKSTDKCLEWLDSRPKSSVVYISFGTVAYLKQEQIEEIAHGVLKSGLSFLWVIRPPPHDLKVETHVLPQELKESSAKGKGMIVDWCPQEQVLSHPSVACFVTHCGWNSTMESLSSGVPVVCCPQWGDQVTDAVYLIDVFKTGVRLGRGATEERVVPREEVAEKLLEATVGEKAEELRKNALKWKAEAEAAVAPGGSSDKNFREFVEKLGAGVTKTKDNGY

SEQ ID NO: 81575 - DNA, 1014 bp, Arabidopsis thaliana
  misc_feature (1)..(1014): Ceres Seq. ID no. 12660344
  misc_feature: MA Experiment ID: 108434 Result: Down-regulated in Transcription
  misc_feature: MA Experiment 108434 PARAMETER Experiment Name: At_Root_Tips_cDNA_P Parameter: Tissue Value: Root Tips
  misc_feature: MA Experiment ID: 108435 Result: Down-regulated in Transcription
  misc_feature: MA Experiment 108435 PARAMETER Experiment Name: At_stm_Mutants_cDNA_P Parameter: Plant Line Value: wt Landsburg vs stm
  misc_feature: MA Experiment 108435 PARAMETER Experiment Name: At_stm_Mutants_cDNA_P Parameter: Tissue Value: Shoot Apical Meristem Region
  misc_feature: MA Experiment ID: 108461 Result: Up-regulated in Transcription
  misc_feature: MA Experiment 108461 PARAMETER Experiment Name: At_Germinating_Seeds_cDNA_P Parameter: Age (day) Value: 1 vs. 0
  misc_feature: MA Experiment 108461 PARAMETER Experiment Name: At_Germinating_Seeds_cDNA_P Parameter: Tissue Value: Germinating Seeds
  misc_feature: MA Experiment ID: 108462 Result: Up-regulated in Transcription
  misc_feature: MA Experiment 108462 PARAMETER Experiment Name: At_Germinating_Seeds_cDNA_P Parameter: Age (day) Value: 2 vs. 0
  misc_feature: MA Experiment 108462 PARAMETER Experiment Name: At_Germinating_Seeds_cDNA_P Parameter: Tissue Value: Germinating Seeds
  misc_feature: MA Experiment ID: 108464 Result: Up-regulated in Transcription
  misc_feature: MA Experiment 108464 PARAMETER Experiment Name: At_Germinating_Seeds_cDNA_P Parameter: Age (day) Value: 4 vs. 0
  misc_feature: MA Experiment 108464 PARAMETER Experiment Name: At_Germinating_Seeds_cDNA_P Parameter: Tissue Value: Germinating Seeds
  misc_feature: MA Experiment ID: 108585 Result: Down-regulated in Transcription
  misc_feature: MA Experiment 108585 PARAMETER Experiment Name: At_5mM_NaNP_cDNA_P Parameter: Timepoint (hr) Value: 6
  misc_feature: MA Experiment 108585 PARAMETER Experiment Name: At_5mM_NaNP_cDNA_P Parameter: Tissue Value: Aerial
  misc_feature: MA Experiment 108585 PARAMETER Experiment Name: At_5mM_NaNP_cDNA_P Parameter: Treatment Value: null
  misc_feature: MA Experiment ID: 108595 Result: Down-regulated in Transcription
  misc_feature: MA Experiment 108595 PARAMETER Experiment Name: At_Ler-pi_Ovule_cDNA_P Parameter: Plant Line Value: null
  misc_feature: MA Experiment ID: 20000087 Result: Down-regulated in Transcription
  misc_feature: MA Experiment 20000087 PARAMETER Experiment Name: At_100uM_ABA_Mutants_cDNA_P Parameter: Plant Line Value: WS
  misc_feature: MA Experiment 20000087 PARAMETER Experiment Name: At_100uM_ABA_Mutants_cDNA_P Parameter: Timepoint (hr) Value: 6
  misc_feature: MA Experiment 20000087 PARAMETER Experiment Name: At_100uM_ABA_Mutants_cDNA_P Parameter: Tissue Value: Aerial
  misc_feature: MA Experiment 20000087 PARAMETER Experiment Name: At_100uM_ABA_Mutants_cDNA_P Parameter: Treatment Value: 100uM ABA vs. No Treatment
  misc_feature: MA Experiment ID: 20000089 Result: Down-regulated in Transcription
  misc_feature: MA Experiment ID: 20000090 Result: Down-regulated in Transcription
atgtcagagatagaagaagaagaagaagaaggatcagcaagtgcaattacaggttcgagaagtttcgatcttcccgatgaacttcttcaagttctaccgtccgatccattcgagcagctagatgtagctcgcaaaatcacatccattgctctctcgacacgtgtctcagctctcgaatcagagtcgtcggatctccgggaacttctcgccgagaaagaaaaagaatttgaagaactccagtctcacgttgagtctctcgaggcttctctttccgatgcgtttcataagctttctctcgctgatggtgaaaaggagaatctgataagagaaaatgcttctttgtctaatactgtcaagagacttcagagagatgtctcaaagcttgagggttttaggaagacgcttatgatgtctcttcaagatgatgaccaaaatgcaggaacaacgcaaatcatcgctaagccgacaccaaacgatgatgatactccatttcaaccttcaagacattcatcaatccaatctcaacaagcttctgaagccattgaaccagctgcaactgacaacgaaaacgatgctcctaaaccaagtttatcagctagtcttccgttagtatcacaaactactacgccacggcttactcctcctggttctccaccaatcttatctgcttctggtacaccgaaaacaacttcgagacctatctctcctcgacgccattctgtatcgttcgctaccactagaggcatgtttgatgatactagatcttctatttcaatctcagagcctggttcacaaactgcgagaactcgggttgatggaaaagagttctttcgacaagtcaggagccgattatcttacgagcaatttggtgcatttcttggaaatgtgaaggatcttaacgcccacaagcaaacaagagaagaaacacttaggaaagctgaagagatatttggaggcgataacagagatctctacgtcatattcgagggcttgatcacacgcaacgctcactaa

SEQ ID NO: 81576 - protein, 337 aa, Arabidopsis thaliana; identical to SEQ ID NO: 25685
  peptide (1)..(337): Ceres Seq. ID no. 12660345
  misc_feature (1)..(337): Homolog of NCBI NO: 18414476 NR Description: Expressed protein; protein id: At4g15545.1, by cDNA: 307., supported by cDNA: gi_14517355, supported by cDNA: supported by cDNA: gi_16323275 [Arabidopsis thaliana] thaliana]
  misc_feature (10)..(307): Homolog of NCBI NO: 7485048 NR Description: hypothetical protein - Arabidopsis thaliana hypothetical protein [Arabidopsis thaliana]
  misc_feature (22)..(335): Homolog of NCBI NO: 30684901 NR Description: expressed protein [Arabidopsis thaliana] ESTs gb|N38586 and gb|N38613 come from this gene. [Arabidopsis >gi|26452357|dbj|BAC43264.1| unknown protein [Arabidopsis
  misc_feature (22)..(333): Homolog of NCBI NO: 15222835 NR Description: hypothetical protein; protein id: At1g56080.1
  misc_feature (11)..(335): Homolog of NCBI NO: 38344261 NR Description: OSJNBa0008M17.14 [Oryza sativa (japonica
  misc_feature (29)..(142): Homolog of NCBI NO: 23613663 NR Description: hypothetical protein, conserved [Plasmodium
  misc_feature (272)..(336): Homolog of NCBI NO: 23613663 NR Description: hypothetical protein, conserved [Plasmodium
  misc_feature (29)..(142): Homolog of NCBI NO: 23489944 NR Description: hypothetical protein [Plasmodium yoelii yoelii]
  misc_feature (272)..(336): Homolog of NCBI NO: 23489944 NR Description: hypothetical protein [Plasmodium yoelii yoelii]
  misc_feature (22)..(268): Homolog of NCBI NO: 25404089 NR Description: hypothetical protein T6H22.12 [imported] - thaliana >gi|6056378|gb|AAF02842.1|AC009894_13 Hypothetical

SEQ ID NO: 81577 - protein, 202 aa, Arabidopsis thaliana; identical to SEQ ID NO: 25686
  peptide (1)..(202): Ceres Seq. ID no. 12660346
  misc_feature (1)..(202): Homolog of NCBI NO: 18414476 NR Description: Expressed protein; protein id: At4g15545.1, by cDNA: 307., supported by cDNA: gi_14517355, supported by cDNA: supported by cDNA: gi_16323275 [Arabidopsis thaliana] thaliana]
  misc_feature (1)..(172): Homolog of NCBI NO: 7485048 NR Description: hypothetical protein - Arabidopsis thaliana hypothetical protein [Arabidopsis thaliana]
  misc_feature (1)..(200): Homolog of NCBI NO: 30684901 NR Description: expressed protein [Arabidopsis thaliana] ESTs gb|N38586 and gb|N38613 come from this gene. [Arabidopsis >gi|26452357|dbj|BAC43264.1| unknown protein [Arabidopsis
  misc_feature (1)..(198): Homolog of NCBI NO: 15222835 NR Description: hypothetical protein; protein id: At1g56080.1
  misc_feature (1)..(200): Homolog of NCBI NO: 38344261 NR Description: OSJNBa0008M17.14 [Oryza sativa (japonica
  misc_feature (137)..(201): Homolog of NCBI NO: 23613663 NR Description: hypothetical protein, conserved [Plasmodium
  misc_feature (137)..(201): Homolog of NCBI NO: 23489944 NR Description: hypothetical protein [Plasmodium yoelii yoelii]
  misc_feature (1)..(133): Homolog of NCBI NO: 25404089 NR Description: hypothetical protein T6H22.12 [imported] - thaliana >gi|6056378|gb|AAF02842.1|AC009894_13 Hypothetical
  misc_feature (1)..(130): Homolog of NCBI NO: 34909876 NR Description: B1143G03.2 [Oryza sativa (japonica

SEQ ID NO: 81578 - protein, 201 aa, Arabidopsis thaliana
  peptide (1)..(201): Ceres Seq. ID no. 12660347
  misc_feature (1)..(201): Homolog of NCBI NO: 18414476 NR Description: Expressed protein; protein id: At4g15545.1, by cDNA: 307., supported by cDNA: gi_14517355, supported by cDNA: supported by cDNA: gi_16323275 [Arabidopsis thaliana] thaliana]
  misc_feature (1)..(171): Homolog of NCBI NO: 7485048 NR Description: hypothetical protein - Arabidopsis thaliana hypothetical protein [Arabidopsis thaliana]
  misc_feature (1)..(199): Homolog of NCBI NO: 30684901 NR Description: expressed protein [Arabidopsis thaliana] ESTs gb|N38586 and gb|N38613 come from this gene. [Arabidopsis >gi|26452357|dbj|BAC43264.1| unknown protein [Arabidopsis
  misc_feature (1)..(197): Homolog of NCBI NO: 15222835 NR Description: hypothetical protein; protein id: At1g56080.1
  misc_feature (1)..(199): Homolog of NCBI NO: 38344261 NR Description: OSJNBa0008M17.14 [Oryza sativa (japonica
  misc_feature (136)..(200): Homolog of NCBI NO: 23613663 NR Description: hypothetical protein, conserved [Plasmodium
  misc_feature (136)..(200): Homolog of NCBI NO: 23489944 NR Description: hypothetical protein [Plasmodium yoelii yoelii]
  misc_feature (1)..(132): Homolog of NCBI NO: 25404089 NR Description: hypothetical protein T6H22.12 [imported] - thaliana >gi|6056378|gb|AAF02842.1|AC009894_13 Hypothetical
  misc_feature (1)..(129): Homolog of NCBI NO: 34909876 NR Description: B1143G03.2 [Oryza sativa (japonica
MSLQDDDQNAGTTQIIAKPTPNDDDTPFQPSRHSSIQSQQASEAIEPAATDNENDAPKPSLSASLPLVSQTTTPRLTPPGSPPILSASGTPKTTSRPISPRRHSVSFATTRGMFDDTRSSISISEPGSQTARTRVDGKEFFRQVRSRLSYEQFGAFLGNVKDLNAHKQTREETLRKAEEIFGGDNRDLYVIFEGLITRNAH

SEQ ID NO: 81579 - DNA, 2076 bp, Arabidopsis thaliana
  misc_feature (1)..(2076): Ceres Seq. ID no. 12660367
  misc_feature: MA Experiment ID: 20000307 Result: Down-regulated in Transcription
  misc_feature: MA Experiment 20000307 PARAMETER Experiment Name: At_Germinating_Seeds_Sub_P Parameter: Age (hr) Value: 24 vs. 0
  misc_feature: MA Experiment 20000307 PARAMETER Experiment Name: At_Germinating_Seeds_Sub_P Parameter: Organism Value: A. thaliana
  misc_feature: MA Experiment 20000307 PARAMETER Experiment Name: At_Germinating_Seeds_Sub_P Parameter: Plant Line Value: WS
  misc_feature: MA Experiment 20000307 PARAMETER Experiment Name: At_Germinating_Seeds_Sub_P Parameter: Tissue Value: Germinating Seeds
  misc_feature: MA Experiment ID: 20000327 Result: Up-regulated in Transcription
  misc_feature: MA Experiment 20000327 PARAMETER Experiment Name: At_42deg_Heat_Sub_P Parameter: Age (day) Value: 14
  misc_feature: MA Experiment 20000327 PARAMETER Experiment Name: At_42deg_Heat_Sub_P Parameter: Organism Value: A. thaliana
  misc_feature: MA Experiment 20000327 PARAMETER Experiment Name: At_42deg_Heat_Sub_P Parameter: Plant Line Value: WS
  misc_feature: MA Experiment 20000327 PARAMETER Experiment Name: At_42deg_Heat_Sub_P Parameter: Temperature (deg C) Value: 42 vs. 22
  misc_feature: MA Experiment 20000327 PARAMETER Experiment Name: At_42deg_Heat_Sub_P Parameter: Timepoint (hr) Value: 1
  misc_feature: MA Experiment 20000327 PARAMETER Experiment Name: At_42deg_Heat_Sub_P Parameter: Tissue Value: Aerial
actaaaaagaatatagagatatagtatcaacacaaatgtcgtccaccatttctcaaaacaatagtccaataatgaaaatccaaaatctgtaacatgaccaattgacccaatgaagaaagggttcatccaaaatgtccatttagcccctgcaacttctctgttcgtccctcagtacaaaaacgacttctttcatctcaaaaccaaagctttcttggttcacaagctttcagaatctaccaacgctgctttcacgaatttactacatactctgactctgaaacttgggttcgcgagcgacactttcactgtgaatcacctagttattagttatgtcaagctcaaagaaatcaacactgcacgcaaactgtttgatgaaatgtgtgaaccaaatgtggtttcatggacttcggttatttctgggtataacgacatgggtaaacctcaaaatgctctttctatgtttcagaagatgcatgaagatagacctgtgcctcccaatgagtacacgtttgctagtgtctttaaagcatgttctgctttggctgaatcaagaatcggtaaaaacatccatgcccgtctggagatttcagggctcagaaggaatattgtagtgagttcctctcttgttgacatgtatgggaaatgcaacgatgtggaaaccgctagacgggttttcgactcgatgattggttatggaagaaatgttgtttcttggacctcgatgatcactgcttatgcgcagaacgctcgtggccatgaagctattgagttgtttagatcattcaatgctgctttgacgtcggatagggcgaatcagtttatgctggctagtgtaattagcgcatgctctagtttaggtaggctgcaatgggggaaagttgctcacgggttagttactcgaggtggttatgaatcgaacactgtggttgctacctctcttctagatatgtacgcgaaatgcggatctctaagctgtgcggagaaaatcttcttgagaattcgttgtcattctgttatttcgtacacatctatgatcatggcgaaggcaaagcatggacttggagaagcagcggttaaactattcgatgaaatggttgcagggagaataaatcctaactatgtaacattacttggcgtgttacacgcttgtagccattcgggtctggttaacgaaggcctagaatacttgagtttaatggctgagaagtatggtgtggttcctgactcgaggcattacacttgtgttgttgatatgcttggaagatttggtcgtgttgatgaagcttatgaattggcgaaaactatagaagttggagcagagcaaggtgcgctcttgtggggagctcttctctcagctggtaggttacatggaagagttgagattgtaagtgaagcgagcaagcgattaatacaatctaatcagcaagtgacaagtgcgtacatcgcattatccaatgcttatgctgtgtctggaggatgggaagattcagaatctcttcgattagagatgaaacgtagtggaaatgtgaaagaacgagcttgtagctggattgaaaataaagattcagtttatgtttttcatgctggggatttgtcatgtgatgagagcggtgagattgaaaggttcctgaaagatctagagaagagaatgaaagaaagaggacacagaggaagtagtagtatgatcacaacaagttcatcggtttttgtcgatgttgatgaggaagctaaagatgaaatggtgagtttgcattgtgaaagattggctttagcatatggattgcttcatttgcctgcaggatcaacaattaggattatgaacaatttgaggatgtgtagagattgccatgaggctttcaagctgatcagtgagattgtggagagggaaattgttgtcagggatgtgaataggtttcattgctttaagaatggctcttgcacttgtcgtgattattggtgaactttttactaaattatattgattttttgttctgatatgatccgaatcattcatagtcaaaacattgatgtagaagcgtatgtttcaatcacttatataattaaagtagttgtaag

SEQ ID NO: 81580 - protein, 616 aa, Arabidopsis thaliana
  peptide (1)..(616): Ceres Seq. ID no. 12660368
  misc_feature (96)..(130): Pfam Name: PPR repeat Pfam Description: PPR repeat
  misc_feature (63)..(616): Homolog of NCBI NO: 33146689 NR Description: putative pentatricopeptide (PPR)
  misc_feature (51)..(120): Homolog of NCBI NO: 33146689 NR Description: putative pentatricopeptide (PPR)
  misc_feature (1)..(616): Homolog of NCBI NO: 11994419 NR Description: selenium-binding protein-like [Arabidopsis
  misc_feature (1)..(615): Homolog of NCBI NO: 15230593 NR Description: unknown protein; protein id: At3g12770.1
  misc_feature (80)..(616): Homolog of NCBI NO: 15229426 NR Description: hypothetical protein; protein id: At3g23330.1 thaliana] >gi|11994318|dbj|BAB02277.1|
  misc_feature (51)..(616): Homolog of NCBI NO: 34394298 NR Description: putative pentatricopeptide (PPR)
  misc_feature (51)..(616): Homolog of NCBI NO: 15236324 NR Description: putative protein; protein id: At4g13650.1
  misc_feature (166)..(616): Homolog of NCBI NO: 15217508 NR Description: hypothetical protein; protein id: At1g09410.1
  misc_feature (68)..(222): Homolog of NCBI NO: 15217508 NR Description: hypothetical protein; protein id: At1g09410.1
  misc_feature (50)..(616): Homolog of NCBI NO: 15229561 NR Description: hypothetical protein; protein id: At3g24000.1 thaliana] >gi|9294669|dbj|BAB03018.1| contains similarity to
MKKGFIQNVHLAPATSLFVPQYKNDFFHLKTKAFLVHKLSESTNAAFTNLLHTLTLKLGFASDTFTVNHLVISYVKLKEINTARKLFDEMCEPNVVSWTSVISGYNDMGKPQNALSMFQKMHEDRPVPPNEYTFASVFKACSALAESRIGKNIHARLEISGLRRNIVVSSSLVDMYGKCNDVETARRVFDSMIGYGRNVVSWTSMITAYAQNARGHEAIELFRSFNAALTSDRANQFMLASVISACSSLGRLQWGKVAHGLVTRGGYESNTVVATSLLDMYAKCGSLSCAEKIFLRIRCHSVISYTSMIMAKAKHGLGEAAVKLFDEMVAGRINPNYVTLLGVLHACSHSGLVNEGLEYLSLMAEKYGVVPDSRHYTCVVDMLGRFGRVDEAYELAKTIEVGAEQGALLWGALLSAGRLHGRVEIVSEASKRLIQSNQQVTSAYIALSNAYAVSGGWEDSESLRLEMKRSGNVKERACSWIENKDSVYVFHAGDLSCDESGEIERFLKDLEKRMKERGHRGSSSMITTSSSVFVDVDEEAKDEMVSLHCERLALAYGLLHLPAGSTIRIMNNLRMCRDCHEAFKLISEIVEREIVVRDVNRFHCFKNGSCTCRDYW

SEQ ID NO: 81581 - protein, 527 aa, Arabidopsis thaliana
  peptide (1)..(527): Ceres Seq. ID no. 12660369
  misc_feature (7)..(41): Pfam Name: PPR repeat Pfam Description: PPR repeat
  misc_feature (1)..(527): Homolog of NCBI NO: 33146689 NR Description: putative pentatricopeptide (PPR)
  misc_feature (1)..(31): Homolog of NCBI NO: 33146689 NR Description: putative pentatricopeptide (PPR)
  misc_feature (1)..(527): Homolog of NCBI NO: 11994419 NR Description: selenium-binding protein-like [Arabidopsis
  misc_feature (1)..(526): Homolog of NCBI NO: 15230593 NR Description: unknown protein; protein id: At3g12770.1
  misc_feature (1)..(527): Homolog of NCBI NO: 15229426 NR Description: hypothetical protein; protein id: At3g23330.1 thaliana] >gi|11994318|dbj|BAB02277.1|
  misc_feature (1)..(527): Homolog of NCBI NO: 34394298 NR Description: putative pentatricopeptide (PPR)
  misc_feature (1)..(527): Homolog of NCBI NO: 15236324 NR Description: putative protein; protein id: At4g13650.1
  misc_feature (77)..(527): Homolog of NCBI NO: 15217508 NR Description: hypothetical protein; protein id: At1g09410.1
  misc_feature (1)..(133): Homolog of NCBI NO: 15217508 NR Description: hypothetical protein; protein id: At1g09410.1
  misc_feature (1)..(527): Homolog of NCBI NO: 15229561 NR Description: hypothetical protein; protein id: At3g24000.1 thaliana] >gi|9294669|dbj|BAB03018.1| contains similarity to
MCEPNVVSWTSVISGYNDMGKPQNALSMFQKMHEDRPVPPNEYTFASVFKACSALAESRIGKNIHARLEISGLRRNIVVSSSLVDMYGKCNDVETARRVFDSMIGYGRNVVSWTSMITAYAQNARGHEAIELFRSFNAALTSDRANQFMLASVISACSSLGRLQWGKVAHGLVTRGGYESNTVVATSLLDMYAKCGSLSCAEKIFLRIRCHSVISYTSMIMAKAKHGLGEAAVKLFDEMVAGRINPNYVTLLGVLHACSHSGLVNEGLEYLSLMAEKYGVVPDSRHYTCVVDMLGRFGRVDEAYELAKTIEVGAEQGALLWGALLSAGRLHGRVEIVSEASKRLIQSNQQVTSAYIALSNAYAVSGGWEDSESLRLEMKRSGNVKERACSWIENKDSVYVFHAGDLSCDESGEIERFLKDLEKRMKERGHRGSSSMITTSSSVFVDVDEEAKDEMVSLHCERLALAYGLLHLPAGSTIRIMNNLRMCRDCHEAFKLISEIVEREIVVRDVNRFHCFKNGSCTCRDYW

SEQ ID NO: 81582 - protein, 509 aa, Arabidopsis thaliana
  peptide (1)..(509): Ceres Seq. ID no. 12660370
  misc_feature (1)..(509): Homolog of NCBI NO: 33146689 NR Description: putative pentatricopeptide (PPR)
  misc_feature (1)..(13): Homolog of NCBI NO: 33146689 NR Description: putative pentatricopeptide (PPR)
  misc_feature (1)..(509): Homolog of NCBI NO: 11994419 NR Description: selenium-binding protein-like [Arabidopsis
  misc_feature (1)..(508): Homolog of NCBI NO: 15230593 NR Description: unknown protein; protein id: At3g12770.1
  misc_feature (1)..(509): Homolog of NCBI NO: 15229426 NR Description: hypothetical protein; protein id: At3g23330.1 thaliana] >gi|11994318|dbj|BAB02277.1|
  misc_feature (1)..(509): Homolog of NCBI NO: 34394298 NR Description: putative pentatricopeptide (PPR)
  misc_feature (1)..(509): Homolog of NCBI NO: 15236324 NR Description: putative protein; protein id: At4g13650.1
  misc_feature (59)..(509): Homolog of NCBI NO: 15217508 NR Description: hypothetical protein; protein id: At1g09410.1
  misc_feature (1)..(115): Homolog of NCBI NO: 15217508 NR Description: hypothetical protein; protein id: At1g09410.1
  misc_feature (1)..(509): Homolog of NCBI NO: 15229561 NR Description: hypothetical protein; protein id: At3g24000.1 thaliana] >gi|9294669|dbj|BAB03018.1| contains similarity to
MGKPQNALSMFQKMHEDRPVPPNEYTFASVFKACSALAESRIGKNIHARLEISGLRRNIVVSSSLVDMYGKCNDVETARRVFDSMIGYGRNVVSWTSMITAYAQNARGHEAIELFRSFNAALTSDRANQFMLASVISACSSLGRLQWGKVAHGLVTRGGYESNTVVATSLLDMYAKCGSLSCAEKIFLRIRCHSVISYTSMIMAKAKHGLGEAAVKLFDEMVAGRINPNYVTLLGVLHACSHSGLVNEGLEYLSLMAEKYGVVPDSRHYTCVVDMLGRFGRVDEAYELAKTIEVGAEQGALLWGALLSAGRLHGRVEIVSEASKRLIQSNQQVTSAYIALSNAYAVSGGWEDSESLRLEMKRSGNVKERACSWIENKDSVYVFHAGDLSCDESGEIERFLKDLEKRMKERGHRGSSSMITTSSSVFVDVDEEAKDEMVSLHCERLALAYGLLHLPAGSTIRIMNNLRMCRDCHEAFKLISEIVEREIVVRDVNRFHCFKNGSCTCRDYW

SEQ ID NO: 81583 - DNA, 2157 bp, Arabidopsis thaliana
  misc_feature (1)..(2157): Ceres Seq. ID no. 12660404
  misc_feature: MA Experiment ID: 20000794 Result: Up-regulated in Transcription
  misc_feature: MA Experiment 20000794 PARAMETER Experiment Name: At_Petals_P Parameter: Age (day) Value: 23-25 days
  misc_feature: MA Experiment 20000794 PARAMETER Experiment Name: At_Petals_P Parameter: Plant Line Value: WS
  misc_feature: MA Experiment 20000794 PARAMETER Experiment Name: At_Petals_P Parameter: Tissue Value: Petals vs. Whole plant
  misc_feature: MA Experiment ID: 20001910 Result: Up-regulated in Transcription
  misc_feature: MA Experiment 20001910 PARAMETER Experiment Name: At_Drought_Reproduction_P Parameter: Age (day) Value: 37
  misc_feature: MA Experiment 20001910 PARAMETER Experiment Name: At_Drought_Reproduction_P Parameter: Organism Value: A. thaliana
  misc_feature: MA Experiment 20001910 PARAMETER Experiment Name: At_Drought_Reproduction_P Parameter: Plant Line Value: WS
  misc_feature: MA Experiment 20001910 PARAMETER Experiment Name: At_Drought_Reproduction_P Parameter: Timepoint (day) Value: 7
  misc_feature: MA Experiment 20001910 PARAMETER Experiment Name: At_Drought_Reproduction_P Parameter: Tissue Value: Flowers
  misc_feature: MA Experiment 20001910 PARAMETER Experiment Name: At_Drought_Reproduction_P Parameter: Treatment Value: Drought vs. No Drought
atggacaaagtccagcaacaagcagatttattcggtaagacgatatctccgtttgtagcttcacaaccaacaaatgtcggaggattcactgatcagaaaatcattggcggttctgagacgacacaacctccagccacctcacctccttctcctccatcccctgacacacaaacatctcccccgccggcaacagctgctcaaccaccaccgaatcagcctcctaatacaactccacctccaacgcctccttcttcccctccaccttctataactccacctccttcacctcctcagcctcaacctccgcctcaatccaccccaactggagattctccggtggtgattccttttccaaagcctcaattacctcctccttctctttttcctcccccctccttagttaatcagctaccggatccaagacctaatgataataacatacttgaacccatcaacaaccctatttctcttccgtctccgccttctactcccttttcgccaccgtctcaggaaaattccggcagtcaagggtctcctccgttgtcatctttattgcctccgatgcttccgctaaaccctaattctcctggaaaccctttacagcccttggattcacctctgggaggagaatcaaatcgtgtaccctcgtcgtcttcttccccatctcctccttccctctccggatcaaataaccattccggaggctctaatagacataatgccaatagtaacggggatggtggtactagccaacaaagtaatgagtctaattacaccgagaagacagtgattggtattgggatcgcaggtgtgttggtcatattgttcatcgctggcgttttctttgttaggaggaaacaaaagaaaggctcttcttccccgcgctctaaccagtatttgccaccggctaatgtctctgtaaatacagaaggattcatccattacagacagaaacccgggaatgggaacagctcggcgcagaactcttcaccggatactaacagtcttgggaacccaaaacatggtagaggaacccctgactccgcagtaatagggacttcaaagatccatttcacctacgaagagctaagtcagataactgaaggattttgcaagagctttgtggtaggagaaggcgggttcgggtgtgtctacaagggcatcctattcgagggaaagccagtagcgatcaaacagctgaagtcggtcagcgcagaaggatatagagagttcaaagctgaagtagagatcataagcagagtgcatcataggcacttggtgtctcttgtgggttattgcatctctgaacaacacagattcctcatctatgagtttgtccccaacaatactttggattaccatttacatggcaaaaacttaccggttttggaatggagtagaagagtcaggattgcaataggcgcagccaaaggacttgcttatctacatgaagattgccacccaaagattatccatagggacatcaaatcgtcaaacattctgctggatgatgaattcgaagctcaggttgcagatttcggactcgctagactgaacgatactgcacagtcacacatatcaacgcgtgtcatgggcacattcgggtatctagcaccagaatatgcgtcaagcggaaagctaacggatagatcagatgtgttttcatttggagttgtgcttctcgaactcatcaccggtcgcaaacctgttgatacctctcaacctttgggtgaagaaagtctcgtcgaatgggcacgtccaaggctaatcgaggccattgaaaaaggtgacatcagcgaagtagtggatccacggctagagaatgattacgtcgaaagtgaagtctataaaatgattgaaacggcagcgtcttgtgttagacattccgctttaaaacgacctcgtatggttcaggttgttagagctctggacacgagagatgacttgtcggatctgacaaacggagttaaagtgggtcaaagtagggtctacgactccggtcaatacagtaatgagattcgaattttcagacgagcctctgaagattcctcggatcttggtactaatactggctactaccctagccaagactacgccactagccatgaatatgaatctgagagccgagccttcaacacaagtcaccggaaccattga

SEQ ID NO: 81584 - protein, 718 aa, Arabidopsis thaliana
  peptide (1)..(718): Ceres Seq. ID no. 12660405
  misc_feature (43)..(717): Homolog of NCBI NO: 15223161 NR Description: putative protein kinase; protein id: At1g70460.1
  misc_feature (38)..(717): Homolog of NCBI NO: 15223161 NR Description: putative protein kinase; protein id: At1g70460.1
  misc_feature (325)..(712): Homolog of NCBI NO: 25518375 NR Description: hypothetical protein F5O8.10 - Arabidopsis
  misc_feature (35)..(335): Homolog of NCBI NO: 25518375 NR Description: hypothetical protein F5O8.10 - Arabidopsis
  misc_feature (43)..(509): Homolog of NCBI NO: 15220786 NR Description: Pto kinase interactor, putative; protein id:
  misc_feature (536)..(712): Homolog of NCBI NO: 15220786 NR Description: Pto kinase interactor, putative; protein id:
  misc_feature (38)..(689): Homolog of NCBI NO: 15240947 NR Description: putative protein; protein id: At5g38560.1, by cDNA: gi_15983496, supported by cDNA: gi_18700152 [Arabidopsis >gi|10176824|dbj|BAB10146.1| contains similarity to protein
  misc_feature (16)..(689): Homolog of NCBI NO: 15221470 NR Description: protein kinase, putative; protein id: supported by cDNA: gi_21280864 [Arabidopsis thaliana]
  misc_feature (38)..(690): Homolog of NCBI NO: 15222649 NR Description: Pto kinase interactor, putative; protein id: [Arabidopsis thaliana] >gi|25403034|pir||F86387 probable Pto
  misc_feature (37)..(695): Homolog of NCBI NO: 15230108 NR Description: protein kinase, putative; protein id: At3g24400.1
MDKVQQQADLFGKTISPFVASQPTNVGGFTDQKIIGGSETTQPPATSPPSPPSPDTQTSPPPATAAQPPPNQPPNTTPPPTPPSSPPPSITPPPSPPQPQPPPQSTPTGDSPVVIPFPKPQLPPPSLFPPPSLVNQLPDPRPNDNNILEPINNPISLPSPPSTPFSPPSQENSGSQGSPPLSSLLPPMLPLNPNSPGNPLQPLDSPLGGESNRVPSSSSSPSPPSLSGSNNHSGGSNRHNANSNGDGGTSQQSNESNYTEKTVIGIGIAGVLVILFIAGVFFVRRKQKKGSSSPRSNQYLPPANVSVNTEGFIHYRQKPGNGNSSAQNSSPDTNSLGNPKHGRGTPDSAVIGTSKIHFTYEELSQITEGFCKSFVVGEGGFGCVYKGILFEGKPVAIKQLKSVSAEGYREFKAEVEIISRVHHRHLVSLVGYCISEQHRFLIYEFVPNNTLDYHLHGKNLPVLEWSRRVRIAIGAAKGLAYLHEDCHPKIIHRDIKSSNILLDDEFEAQVADFGLARLNDTAQSHISTRVMGTFGYLAPEYASSGKLTDRSDVFSFGVVLLELITGRKPVDTSQPLGEESLVEWARPRLIEAIEKGDISEVVDPRLENDYVESEVYKMIETAASCVRHSALKRPRMVQVVRALDTRDDLSDLTNGVKVGQSRVYDSGQYSNEIRIFRRASEDSSDLGTNTGYYPSQDYATSHEYESESRAFNTSHRNH

SEQ ID NO: 81585 - protein, 531 aa, Arabidopsis thaliana
  peptide (1)..(531): Ceres Seq. ID no. 12660406
  misc_feature (1)..(530): Homolog of NCBI NO: 15223161 NR Description: putative protein kinase; protein id: At1g70460.1
  misc_feature (1)..(530): Homolog of NCBI NO: 15223161 NR Description: putative protein kinase; protein id: At1g70460.1
  misc_feature (138)..(525): Homolog of NCBI NO: 25518375 NR Description: hypothetical protein F5O8.10 - Arabidopsis
  misc_feature (1)..(148): Homolog of NCBI NO: 25518375 NR Description: hypothetical protein F5O8.10 - Arabidopsis
  misc_feature (1)..(322): Homolog of NCBI NO: 15220786 NR Description: Pto kinase interactor, putative; protein id:
  misc_feature (349)..(525): Homolog of NCBI NO: 15220786 NR Description: Pto kinase interactor, putative; protein id:
  misc_feature (1)..(502): Homolog of NCBI NO: 15240947 NR Description: putative protein; protein id: At5g38560.1, by cDNA: gi_15983496, supported by cDNA: gi_18700152 [Arabidopsis >gi|10176824|dbj|BAB10146.1| contains similarity to protein
  misc_feature (1)..(502): Homolog of NCBI NO: 15221470 NR Description: protein kinase, putative; protein id: supported by cDNA: gi_21280864 [Arabidopsis thaliana]
  misc_feature (1)..(503): Homolog of NCBI NO: 15222649 NR Description: Pto kinase interactor, putative; protein id: [Arabidopsis thaliana] >gi|25403034|pir||F86387 probable Pto
  misc_feature (1)..(508): Homolog of NCBI NO: 15230108 NR Description: protein kinase, putative; protein id: At3g24400.1
MLPLNPNSPGNPLQPLDSPLGGESNRVPSSSSSPSPPSLSGSNNHSGGSNRHNANSNGDGGTSQQSNESNYTEKTVIGIGIAGVLVILFIAGVFFVRRKQKKGSSSPRSNQYLPPANVSVNTEGFIHYRQKPGNGNSSAQNSSPDTNSLGNPKHGRGTPDSAVIGTSKIHFTYEELSQITEGFCKSFVVGEGGFGCVYKGILFEGKPVAIKQLKSVSAEGYREFKAEVEIISRVHHRHLVSLVGYCISEQHRFLIYEFVPNNTLDYHLHGKNLPVLEWSRRVRIAIGAAKGLAYLHEDCHPKIIHRDIKSSNILLDDEFEAQVADFGLARLNDTAQSHISTRVMGTFGYLAPEYASSGKLTDRSDVFSFGVVLLELITGRKPVDTSQPLGEESLVEWARPRLIEAIEKGDISEVVDPRLENDYVESEVYKMIETAASCVRHSALKRPRMVQVVRALDTRDDLSDLTNGVKVGQSRVYDSGQYSNEIRIFRRASEDSSDLGTNTGYYPSQDYATSHEYESESRAFNTSHRNH

SEQ ID NO: 81586 - DNA, 1347 bp, Arabidopsis thaliana
  misc_feature (1)..(1347): Ceres Seq. ID no. 12660411
atggcatcaagctcttgtctcaagcaagggtcagtgccaatgaacaatgtttgtgttacccctgaagcaacgtatgaggctgtggttgcagaccctaggcttttcatgacttccttggaaaggctgcactctctcttgggtactaaattcatggttccgatcataggaggaagagatttggacttgcacaagcttttcgttgaggtaacctcacgtggcggaatcaataagatacttaatgaaaggagatggaaagaagtaactgctacatttgtctttcctccaactgcaacaaacgcatcatatgttctgcgcaaatactacttctcgctgctgaacaattatgagcaaatctatttcttcagatctaatggtcagattcctccagactctatgcagagtccatctgctagaccatgctttattcagggagccattagaccttcacaagaacttcaagctctaacctttaccccacagcccaagatcaatactgcagaattcctcggaggatcacttgctggatcaaatgtggttggagtgatcgatggaaaattcgaaagtggttaccttgtaactgtaacaattggatcagagcagcttaaaggagttctgtatcagcttcttcctcagaacacagtttcttatcaaactccgcaacagagtcatggtgtcctcccgaacactctgaacatttctgccaatcctcagggggttgcaggaggagtaacaaaacgccgtaggagaagaaagaaatcagagatcaaaagacgtgatcctgatcatccaaaacccaacagaagtggttataacttctttttcgcagagcagcacgcgagacttaaaccgcttcatcctggtaaggatagggatatcagcaggatgattggtgagctatggaacaagctgaatgaagacgaaaaattgatttaccaagggaaggcaatggaggacaaagagcgatacagaactgaaatggaagattacagagagaaaaaaaagaatggacagctcataagcaacgctgttccgctgcaacagagacttccggagcaaaacgtagacatggctgaagctgaccttccaattgatgaagtcgaagaagatgacgaagaaggtgattcaagcggatcctcaggcgaaagcgagccacatgatgatcagagcatagaaactgatcctgaattggaagagccatctctgaatccctcaggtccaaacctaaaccctaatccgactgagatagtggtggctcctaaggagaaaaacggcgatgttgtgatggaaacatctccattgaagaaagccgatgagccaactgtggcggtgactgctgagcagaactga

SEQ ID NO: 81587 - protein, 448 aa, Arabidopsis thaliana
  peptide (1)..(448): Ceres Seq. ID no. 12660412
  misc_feature (26)..(138): Pfam Name: ARID/BRIGHT DNA binding domain Pfam Description: ARID/BRIGHT DNA binding domain
  misc_feature (1)..(448): Homolog of NCBI NO: 15220344 NR Description: unknown protein; protein id: At1g04880.1
  misc_feature (153)..(340): Homolog of NCBI NO: 18399977 NR Description: expressed protein; protein id: At3g13350.1, by cDNA: 38326., supported by cDNA: gi_13605512 [Arabidopsis
  misc_feature (23)..(134): Homolog of NCBI NO: 18399977 NR Description: expressed protein; protein id: At3g13350.1, by cDNA: 38326., supported by cDNA: gi_13605512 [Arabidopsis
  misc_feature (21)..(251): Homolog of NCBI NO: 15222957 NR Description: unknown protein; protein id: At1g76110.1, by cDNA: gi_20466327 [Arabidopsis thaliana]
  misc_feature (15)..(123): Homolog of NCBI NO: 15222755 NR Description: unknown protein; protein id: At1g55650.1
  misc_feature (224)..(330): Homolog of NCBI NO: 15222755 NR Description: unknown protein; protein id: At1g55650.1
  misc_feature (149)..(331): Homolog of NCBI NO: 15222957 NR Description: unknown protein; protein id: At1g76110.1, by cDNA: gi_20466327 [Arabidopsis thaliana]
  misc_feature (175)..(224): Homolog of NCBI NO: 15222755 NR Description: unknown protein; protein id: At1g55650.1
  misc_feature (35)..(153): Homolog of NCBI NO: 12840712 NR Description: unnamed protein product [Mus musculus]
  misc_feature (224)..(330): Homolog of NCBI NO: 25405992 NR Description: protein F20N2.8 [imported] - Arabidopsis thaliana
MASSSCLKQGSVPMNNVCVTPEATYEAVVADPRLFMTSLERLHSLLGTKFMVPIIGGRDLDLHKLFVEVTSRGGINKILNERRWKEVTATFVFPPTATNASYVLRKYYFSLLNNYEQIYFFRSNGQIPPDSMQSPSARPCFIQGAIRPSQELQALTFTPQPKINTAEFLGGSLAGSNVVGVIDGKFESGYLVTVTIGSEQLKGVLYQLLPQNTVSYQTPQQSHGVLPNTLNISANPQGVAGGVTKRRRRRKKSEIKRRDPDHPKPNRSGYNFFFAEQHARLKPLHPGKDRDISRMIGELWNKLNEDEKLIYQGKAMEDKERYRTEMEDYREKKKNGQLISNAVPLQQRLPEQNVDMAEADLPIDEVEEDDEEGDSSGSSGESEPHDDQSIETDPELEEPSLNPSGPNLNPNPTEIVVAPKEKNGDVVMETSPLKKADEPTVAVTAEQN

SEQ ID NO: 81588 - protein, 435 aa, Arabidopsis thaliana
  peptide (1)..(435): Ceres Seq. ID no. 12660413
  misc_feature (13)..(125): Pfam Name: ARID/BRIGHT DNA binding domain Pfam Description: ARID/BRIGHT DNA binding domain
  misc_feature (1)..(435): Homolog of NCBI NO: 15220344 NR Description: unknown protein; protein id: At1g04880.1
  misc_feature (140)..(327): Homolog of NCBI NO: 18399977 NR Description: expressed protein; protein id: At3g13350.1, by cDNA: 38326., supported by cDNA: gi_13605512 [Arabidopsis
  misc_feature (10)..(121): Homolog of NCBI NO: 18399977 NR Description: expressed protein; protein id: At3g13350.1, by cDNA: 38326., supported by cDNA: gi_13605512 [Arabidopsis
  misc_feature (8)..(238): Homolog of NCBI NO: 15222957 NR Description: unknown protein; protein id: At1g76110.1, by cDNA: gi_20466327 [Arabidopsis thaliana]
  misc_feature (2)..(110): Homolog of NCBI NO: 15222755 NR Description: unknown protein; protein id: At1g55650.1
  misc_feature (211)..(317): Homolog of NCBI NO: 15222755 NR Description: unknown protein; protein id: At1g55650.1
  misc_feature (136)..(318): Homolog of NCBI NO: 15222957 NR Description: unknown protein; protein id: At1g76110.1, by cDNA: gi_20466327 [Arabidopsis thaliana]
  misc_feature (162)..(211): Homolog of NCBI NO: 15222755 NR Description: unknown protein; protein id: At1g55650.1
  misc_feature (22)..(140): Homolog of NCBI NO: 12840712 NR Description: unnamed protein product [Mus musculus]
  misc_feature (211)..(317): Homolog of NCBI NO: 25405992 NR Description: protein F20N2.8 [imported] - Arabidopsis thaliana
MNNVCVTPEATYEAVVADPRLFMTSLERLHSLLGTKFMVPIIGGRDLDLHKLFVEVTSRGGINKILNERRWKEVTATFVFPPTATNASYVLRKYYFSLLNNYEQIYFFRSNGQIPPDSMQSPSARPCFIQGAIRPSQELQALTFTPQPKINTAEFLGGSLAGSNVVGVIDGKFESGYLVTVTIGSEQLKGVLYQLLPQNTVSYQTPQQSHGVLPNTLNISANPQGVAGGVTKRRRRRKKSEIKRRDPDHPKPNRSGYNFFFAEQHARLKPLHPGKDRDISRMIGELWNKLNEDEKLIYQGKAMEDKERYRTEMEDYREKKKNGQLISNAVPLQQRLPEQNVDMAEADLPIDEVEEDDEEGDSSGSSGESEPHDDQSIETDPELEEPSLNPSGPNLNPNPTEIVVAPKEKNGDVVMETSPLKKADEPTVAVTAEQN

SEQ ID NO: 81589 - protein, 413 aa, Arabidopsis thaliana
  peptide (1)..(413): Ceres Seq. ID no. 12660414
  misc_feature (1)..(103): Pfam Name: ARID/BRIGHT DNA binding domain Pfam Description: ARID/BRIGHT DNA binding domain
  misc_feature (1)..(413): Homolog of NCBI NO: 15220344 NR Description: unknown protein; protein id: At1g04880.1
  misc_feature (118)..(305): Homolog of NCBI NO: 18399977 NR Description: expressed protein; protein id: At3g13350.1, by cDNA: 38326., supported by cDNA: gi_13605512 [Arabidopsis
  misc_feature (1)..(99): Homolog of NCBI NO: 18399977 NR Description: expressed protein; protein id: At3g13350.1, by cDNA: 38326., supported by cDNA: gi_13605512 [Arabidopsis
  misc_feature (1)..(216): Homolog of NCBI NO: 15222957 NR Description: unknown protein; protein id: At1g76110.1, by cDNA: gi_20466327 [Arabidopsis thaliana]
  misc_feature (1)..(88): Homolog of NCBI NO: 15222755 NR Description: unknown protein; protein id: At1g55650.1
  misc_feature (189)..(295): Homolog of NCBI NO: 15222755 NR Description: unknown protein; protein id: At1g55650.1
  misc_feature (114)..(296): Homolog of NCBI NO: 15222957 NR Description: unknown protein; protein id: At1g76110.1, by cDNA: gi_20466327 [Arabidopsis thaliana]
  misc_feature (140)..(189): Homolog of NCBI NO: 15222755 NR Description: unknown protein; protein id: At1g55650.1
  misc_feature (1)..(118): Homolog of NCBI NO: 12840712 NR Description: unnamed protein product [Mus musculus]
  misc_feature (189)..(295): Homolog of NCBI NO: 25405992 NR Description: protein F20N2.8 [imported] - Arabidopsis thaliana
MTSLERLHSLLGTKFMVPIIGGRDLDLHKLFVEVTSRGGINKILNERRWKEVTATFVFPPTATNASYVLRKYYFSLLNNYEQIYFFRSNGQIPPDSMQSPSARPCFIQGAIRPSQELQALTFTPQPKINTAEFLGGSLAGSNVVGVIDGKFESGYLVTVTIGSEQLKGVLYQLLPQNTVSYQTPQQSHGVLPNTLNISANPQGVAGGVTKRRRRRKKSEIKRRDPDHPKPNRSGYNFFFAEQHARLKPLHPGKDRDISRMIGELWNKLNEDEKLIYQGKAMEDKERYRTEMEDYREKKKNGQLISNAVPLQQRLPEQNVDMAEADLPIDEVEEDDEEGDSSGSSGESEPHDDQSIETDPELEEPSLNPSGPNLNPNPTEIVVAPKEKNGDVVMETSPLKKADEPTVAVTAEQN

SEQ ID NO: 81590 - DNA, 648 bp, Arabidopsis thaliana
  misc_feature (1)..(648): Ceres Seq. ID no. 12660423
  misc_feature: MA Experiment ID: 20000185 Result: Up-regulated in Transcription
  misc_feature: MA Experiment 20000185 PARAMETER Experiment Name: At_Roots__P Parameter: Age (day) Value: 7 vs. 21
  misc_feature: MA Experiment 20000185 PARAMETER Experiment Name: At_Roots__P Parameter: Organism Value: A. thaliana
  misc_feature: MA Experiment 20000185 PARAMETER Experiment Name: At_Roots__P Parameter: Tissue Value: Roots vs. Whole Plant
  misc_feature: MA Experiment ID: 20000227 Result: Down-regulated in Transcription
  misc_feature: MA Experiment 20000227 PARAMETER Experiment Name: At_Root-Tips-vs-Tops_P Parameter: Tissue Value: Root Tips vs. Root Tops
  misc_feature: MA Experiment ID: 20001557 Result: Up-regulated in Transcription
  misc_feature: MA Experiment 20001557 PARAMETER Experiment Name: At_Drought_Soil_Dry_P Parameter: Age (day) Value: 27
  misc_feature: MA Experiment 20001557 PARAMETER Experiment Name: At_Drought_Soil_Dry_P Parameter: Organism Value: A. thaliana
  misc_feature: MA Experiment 20001557 PARAMETER Experiment Name: At_Drought_Soil_Dry_P Parameter: Plant Line Value: WS
  misc_feature: MA Experiment 20001557 PARAMETER Experiment Name: At_Drought_Soil_Dry_P Parameter: Post Timepoint (hr) Value: 3
  misc_feature: MA Experiment 20001557 PARAMETER Experiment Name: At_Drought_Soil_Dry_P Parameter: Post-Treatment Value: Re-Water vs. No Drought
  misc_feature: MA Experiment 20001557 PARAMETER Experiment Name: At_Drought_Soil_Dry_P Parameter: Timepoint (day) Value: 13
  misc_feature: MA Experiment 20001557 PARAMETER Experiment Name: At_Drought_Soil_Dry_P Parameter: Treatment Value: Drought vs. No Drought
  misc_feature: MA Experiment ID: 20001904 Result: Up-regulated in Transcription
  misc_feature: MA Experiment 20001904 PARAMETER Experiment Name: At_Drought_Reproduction_P Parameter: Age (day) Value: 37
  misc_feature: MA Experiment 20001904 PARAMETER Experiment Name: At_Drought_Reproduction_P Parameter: Organism Value: A. thaliana
  misc_feature: MA Experiment 20001904 PARAMETER Experiment Name: At_Drought_Reproduction_P Parameter: Plant Line Value: WS
  misc_feature: MA Experiment 20001904 PARAMETER Experiment Name: At_Drought_Reproduction_P Parameter: Timepoint (day) Value: 7
  misc_feature: MA Experiment 20001904 PARAMETER Experiment Name: At_Drought_Reproduction_P Parameter: Tissue Value: Rosettes
  misc_feature: MA Experiment 20001904 PARAMETER Experiment Name: At_Drought_Reproduction_P Parameter: Treatment Value: Drought vs. No Drought
  misc_feature: MA Experiment ID: 20001905 Result: Up-regulated in Transcription
  misc_feature: MA Experiment 20001905 PARAMETER Experiment Name: At_Drought_Reproduction_P Parameter: Age (day) Value: 40
  misc_feature: MA Experiment 20001905 PARAMETER Experiment Name: At_Drought_Reproduction_P Parameter: Organism Value: A. thaliana
  misc_feature: MA Experiment 20001905 PARAMETER Experiment Name: At_Drought_Reproduction_P Parameter: Plant Line Value: WS
  misc_feature: MA Experiment 20001905 PARAMETER Experiment Name: At_Drought_Reproduction_P Parameter: Timepoint (day) Value: 10
  misc_feature: MA Experiment 20001905 PARAMETER Experiment Name: At_Drought_Reproduction_P Parameter: Tissue Value: Rosettes
  misc_feature: MA Experiment 20001905 PARAMETER Experiment Name: At_Drought_Reproduction_P Parameter: Treatment Value: Drought vs. No Drought
  misc_feature: MA Experiment ID: 20001906 Result: Up-regulated in Transcription
  misc_feature: MA Experiment 20001906 PARAMETER Experiment Name: At_Drought_Reproduction_P Parameter: Age (day) Value: 35
  misc_feature: MA Experiment 20001906 PARAMETER Experiment Name: At_Drought_Reproduction_P Parameter: Organism Value: A. thaliana
  misc_feature: MA Experiment 20001906 PARAMETER Experiment Name: At_Drought_Reproduction_P Parameter: Plant Line Value: WS
  misc_feature: MA Experiment 20001906 PARAMETER Experiment Name: At_Drought_Reproduction_P Parameter: Timepoint (day) Value: 5
  misc_feature: MA Experiment 20001906 PARAMETER Experiment Name: At_Drought_Reproduction_P Parameter: Tissue Value: Siliques
  misc_feature: MA Experiment 20001906 PARAMETER Experiment Name: At_Drought_Reproduction_P Parameter: Treatment Value: Drought vs. No Drought
atgaagcttgtggagaagacgactactacagagcaggacaatggagaagatttctgccgcaccatcatcgaggtttccgaggttaacagaaacgtgtttcaggctccgggcggtgaagctgatccctttcgagttgtctccggcgaagaacttcacctaattccgccgctcaacttctccatggtcgataacggtatattccggtctggattccctgattcagctaacttctcctttctccagactctcggtctccgctcaatcatatacttgtgcccggagccctacccagagagcaatctccagttccttaaatccaatggaatcaggcttttccagtttggtattgaaggcaacaaggagccatttgtgaatattccagaccataaaatccgcatggcactgaaagtgcttctagatgagaaaaaccatcctgttctgattcattgtaagcgaggcaagcatcggaccggttgtcttgttggttgcttgaggaagctccagaaatggtgtttgacatcgatattcgacgagtaccaacgatttgcagcagcgaaagctagagtttcagatcaaagattcatggagatattcgatgtttccagcttcagtcatattccaatgtcattctcttgttccatcaggtaa

SEQ ID NO: 81591 - protein, 215 aa, Arabidopsis thaliana
  peptide (1)..(215): Ceres Seq. ID no. 12660424
  misc_feature (53)..(215): Pfam Name: Tyrosine phosphatase family Pfam Description: Tyrosine phosphatase family
  misc_feature (1)..(215): Homolog of NCBI NO: 15220383 NR Description: unkown protein; protein id: At1g05000.1
  misc_feature (11)..(215): Homolog of NCBI NO: 15225761 NR Description: unknown protein; protein id: At2g32960.1
  misc_feature (1)..(120): Homolog of NCBI NO: 30102538 NR Description: At2g32960 [Arabidopsis thaliana]
  misc_feature (115)..(215): Homolog of NCBI NO: 30102538 NR Description: At2g32960 [Arabidopsis thaliana]
  misc_feature (48)..(215): Homolog of NCBI NO: 18412419 NR Description: putative protein; protein id: At4g03960.1, by cDNA: 26983., supported by cDNA: gi_15810021, supported by gi_17981660 [Arabidopsis thaliana] >gi|15810022|gb|AAL06938.1|
  misc_feature (53)..(209): Homolog of NCBI NO: 15232985 NR Description: unknown protein; protein id: At3g02800.1 thaliana] >gi|6728982|gb|AAF26980.1|AC018363_25 unknown protein
  misc_feature (53)..(200): Homolog of NCBI NO: 21553927 NR Description: unknown [Arabidopsis thaliana]
  misc_feature (53)..(200): Homolog of NCBI NO: 15237359 NR Description: putative protein; protein id: At5g16480.1, by cDNA: 18232. [Arabidopsis thaliana] contains similarity to tyrosine phosphatase~gene_id:MQK4.21
  misc_feature (48)..(215): Homolog of NCBI NO: 7487406 NR Description: hypothetical protein T24M8.4 - Arabidopsis
  misc_feature (53)..(206): Homolog of NCBI NO: 6324296 NR Description: Synthetic interaction with Whi2; Siw14p cerevisiae] >gi|1730719|sp|P53965|YND2_YEAST HYPOTHETICAL 32.8 KD
MKLVEKTTTTEQDNGEDFCRTIIEVSEVNRNVFQAPGGEADPFRVVSGEELHLIPPLNFSMVDNGIFRSGFPDSANFSFLQTLGLRSIIYLCPEPYPESNLQFLKSNGIRLFQFGIEGNKEPFVNIPDHKIRMALKVLLDEKNHPVLIHCKRGKHRTGCLVGCLRKLQKWCLTSIFDEYQRFAAAKARVSDQRFMEIFDVSSFSHIPMSFSCSIR

SEQ ID NO: 81592 - protein, 155 aa, Arabidopsis thaliana
  peptide (1)..(155): Ceres Seq. ID no. 12660425
  misc_feature (1)..(155): Pfam Name: Tyrosine phosphatase family Pfam Description: Tyrosine phosphatase family
  misc_feature (1)..(155): Homolog of NCBI NO: 15220383 NR Description: unkown protein; protein id: At1g05000.1
  misc_feature (1)..(155): Homolog of NCBI NO: 15225761 NR Description: unknown protein; protein id: At2g32960.1
  misc_feature (1)..(60): Homolog of NCBI NO: 30102538 NR Description: At2g32960 [Arabidopsis thaliana]
  misc_feature (55)..(155): Homolog of NCBI NO: 30102538 NR Description: At2g32960 [Arabidopsis thaliana]
  misc_feature (1)..(155): Homolog of NCBI NO: 18412419 NR Description: putative protein; protein id: At4g03960.1, by cDNA: 26983., supported by cDNA: gi_15810021, supported by gi_17981660 [Arabidopsis thaliana] >gi|15810022|gb|AAL06938.1|
  misc_feature (1)..(149): Homolog of NCBI NO: 15232985 NR Description: unknown protein; protein id: At3g02800.1 thaliana] >gi|6728982|gb|AAF26980.1|AC018363_25 unknown protein
  misc_feature (1)..(140): Homolog of NCBI NO: 21553927 NR Description: unknown [Arabidopsis thaliana]
  misc_feature (1)..(140): Homolog of NCBI NO: 15237359 NR Description: putative protein; protein id: At5g16480.1, by cDNA: 18232. [Arabidopsis thaliana] contains similarity to tyrosine phosphatase~gene_id:MQK4.21
  misc_feature (1)..(155): Homolog of NCBI NO: 7487406 NR Description: hypothetical protein T24M8.4 - Arabidopsis
  misc_feature (1)..(146): Homolog of NCBI NO: 6324296 NR Description: Synthetic interaction with Whi2; Siw14p cerevisiae] >gi|1730719|sp|P53965|YND2_YEAST HYPOTHETICAL 32.8 KD
MVDNGIFRSGFPDSANFSFLQTLGLRSIIYLCPEPYPESNLQFLKSNGIRLFQFGIEGNKEPFVNIPDHKIRMALKVLLDEKNHPVLIHCKRGKHRTGCLVGCLRKLQKWCLTSIFDEYQRFAAAKARVSDQRFMEIFDVSSFSHIPMSFSCSIR

SEQ ID NO: 81593 - DNA, 1205 bp, Arabidopsis thaliana
  misc_feature (1)..(1205): Ceres Seq. ID no. 12660441
  misc_feature: MA Experiment ID: 20000166 Result: Up-regulated in Transcription
  misc_feature: MA Experiment 20000166 PARAMETER Experiment Name: At_100uM_ABA_P Parameter: Age (day) Value: 14
  misc_feature: MA Experiment 20000166 PARAMETER Experiment Name: At_100uM_ABA_P Parameter: Organism Value: A. thaliana
  misc_feature: MA Experiment 20000166 PARAMETER Experiment Name: At_100uM_ABA_P Parameter: Plant Line Value: WS
  misc_feature: MA Experiment 20000166 PARAMETER Experiment Name: At_100uM_ABA_P Parameter: Timepoint (hr) Value: 1
  misc_feature: MA Experiment 20000166 PARAMETER Experiment Name: At_100uM_ABA_P Parameter: Tissue Value: Aerial
  misc_feature: MA Experiment 20000166 PARAMETER Experiment Name: At_100uM_ABA_P Parameter: Treatment Value: 100uM ABA vs. No Treatment
  misc_feature: MA Experiment ID: 20000169 Result: Up-regulated in Transcription
  misc_feature: MA Experiment 20000169 PARAMETER Experiment Name: At_100uM_ABA_P Parameter: Age (day) Value: 14
  misc_feature: MA Experiment 20000169 PARAMETER Experiment Name: At_100uM_ABA_P Parameter: Organism Value: A. thaliana
  misc_feature: MA Experiment 20000169 PARAMETER Experiment Name: At_100uM_ABA_P Parameter: Plant Line Value: WS
  misc_feature: MA Experiment 20000169 PARAMETER Experiment Name: At_100uM_ABA_P Parameter: Timepoint (hr) Value: 6
  misc_feature: MA Experiment 20000169 PARAMETER Experiment Name: At_100uM_ABA_P Parameter: Tissue Value: Aerial
  misc_feature: MA Experiment 20000169 PARAMETER Experiment Name: At_100uM_ABA_P Parameter: Treatment Value: 100uM ABA vs. No Treatment
  misc_feature: MA Experiment ID: 20000182 Result: Up-regulated in Transcription
  misc_feature: MA Experiment 20000182 PARAMETER Experiment Name: At_2mM_SA_P Parameter: Age (day) Value: 14
  misc_feature: MA Experiment 20000182 PARAMETER Experiment Name: At_2mM_SA_P Parameter: Organism Value: A. thaliana
  misc_feature: MA Experiment 20000182 PARAMETER Experiment Name: At_2mM_SA_P Parameter: Plant Line Value: WS
  misc_feature: MA Experiment 20000182 PARAMETER Experiment Name: At_2mM_SA_P Parameter: Timepoint (hr) Value: 6
  misc_feature: MA Experiment 20000182 PARAMETER Experiment Name: At_2mM_SA_P Parameter: Tissue Value: Aerial
  misc_feature: MA Experiment 20000182 PARAMETER Experiment Name: At_2mM_SA_P Parameter: Treatment Value: 2mM SA vs. No Treatment
  misc_feature: MA Experiment ID: 20000184 Result: Down-regulated in Transcription
  misc_feature: MA Experiment 20000184 PARAMETER Experiment Name: At_Shoots__P Parameter: Age (day) Value: 7
  misc_feature: MA Experiment 20000184 PARAMETER Experiment Name: At_Shoots__P Parameter: Tissue Value: Shoots vs. Whole Plant
  misc_feature: MA Experiment ID: 20000234 Result: Down-regulated in Transcription
  misc_feature: MA Experiment 20000234 PARAMETER Experiment Name: At_Siliques_P Parameter: Age (day) Value: 21
  misc_feature: MA Experiment 20000234 PARAMETER Experiment Name: At_Siliques_P Parameter: Organism Value: A. thaliana
  misc_feature: MA Experiment 20000234 PARAMETER Experiment Name: At_Siliques_P Parameter: Plant Line Value: WS
  misc_feature: MA Experiment 20000234 PARAMETER Experiment Name: At_Siliques_P Parameter: Tissue Value: Less Than 5mm Siliques vs. Whole Plant
  misc_feature: MA Experiment ID: 20000267 Result: Up-regulated in Transcription
  misc_feature: MA Experiment 20000267 PARAMETER Experiment Name: At_Drought_P Parameter: Age (day) Value: 7
  misc_feature: MA Experiment 20000267 PARAMETER Experiment Name: At_Drought_P Parameter: Organism Value: A. thaliana
  misc_feature: MA Experiment 20000267 PARAMETER Experiment Name: At_Drought_P Parameter: Plant Line Value: WS
  misc_feature: MA Experiment 20000267 PARAMETER Experiment Name: At_Drought_P Parameter: Timepoint (hr) Value: 6
  misc_feature: MA Experiment 20000267 PARAMETER Experiment Name: At_Drought_P Parameter: Tissue Value: Whole Plant
  misc_feature: MA Experiment 20000267 PARAMETER Experiment Name: At_Drought_P Parameter: Treatment Value: Drought vs. No Drought
  misc_feature: MA Experiment ID: 20000436 Result: Up-regulated in Transcription
  misc_feature: MA Experiment 20000436 PARAMETER Experiment Name: At_Drought_P Parameter: Age (day) Value: 7
  misc_feature: MA Experiment 20000436 PARAMETER Experiment Name: At_Drought_P Parameter: Organism Value: A. thaliana
  misc_feature: MA Experiment 20000436 PARAMETER Experiment Name: At_Drought_P Parameter: Plant Line Value: WS
  misc_feature: MA Experiment 20000436 PARAMETER Experiment Name: At_Drought_P Parameter: Timepoint (hr) Value: 12
  misc_feature: MA Experiment 20000436 PARAMETER Experiment Name: At_Drought_P Parameter: Tissue Value: Whole Plant
  misc_feature: MA Experiment 20000436 PARAMETER Experiment Name: At_Drought_P Parameter: Treatment Value: Drought vs. No Drought
  misc_feature: MA Experiment ID: 20000437 Result: Up-regulated in Transcription
  misc_feature: MA Experiment 20000437 PARAMETER Experiment Name: At_Drought_P Parameter: Age (day) Value: 8
  misc_feature: MA Experiment 20000437 PARAMETER Experiment Name: At_Drought_P Parameter: Organism Value: A. thaliana
  misc_feature: MA Experiment 20000437 PARAMETER Experiment Name: At_Drought_P Parameter: Plant Line Value: WS
  misc_feature: MA Experiment 20000437 PARAMETER Experiment Name: At_Drought_P Parameter: Timepoint (hr) Value: 24
  misc_feature: MA Experiment 20000437 PARAMETER Experiment Name: At_Drought_P Parameter: Tissue Value: Whole Plant
  misc_feature: MA Experiment 20000437 PARAMETER Experiment Name: At_Drought_P Parameter: Treatment Value: Drought vs. No Drought
  misc_feature: MA Experiment ID: 20000441 Result: Down-regulated in Transcription
  misc_feature: MA Experiment 20000441 PARAMETER Experiment Name: At_1uM_BR-BRZ__P Parameter: Tissue Value: Shoot Apices
  misc_feature: MA Experiment 20000441 PARAMETER Experiment Name: At_1uM_BR-BRZ__P Parameter: Treatment Value: 1uM BR vs. No Treatment
  misc_feature: MA Experiment ID: 20000453 Result: Up-regulated in Transcription
  misc_feature: MA Experiment 20000453 PARAMETER Experiment Name: At_100uM_ABA_P Parameter: Age (day) Value: 15
  misc_feature: MA Experiment 20000453 PARAMETER Experiment Name: At_100uM_ABA_P Parameter: Organism Value: A. thaliana
  misc_feature: MA Experiment 20000453 PARAMETER Experiment Name: At_100uM_ABA_P Parameter: Plant Line Value: WS
  misc_feature: MA Experiment 20000453 PARAMETER Experiment Name: At_100uM_ABA_P Parameter: Timepoint (hr) Value: 24
  misc_feature: MA Experiment 20000453 PARAMETER Experiment Name: At_100uM_ABA_P Parameter: Tissue Value: Aerial
  misc_feature: MA Experiment 20000453 PARAMETER Experiment Name: At_100uM_ABA_P Parameter: Treatment Value: 100uM ABA vs. No Treatment
  misc_feature: MA Experiment ID: 20000456 Result: Up-regulated in Transcription
  misc_feature: MA Experiment 20000456 PARAMETER Experiment Name: At_100uM_BA_P Parameter: Age (day) Value: 14
  misc_feature: MA Experiment 20000456 PARAMETER Experiment Name: At_100uM_BA_P Parameter: Organism Value: A. thaliana
  misc_feature: MA Experiment 20000456 PARAMETER Experiment Name: At_100uM_BA_P Parameter: Plant Line Value: WS
  misc_feature: MA Experiment 20000456 PARAMETER Experiment Name: At_100uM_BA_P Parameter: Timepoint (hr) Value: 6
  misc_feature: MA Experiment 20000456 PARAMETER Experiment Name: At_100uM_BA_P Parameter: Tissue Value: Aerial
  misc_feature: MA Experiment 20000456 PARAMETER Experiment Name: At_100uM_BA_P Parameter: Treatment Value: 100uM BA vs. No Treatment
  misc_feature: MA Experiment ID: 20001554 Result: Up-regulated in Transcription
  misc_feature: MA Experiment 20001554 PARAMETER Experiment Name: At_Drought_Soil_Dry_P Parameter: Age (day) Value: 21
  misc_feature: MA Experiment 20001554 PARAMETER Experiment Name: At_Drought_Soil_Dry_P Parameter: Organism Value: A. thaliana
  misc_feature: MA Experiment 20001554 PARAMETER Experiment Name: At_Drought_Soil_Dry_P Parameter: Plant Line Value: WS
  misc_feature: MA Experiment 20001554 PARAMETER Experiment Name: At_Drought_Soil_Dry_P Parameter: Post Timepoint (hr) Value: None
  misc_feature: MA Experiment 20001554 PARAMETER Experiment Name: At_Drought_Soil_Dry_P Parameter: Post-Treatment Value: None
  misc_feature: MA Experiment 20001554 PARAMETER Experiment Name: At_Drought_Soil_Dry_P Parameter: Timepoint (day) Value: 7
  misc_feature: MA Experiment 20001554 PARAMETER Experiment Name: At_Drought_Soil_Dry_P Parameter: Treatment Value: Drought vs. No Drought
  misc_feature: MA Experiment ID: 20001556 Result: Up-regulated in Transcription
  misc_feature: MA Experiment 20001556 PARAMETER Experiment Name: At_Drought_Soil_Dry_P Parameter: Age (day) Value: 26
  misc_feature: MA Experiment 20001556 PARAMETER Experiment Name: At_Drought_Soil_Dry_P Parameter: Organism Value: A. thaliana
  misc_feature: MA Experiment 20001556 PARAMETER Experiment Name: At_Drought_Soil_Dry_P Parameter: Plant Line Value: WS
  misc_feature: MA Experiment 20001556 PARAMETER Experiment Name: At_Drought_Soil_Dry_P Parameter: Post Timepoint (hr) Value: None
  misc_feature: MA Experiment 20001556 PARAMETER Experiment Name: At_Drought_Soil_Dry_P Parameter: Post-Treatment Value: None
  misc_feature: MA Experiment 20001556 PARAMETER Experiment Name: At_Drought_Soil_Dry_P Parameter: Timepoint (day) Value: 12
  misc_feature: MA Experiment 20001556 PARAMETER Experiment Name: At_Drought_Soil_Dry_P Parameter: Treatment Value: Drought vs. No Drought
  misc_feature: MA Experiment ID: 20001557 Result: Up-regulated in Transcription
  misc_feature: MA Experiment 20001557 PARAMETER Experiment Name: At_Drought_Soil_Dry_P Parameter: Age (day) Value: 27
  misc_feature: MA Experiment 20001557 PARAMETER Experiment Name: At_Drought_Soil_Dry_P Parameter: Organism Value: A. thaliana
  misc_feature: MA Experiment 20001557 PARAMETER Experiment Name: At_Drought_Soil_Dry_P Parameter: Plant Line Value: WS
  misc_feature: MA Experiment 20001557 PARAMETER Experiment Name: At_Drought_Soil_Dry_P Parameter: Post Timepoint (hr) Value: 3
  misc_feature: MA Experiment 20001557 PARAMETER Experiment Name: At_Drought_Soil_Dry_P Parameter: Post-Treatment Value: Re-Water vs. No Drought
  misc_feature: MA Experiment 20001557 PARAMETER Experiment Name: At_Drought_Soil_Dry_P Parameter: Timepoint (day) Value: 13
  misc_feature: MA Experiment 20001557 PARAMETER Experiment Name: At_Drought_Soil_Dry_P Parameter: Treatment Value: Drought vs. No Drought
  misc_feature: MA Experiment ID: 20001558 Result: Up-regulated in Transcription
  misc_feature: MA Experiment 20001558 PARAMETER Experiment Name: At_Drought_Soil_Dry_P Parameter: Age (day) Value: 27
  misc_feature: MA Experiment 20001558 PARAMETER Experiment Name: At_Drought_Soil_Dry_P Parameter: Organism Value: A. thaliana
  misc_feature: MA Experiment 20001558 PARAMETER Experiment Name: At_Drought_Soil_Dry_P Parameter: Plant Line Value: WS
  misc_feature: MA Experiment 20001558 PARAMETER Experiment Name: At_Drought_Soil_Dry_P Parameter: Post Timepoint (hr) Value: 6
  misc_feature: MA Experiment 20001558 PARAMETER Experiment Name: At_Drought_Soil_Dry_P Parameter: Post-Treatment Value: Re-Water vs. No Drought
  misc_feature: MA Experiment 20001558 PARAMETER Experiment Name: At_Drought_Soil_Dry_P Parameter: Timepoint (day) Value: 13
  misc_feature: MA Experiment 20001558 PARAMETER Experiment Name: At_Drought_Soil_Dry_P Parameter: Treatment Value: Drought vs. No Drought
  misc_feature: MA Experiment ID: 20001904 Result: Up-regulated in Transcription
  misc_feature: MA Experiment 20001904 PARAMETER Experiment Name: At_Drought_Reproduction_P Parameter: Age (day) Value: 37
  misc_feature: MA Experiment 20001904 PARAMETER Experiment Name: At_Drought_Reproduction_P Parameter: Organism Value: A. thaliana
  misc_feature: MA Experiment 20001904 PARAMETER Experiment Name: At_Drought_Reproduction_P Parameter: Plant Line Value: WS
  misc_feature: MA Experiment 20001904 PARAMETER Experiment Name: At_Drought_Reproduction_P Parameter: Timepoint (day) Value: 7
  misc_feature: MA Experiment 20001904 PARAMETER Experiment Name: At_Drought_Reproduction_P Parameter: Tissue Value: Rosettes
  misc_feature: MA Experiment 20001904 PARAMETER Experiment Name: At_Drought_Reproduction_P Parameter: Treatment Value: Drought vs. No Drought
  misc_feature: MA Experiment ID: 20001910 Result: Up-regulated in Transcription
  misc_feature: MA Experiment 20001910 PARAMETER Experiment Name: At_Drought_Reproduction_P Parameter: Age (day) Value: 37
  misc_feature: MA Experiment 20001910 PARAMETER Experiment Name: At_Drought_Reproduction_P Parameter: Organism Value: A. thaliana
  misc_feature: MA Experiment 20001910 PARAMETER Experiment Name: At_Drought_Reproduction_P Parameter: Plant Line Value: WS
  misc_feature: MA Experiment 20001910 PARAMETER Experiment Name: At_Drought_Reproduction_P Parameter: Timepoint (day) Value: 7
  misc_feature: MA Experiment 20001910 PARAMETER Experiment Name: At_Drought_Reproduction_P Parameter: Tissue Value: Flowers
  misc_feature: MA Experiment 20001910 PARAMETER Experiment Name: At_Drought_Reproduction_P Parameter: Treatment Value: Drought vs. No Drought
  misc_feature: MA Experiment ID: 20001911 Result: Up-regulated in Transcription
  misc_feature: MA Experiment 20001911 PARAMETER Experiment Name: At_Drought_Reproduction_P Parameter: Age (day) Value: 40
  misc_feature: MA Experiment 20001911 PARAMETER Experiment Name: At_Drought_Reproduction_P Parameter: Organism Value: A. thaliana
  misc_feature: MA Experiment 20001911 PARAMETER Experiment Name: At_Drought_Reproduction_P Parameter: Plant Line Value: WS
  misc_feature: MA Experiment 20001911 PARAMETER Experiment Name: At_Drought_Reproduction_P Parameter: Timepoint (day) Value: 10
  misc_feature: MA Experiment 20001911 PARAMETER Experiment Name: At_Drought_Reproduction_P Parameter: Tissue Value: Flowers
  misc_feature: MA Experiment 20001911 PARAMETER Experiment Name: At_Drought_Reproduction_P Parameter: Treatment Value: Drought vs. No Drought
aaacattcaaaaaaaaaaaaaaaccattttttttttcttactcaaatcttttttagtatcattctccaaatgaattggactagaggaaaaactttaggccgtggctcaacggccaccgtttccgccgccacttgtcacgaatccggcgaaacactcgccgtaaaatccgccgagtttcaccggtcggagttcttgcaaagagaagccaagattctctcctcattaaactctccgtacgtcatcggatacagaggatgcgaaattacgagagagcccttccacaacaacggagaagctacgacttacagtcttcttatggagtacgcgccgtacggaacgttgaccgacgtagcgaccaagaacggcggcttcattgacgaggctcgggtcgtgaagtacacgcgccagatacttcttgggttggagtacattcataactcaaagggaattgcgcattgcgacattaagggaagcaacgtgttggtcggagagaacggagaagccaagatcgctgatttcgggtgtgcgaaatgggttgaaccggaaataaccgaaccggttagaggaacgccggcgttcatggctccagaagcggcgcgtggagagagacaagggaaagagagtgatatatgggcggtgggttgtacggtgatagagatggttaccgggtctcagccgtggattggggcggattttaccgacccggtttcggttctttaccgggtcggatatttaggtgagttaccagagctgccttgctcgcttacggaacaagcaaaggattttttaggaaagtgtttgaaaaaagaagcgacggagagatggacagcgagtcaactactaaaccatccgttcttggttaataaagaaccggaattggtaaccggtttggttacgaactcaccgacaagtgtgacggatcaaatgttctggagatcagtggaagaggaggtgtcagaggaccgttcaagctggtgggaatgtcacgaggatgagagaattggagtgctaagctggattggtcatgttgtggtggagtccacatgggacttggacggtgaggattggatcacggttcgacggaattagtcggttcacatgaaggagcgttgattattcgattcaattagtgaagatattgttttagtttagtagaagttgaggtttagagattttcatgtacatttcctaattcatcatttttt

SEQ ID NO: 81594 - protein, 362 aa, Arabidopsis thaliana
  peptide (1)..(362): Ceres Seq. ID no. 12660442
  misc_feature (26)..(286): Pfam Name: Protein kinase domain Pfam Description: Protein kinase domain
  misc_feature (24)..(362): Homolog of NCBI NO: 15220416 NR Description: putative NPK1-related MAP kinase; protein id: supported by cDNA: gi_17381165, supported by cDNA: gi_20259424
  misc_feature (24)..(360): Homolog of NCBI NO: 15225692 NR Description: putative protein kinase; protein id: At2g32510.1
  misc_feature (22)..(362): Homolog of NCBI NO: 15236903 NR Description: putative NPK1-related protein kinase; protein id:
  misc_feature (22)..(362): Homolog of NCBI NO: 19423926 NR Description: unknown protein [Arabidopsis thaliana]
  misc_feature (23)..(331): Homolog of NCBI NO: 15240456 NR Description: putative protein; protein id: At5g55090.1
  misc_feature (26)..(359): Homolog of NCBI NO: 34911472 NR Description: NPK1-related protein kinase-like protein [Oryza
  misc_feature (26)..(362): Homolog of NCBI NO: 37530786 NR Description: putative NPK1-related protein kinase [Oryza
  misc_feature (26)..(362): Homolog of NCBI NO: 37530788 NR Description: putative NPK1-related protein kinase [Oryza
  misc_feature (19)..(357): Homolog of NCBI NO: 34911466 NR Description: NPK1-related protein kinase-like protein [Oryza
  misc_feature (28)..(359): Homolog of NCBI NO: 34911474 NR Description: NPK1-related protein kinase-like protein [Oryza
KHSKKKKNHFFFLTQIFFSIILQMNWTRGKTLGRGSTATVSAATCHESGETLAVKSAEFHRSEFLQREAKILSSLNSPYVIGYRGCEITREPFHNNGEATTYSLLMEYAPYGTLTDVATKNGGFIDEARVVKYTRQILLGLEYIHNSKGIAHCDIKGSNVLVGENGEAKIADFGCAKWVEPEITEPVRGTPAFMAPEAARGERQGKESDIWAVGCTVIEMVTGSQPWIGADFTDPVSVLYRVGYLGELPELPCSLTEQAKDFLGKCLKKEATERWTASQLLNHPFLVNKEPELVTGLVTNSPTSVTDQMFWRSVEEEVSEDRSSWWECHEDERIGVLSWIGHVVVESTWDLDGEDWITVRRN

SEQ ID NO: 81595 - protein, 339 aa, Arabidopsis thaliana
  peptide (1)..(339): Ceres Seq. ID no. 12660443
  misc_feature (3)..(263): Pfam Name: Protein kinase domain Pfam Description: Protein kinase domain
  misc_feature (1)..(339): Homolog of NCBI NO: 15220416 NR Description: putative NPK1-related MAP kinase; protein id: supported by cDNA: gi_17381165, supported by cDNA: gi_20259424
  misc_feature (1)..(337): Homolog of NCBI NO: 15225692 NR Description: putative protein kinase; protein id: At2g32510.1
  misc_feature (1)..(339): Homolog of NCBI NO: 15236903 NR Description: putative NPK1-related protein kinase; protein id:
  misc_feature (1)..(339): Homolog of NCBI NO: 19423926 NR Description: unknown protein [Arabidopsis thaliana]
  misc_feature (1)..(308): Homolog of NCBI NO: 15240456 NR Description: putative protein; protein id: At5g55090.1
  misc_feature (3)..(336): Homolog of NCBI NO: 34911472 NR Description: NPK1-related protein kinase-like protein [Oryza
  misc_feature (3)..(339): Homolog of NCBI NO: 37530786 NR Description: putative NPK1-related protein kinase [Oryza
  misc_feature (3)..(339): Homolog of NCBI NO: 37530788 NR Description: putative NPK1-related protein kinase [Oryza
  misc_feature (1)..(334): Homolog of NCBI NO: 34911466 NR Description: NPK1-related protein kinase-like protein [Oryza
  misc_feature (5)..(336): Homolog of NCBI NO: 34911474 NR Description: NPK1-related protein kinase-like protein [Oryza
MNWTRGKTLGRGSTATVSAATCHESGETLAVKSAEFHRSEFLQREAKILSSLNSPYVIGYRGCEITREPFHNNGEATTYSLLMEYAPYGTLTDVATKNGGFIDEARVVKYTRQILLGLEYIHNSKGIAHCDIKGSNVLVGENGEAKIADFGCAKWVEPEITEPVRGTPAFMAPEAARGERQGKESDIWAVGCTVIEMVTGSQPWIGADFTDPVSVLYRVGYLGELPELPCSLTEQAKDFLGKCLKKEATERWTASQLLNHPFLVNKEPELVTGLVTNSPTSVTDQMFWRSVEEEVSEDRSSWWECHEDERIGVLSWIGHVVVESTWDLDGEDWITVRRN

SEQ ID NO: 81596 - protein, 257 aa, Arabidopsis thaliana
  peptide (1)..(257): Ceres Seq. ID no. 12660444
  misc_feature (1)..(181): Pfam Name: Protein kinase domain Pfam Description: Protein kinase domain
  misc_feature (1)..(257): Homolog of NCBI NO: 15220416 NR Description: putative NPK1-related MAP kinase; protein id: supported by cDNA: gi_17381165, supported by cDNA: gi_20259424
  misc_feature (1)..(255): Homolog of NCBI NO: 15225692 NR Description: putative protein kinase; protein id: At2g32510.1
  misc_feature (1)..(257): Homolog of NCBI NO: 15236903 NR Description: putative NPK1-related protein kinase; protein id:
  misc_feature (1)..(257): Homolog of NCBI NO: 19423926 NR Description: unknown protein [Arabidopsis thaliana]
  misc_feature (1)..(226): Homolog of NCBI NO: 15240456 NR Description: putative protein; protein id: At5g55090.1
  misc_feature (1)..(254): Homolog of NCBI NO: 34911472 NR Description: NPK1-related protein kinase-like protein [Oryza
  misc_feature (1)..(257): Homolog of NCBI NO: 37530786 NR Description: putative NPK1-related protein kinase [Oryza
  misc_feature (1)..(257): Homolog of NCBI NO: 37530788 NR Description: putative NPK1-related protein kinase [Oryza
  misc_feature (1)..(252): Homolog of NCBI NO: 34911466 NR Description: NPK1-related protein kinase-like protein [Oryza
  misc_feature (1)..(254): Homolog of NCBI NO: 34911474 NR Description: NPK1-related protein kinase-like protein [Oryza
MEYAPYGTLTDVATKNGGFIDEARVVKYTRQILLGLEYIHNSKGIAHCDIKGSNVLVGENGEAKIADFGCAKWVEPEITEPVRGTPAFMAPEAARGERQGKESDIWAVGCTVIEMVTGSQPWIGADFTDPVSVLYRVGYLGELPELPCSLTEQAKDFLGKCLKKEATERWTASQLLNHPFLVNKEPELVTGLVTNSPTSVTDQMFWRSVEEEVSEDRSSWWECHEDERIGVLSWIGHVVVESTWDLDGEDWITVRRN

SEQ ID NO: 81597 - DNA, 1209 bp, Arabidopsis thaliana
  misc_feature (1)..(1209): Ceres Seq. ID no. 12660445
  misc_feature: MA Experiment ID: 20000437 Result: Up-regulated in Transcription
  misc_feature: MA Experiment 20000437 PARAMETER Experiment Name: At_Drought_P Parameter: Age (day) Value: 8
  misc_feature: MA Experiment 20000437 PARAMETER Experiment Name: At_Drought_P Parameter: Organism Value: A. thaliana
  misc_feature: MA Experiment 20000437 PARAMETER Experiment Name: At_Drought_P Parameter: Plant Line Value: WS
  misc_feature: MA Experiment 20000437 PARAMETER Experiment Name: At_Drought_P Parameter: Timepoint (hr) Value: 24
  misc_feature: MA Experiment 20000437 PARAMETER Experiment Name: At_Drought_P Parameter: Tissue Value: Whole Plant
  misc_feature: MA Experiment 20000437 PARAMETER Experiment Name: At_Drought_P Parameter: Treatment Value: Drought vs. No Drought
  misc_feature: MA Experiment ID: 20001451 Result: Up-regulated in Transcription
  misc_feature: MA Experiment 20001451 PARAMETER Experiment Name: At_Far-red-induction_P Parameter: Age (day) Value: 7
  misc_feature: MA Experiment 20001451 PARAMETER Experiment Name: At_Far-red-induction_P Parameter: Light Value: Far-red vs. White
  misc_feature: MA Experiment 20001451 PARAMETER Experiment Name: At_Far-red-induction_P Parameter: Organism Value: A. thaliana
  misc_feature: MA Experiment 20001451 PARAMETER Experiment Name: At_Far-red-induction_P Parameter: Plant Line Value: Columbia
  misc_feature: MA Experiment 20001451 PARAMETER Experiment Name: At_Far-red-induction_P Parameter: Timepoint (hr) Value: 24
  misc_feature: MA Experiment 20001451 PARAMETER Experiment Name: At_Far-red-induction_P Parameter: Tissue Value: Whole Plant
  misc_feature: MA Experiment ID: 20001757 Result: Down-regulated in Transcription
  misc_feature: MA Experiment 20001757 PARAMETER Experiment Name: At_50mM_NH4NO3_L-to-H_P Parameter: Timepoint (hr) Value: 6
  misc_feature: MA Experiment 20001757 PARAMETER Experiment Name: At_50mM_NH4NO3_L-to-H_P Parameter: Tissue Value: Leaf
  misc_feature: MA Experiment 20001757 PARAMETER Experiment Name: At_50mM_NH4NO3_L-to-H_P Parameter: Treatment Value: 50mM NH4NO3 vs 100mM Mannitol
atggcgaccgccgccgccaccactaccgcttccgctgccggaaccttgaccagagcctccacctaccccaacacctattccaattccaatcccaatgccgacgcctcctccatgccctccaccaacaccaccaccgtgccccaaacctcctcctcctccacctccagcaccaccaccgccaccgagtcctcctccggcaccaccgccgagtcctcctccagcaccaaatccgccaccatgtccggatccaccacccacaccacctcctccgccaccgcctcctccaccgcctccaccagcacctcctcctactccacctcctactccacctccagcaccaaaaccactaccatgaccggatccaccattagcaccaccgcctccgccgcccccacctccaccgcctccaccagcacctcctcctactccacctcctactccacctccagcaccaaaaccactaccgtgaccggatccaccattggcaccaccgcctccgccgcccccacctccacctccacctccaccgccaactcctccgccagctccaccaccaatccctcctccggctccaaacccactgccatgaccggaaccaccgccaacacctccccctccgcccccaccagctccccctccaccaccaattcctccagcaccgccgcctacacctcctccggctccaaacccaccaccgtgaccagaaccaccgccaacacctcctcctccgcctccaccagctccgcctcccccaccaattcctccaccagcacccccaccaactcctccgccggctccaaacccaccaccatgaccggaaccaccaccaatacctcctccaccaccaccaccagctccgcctccaccaccaagtcctcctccagctccgccaccaactcctcctccggctccaaaccctccaccttgtccaccaccaccgcctataccgccaccacttcctctcccaccgccgaaccctccaccaccaccgcgtccaaaccggccacgtccagcacacctccggccccacctacaatcatcgtctctaaacctcgcaggacccaccacagatccatcccccaaaacacattccacacacgaattaagcaaaaccaaagaaagaagcaaacaagtaacgcccttaagttccatctacaaggagagagagagagaaataacaataaaatgtcttctcttgtttgcttgtga

SEQ ID NO: 81598 - protein, 402 aa, Arabidopsis thaliana
  peptide (1)..(402): Ceres Seq. ID no. 12660446
  misc_feature (3)..(354): Pfam Name: Equine herpesvirus glycoprotein gp2 Pfam Description: Equine herpesvirus glycoprotein gp2
  misc_feature (1)..(402): Homolog of NCBI NO: 25406831 NR Description: hypothetical protein [imported] - Arabidopsis >gi|2388584|gb|AAB71465.1| EST gb|ATTS1136 comes from this gene.
  misc_feature (3)..(363): Homolog of NCBI NO: 30313663 NR Description: sublingual apomucin [Mus musculus]
  misc_feature (2)..(342): Homolog of NCBI NO: 30313663 NR Description: sublingual apomucin [Mus musculus]
  misc_feature (3)..(338): Homolog of NCBI NO: 30313663 NR Description: sublingual apomucin [Mus musculus]
  misc_feature (2)..(363): Homolog of NCBI NO: 30313663 NR Description: sublingual apomucin [Mus musculus]
  misc_feature (5)..(343): Homolog of NCBI NO: 30313663 NR Description: sublingual apomucin [Mus musculus]
  misc_feature (2)..(343): Homolog of NCBI NO: 30313663 NR Description: sublingual apomucin [Mus musculus]
  misc_feature (3)..(345): Homolog of NCBI NO: 30313663 NR Description: sublingual apomucin [Mus musculus]
  misc_feature (3)..(361): Homolog of NCBI NO: 30313663 NR Description: sublingual apomucin [Mus musculus]
  misc_feature (19)..(343): Homolog of NCBI NO: 30313663 NR Description: sublingual apomucin [Mus musculus]
MATAAATTTASAAGTLTRASTYPNTYSNSNPNADASSMPSTNTTTVPQTSSSSTSSTTTATESSSGTTAESSSSTKSATMSGSTTHTTSSATASSTASTSTSSYSTSYSTSSTKTTTMTGSTISTTASAAPTSTASTSTSSYSTSYSTSSTKTTTVTGSTIGTTASAAPTSTSTSTANSSASSTTNPSSGSKPTAMTGTTANTSPSAPTSSPSTTNSSSTAAYTSSGSKPTTVTRTTANTSSSASTSSASPTNSSTSTPTNSSAGSKPTTMTGTTTNTSSTTTTSSASTTKSSSSSATNSSSGSKPSTLSTTTAYTATTSSPTAEPSTTTASKPATSSTPPAPPTIIVSKPRRTHHRSIPQNTFHTRIKQNQRKKQTSNALKFHLQGERERNNNKMSSLVCL

SEQ ID NO: 81599 - protein, 365 aa, Arabidopsis thaliana
  peptide (1)..(365): Ceres Seq. ID no. 12660447
  misc_feature (1)..(317): Pfam Name: Equine herpesvirus glycoprotein gp2 Pfam Description: Equine herpesvirus glycoprotein gp2
  misc_feature (1)..(365): Homolog of NCBI NO: 25406831 NR Description: hypothetical protein [imported] - Arabidopsis >gi|2388584|gb|AAB71465.1| EST gb|ATTS1136 comes from this gene.
  misc_feature (1)..(326): Homolog of NCBI NO: 30313663 NR Description: sublingual apomucin [Mus musculus]
  misc_feature (1)..(305): Homolog of NCBI NO: 30313663 NR Description: sublingual apomucin [Mus musculus]
  misc_feature (1)..(301): Homolog of NCBI NO: 30313663 NR Description: sublingual apomucin [Mus musculus]
  misc_feature (1)..(326): Homolog of NCBI NO: 30313663 NR Description: sublingual apomucin [Mus musculus]
  misc_feature (1)..(306): Homolog of NCBI NO: 30313663 NR Description: sublingual apomucin [Mus musculus]
  misc_feature (1)..(306): Homolog of NCBI NO: 30313663 NR Description: sublingual apomucin [Mus musculus]
  misc_feature (1)..(308): Homolog of NCBI NO: 30313663 NR Description: sublingual apomucin [Mus musculus]
  misc_feature (1)..(324): Homolog of NCBI NO: 30313663 NR Description: sublingual apomucin [Mus musculus]
  misc_feature (1)..(306): Homolog of NCBI NO: 30313663 NR Description: sublingual apomucin [Mus musculus]
MPSTNTTTVPQTSSSSTSSTTTATESSSGTTAESSSSTKSATMSGSTTHTTSSATASSTASTSTSSYSTSYSTSSTKTTTMTGSTISTTASAAPTSTASTSTSSYSTSYSTSSTKTTTVTGSTIGTTASAAPTSTSTSTANSSASSTTNPSSGSKPTAMTGTTANTSPSAPTSSPSTTNSSSTAAYTSSGSKPTTVTRTTANTSSSASTSSASPTNSSTSTPTNSSAGSKPTTMTGTTTNTSSTTTTSSASTTKSSSSSATNSSSGSKPSTLSTTTAYTATTSSPTAEPSTTTASKPATSSTPPAPPTIIVSKPRRTHHRSIPQNTFHTRIKQNQRKKQTSNALKFHLQGERERNNNKMSSLVCL

SEQ ID NO: 81600 - protein, 323 aa, Arabidopsis thaliana
  peptide (1)..(323): Ceres Seq. ID no. 12660448
  misc_feature (1)..(275): Pfam Name: Equine herpesvirus glycoprotein gp2 Pfam Description: Equine herpesvirus glycoprotein gp2
  misc_feature (1)..(323): Homolog of NCBI NO: 25406831 NR Description: hypothetical protein [imported] - Arabidopsis >gi|2388584|gb|AAB71465.1| EST gb|ATTS1136 comes from this gene.
  misc_feature (1)..(284): Homolog of NCBI NO: 30313663 NR Description: sublingual apomucin [Mus musculus]
  misc_feature (1)..(263): Homolog of NCBI NO: 30313663 NR Description: sublingual apomucin [Mus musculus]
  misc_feature (1)..(259): Homolog of NCBI NO: 30313663 NR Description: sublingual apomucin [Mus musculus]
  misc_feature (1)..(284): Homolog of NCBI NO: 30313663 NR Description: sublingual apomucin [Mus musculus]
  misc_feature (1)..(264): Homolog of NCBI NO: 30313663 NR Description: sublingual apomucin [Mus musculus]
  misc_feature (1)..(264): Homolog of NCBI NO: 30313663 NR Description: sublingual apomucin [Mus musculus]
  misc_feature (1)..(266): Homolog of NCBI NO: 30313663 NR Description: sublingual apomucin [Mus musculus]
  misc_feature (1)..(282): Homolog of NCBI NO: 30313663 NR Description: sublingual apomucin [Mus musculus]
  misc_feature (1)..(264): Homolog of NCBI NO: 30313663 NR Description: sublingual apomucin [Mus musculus]
MSGSTTHTTSSATASSTASTSTSSYSTSYSTSSTKTTTMTGSTISTTASAAPTSTASTSTSSYSTSYSTSSTKTTTVTGSTIGTTASAAPTSTSTSTANSSASSTTNPSSGSKPTAMTGTTANTSPSAPTSSPSTTNSSSTAAYTSSGSKPTTVTRTTANTSSSASTSSASPTNSSTSTPTNSSAGSKPTTMTGTTTNTSSTTTTSSASTTKSSSSSATNSSSGSKPSTLSTTTAYTATTSSPTAEPSTTTASKPATSSTPPAPPTIIVSKPRRTHHRSIPQNTFHTRIKQNQRKKQTSNALKFHLQGERERNNNKMSSLVCL

SEQ ID NO: 81601 - DNA, 1482 bp, Arabidopsis thaliana
  misc_feature (1)..(1482): Ceres Seq. ID no. 12660455
  misc_feature: MA Experiment ID: 20000180 Result: Down-regulated in Transcription
  misc_feature: MA Experiment 20000180 PARAMETER Experiment Name: At_Germinating_Seeds_P Parameter: Age (hr) Value: 24 vs. 0
  misc_feature: MA Experiment 20000180 PARAMETER Experiment Name: At_Germinating_Seeds_P Parameter: Tissue Value: Germinating Seeds
  misc_feature: MA Experiment ID: 20000184 Result: Down-regulated in Transcription
  misc_feature: MA Experiment 20000184 PARAMETER Experiment Name: At_Shoots__P Parameter: Age (day) Value: 7
  misc_feature: MA Experiment 20000184 PARAMETER Experiment Name: At_Shoots__P Parameter: Tissue Value: Shoots vs. Whole Plant
  misc_feature: MA Experiment ID: 20001248 Result: Up-regulated in Transcription
  misc_feature: MA Experiment 20001248 PARAMETER Experiment Name: At_Far-red-induction_P Parameter: Age (day) Value: 7
  misc_feature: MA Experiment 20001248 PARAMETER Experiment Name: At_Far-red-induction_P Parameter: Light Value: Far-red vs. White
  misc_feature: MA Experiment 20001248 PARAMETER Experiment Name: At_Far-red-induction_P Parameter: Organism Value: A. thaliana
  misc_feature: MA Experiment 20001248 PARAMETER Experiment Name: At_Far-red-induction_P Parameter: Plant Line Value: Columbia
  misc_feature: MA Experiment 20001248 PARAMETER Experiment Name: At_Far-red-induction_P Parameter: Timepoint (hr) Value: 4
  misc_feature: MA Experiment 20001248 PARAMETER Experiment Name: At_Far-red-induction_P Parameter: Tissue Value: Whole Plant
  misc_feature: MA Experiment ID: 20001450 Result: Up-regulated in Transcription
  misc_feature: MA Experiment 20001450 PARAMETER Experiment Name: At_Far-red-induction_P Parameter: Age (day) Value: 7
  misc_feature: MA Experiment 20001450 PARAMETER Experiment Name: At_Far-red-induction_P Parameter: Light Value: Far-red vs. White
  misc_feature: MA Experiment 20001450 PARAMETER Experiment Name: At_Far-red-induction_P Parameter: Organism Value: A. thaliana
  misc_feature: MA Experiment 20001450 PARAMETER Experiment Name: At_Far-red-induction_P Parameter: Plant Line Value: Columbia
  misc_feature: MA Experiment 20001450 PARAMETER Experiment Name: At_Far-red-induction_P Parameter: Timepoint (hr) Value: 8
  misc_feature: MA Experiment 20001450 PARAMETER Experiment Name: At_Far-red-induction_P Parameter: Tissue Value: Whole Plant
  misc_feature: MA Experiment ID: 20001557 Result: Down-regulated in Transcription
  misc_feature: MA Experiment 20001557 PARAMETER Experiment Name: At_Drought_Soil_Dry_P Parameter: Age (day) Value: 27
  misc_feature: MA Experiment 20001557 PARAMETER Experiment Name: At_Drought_Soil_Dry_P Parameter: Organism Value: A. thaliana
  misc_feature: MA Experiment 20001557 PARAMETER Experiment Name: At_Drought_Soil_Dry_P Parameter: Plant Line Value: WS
  misc_feature: MA Experiment 20001557 PARAMETER Experiment Name: At_Drought_Soil_Dry_P Parameter: Post Timepoint (hr) Value: 3
  misc_feature: MA Experiment 20001557 PARAMETER Experiment Name: At_Drought_Soil_Dry_P Parameter: Post-Treatment Value: Re-Water vs. No Drought
  misc_feature: MA Experiment 20001557 PARAMETER Experiment Name: At_Drought_Soil_Dry_P Parameter: Timepoint (day) Value: 13
  misc_feature: MA Experiment 20001557 PARAMETER Experiment Name: At_Drought_Soil_Dry_P Parameter: Treatment Value: Drought vs. No Drought
  misc_feature: MA Experiment ID: 20001558 Result: Down-regulated in Transcription
  misc_feature: MA Experiment 20001558 PARAMETER Experiment Name: At_Drought_Soil_Dry_P Parameter: Age (day) Value: 27
  misc_feature: MA Experiment 20001558 PARAMETER Experiment Name: At_Drought_Soil_Dry_P Parameter: Organism Value: A. thaliana
  misc_feature: MA Experiment 20001558 PARAMETER Experiment Name: At_Drought_Soil_Dry_P Parameter: Plant Line Value: WS
  misc_feature: MA Experiment 20001558 PARAMETER Experiment Name: At_Drought_Soil_Dry_P Parameter: Post Timepoint (hr) Value: 6
  misc_feature: MA Experiment 20001558 PARAMETER Experiment Name: At_Drought_Soil_Dry_P Parameter: Post-Treatment Value: Re-Water vs. No Drought
  misc_feature: MA Experiment 20001558 PARAMETER Experiment Name: At_Drought_Soil_Dry_P Parameter: Timepoint (day) Value: 13
  misc_feature: MA Experiment 20001558 PARAMETER Experiment Name: At_Drought_Soil_Dry_P Parameter: Treatment Value: Drought vs. No Drought
gaaaagtctatggcggagacaacgagttggatcccagtatggtttcctctgatggtgttgggatgttttggtctgaattggttggtcaggaaggtgaatgtgtggctctatgagtccagccttggggagaacaggcactatctgccaccaggtgatttgggttggcctttcattggcaacatgttgtcttttctcagagctttcaagacttctgaccctgactccttcactcgcactttaatcaaaaggtatggacctaaaggtatatataaagcacacatgttcgggaacccaagtataatagtaacaacatcagacacttgccggcgtgtgctgacagacgatgatgcgttcaagccaggttggccaacatctacaatggaactcattggaaggaagtcattcgttggtatctctttcgaggaacacaagcgtctcaggcgtttgactgctgctccagtcaatggccatgaagccctctctacttatataccgtacattgaagaaaacgttattactgttctggacaagtggaccaaaatgggagagttcgagttcttgactcatctgcgtaagctcacctttaggatcatcatgtacatctttctcagctctgagagtgagaatgtaatggatgcattggaacgagaatatacagctcttaactatggggttcgagcaatggcagtcaatattcctggatttgcttatcatagagcactcaaggcgaggaaaacacttgtagctgcctttcagtccatagtgactgagcgcagaaatcaaaggaagcagaacattttatcaaataagaaagatatgttagacaatcttcttaatgttaaagatgaagatggaaaaactttggatgacgaagagattatcgatgttcttctgatgtatcttaatgccggtcatgaatcctctggccacaccattatgtgggctaccgtttttctacaagaacaccctgaggttctacaaagagcaaaggctgaacaagaaatgatcctgaaaagtaggcctgaaggtcaaaaaggtctatctctaaaagaaacccggaaaatggaattcttatcgcaggttgtcgatgagacacttcgagtcataacattctcactcactgcttttcgagaggcaaagactgacgttgaaatgaatggctatttgatcccaaaaggttggaaggttttgacatggtttagggatgtccacatcgaccctgaagtctttccagatccaagaaaatttgatcctgctagatgggataatggtttcgtaccaaaagctggtgcgttccttccttttggtgctggaagccatctatgcccgggaaatgatctggctaagctcgagatttcaatttttcttcatcatttcctcctcaaatatcaggtgaaacggagcaaccccgaatgtccagtgatgtatctgcctcataccagaccaactgataattgcttggcaagaattagttatcagtaa

SEQ ID NO: 81602 - protein, 493 aa, Arabidopsis thaliana
  peptide (1)..(493): Ceres Seq. ID no. 12660456
  misc_feature (49)..(490): Pfam Name: Cytochrome P450 Pfam Description: Cytochrome P450
  misc_feature (4)..(493): Homolog of NCBI NO: 15220438 NR Description: putative cytochrome P450; protein id: supported by cDNA: gi_13021852 [Arabidopsis thaliana]
  misc_feature (4)..(493): Homolog of NCBI NO: 13021853 NR Description: ent-kaurenoic acid hydroxylase [Arabidopsis
  misc_feature (4)..(491): Homolog of NCBI NO: 15225685 NR Description: ent-kaurenoic acid oxidase (cytochrome P450 protein id: At2g32440.1, supported by cDNA: gi_13021855
  misc_feature (4)..(491): Homolog of NCBI NO: 13021856 NR Description: ent-kaurenoic acid hydroxylase [Arabidopsis
EKSMAETTSWIPVWFPLMVLGCFGLNWLVRKVNVWLYESSLGENRHYLPPGDLGWPFIGNMLSFLRAFKTSDPDSFTRTLIKRYGPKGIYKAHMFGNPSIIVTTSDTCRRVLTDDDAFKPGWPTSTMELIGRKSFVGISFEEHKRLRRLTAAPVNGHEALSTYIPYIEENVITVLDKWTKMGEFEFLTHLRKLTFRIIMYIFLSSESENVMDALEREYTALNYGVRAMAVNIPGFAYHRALKARKTLVAAFQSIVTERRNQRKQNILSNKKDMLDNLLNVKDEDGKTLDDEEIIDVLLMYLNAGHESSGHTIMWATVFLQEHPEVLQRAKAEQEMILKSRPEGQKGLSLKETRKMEFLSQVVDETLRVITFSLTAFREAKTDVEMNGYLIPKGWKVLTWFRDVHIDPEVFPDPRKFDPARWDNGFVPKAGAFLPFGAGSHLCPGNDLAKLEISIFLHHFLLKYQVKRSNPECPVMYLPHTRPTDNCLARISYQ

SEQ ID NO: 81603 - protein, 490 aa, Arabidopsis thaliana
  peptide (1)..(490): Ceres Seq. ID no. 12660457
  misc_feature (46)..(487): Pfam Name: Cytochrome P450 Pfam Description: Cytochrome P450
  misc_feature (1)..(490): Homolog of NCBI NO: 15220438 NR Description: putative cytochrome P450; protein id: supported by cDNA: gi_13021852 [Arabidopsis thaliana]
  misc_feature (1)..(490): Homolog of NCBI NO: 13021853 NR Description: ent-kaurenoic acid hydroxylase [Arabidopsis
  misc_feature (1)..(488): Homolog of NCBI NO: 15225685 NR Description: ent-kaurenoic acid oxidase (cytochrome P450 protein id: At2g32440.1, supported by cDNA: gi_13021855
  misc_feature (1)..(488): Homolog of NCBI NO: 13021856 NR Description: ent-kaurenoic acid hydroxylase [Arabidopsis
MAETTSWIPVWFPLMVLGCFGLNWLVRKVNVWLYESSLGENRHYLPPGDLGWPFIGNMLSFLRAFKTSDPDSFTRTLIKRYGPKGIYKAHMFGNPSIIVTTSDTCRRVLTDDDAFKPGWPTSTMELIGRKSFVGISFEEHKRLRRLTAAPVNGHEALSTYIPYIEENVITVLDKWTKMGEFEFLTHLRKLTFRIIMYIFLSSESENVMDALEREYTALNYGVRAMAVNIPGFAYHRALKARKTLVAAFQSIVTERRNQRKQNILSNKKDMLDNLLNVKDEDGKTLDDEEIIDVLLMYLNAGHESSGHTIMWATVFLQEHPEVLQRAKAEQEMILKSRPEGQKGLSLKETRKMEFLSQVVDETLRVITFSLTAFREAKTDVEMNGYLIPKGWKVLTWFRDVHIDPEVFPDPRKFDPARWDNGFVPKAGAFLPFGAGSHLCPGNDLAKLEISIFLHHFLLKYQVKRSNPECPVMYLPHTRPTDNCLARISYQ

SEQ ID NO: 81604 - protein, 476 aa, Arabidopsis thaliana
  peptide (1)..(476): Ceres Seq. ID no. 12660458
  misc_feature (32)..(473): Pfam Name: Cytochrome P450 Pfam Description: Cytochrome P450
  misc_feature (1)..(476): Homolog of NCBI NO: 15220438 NR Description: putative cytochrome P450; protein id: supported by cDNA: gi_13021852 [Arabidopsis thaliana]
  misc_feature (1)..(476): Homolog of NCBI NO: 13021853 NR Description: ent-kaurenoic acid hydroxylase [Arabidopsis
  misc_feature (1)..(474): Homolog of NCBI NO: 15225685 NR Description: ent-kaurenoic acid oxidase (cytochrome P450 protein id: At2g32440.1, supported by cDNA: gi_13021855
  misc_feature (1)..(474): Homolog of NCBI NO: 13021856 NR Description: ent-kaurenoic acid hydroxylase [Arabidopsis
MVLGCFGLNWLVRKVNVWLYESSLGENRHYLPPGDLGWPFIGNMLSFLRAFKTSDPDSFTRTLIKRYGPKGIYKAHMFGNPSIIVTTSDTCRRVLTDDDAFKPGWPTSTMELIGRKSFVGISFEEHKRLRRLTAAPVNGHEALSTYIPYIEENVITVLDKWTKMGEFEFLTHLRKLTFRIIMYIFLSSESENVMDALEREYTALNYGVRAMAVNIPGFAYHRALKARKTLVAAFQSIVTERRNQRKQNILSNKKDMLDNLLNVKDEDGKTLDDEEIIDVLLMYLNAGHESSGHTIMWATVFLQEHPEVLQRAKAEQEMILKSRPEGQKGLSLKETRKMEFLSQVVDETLRVITFSLTAFREAKTDVEMNGYLIPKGWKVLTWFRDVHIDPEVFPDPRKFDPARWDNGFVPKAGAFLPFGAGSHLCPGNDLAKLEISIFLHHFLLKYQVKRSNPECPVMYLPHTRPTDNCLARISYQ

SEQ ID NO: 81605 - DNA, 483 bp, Arabidopsis thaliana
  misc_feature (1)..(483): Ceres Seq. ID no. 12660459
  misc_feature: MA Experiment ID: 20000184 Result: Up-regulated in Transcription
  misc_feature: MA Experiment 20000184 PARAMETER Experiment Name: At_Shoots__P Parameter: Age (day) Value: 7
  misc_feature: MA Experiment 20000184 PARAMETER Experiment Name: At_Shoots__P Parameter: Tissue Value: Shoots vs. Whole Plant
atgggagctttggggaagctgatcaacatctctctgtttttcttcttcgcactgatggctatcaatgtaccgcttctcaacggtcaaatactatttcctggaatctacccgaagctcctcaccgatctgaaagactggtacagctctgagttcaacgattacctcttcatagagaagcctcttttcttcgttggactcgtctggcatgagatcatattcctattgcctctctccattgtcaacatctacgccattcttaccagcaagtcgtggtttggtaccacttctttgttgtatggagcttctttcctcacttccatggctgctatacttggagacatgataggttcagagaaggtgactaacaaattgctattggcgtatttgcctttcgtgggtcttgcaattctggcaatgcttcgtggtctggtgacttgttcgaccaaaagatcaactgttttagccaggagaaagcttgcttga

SEQ ID NO: 81606 - protein, 160 aa, Arabidopsis thaliana
  peptide (1)..(160): Ceres Seq. ID no. 12660460
  misc_feature (1)..(160): Homolog of NCBI NO: 15220447 NR Description: hypothetical protein; protein id: At1g05220.1
  misc_feature (1)..(160): Homolog of NCBI NO: 18390494 NR Description: expressed protein; protein id: At1g05210.1, by cDNA: 29808. [Arabidopsis thaliana] >gi|25372732|pir||E86186
  misc_feature (1)..(160): Homolog of NCBI NO: 18402955 NR Description: expressed protein; protein id: At2g32380.1, by cDNA: 9671. [Arabidopsis thaliana] >gi|25372728|pir||D84732
  misc_feature (1)..(152): Homolog of NCBI NO: 28411944 NR Description: OSJNBa0027N13.37 [Oryza sativa (japonica
  misc_feature (1)..(155): Homolog of NCBI NO: 28411943 NR Description: OSJNBa0027N13.35 [Oryza sativa (japonica
  misc_feature (1)..(111): Homolog of NCBI NO: 19526880 NR Description: RIKEN cDNA 1810014L12 [Mus musculus]
  misc_feature (30)..(111): Homolog of NCBI NO: 27688749 NR Description: similar to RIKEN cDNA 1810014L12 [Mus musculus] norvegicus] >gi|27688753|ref|XP_220742.1| similar to RIKEN cDNA
  misc_feature (14)..(115): Homolog of NCBI NO: 2135212 NR Description: gene MAC30 protein - human (fragment)
MGALGKLINISLFFFFALMAINVPLLNGQILFPGIYPKLLTDLKDWYSSEFNDYLFIEKPLFFVGLVWHEIIFLLPLSIVNIYAILTSKSWFGTTSLLYGASFLTSMAAILGDMIGSEKVTNKLLLAYLPFVGLAILAMLRGLVTCSTKRSTVLARRKLA

SEQ ID NO: 81607 - protein, 142 aa, Arabidopsis thaliana
  peptide (1)..(142): Ceres Seq. ID no. 12660461
  misc_feature (1)..(142): Homolog of NCBI NO: 15220447 NR Description: hypothetical protein; protein id: At1g05220.1
  misc_feature (1)..(142): Homolog of NCBI NO: 18390494 NR Description: expressed protein; protein id: At1g05210.1, by cDNA: 29808. [Arabidopsis thaliana] >gi|25372732|pir||E86186
  misc_feature (1)..(142): Homolog of NCBI NO: 18402955 NR Description: expressed protein; protein id: At2g32380.1, by cDNA: 9671. [Arabidopsis thaliana] >gi|25372728|pir||D84732
  misc_feature (1)..(134): Homolog of NCBI NO: 28411944 NR Description: OSJNBa0027N13.37 [Oryza sativa (japonica
  misc_feature (1)..(137): Homolog of NCBI NO: 28411943 NR Description: OSJNBa0027N13.35 [Oryza sativa (japonica
  misc_feature (1)..(93): Homolog of NCBI NO: 19526880 NR Description: RIKEN cDNA 1810014L12 [Mus musculus]
  misc_feature (12)..(93): Homolog of NCBI NO: 27688749 NR Description: similar to RIKEN cDNA 1810014L12 [Mus musculus] norvegicus] >gi|27688753|ref|XP_220742.1| similar to RIKEN cDNA
  misc_feature (1)..(97): Homolog of NCBI NO: 2135212 NR Description: gene MAC30 protein - human (fragment)
MAINVPLLNGQILFPGIYPKLLTDLKDWYSSEFNDYLFIEKPLFFVGLVWHEIIFLLPLSIVNIYAILTSKSWFGTTSLLYGASFLTSMAAILGDMIGSEKVTNKLLLAYLPFVGLAILAMLRGLVTCSTKRSTVLARRKLA

SEQ ID NO: 81608 - DNA, 1258 bp, Arabidopsis thaliana
  misc_feature (1)..(1258): Ceres Seq. ID no. 12660466
  misc_feature: MA Experiment ID: 20000180 Result: Up-regulated in Transcription
  misc_feature: MA Experiment 20000180 PARAMETER Experiment Name: At_Germinating_Seeds_P Parameter: Age (hr) Value: 24 vs. 0
  misc_feature: MA Experiment 20000180 PARAMETER Experiment Name: At_Germinating_Seeds_P Parameter: Tissue Value: Germinating Seeds
  misc_feature: MA Experiment ID: 20000185 Result: Up-regulated in Transcription
  misc_feature: MA Experiment 20000185 PARAMETER Experiment Name: At_Roots__P Parameter: Age (day) Value: 7 vs. 21
  misc_feature: MA Experiment 20000185 PARAMETER Experiment Name: At_Roots__P Parameter: Organism Value: A. thaliana
  misc_feature: MA Experiment 20000185 PARAMETER Experiment Name: At_Roots__P Parameter: Tissue Value: Roots vs. Whole Plant
  misc_feature: MA Experiment ID: 20000268 Result: Down-regulated in Transcription
  misc_feature: MA Experiment 20000268 PARAMETER Experiment Name: At_100mM_NaCl__P Parameter: Age (day) Value: 14
  misc_feature: MA Experiment 20000268 PARAMETER Experiment Name: At_100mM_NaCl__P Parameter: Organism Value: A. thaliana
  misc_feature: MA Experiment 20000268 PARAMETER Experiment Name: At_100mM_NaCl__P Parameter: Plant Line Value: WS
  misc_feature: MA Experiment 20000268 PARAMETER Experiment Name: At_100mM_NaCl__P Parameter: Timepoint (hr) Value: 6
  misc_feature: MA Experiment 20000268 PARAMETER Experiment Name: At_100mM_NaCl__P Parameter: Tissue Value: Whole Plant
  misc_feature: MA Experiment 20000268 PARAMETER Experiment Name: At_100mM_NaCl__P Parameter: Treatment Value: 100mM NaCl vs. No Treatment
  misc_feature: MA Experiment ID: 20000437 Result: Down-regulated in Transcription
  misc_feature: MA Experiment 20000437 PARAMETER Experiment Name: At_Drought_P Parameter: Age (day) Value: 8
  misc_feature: MA Experiment 20000437 PARAMETER Experiment Name: At_Drought_P Parameter: Organism Value: A. thaliana
  misc_feature: MA Experiment 20000437 PARAMETER Experiment Name: At_Drought_P Parameter: Plant Line Value: WS
  misc_feature: MA Experiment 20000437 PARAMETER Experiment Name: At_Drought_P Parameter: Timepoint (hr) Value: 24
  misc_feature: MA Experiment 20000437 PARAMETER Experiment Name: At_Drought_P Parameter: Tissue Value: Whole Plant
  misc_feature: MA Experiment 20000437 PARAMETER Experiment Name: At_Drought_P Parameter: Treatment Value: Drought vs. No Drought
  misc_feature: MA Experiment ID: 20000439 Result: Up-regulated in Transcription
  misc_feature: MA Experiment 20000439 PARAMETER Experiment Name: At_Roots__P Parameter: Age (day) Value: 14 vs. 21
  misc_feature: MA Experiment 20000439 PARAMETER Experiment Name: At_Roots__P Parameter: Organism Value: A. thaliana
  misc_feature: MA Experiment 20000439 PARAMETER Experiment Name: At_Roots__P Parameter: Tissue Value: Roots vs. Whole Plant
  misc_feature: MA Experiment ID: 20000527 Result: Down-regulated in Transcription
  misc_feature: MA Experiment 20000527 PARAMETER Experiment Name: At_10percent_PEG_P Parameter: Age (day) Value: 20
  misc_feature: MA Experiment 20000527 PARAMETER Experiment Name: At_10percent_PEG_P Parameter: Organism Value: A. thaliana
  misc_feature: MA Experiment 20000527 PARAMETER Experiment Name: At_10percent_PEG_P Parameter: Plant Line Value: WS
  misc_feature: MA Experiment 20000527 PARAMETER Experiment Name: At_10percent_PEG_P Parameter: Timepoint (day) Value: 20
  misc_feature: MA Experiment 20000527 PARAMETER Experiment Name: At_10percent_PEG_P Parameter: Tissue Value: Whole Plant
  misc_feature: MA Experiment 20000527 PARAMETER Experiment Name: At_10percent_PEG_P Parameter: Treatment Value: 10percent PEG vs. No Treatment
  misc_feature: MA Experiment ID: 20001450 Result: Down-regulated in Transcription
  misc_feature: MA Experiment 20001450 PARAMETER Experiment Name: At_Far-red-induction_P Parameter: Age (day) Value: 7
  misc_feature: MA Experiment 20001450 PARAMETER Experiment Name: At_Far-red-induction_P Parameter: Light Value: Far-red vs. White
  misc_feature: MA Experiment 20001450 PARAMETER Experiment Name: At_Far-red-induction_P Parameter: Organism Value: A. thaliana
  misc_feature: MA Experiment 20001450 PARAMETER Experiment Name: At_Far-red-induction_P Parameter: Plant Line Value: Columbia
  misc_feature: MA Experiment 20001450 PARAMETER Experiment Name: At_Far-red-induction_P Parameter: Timepoint (hr) Value: 8
  misc_feature: MA Experiment 20001450 PARAMETER Experiment Name: At_Far-red-induction_P Parameter: Tissue Value: Whole Plant
atctccaaagctcgttctcaccttacttggcaaacactcaacgaagaaaggagagagagacggtaatggcgatcaagaacattctcgcccttgtggttcttcttagcgtggttggagtttctgtcgccattccacagttgcttgacctcgactactaccggtctaagtgtcccaaggcagaggaaattgttcgtggtgtcacagtacaatatgtttctcgccagaaaacccttgccgctaaacttctaaggatgcatttccatgattgtttcgtcagaggatgtgatggttccgttcttctgaaatctgcaaagaatgatgcggaaagagacgctgtccccaacctgaccctgaaaggttatgaagtggtggatgcggccaagacagcgctggagaggaagtgtcctaatctcatttcttgcgctgatgttcttgccttggtcgccagagatgccgtggcagtgatcgggggaccatggtggccggttccattgggccgcagggatggacgcatctcgaaattgaacgatgcattgctaaatttaccatctcctttcgccgacataaagacgctgaagaagaactttgccaacaagggtcttaacgctaaagaccttgtggttctctcagggggtcacaccattggaatctctagttgcgctctcgtcaacagtcgtctctacaacttcacaggaaagggcgattctgacccatccatgaaccctagctacgtgagggaattgaagagaaagtgcccgcctacagatttcagaacctcactgaacatggacccaggcagtgcgttgacattcgacactcactacttcaaggtcgtggctcagaagaaagggctcttcacatctgactctacgcttctcgatgacattgagaccaaaaactacgttcagactcaggccattctccctcctgtgttttcttctttcaataaagatttctccgattccatggtcaaacttggtttcgtccaaattcttaccggcaaaaatggtgagatcaggaagagatgcgccttccctaactaatttggatcgatcagaccgggtttcggatgattttgagtctacacgtttttctctgcttattttctttctttttcttttttctttcacggaagtttgagctttggtgttgtcttcttctgtttcttccatgaataattgttttttgttgagtaactttacatttgtattctttacggtgactgtgttttgtaatggaaaaagtttgtttcgaattc

SEQ ID NO: 81609 - protein, 346 aa, Arabidopsis thaliana
  peptide (1)..(346): Ceres Seq. ID no. 12660467
  misc_feature (63)..(307): Pfam Name: Peroxidase Pfam Description: Peroxidase
  misc_feature (22)..(346): Homolog of NCBI NO: 18390498 NR Description: peroxidase, putative; protein id: At1g05240.1 thaliana] >gi|18390500|ref|NP_563733.1| peroxidase, putative; id: At1g05250.1 [Arabidopsis thaliana]
  misc_feature (23)..(346): Homolog of NCBI NO: 15242237 NR Description: peroxidase, putative; protein id: At5g15180.1, by cDNA: gi_18176158 [Arabidopsis thaliana] Peroxidase 56 precursor (Atperox P56) (ATP33)
  misc_feature (22)..(346): Homolog of NCBI NO: 15232058 NR Description: peroxidase, putative; protein id: At3g01190.1, by cDNA: 37597., supported by cDNA: gi_17065467, supported by gi_20148488 [Arabidopsis thaliana]
  misc_feature (28)..(346): Homolog of NCBI NO: 7259219 NR Description: peroxidase [Spinacia oleracea]
  misc_feature (28)..(346): Homolog of NCBI NO: 7433079 NR Description: peroxidase (EC 1.11.1.7) precursor prx10 -
  misc_feature (28)..(346): Homolog of NCBI NO: 15220463 NR Description: peroxidase, putative; protein id: At1g05260.1, by cDNA: 114862., supported by cDNA: gi_2738253 [Arabidopsis >gi|25453190|sp|O23044|PER3_ARATH Peroxidase 3 precursor (Atperox
  misc_feature (28)..(346): Homolog of NCBI NO: 21536908 NR Description: putative peroxidase [Arabidopsis thaliana]
  misc_feature (14)..(342): Homolog of NCBI NO: 34915480 NR Description: putative peroxidase [Oryza sativa (japonica
  misc_feature (27)..(346): Homolog of NCBI NO: 39546236 NR Description: OSJNBa0089N06.6 [Oryza sativa (japonica
  misc_feature (19)..(346): Homolog of NCBI NO: 27261041 NR Description: putative peroxidase [Oryza sativa (japonica
LQSSFSPYLANTQRRKERETVMAIKNILALVVLLSVVGVSVAIPQLLDLDYYRSKCPKAEEIVRGVTVQYVSRQKTLAAKLLRMHFHDCFVRGCDGSVLLKSAKNDAERDAVPNLTLKGYEVVDAAKTALERKCPNLISCADVLALVARDAVAVIGGPWWPVPLGRRDGRISKLNDALLNLPSPFADIKTLKKNFANKGLNAKDLVVLSGGHTIGISSCALVNSRLYNFTGKGDSDPSMNPSYVRELKRKCPPTDFRTSLNMDPGSALTFDTHYFKVVAQKKGLFTSDSTLLDDIETKNYVQTQAILPPVFSSFNKDFSDSMVKLGFVQILTGKNGEIRKRCAFPN

SEQ ID NO: 81610 - protein, 325 aa, Arabidopsis thaliana
  peptide (1)..(325): Ceres Seq. ID no. 12660468
  misc_feature (42)..(286): Pfam Name: Peroxidase Pfam Description: Peroxidase
  misc_feature (1)..(325): Homolog of NCBI NO: 18390498 NR Description: peroxidase, putative; protein id: At1g05240.1 thaliana] >gi|18390500|ref|NP_563733.1| peroxidase, putative; id: At1g05250.1 [Arabidopsis thaliana]
  misc_feature (2)..(325): Homolog of NCBI NO: 15242237 NR Description: peroxidase, putative; protein id: At5g15180.1, by cDNA: gi_18176158 [Arabidopsis thaliana] Peroxidase 56 precursor (Atperox P56) (ATP33)
  misc_feature (1)..(325): Homolog of NCBI NO: 15232058 NR Description: peroxidase, putative; protein id: At3g01190.1, by cDNA: 37597., supported by cDNA: gi_17065467, supported by gi_20148488 [Arabidopsis thaliana]
  misc_feature (7)..(325): Homolog of NCBI NO: 7259219 NR Description: peroxidase [Spinacia oleracea]
  misc_feature (7)..(325): Homolog of NCBI NO: 7433079 NR Description: peroxidase (EC 1.11.1.7) precursor prx10 -
  misc_feature (7)..(325): Homolog of NCBI NO: 15220463 NR Description: peroxidase, putative; protein id: At1g05260.1, by cDNA: 114862., supported by cDNA: gi_2738253 [Arabidopsis >gi|25453190|sp|O23044|PER3_ARATH Peroxidase 3 precursor (Atperox
  misc_feature (7)..(325): Homolog of NCBI NO: 21536908 NR Description: putative peroxidase [Arabidopsis thaliana]
  misc_feature (1)..(321): Homolog of NCBI NO: 34915480 NR Description: putative peroxidase [Oryza sativa (japonica
  misc_feature (6)..(325): Homolog of NCBI NO: 39546236 NR Description: OSJNBa0089N06.6 [Oryza sativa (japonica
  misc_feature (1)..(325): Homolog of NCBI NO: 27261041 NR Description: putative peroxidase [Oryza sativa (japonica
MAIKNILALVVLLSVVGVSVAIPQLLDLDYYRSKCPKAEEIVRGVTVQYVSRQKTLAAKLLRMHFHDCFVRGCDGSVLLKSAKNDAERDAVPNLTLKGYEVVDAAKTALERKCPNLISCADVLALVARDAVAVIGGPWWPVPLGRRDGRISKLNDALLNLPSPFADIKTLKKNFANKGLNAKDLVVLSGGHTIGISSCALVNSRLYNFTGKGDSDPSMNPSYVRELKRKCPPTDFRTSLNMDPGSALTFDTHYFKVVAQKKGLFTSDSTLLDDIETKNYVQTQAILPPVFSSFNKDFSDSMVKLGFVQILTGKNGEIRKRCAFPN

SEQ ID NO: 81611 - protein, 263 aa, Arabidopsis thaliana
  peptide (1)..(263): Ceres Seq. ID no. 12660469
  misc_feature (1)..(224): Pfam Name: Peroxidase Pfam Description: Peroxidase
  misc_feature (1)..(263): Homolog of NCBI NO: 18390498 NR Description: peroxidase, putative; protein id: At1g05240.1 thaliana] >gi|18390500|ref|NP_563733.1| peroxidase, putative; id: At1g05250.1 [Arabidopsis thaliana]
  misc_feature (1)..(263): Homolog of NCBI NO: 15242237 NR Description: peroxidase, putative; protein id: At5g15180.1, by cDNA: gi_18176158 [Arabidopsis thaliana] Peroxidase 56 precursor (Atperox P56) (ATP33)
  misc_feature (1)..(263): Homolog of NCBI NO: 15232058 NR Description: peroxidase, putative; protein id: At3g01190.1, by cDNA: 37597., supported by cDNA: gi_17065467, supported by gi_20148488 [Arabidopsis thaliana]
  misc_feature (1)..(263): Homolog of NCBI NO: 7259219 NR Description: peroxidase [Spinacia oleracea]
  misc_feature (1)..(263): Homolog of NCBI NO: 7433079 NR Description: peroxidase (EC 1.11.1.7) precursor prx10 -
  misc_feature (1)..(263): Homolog of NCBI NO: 15220463 NR Description: peroxidase, putative; protein id: At1g05260.1, by cDNA: 114862., supported by cDNA: gi_2738253 [Arabidopsis >gi|25453190|sp|O23044|PER3_ARATH Peroxidase 3 precursor (Atperox
  misc_feature (1)..(263): Homolog of NCBI NO: 21536908 NR Description: putative peroxidase [Arabidopsis thaliana]
  misc_feature (1)..(259): Homolog of NCBI NO: 34915480 NR Description: putative peroxidase [Oryza sativa (japonica
  misc_feature (1)..(263): Homolog of NCBI NO: 39546236 NR Description: OSJNBa0089N06.6 [Oryza sativa (japonica
  misc_feature (1)..(263): Homolog of NCBI NO: 27261041 NR Description: putative peroxidase [Oryza sativa (japonica
MHFHDCFVRGCDGSVLLKSAKNDAERDAVPNLTLKGYEVVDAAKTALERKCPNLISCADVLALVARDAVAVIGGPWWPVPLGRRDGRISKLNDALLNLPSPFADIKTLKKNFANKGLNAKDLVVLSGGHTIGISSCALVNSRLYNFTGKGDSDPSMNPSYVRELKRKCPPTDFRTSLNMDPGSALTFDTHYFKVVAQKKGLFTSDSTLLDDIETKNYVQTQAILPPVFSSFNKDFSDSMVKLGFVQILTGKNGEIRKRCAFPN

SEQ ID NO: 81612 - DNA, 1083 bp, Arabidopsis thaliana
  misc_feature (1)..(1083): Ceres Seq. ID no. 12660473
  misc_feature: MA Experiment ID: 20000355 Result: Down-regulated in Transcription
  misc_feature: MA Experiment 20000355 PARAMETER Experiment Name: At_Siliques_Sub_P Parameter: Age (day) Value: 21
  misc_feature: MA Experiment 20000355 PARAMETER Experiment Name: At_Siliques_Sub_P Parameter: Organism Value: A. thaliana
  misc_feature: MA Experiment 20000355 PARAMETER Experiment Name: At_Siliques_Sub_P Parameter: Plant Line Value: WS
  misc_feature: MA Experiment 20000355 PARAMETER Experiment Name: At_Siliques_Sub_P Parameter: Tissue Value: Less Than 5mm Siliques vs. Whole Plant
  misc_feature: MA Experiment ID: 20000440 Result: Down-regulated in Transcription
  misc_feature: MA Experiment 20000440 PARAMETER Experiment Name: At_Closed-Flower__Sub_P Parameter: Tissue Value: Closed Flower vs. Whole Plant
atgagaatcacacaaaacgtcaagctcttactcttcttcttcttcttcatctccttcctcttcatcgccgtatccgccggcgagtctaaatgcgagtgttcacacgaagacgacgaggcaaacaaagccggagcaaaaaaatacaagatcgccgcaattccttccgttctggccgccggagttatcggcgttatgtttccgttactaggcaagttcttcccgtcgcttaaaccggagacgactttcttcttcgtgacgaaagccttcgccgccggcgtaatcctcgcaacggggtttatgcatgtgttgcctgaaggttacgagaagctgacgtcaccgtgtctgaaaggagaagcctgggagtttccgttcacaggctttatcgcgatggtcgctgcgattttgactctttccgttgactcttttgccacgtcgtatttccataaagcgcattttaaaacgtctaagaggattggtgacggtgaggaacaagacgctggcggtggcggtggcggtggagacgagctcgggttgcacgtgcatgctcacggtcacacgcacgggattgttggcgtggaatctggtgaatcccaggttcagcttcaccggactcgagttgttgcacaggtgttggaagtgggaataatagtacattcagtggtaataggaatatcactgggagcatcacaaagtccagacactgccaaagctctctttgctgctttaatgtttcatcaatgcttcgagggtcttggtcttggtggttgcatcgcccagggaaatttcaattgtatgtcaattacaataatgtcgatctttttctctgtaacgacgccggtaggaatcgcggttggaatggcaatttcaagctcttatgatgattcgagtccaacggctctgatcgtacagggagtccttaacgctgcatctgcaggcatcctcatctatatgtctctagtggactttctcgcagcagattttatgcaccctaagatgcagtctaacactagacttcaaatcatggctcatatctctcttcttgttggagcaggggttatgtcacttttagctaaatgggcttaa

SEQ ID NO: 81613 - protein, 360 aa, Arabidopsis thaliana
  peptide (1)..(360): Ceres Seq. ID no. 12660474
  misc_feature (46)..(357): Pfam Name: ZIP Zinc transporter Pfam Description: ZIP Zinc transporter
  misc_feature (1)..(360): Homolog of NCBI NO: 15220470 NR Description: putative zinc transporter; protein id: [Arabidopsis thaliana] >gi|25347106|pir||G86187 hypothetical
  misc_feature (1)..(360): Homolog of NCBI NO: 12006851 NR Description: putative Zn transport protein [Thlaspi
MRITQNVKLLLFFFFFISFLFIAVSAGESKCECSHEDDEANKAGAKKYKIAAIPSVLAAGVIGVMFPLLGKFFPSLKPETTFFFVTKAFAAGVILATGFMHVLPEGYEKLTSPCLKGEAWEFPFTGFIAMVAAILTLSVDSFATSYFHKAHFKTSKRIGDGEEQDAGGGGGGGDELGLHVHAHGHTHGIVGVESGESQVQLHRTRVVAQVLEVGIIVHSVVIGISLGASQSPDTAKALFAALMFHQCFEGLGLGGCIAQGNFNCMSITIMSIFFSVTTPVGIAVGMAISSSYDDSSPTALIVQGVLNAASAGILIYMSLVDFLAADFMHPKMQSNTRLQIMAHISLLVGAGVMSLLAKWA

SEQ ID NO: 81614 - protein, 296 aa, Arabidopsis thaliana
  peptide (1)..(296): Ceres Seq. ID no. 12660475
  misc_feature (1)..(293): Pfam Name: ZIP Zinc transporter Pfam Description: ZIP Zinc transporter
  misc_feature (1)..(296): Homolog of NCBI NO: 15220470 NR Description: putative zinc transporter; protein id: [Arabidopsis thaliana] >gi|25347106|pir||G86187 hypothetical
  misc_feature (1)..(296): Homolog of NCBI NO: 12006851 NR Description: putative Zn transport protein [Thlaspi
MFPLLGKFFPSLKPETTFFFVTKAFAAGVILATGFMHVLPEGYEKLTSPCLKGEAWEFPFTGFIAMVAAILTLSVDSFATSYFHKAHFKTSKRIGDGEEQDAGGGGGGGDELGLHVHAHGHTHGIVGVESGESQVQLHRTRVVAQVLEVGIIVHSVVIGISLGASQSPDTAKALFAALMFHQCFEGLGLGGCIAQGNFNCMSITIMSIFFSVTTPVGIAVGMAISSSYDDSSPTALIVQGVLNAASAGILIYMSLVDFLAADFMHPKMQSNTRLQIMAHISLLVGAGVMSLLAKWA

SEQ ID NO: 81615 - protein, 261 aa, Arabidopsis thaliana
  peptide (1)..(261): Ceres Seq. ID no. 12660476
  misc_feature (1)..(258): Pfam Name: ZIP Zinc transporter Pfam Description: ZIP Zinc transporter
  misc_feature (1)..(261): Homolog of NCBI NO: 15220470 NR Description: putative zinc transporter; protein id: [Arabidopsis thaliana] >gi|25347106|pir||G86187 hypothetical
  misc_feature (1)..(261): Homolog of NCBI NO: 12006851 NR Description: putative Zn transport protein [Thlaspi
MHVLPEGYEKLTSPCLKGEAWEFPFTGFIAMVAAILTLSVDSFATSYFHKAHFKTSKRIGDGEEQDAGGGGGGGDELGLHVHAHGHTHGIVGVESGESQVQLHRTRVVAQVLEVGIIVHSVVIGISLGASQSPDTAKALFAALMFHQCFEGLGLGGCIAQGNFNCMSITIMSIFFSVTTPVGIAVGMAISSSYDDSSPTALIVQGVLNAASAGILIYMSLVDFLAADFMHPKMQSNTRLQIMAHISLLVGAGVMSLLAKWA

SEQ ID NO: 81616 - DNA, 740 bp, Arabidopsis thaliana
  misc_feature (1)..(740): Ceres Seq. ID no. 12660485
  misc_feature: MA Experiment ID: 20000182 Result: Down-regulated in Transcription
  misc_feature: MA Experiment 20000182 PARAMETER Experiment Name: At_2mM_SA_P Parameter: Age (day) Value: 14
  misc_feature: MA Experiment 20000182 PARAMETER Experiment Name: At_2mM_SA_P Parameter: Organism Value: A. thaliana
  misc_feature: MA Experiment 20000182 PARAMETER Experiment Name: At_2mM_SA_P Parameter: Plant Line Value: WS
  misc_feature: MA Experiment 20000182 PARAMETER Experiment Name: At_2mM_SA_P Parameter: Timepoint (hr) Value: 6
  misc_feature: MA Experiment 20000182 PARAMETER Experiment Name: At_2mM_SA_P Parameter: Tissue Value: Aerial
  misc_feature: MA Experiment 20000182 PARAMETER Experiment Name: At_2mM_SA_P Parameter: Treatment Value: 2mM SA vs. No Treatment
  misc_feature: MA Experiment ID: 20000185 Result: Down-regulated in Transcription
  misc_feature: MA Experiment 20000185 PARAMETER Experiment Name: At_Roots__P Parameter: Age (day) Value: 7 vs. 21
  misc_feature: MA Experiment 20000185 PARAMETER Experiment Name: At_Roots__P Parameter: Organism Value: A. thaliana
  misc_feature: MA Experiment 20000185 PARAMETER Experiment Name: At_Roots__P Parameter: Tissue Value: Roots vs. Whole Plant
  misc_feature: MA Experiment ID: 20000437 Result: Down-regulated in Transcription
  misc_feature: MA Experiment 20000437 PARAMETER Experiment Name: At_Drought_P Parameter: Age (day) Value: 8
  misc_feature: MA Experiment 20000437 PARAMETER Experiment Name: At_Drought_P Parameter: Organism Value: A. thaliana
  misc_feature: MA Experiment 20000437 PARAMETER Experiment Name: At_Drought_P Parameter: Plant Line Value: WS
  misc_feature: MA Experiment 20000437 PARAMETER Experiment Name: At_Drought_P Parameter: Timepoint (hr) Value: 24
  misc_feature: MA Experiment 20000437 PARAMETER Experiment Name: At_Drought_P Parameter: Tissue Value: Whole Plant
  misc_feature: MA Experiment 20000437 PARAMETER Experiment Name: At_Drought_P Parameter: Treatment Value: Drought vs. No Drought
  misc_feature: MA Experiment ID: 20000439 Result: Down-regulated in Transcription
  misc_feature: MA Experiment 20000439 PARAMETER Experiment Name: At_Roots__P Parameter: Age (day) Value: 14 vs. 21
  misc_feature: MA Experiment 20000439 PARAMETER Experiment Name: At_Roots__P Parameter: Organism Value: A. thaliana
  misc_feature: MA Experiment 20000439 PARAMETER Experiment Name: At_Roots__P Parameter: Tissue Value: Roots vs. Whole Plant
  misc_feature: MA Experiment ID: 20001451 Result: Up-regulated in Transcription
  misc_feature: MA Experiment 20001451 PARAMETER Experiment Name: At_Far-red-induction_P Parameter: Age (day) Value: 7
  misc_feature: MA Experiment 20001451 PARAMETER Experiment Name: At_Far-red-induction_P Parameter: Light Value: Far-red vs. White
  misc_feature: MA Experiment 20001451 PARAMETER Experiment Name: At_Far-red-induction_P Parameter: Organism Value: A. thaliana
  misc_feature: MA Experiment 20001451 PARAMETER Experiment Name: At_Far-red-induction_P Parameter: Plant Line Value: Columbia
  misc_feature: MA Experiment 20001451 PARAMETER Experiment Name: At_Far-red-induction_P Parameter: Timepoint (hr) Value: 24
  misc_feature: MA Experiment 20001451 PARAMETER Experiment Name: At_Far-red-induction_P Parameter: Tissue Value: Whole Plant
  misc_feature: MA Experiment ID: 20001559 Result: Down-regulated in Transcription
  misc_feature: MA Experiment 20001559 PARAMETER Experiment Name: At_Drought_Soil_Dry_P Parameter: Age (day) Value: 28
  misc_feature: MA Experiment 20001559 PARAMETER Experiment Name: At_Drought_Soil_Dry_P Parameter: Organism Value: A. thaliana
  misc_feature: MA Experiment 20001559 PARAMETER Experiment Name: At_Drought_Soil_Dry_P Parameter: Plant Line Value: WS
  misc_feature: MA Experiment 20001559 PARAMETER Experiment Name: At_Drought_Soil_Dry_P Parameter: Post Timepoint (hr) Value: 29
  misc_feature: MA Experiment 20001559 PARAMETER Experiment Name: At_Drought_Soil_Dry_P Parameter: Post-Treatment Value: Re-Water vs. No Drought
  misc_feature: MA Experiment 20001559 PARAMETER Experiment Name: At_Drought_Soil_Dry_P Parameter: Timepoint (day) Value: 14
  misc_feature: MA Experiment 20001559 PARAMETER Experiment Name: At_Drought_Soil_Dry_P Parameter: Treatment Value: Drought vs. No Drought
  misc_feature: MA Experiment ID: 20001904 Result: Down-regulated in Transcription
  misc_feature: MA Experiment 20001904 PARAMETER Experiment Name: At_Drought_Reproduction_P Parameter: Age (day) Value: 37
  misc_feature: MA Experiment 20001904 PARAMETER Experiment Name: At_Drought_Reproduction_P Parameter: Organism Value: A. thaliana
  misc_feature: MA Experiment 20001904 PARAMETER Experiment Name: At_Drought_Reproduction_P Parameter: Plant Line Value: WS
  misc_feature: MA Experiment 20001904 PARAMETER Experiment Name: At_Drought_Reproduction_P Parameter: Timepoint (day) Value: 7
  misc_feature: MA Experiment 20001904 PARAMETER Experiment Name: At_Drought_Reproduction_P Parameter: Tissue Value: Rosettes
  misc_feature: MA Experiment 20001904 PARAMETER Experiment Name: At_Drought_Reproduction_P Parameter: Treatment Value: Drought vs. No Drought
  misc_feature: MA Experiment ID: 20001906 Result: Down-regulated in Transcription
  misc_feature: MA Experiment 20001906 PARAMETER Experiment Name: At_Drought_Reproduction_P Parameter: Age (day) Value: 35
  misc_feature: MA Experiment 20001906 PARAMETER Experiment Name: At_Drought_Reproduction_P Parameter: Organism Value: A. thaliana
  misc_feature: MA Experiment 20001906 PARAMETER Experiment Name: At_Drought_Reproduction_P Parameter: Plant Line Value: WS
  misc_feature: MA Experiment 20001906 PARAMETER Experiment Name: At_Drought_Reproduction_P Parameter: Timepoint (day) Value: 5
  misc_feature: MA Experiment 20001906 PARAMETER Experiment Name: At_Drought_Reproduction_P Parameter: Tissue Value: Siliques
  misc_feature: MA Experiment 20001906 PARAMETER Experiment Name: At_Drought_Reproduction_P Parameter: Treatment Value: Drought vs. No Drought
aactagaaccatcctctttttcatctatatctgattctgaggttcctgttgttatcagacagaaagattcatgggtttccttgtagccgtcatgaacttttctcctactttggtgcatcaccatatgaaatcgaagccacaatgtcaaaatgaaaagcttcgtcaaggccaaacatcatctttgtttgatcgtcgtggtttcttgaaatgtgttgttggtgcttcttcgttcatggccacaattgagttttctggattacaagctcaggcgtcagaggaaaagttagacgaaggagaaggagttgttggtgctttcaagactttgtttgatcctaatgagagaacaaagtctggcaaagagttaccaaaagcttacttgaaatctgcaagagaggttgtcaaaaccatgagggagtcattgaaagagaaccctaaagacaatgctaagttcagaagaagtgctgatgctgctaaagaatccattcgtgattatctgagcaattggagaggacaaaagactgttgccggagaagaatcatacgtggagctggagaatgtaatccgcgctttggcgaaattttactcaaaggcaggtccttctgcaccacttcctgatgaggttaagactgagattttggatgatcttaacaaggctgaagagtttttgtgacatttttgctgtaacatgtttcacccatgttatacatatcaaagtattgaaagcaatagaagaacgcttg

SEQ ID NO: 81617 - protein, 199 aa, Arabidopsis thaliana
  peptide (1)..(199): Ceres Seq. ID no. 12660486
  misc_feature (1)..(199): Homolog of NCBI NO: 18390518 NR Description: Expressed protein; protein id: At1g05385.1, by cDNA: gi_13877958 [Arabidopsis thaliana]
  misc_feature (1)..(199): Homolog of NCBI NO: 26451618 NR Description: unknown protein [Arabidopsis thaliana]
  misc_feature (20)..(199): Homolog of NCBI NO: 14626275 NR Description: unknown protein [Oryza sativa (japonica
  misc_feature (94)..(196): Homolog of NCBI NO: 6919945 NR Description: Photosystem II 11 kDa protein precursor
  misc_feature (94)..(196): Homolog of NCBI NO: 16331054 NR Description: photosystem II 11 kD protein [Synechocystis sp.
MGFLVAVMNFSPTLVHHHMKSKPQCQNEKLRQGQTSSLFDRRGFLKCVVGASSFMATIEFSGLQAQASEEKLDEGEGVVGAFKTLFDPNERTKSGKELPKAYLKSAREVVKTMRESLKENPKDNAKFRRSADAAKESIRDYLSNWRGQKTVAGEESYVELENVIRALAKFYSKAGPSAPLPDEVKTEILDDLNKAEEFL

SEQ ID NO: 81618 - protein, 192 aa, Arabidopsis thaliana
  peptide (1)..(192): Ceres Seq. ID no. 12660487
  misc_feature (1)..(192): Homolog of NCBI NO: 18390518 NR Description: Expressed protein; protein id: At1g05385.1, by cDNA: gi_13877958 [Arabidopsis thaliana]
  misc_feature (1)..(192): Homolog of NCBI NO: 26451618 NR Description: unknown protein [Arabidopsis thaliana]
  misc_feature (13)..(192): Homolog of NCBI NO: 14626275 NR Description: unknown protein [Oryza sativa (japonica
  misc_feature (87)..(189): Homolog of NCBI NO: 6919945 NR Description: Photosystem II 11 kDa protein precursor
  misc_feature (87)..(189): Homolog of NCBI NO: 16331054 NR Description: photosystem II 11 kD protein [Synechocystis sp.
MNFSPTLVHHHMKSKPQCQNEKLRQGQTSSLFDRRGFLKCVVGASSFMATIEFSGLQAQASEEKLDEGEGVVGAFKTLFDPNERTKSGKELPKAYLKSAREVVKTMRESLKENPKDNAKFRRSADAAKESIRDYLSNWRGQKTVAGEESYVELENVIRALAKFYSKAGPSAPLPDEVKTEILDDLNKAEEFL

SEQ ID NO: 81619 - protein, 181 aa, Arabidopsis thaliana
  peptide (1)..(181): Ceres Seq. ID no. 12660488
  misc_feature (1)..(181): Homolog of NCBI NO: 18390518 NR Description: Expressed protein; protein id: At1g05385.1, by cDNA: gi_13877958 [Arabidopsis thaliana]
  misc_feature (1)..(181): Homolog of NCBI NO: 26451618 NR Description: unknown protein [Arabidopsis thaliana]
  misc_feature (2)..(181): Homolog of NCBI NO: 14626275 NR Description: unknown protein [Oryza sativa (japonica
  misc_feature (76)..(178): Homolog of NCBI NO: 6919945 NR Description: Photosystem II 11 kDa protein precursor
  misc_feature (76)..(178): Homolog of NCBI NO: 16331054 NR Description: photosystem II 11 kD protein [Synechocystis sp.
MKSKPQCQNEKLRQGQTSSLFDRRGFLKCVVGASSFMATIEFSGLQAQASEEKLDEGEGVVGAFKTLFDPNERTKSGKELPKAYLKSAREVVKTMRESLKENPKDNAKFRRSADAAKESIRDYLSNWRGQKTVAGEESYVELENVIRALAKFYSKAGPSAPLPDEVKTEILDDLNKAEEFL

SEQ ID NO: 81620 - DNA, 916 bp, Arabidopsis thaliana
  misc_feature (1)..(916): Ceres Seq. ID no. 12660500
  misc_feature: MA Experiment ID: 20000288 Result: Down-regulated in Transcription
  misc_feature: MA Experiment 20000288 PARAMETER Experiment Name: At_Drought_P Parameter: Age (day) Value: 7
  misc_feature: MA Experiment 20000288 PARAMETER Experiment Name: At_Drought_P Parameter: Organism Value: A. thaliana
  misc_feature: MA Experiment 20000288 PARAMETER Experiment Name: At_Drought_P Parameter: Plant Line Value: WS
  misc_feature: MA Experiment 20000288 PARAMETER Experiment Name: At_Drought_P Parameter: Timepoint (hr) Value: 1
  misc_feature: MA Experiment 20000288 PARAMETER Experiment Name: At_Drought_P Parameter: Tissue Value: Whole Plant
  misc_feature: MA Experiment 20000288 PARAMETER Experiment Name: At_Drought_P Parameter: Treatment Value: Drought vs. No Drought
  misc_feature: MA Experiment ID: 20000437 Result: Up-regulated in Transcription
  misc_feature: MA Experiment 20000437 PARAMETER Experiment Name: At_Drought_P Parameter: Age (day) Value: 8
  misc_feature: MA Experiment 20000437 PARAMETER Experiment Name: At_Drought_P Parameter: Organism Value: A. thaliana
  misc_feature: MA Experiment 20000437 PARAMETER Experiment Name: At_Drought_P Parameter: Plant Line Value: WS
  misc_feature: MA Experiment 20000437 PARAMETER Experiment Name: At_Drought_P Parameter: Timepoint (hr) Value: 24
  misc_feature: MA Experiment 20000437 PARAMETER Experiment Name: At_Drought_P Parameter: Tissue Value: Whole Plant
  misc_feature: MA Experiment 20000437 PARAMETER Experiment Name: At_Drought_P Parameter: Treatment Value: Drought vs. No Drought
  misc_feature: MA Experiment ID: 20001457 Result: Down-regulated in Transcription
  misc_feature: MA Experiment 20001457 PARAMETER Experiment Name: At_50mM_NH4NO3_L-to-H_P Parameter: Age (day) Value: Undefined
  misc_feature: MA Experiment 20001457 PARAMETER Experiment Name: At_50mM_NH4NO3_L-to-H_P Parameter: Organism Value: Undefined
  misc_feature: MA Experiment 20001457 PARAMETER Experiment Name: At_50mM_NH4NO3_L-to-H_P Parameter: Plant Line Value: Undefined
  misc_feature: MA Experiment 20001457 PARAMETER Experiment Name: At_50mM_NH4NO3_L-to-H_P Parameter: Timepoint (hr) Value: 0.5
  misc_feature: MA Experiment 20001457 PARAMETER Experiment Name: At_50mM_NH4NO3_L-to-H_P Parameter: Tissue Value: Siliques
  misc_feature: MA Experiment 20001457 PARAMETER Experiment Name: At_50mM_NH4NO3_L-to-H_P Parameter: Treatment Value: 50mM NH4NO3 vs. 100mM Manitol
  misc_feature: MA Experiment ID: 20001555 Result: Up-regulated in Transcription
  misc_feature: MA Experiment 20001555 PARAMETER Experiment Name: At_Drought_Soil_Dry_P Parameter: Age (day) Value: 24
  misc_feature: MA Experiment 20001555 PARAMETER Experiment Name: At_Drought_Soil_Dry_P Parameter: Organism Value: A. thaliana
  misc_feature: MA Experiment 20001555 PARAMETER Experiment Name: At_Drought_Soil_Dry_P Parameter: Plant Line Value: WS
  misc_feature: MA Experiment 20001555 PARAMETER Experiment Name: At_Drought_Soil_Dry_P Parameter: Post Timepoint (hr) Value: None
  misc_feature: MA Experiment 20001555 PARAMETER Experiment Name: At_Drought_Soil_Dry_P Parameter: Post-Treatment Value: None
  misc_feature: MA Experiment 20001555 PARAMETER Experiment Name: At_Drought_Soil_Dry_P Parameter: Timepoint (day) Value: 10
  misc_feature: MA Experiment 20001555 PARAMETER Experiment Name: At_Drought_Soil_Dry_P Parameter: Treatment Value: Drought vs. No Drought
  misc_feature: MA Experiment ID: 20001556 Result: Up-regulated in Transcription
  misc_feature: MA Experiment 20001556 PARAMETER Experiment Name: At_Drought_Soil_Dry_P Parameter: Age (day) Value: 26
  misc_feature: MA Experiment 20001556 PARAMETER Experiment Name: At_Drought_Soil_Dry_P Parameter: Organism Value: A. thaliana
  misc_feature: MA Experiment 20001556 PARAMETER Experiment Name: At_Drought_Soil_Dry_P Parameter: Plant Line Value: WS
  misc_feature: MA Experiment 20001556 PARAMETER Experiment Name: At_Drought_Soil_Dry_P Parameter: Post Timepoint (hr) Value: None
  misc_feature: MA Experiment 20001556 PARAMETER Experiment Name: At_Drought_Soil_Dry_P Parameter: Post-Treatment Value: None
  misc_feature: MA Experiment 20001556 PARAMETER Experiment Name: At_Drought_Soil_Dry_P Parameter: Timepoint (day) Value: 12
  misc_feature: MA Experiment 20001556 PARAMETER Experiment Name: At_Drought_Soil_Dry_P Parameter: Treatment Value: Drought vs. No Drought
  misc_feature: MA Experiment ID: 20001904 Result: Up-regulated in Transcription
  misc_feature: MA Experiment 20001904 PARAMETER Experiment Name: At_Drought_Reproduction_P Parameter: Age (day) Value: 37
  misc_feature: MA Experiment 20001904 PARAMETER Experiment Name: At_Drought_Reproduction_P Parameter: Organism Value: A. thaliana
  misc_feature: MA Experiment 20001904 PARAMETER Experiment Name: At_Drought_Reproduction_P Parameter: Plant Line Value: WS
  misc_feature: MA Experiment 20001904 PARAMETER Experiment Name: At_Drought_Reproduction_P Parameter: Timepoint (day) Value: 7
  misc_feature: MA Experiment 20001904 PARAMETER Experiment Name: At_Drought_Reproduction_P Parameter: Tissue Value: Rosettes
  misc_feature: MA Experiment 20001904 PARAMETER Experiment Name: At_Drought_Reproduction_P Parameter: Treatment Value: Drought vs. No Drought
  misc_feature: MA Experiment ID: 20001905 Result: Up-regulated in Transcription
  misc_feature: MA Experiment 20001905 PARAMETER Experiment Name: At_Drought_Reproduction_P Parameter: Age (day) Value: 40
  misc_feature: MA Experiment 20001905 PARAMETER Experiment Name: At_Drought_Reproduction_P Parameter: Organism Value: A. thaliana
  misc_feature: MA Experiment 20001905 PARAMETER Experiment Name: At_Drought_Reproduction_P Parameter: Plant Line Value: WS
  misc_feature: MA Experiment 20001905 PARAMETER Experiment Name: At_Drought_Reproduction_P Parameter: Timepoint (day) Value: 10
  misc_feature: MA Experiment 20001905 PARAMETER Experiment Name: At_Drought_Reproduction_P Parameter: Tissue Value: Rosettes
  misc_feature: MA Experiment 20001905 PARAMETER Experiment Name: At_Drought_Reproduction_P Parameter: Treatment Value: Drought vs. No Drought
  misc_feature: MA Experiment ID: 20001906 Result: Up-regulated in Transcription
  misc_feature: MA Experiment 20001906 PARAMETER Experiment Name: At_Drought_Reproduction_P Parameter: Age (day) Value: 35
  misc_feature: MA Experiment 20001906 PARAMETER Experiment Name: At_Drought_Reproduction_P Parameter: Organism Value: A. thaliana
  misc_feature: MA Experiment 20001906 PARAMETER Experiment Name: At_Drought_Reproduction_P Parameter: Plant Line Value: WS
  misc_feature: MA Experiment 20001906 PARAMETER Experiment Name: At_Drought_Reproduction_P Parameter: Timepoint (day) Value: 5
  misc_feature: MA Experiment 20001906 PARAMETER Experiment Name: At_Drought_Reproduction_P Parameter: Tissue Value: Siliques
  misc_feature: MA Experiment 20001906 PARAMETER Experiment Name: At_Drought_Reproduction_P Parameter: Treatment Value: Drought vs. No Drought
ataagaatcagacagaagttgcagagaaaagagaattaattgattggtgtaatggagaaggcagttcatttatccaccaaaaatggacccaaggttccaggagagccaacgaagaccggaacctccatggttgacacggcagcttcagccgtacaaagcttcgctccgattaaccaaatccaccaacatctctgcgcgtttcatttctatgcatatgacatgacccgacaagtggaggcacaccatttctgtggtcacatcaacgaagacatgcgccagtgtctgatctacgacggtcctgatgccaacgctcgtctgatcggtctggagtacattgtgacagagaagctctttatgacattgcctgacgatgagaagaagctttggcacactcacgagtgggaagttaaaggaggcttcttgttcatgcccggtgttcccgaagctattcaacggcaagatctcgaaaaagtcgccaagacttatgggaaagtttaccatttctggcaagtcgatttggggcatcagcttcccattggcttgcctaatatcatgatggctgttactcgagacggacaactttatccggaaatgatcaaggagacggaaaagcaatttggagtatcgatagacaaggagcgagagtcaagggcttatatgaagggtccagaccatgggatccatcccttggcaaatggaggaggcaaaggcctgaagttggagttgcgagaggttgacataaagccggttgagtccgttccaagagtcttcgtttaagttatacttaaatagacaacttaagaagaataaataaataagcgatcgagcttttcttttgtatagccctcctcgaatcatgtgtataagatgtaaaatacacttgaagtagtatattatggtgtcgtctagtggtttt

SEQ ID NO: 81621 - protein, 241 aa, Arabidopsis thaliana
  peptide (1)..(241): Ceres Seq. ID no. 12660501
  misc_feature (1)..(241): Homolog of NCBI NO: 15220526 NR Description: hypothetical protein; protein id: At1g05510.1, by cDNA: gi_17979350, supported by cDNA: gi_20466016 [Arabidopsis >gi|8778719|gb|AAF79727.1|AC005106_8 T25N20.16 [Arabidopsis
  misc_feature (1)..(241): Homolog of NCBI NO: 30685146 NR Description: expressed protein [Arabidopsis thaliana] unknown protein [Arabidopsis thaliana]
  misc_feature (1)..(241): Homolog of NCBI NO: 26451037 NR Description: unknown protein [Arabidopsis thaliana]
  misc_feature (14)..(240): Homolog of NCBI NO: 4105683 NR Description: unknown [Oryza sativa] >gi|4105692|gb|AAD02496.1|
  misc_feature (13)..(224): Homolog of NCBI NO: 40740423 NR Description: hypothetical protein AN7959.2 [Aspergillus
  misc_feature (15)..(228): Homolog of NCBI NO: 16760314 NR Description: putative secreted protein [Salmonella enterica enterica serovar Typhi] >gi|29141921|ref|NP_805263.1| putative protein [Salmonella enterica subsp. enterica serovar Typhi Ty2]
  misc_feature (15)..(228): Homolog of NCBI NO: 16764905 NR Description: putative outer membrane or secreted lipoprotein typhimurium LT2] >gi|16420083|gb|AAL20479.1| putative outer
  misc_feature (8)..(237): Homolog of NCBI NO: 18415199 NR Description: expressed protein; protein id: At4g18920.1,
  misc_feature (16)..(237): Homolog of NCBI NO: 15242474 NR Description: putative protein; protein id: At5g45690.1, by cDNA: gi_15450432, supported by cDNA: gi_18958059 [Arabidopsis >gi|15450433|gb|AAK96510.1| AT5g45690/MRA19_8 [Arabidopsis
  misc_feature (16)..(231): Homolog of NCBI NO: 34910820 NR Description: P0456A01.15 [Oryza sativa (japonica
MEKAVHLSTKNGPKVPGEPTKTGTSMVDTAASAVQSFAPINQIHQHLCAFHFYAYDMTRQVEAHHFCGHINEDMRQCLIYDGPDANARLIGLEYIVTEKLFMTLPDDEKKLWHTHEWEVKGGFLFMPGVPEAIQRQDLEKVAKTYGKVYHFWQVDLGHQLPIGLPNIMMAVTRDGQLYPEMIKETEKQFGVSIDKERESRAYMKGPDHGIHPLANGGGKGLKLELREVDIKPVESVPRVFV

SEQ ID NO: 81622 - protein, 216 aa, Arabidopsis thaliana
  peptide (1)..(216): Ceres Seq. ID no. 12660502
  misc_feature (1)..(216): Homolog of NCBI NO: 15220526 NR Description: hypothetical protein; protein id: At1g05510.1, by cDNA: gi_17979350, supported by cDNA: gi_20466016 [Arabidopsis >gi|8778719|gb|AAF79727.1|AC005106_8 T25N20.16 [Arabidopsis
  misc_feature (1)..(216): Homolog of NCBI NO: 30685146 NR Description: expressed protein [Arabidopsis thaliana] unknown protein [Arabidopsis thaliana]
  misc_feature (1)..(216): Homolog of NCBI NO: 26451037 NR Description: unknown protein [Arabidopsis thaliana]
  misc_feature (1)..(215): Homolog of NCBI NO: 4105683 NR Description: unknown [Oryza sativa] >gi|4105692|gb|AAD02496.1|
  misc_feature (1)..(199): Homolog of NCBI NO: 40740423 NR Description: hypothetical protein AN7959.2 [Aspergillus
  misc_feature (1)..(203): Homolog of NCBI NO: 16760314 NR Description: putative secreted protein [Salmonella enterica enterica serovar Typhi] >gi|29141921|ref|NP_805263.1| putative protein [Salmonella enterica subsp. enterica serovar Typhi Ty2]
  misc_feature (1)..(203): Homolog of NCBI NO: 16764905 NR Description: putative outer membrane or secreted lipoprotein typhimurium LT2] >gi|16420083|gb|AAL20479.1| putative outer
  misc_feature (1)..(212): Homolog of NCBI NO: 18415199 NR Description: expressed protein; protein id: At4g18920.1,
  misc_feature (1)..(212): Homolog of NCBI NO: 15242474 NR Description: putative protein; protein id: At5g45690.1, by cDNA: gi_15450432, supported by cDNA: gi_18958059 [Arabidopsis >gi|15450433|gb|AAK96510.1| AT5g45690/MRA19_8 [Arabidopsis
  misc_feature (1)..(206): Homolog of NCBI NO: 34910820 NR Description: P0456A01.15 [Oryza sativa (japonica
MVDTAASAVQSFAPINQIHQHLCAFHFYAYDMTRQVEAHHFCGHINEDMRQCLIYDGPDANARLIGLEYIVTEKLFMTLPDDEKKLWHTHEWEVKGGFLFMPGVPEAIQRQDLEKVAKTYGKVYHFWQVDLGHQLPIGLPNIMMAVTRDGQLYPEMIKETEKQFGVSIDKERESRAYMKGPDHGIHPLANGGGKGLKLELREVDIKPVESVPRVFV

SEQ ID NO: 81623 - protein, 185 aa, Arabidopsis thaliana
  peptide (1)..(185): Ceres Seq. ID no. 12660503
  misc_feature (1)..(185): Homolog of NCBI NO: 15220526 NR Description: hypothetical protein; protein id: At1g05510.1, by cDNA: gi_17979350, supported by cDNA: gi_20466016 [Arabidopsis >gi|8778719|gb|AAF79727.1|AC005106_8 T25N20.16 [Arabidopsis
  misc_feature (1)..(185): Homolog of NCBI NO: 30685146 NR Description: expressed protein [Arabidopsis thaliana] unknown protein [Arabidopsis thaliana]
  misc_feature (1)..(185): Homolog of NCBI NO: 26451037 NR Description: unknown protein [Arabidopsis thaliana]
  misc_feature (1)..(184): Homolog of NCBI NO: 4105683 NR Description: unknown [Oryza sativa] >gi|4105692|gb|AAD02496.1|
  misc_feature (1)..(168): Homolog of NCBI NO: 40740423 NR Description: hypothetical protein AN7959.2 [Aspergillus
  misc_feature (1)..(172): Homolog of NCBI NO: 16760314 NR Description: putative secreted protein [Salmonella enterica enterica serovar Typhi] >gi|29141921|ref|NP_805263.1| putative protein [Salmonella enterica subsp. enterica serovar Typhi Ty2]
  misc_feature (1)..(172): Homolog of NCBI NO: 16764905 NR Description: putative outer membrane or secreted lipoprotein typhimurium LT2] >gi|16420083|gb|AAL20479.1| putative outer
  misc_feature (1)..(181): Homolog of NCBI NO: 18415199 NR Description: expressed protein; protein id: At4g18920.1,
  misc_feature (1)..(181): Homolog of NCBI NO: 15242474 NR Description: putative protein; protein id: At5g45690.1, by cDNA: gi_15450432, supported by cDNA: gi_18958059 [Arabidopsis >gi|15450433|gb|AAK96510.1| AT5g45690/MRA19_8 [Arabidopsis
  misc_feature (1)..(175): Homolog of NCBI NO: 34910820 NR Description: P0456A01.15 [Oryza sativa (japonica
MTRQVEAHHFCGHINEDMRQCLIYDGPDANARLIGLEYIVTEKLFMTLPDDEKKLWHTHEWEVKGGFLFMPGVPEAIQRQDLEKVAKTYGKVYHFWQVDLGHQLPIGLPNIMMAVTRDGQLYPEMIKETEKQFGVSIDKERESRAYMKGPDHGIHPLANGGGKGLKLELREVDIKPVESVPRVFV

SEQ ID NO: 81624 - DNA, 1368 bp, Arabidopsis thaliana
  misc_feature (1)..(1368): Ceres Seq. ID no. 12660508
  misc_feature: MA Experiment ID: 20000306 Result: Down-regulated in Transcription
  misc_feature: MA Experiment 20000306 PARAMETER Experiment Name: At_Germinating_Seeds_Sub_P Parameter: Age (hr) Value: 6 vs. 0
  misc_feature: MA Experiment 20000306 PARAMETER Experiment Name: At_Germinating_Seeds_Sub_P Parameter: Organism Value: A. thaliana
  misc_feature: MA Experiment 20000306 PARAMETER Experiment Name: At_Germinating_Seeds_Sub_P Parameter: Plant Line Value: WS
  misc_feature: MA Experiment 20000306 PARAMETER Experiment Name: At_Germinating_Seeds_Sub_P Parameter: Tissue Value: Germinating Seeds
  misc_feature: MA Experiment ID: 20000307 Result: Down-regulated in Transcription
  misc_feature: MA Experiment 20000307 PARAMETER Experiment Name: At_Germinating_Seeds_Sub_P Parameter: Age (hr) Value: 24 vs. 0
  misc_feature: MA Experiment 20000307 PARAMETER Experiment Name: At_Germinating_Seeds_Sub_P Parameter: Organism Value: A. thaliana
  misc_feature: MA Experiment 20000307 PARAMETER Experiment Name: At_Germinating_Seeds_Sub_P Parameter: Plant Line Value: WS
  misc_feature: MA Experiment 20000307 PARAMETER Experiment Name: At_Germinating_Seeds_Sub_P Parameter: Tissue Value: Germinating Seeds
  misc_feature: MA Experiment ID: 20000346 Result: Up-regulated in Transcription
  misc_feature: MA Experiment 20000346 PARAMETER Experiment Name: At_2mM_SA_Sub_P Parameter: Age (day) Value: 14
  misc_feature: MA Experiment 20000346 PARAMETER Experiment Name: At_2mM_SA_Sub_P Parameter: Organism Value: A. thaliana
  misc_feature: MA Experiment 20000346 PARAMETER Experiment Name: At_2mM_SA_Sub_P Parameter: Plant Line Value: WS
  misc_feature: MA Experiment 20000346 PARAMETER Experiment Name: At_2mM_SA_Sub_P Parameter: Timepoint (hr) Value: 1
  misc_feature: MA Experiment 20000346 PARAMETER Experiment Name: At_2mM_SA_Sub_P Parameter: Tissue Value: Aerial
  misc_feature: MA Experiment 20000346 PARAMETER Experiment Name: At_2mM_SA_Sub_P Parameter: Treatment Value: 2mM SA vs. No Treatment
  misc_feature: MA Experiment ID: 20000347 Result: Up-regulated in Transcription
  misc_feature: MA Experiment 20000347 PARAMETER Experiment Name: At_2mM_SA_Sub_P Parameter: Age (day) Value: 14
  misc_feature: MA Experiment 20000347 PARAMETER Experiment Name: At_2mM_SA_Sub_P Parameter: Organism Value: A. thaliana
  misc_feature: MA Experiment 20000347 PARAMETER Experiment Name: At_2mM_SA_Sub_P Parameter: Plant Line Value: WS
  misc_feature: MA Experiment 20000347 PARAMETER Experiment Name: At_2mM_SA_Sub_P Parameter: Timepoint (hr) Value: 6
  misc_feature: MA Experiment 20000347 PARAMETER Experiment Name: At_2mM_SA_Sub_P Parameter: Tissue Value: Aerial
  misc_feature: MA Experiment 20000347 PARAMETER Experiment Name: At_2mM_SA_Sub_P Parameter: Treatment Value: 2mM SA vs. No Treatment
  misc_feature: MA Experiment ID: 20000352 Result: Down-regulated in Transcription
  misc_feature: MA Experiment 20000352 PARAMETER Experiment Name: At_Drought_Sub_P Parameter: Age (day) Value: 7
  misc_feature: MA Experiment 20000352 PARAMETER Experiment Name: At_Drought_Sub_P Parameter: Organism Value: A. thaliana
  misc_feature: MA Experiment 20000352 PARAMETER Experiment Name: At_Drought_Sub_P Parameter: Plant Line Value: WS
  misc_feature: MA Experiment 20000352 PARAMETER Experiment Name: At_Drought_Sub_P Parameter: Timepoint (hr) Value: 6
  misc_feature: MA Experiment 20000352 PARAMETER Experiment Name: At_Drought_Sub_P Parameter: Tissue Value: Whole Plant
  misc_feature: MA Experiment 20000352 PARAMETER Experiment Name: At_Drought_Sub_P Parameter: Treatment Value: Drought vs. No Drought
  misc_feature: MA Experiment ID: 20000355 Result: Down-regulated in Transcription
  misc_feature: MA Experiment 20000355 PARAMETER Experiment Name: At_Siliques_Sub_P Parameter: Age (day) Value: 21
  misc_feature: MA Experiment 20000355 PARAMETER Experiment Name: At_Siliques_Sub_P Parameter: Organism Value: A. thaliana
  misc_feature: MA Experiment 20000355 PARAMETER Experiment Name: At_Siliques_Sub_P Parameter: Plant Line Value: WS
  misc_feature: MA Experiment 20000355 PARAMETER Experiment Name: At_Siliques_Sub_P Parameter: Tissue Value: Less Than 5mm Siliques vs. Whole Plant
atggcgcaaccgcattttctactggtaacgtttccggcgcaaggtcacgtgaacccatctctccgttttgctcgtcggctcatcaaaacaactggcgcacgtgtaactttcgccacgtgtctctctgtcattcaccgctctatgatcccaaaccacaacaacgtcgaaaatctctctttccttactttctccgacggattcgacgacggagtcatctccaacaccgacgacgtccaaaaccggttggtacacttcgaacgtaatggcgataaagctctatcggatttcatcgaagctaatcagaatggtgactctcccgtaagttgcttgatctacacgattcttcccaactgggttccaaaagtggcgcgtagatttcatcttccctctgttcatctctggatccaaccagccttcgctttcgacatttattacaattactctacaggaaacaactccgttttcgagttcccgaatctaccttctctcgaaatccgcgatctgccttctttcctctcaccttccaacacgaacaaagccgcacaagcagtatatcaagaactgatggattttctcaaagaagaatctaacccgaaaattctcgtcaacacattcgattcgctggagccagagttcttaacagctattccgaatatagaaatggtggcagttggtcctttacttcctgcggagattttcactggaagcgaatcaggtaaagatttatcaagagatcatcaaagtagtagttatacactttggttagactcgaaaacagagtcctctgttatttatgtttcttttggaacaatggttgagttgtcgaagaaacagatagaggaactagcgagagcactcatagaagggggaagaccgttcttgtgggttataactgataaactcaacagagaagcgaaaatagaaggagaagaagagacagagattgagaagatagctggttttagacacgagcttgaagaggttgggatgattgtctcgtggtgttcgcagatagaggttttgagacaccgagccataggttgttttttgactcattgtgggtggagctcatcactggagagtttggttctcggcgttccagtggtggcgtttccgatgtggtcggatcagccagcaaatgcgaagcttttggaagaaatatggaagacaggtgtgagggtgagagagaactcggaaggtttagtagagagaggagagataatgcggtgtttggaagcagtgatggaggcgaaatcggtggagctgagggaaaacgcagagaaatggaagcgtttagcgactgaagcgggtagagaaggaggatcttcggacaagaatgtggaagcttttgtgaagagtctgttttga

SEQ ID NO: 81625 - protein, 455 aa, Arabidopsis thaliana
  peptide (1)..(455): Ceres Seq. ID no. 12660509
  misc_feature (8)..(452): Pfam Name: UDP-glucoronosyl and UDP-glucosyl transferase Pfam Description: UDP-glucoronosyl and UDP-glucosyl transferase
  misc_feature (1)..(455): Homolog of NCBI NO: 15220556 NR Description: UDP-glycosyltransferase family; protein id: [Arabidopsis thaliana] >gi|8778724|gb|AAF79732.1|AC005106_13
  misc_feature (1)..(454): Homolog of NCBI NO: 18390540 NR Description: UDP-glucose transferase(UGT1); protein id: supported by cDNA: gi_13605917, supported by cDNA: gi_13661274, by cDNA: gi_18700283 [Arabidopsis thaliana]
  misc_feature (4)..(451): Homolog of NCBI NO: 18414478 NR Description: glucosyltransferase like protein; protein id:
  misc_feature (4)..(451): Homolog of NCBI NO: 2149127 NR Description: UDP-glucose:indole-3-acetate
  misc_feature (1)..(454): Homolog of NCBI NO: 20146093 NR Description: glucosyltransferase NTGT2 [Nicotiana tabacum]
  misc_feature (1)..(454): Homolog of NCBI NO: 14192682 NR Description: cold-induced glucosyl transferase [Solanum
  misc_feature (1)..(451): Homolog of NCBI NO: 6683052 NR Description: anthocyanin 5-O-glucosyltransferase [Petunia x
  misc_feature (4)..(451): Homolog of NCBI NO: 7433892 NR Description: hypothetical protein - Arabidopsis thaliana glucosyltransferase like protein [Arabidopsis thaliana]
  misc_feature (48)..(451): Homolog of NCBI NO: 16604440 NR Description: AT4g15550/dl3815c [Arabidopsis thaliana]
  misc_feature (3)..(451): Homolog of NCBI NO: 15236407 NR Description: UDP-glycosyltransferase family; protein id: supported by cDNA: gi_17065025 [Arabidopsis thaliana]
MAQPHFLLVTFPAQGHVNPSLRFARRLIKTTGARVTFATCLSVIHRSMIPNHNNVENLSFLTFSDGFDDGVISNTDDVQNRLVHFERNGDKALSDFIEANQNGDSPVSCLIYTILPNWVPKVARRFHLPSVHLWIQPAFAFDIYYNYSTGNNSVFEFPNLPSLEIRDLPSFLSPSNTNKAAQAVYQELMDFLKEESNPKILVNTFDSLEPEFLTAIPNIEMVAVGPLLPAEIFTGSESGKDLSRDHQSSSYTLWLDSKTESSVIYVSFGTMVELSKKQIEELARALIEGGRPFLWVITDKLNREAKIEGEEETEIEKIAGFRHELEEVGMIVSWCSQIEVLRHRAIGCFLTHCGWSSSLESLVLGVPVVAFPMWSDQPANAKLLEEIWKTGVRVRENSEGLVERGEIMRCLEAVMEAKSVELRENAEKWKRLATEAGREGGSSDKNVEAFVKSLF

SEQ ID NO: 81626 - protein, 408 aa, Arabidopsis thaliana
  peptide (1)..(408): Ceres Seq. ID no. 12660510
  misc_feature (1)..(405): Pfam Name: UDP-glucoronosyl and UDP-glucosyl transferase Pfam Description: UDP-glucoronosyl and UDP-glucosyl transferase
  misc_feature (1)..(408): Homolog of NCBI NO: 15220556 NR Description: UDP-glycosyltransferase family; protein id: [Arabidopsis thaliana] >gi|8778724|gb|AAF79732.1|AC005106_13
  misc_feature (1)..(407): Homolog of NCBI NO: 18390540 NR Description: UDP-glucose transferase(UGT1); protein id: supported by cDNA: gi_13605917, supported by cDNA: gi_13661274, by cDNA: gi_18700283 [Arabidopsis thaliana]
  misc_feature (1)..(404): Homolog of NCBI NO: 18414478 NR Description: glucosyltransferase like protein; protein id:
  misc_feature (1)..(404): Homolog of NCBI NO: 2149127 NR Description: UDP-glucose:indole-3-acetate
  misc_feature (1)..(407): Homolog of NCBI NO: 20146093 NR Description: glucosyltransferase NTGT2 [Nicotiana tabacum]
  misc_feature (1)..(407): Homolog of NCBI NO: 14192682 NR Description: cold-induced glucosyl transferase [Solanum
  misc_feature (1)..(404): Homolog of NCBI NO: 6683052 NR Description: anthocyanin 5-O-glucosyltransferase [Petunia x
  misc_feature (1)..(404): Homolog of NCBI NO: 7433892 NR Description: hypothetical protein - Arabidopsis thaliana glucosyltransferase like protein [Arabidopsis thaliana]
  misc_feature (1)..(404): Homolog of NCBI NO: 16604440 NR Description: AT4g15550/dl3815c [Arabidopsis thaliana]
  misc_feature (1)..(404): Homolog of NCBI NO: 15236407 NR Description: UDP-glycosyltransferase family; protein id: supported by cDNA: gi_17065025 [Arabidopsis thaliana]
MIPNHNNVENLSFLTFSDGFDDGVISNTDDVQNRLVHFERNGDKALSDFIEANQNGDSPVSCLIYTILPNWVPKVARRFHLPSVHLWIQPAFAFDIYYNYSTGNNSVFEFPNLPSLEIRDLPSFLSPSNTNKAAQAVYQELMDFLKEESNPKILVNTFDSLEPEFLTAIPNIEMVAVGPLLPAEIFTGSESGKDLSRDHQSSSYTLWLDSKTESSVIYVSFGTMVELSKKQIEELARALIEGGRPFLWVITDKLNREAKIEGEEETEIEKIAGFRHELEEVGMIVSWCSQIEVLRHRAIGCFLTHCGWSSSLESLVLGVPVVAFPMWSDQPANAKLLEEIWKTGVRVRENSEGLVERGEIMRCLEAVMEAKSVELRENAEKWKRLATEAGREGGSSDKNVEAFVKSLF

SEQ ID NO: 81627 - protein, 267 aa, Arabidopsis thaliana
  peptide (1)..(267): Ceres Seq. ID no. 12660511
  misc_feature (1)..(264): Pfam Name: UDP-glucoronosyl and UDP-glucosyl transferase Pfam Description: UDP-glucoronosyl and UDP-glucosyl transferase
  misc_feature (1)..(267): Homolog of NCBI NO: 15220556 NR Description: UDP-glycosyltransferase family; protein id: [Arabidopsis thaliana] >gi|8778724|gb|AAF79732.1|AC005106_13
  misc_feature (1)..(266): Homolog of NCBI NO: 18390540 NR Description: UDP-glucose transferase(UGT1); protein id: supported by cDNA: gi_13605917, supported by cDNA: gi_13661274, by cDNA: gi_18700283 [Arabidopsis thaliana]
  misc_feature (1)..(263): Homolog of NCBI NO: 18414478 NR Description: glucosyltransferase like protein; protein id:
  misc_feature (1)..(263): Homolog of NCBI NO: 2149127 NR Description: UDP-glucose:indole-3-acetate
  misc_feature (1)..(266): Homolog of NCBI NO: 20146093 NR Description: glucosyltransferase NTGT2 [Nicotiana tabacum]
  misc_feature (1)..(266): Homolog of NCBI NO: 14192682 NR Description: cold-induced glucosyl transferase [Solanum
  misc_feature (1)..(263): Homolog of NCBI NO: 6683052 NR Description: anthocyanin 5-O-glucosyltransferase [Petunia x
  misc_feature (1)..(263): Homolog of NCBI NO: 7433892 NR Description: hypothetical protein - Arabidopsis thaliana glucosyltransferase like protein [Arabidopsis thaliana]
  misc_feature (1)..(263): Homolog of NCBI NO: 16604440 NR Description: AT4g15550/dl3815c [Arabidopsis thaliana]
  misc_feature (1)..(263): Homolog of NCBI NO: 15236407 NR Description: UDP-glycosyltransferase family; protein id: supported by cDNA: gi_17065025 [Arabidopsis thaliana]
MDFLKEESNPKILVNTFDSLEPEFLTAIPNIEMVAVGPLLPAEIFTGSESGKDLSRDHQSSSYTLWLDSKTESSVIYVSFGTMVELSKKQIEELARALIEGGRPFLWVITDKLNREAKIEGEEETEIEKIAGFRHELEEVGMIVSWCSQIEVLRHRAIGCFLTHCGWSSSLESLVLGVPVVAFPMWSDQPANAKLLEEIWKTGVRVRENSEGLVERGEIMRCLEAVMEAKSVELRENAEKWKRLATEAGREGGSSDKNVEAFVKSLF

SEQ ID NO: 81628 - DNA, 1443 bp, Arabidopsis thaliana
  misc_feature (1)..(1443): Ceres Seq. ID no. 12660539
  misc_feature: MA Experiment ID: 20001904 Result: Up-regulated in Transcription
  misc_feature: MA Experiment 20001904 PARAMETER Experiment Name: At_Drought_Reproduction_P Parameter: Age (day) Value: 37
  misc_feature: MA Experiment 20001904 PARAMETER Experiment Name: At_Drought_Reproduction_P Parameter: Organism Value: A. thaliana
  misc_feature: MA Experiment 20001904 PARAMETER Experiment Name: At_Drought_Reproduction_P Parameter: Plant Line Value: WS
  misc_feature: MA Experiment 20001904 PARAMETER Experiment Name: At_Drought_Reproduction_P Parameter: Timepoint (day) Value: 7
  misc_feature: MA Experiment 20001904 PARAMETER Experiment Name: At_Drought_Reproduction_P Parameter: Tissue Value: Rosettes
  misc_feature: MA Experiment 20001904 PARAMETER Experiment Name: At_Drought_Reproduction_P Parameter: Treatment Value: Drought vs. No Drought
atgcagatttcttcttcttcttttattaccaaatttaccaatctccatatggtaagatcgactagtgatcatcatcaatggagacataactataacttgaagcagcttttcattccaaacctctctgtttcaaactctcagcaccttcctttgaaccagagtgttgcggccattgtgttcggaggaggatcagattctgagctttatccacttaccaaaacaagatccaaaggagcaatccctattgcagcaaactatagacttattgatgcagtcatcagtaattgcatcaacagtggcatcaccaagatctatgcaatcactcagtttaattccacttctctcaattcacatctctccaaagcttacagtggatttggactcggaaaagacagattcgttgaagtcattgccgcttatcagagcctagaagatcaaggatggtttcagggaactgctgatgcgataagaagatgcttgtgggtatttgaagagtttccagttacagagttcttggttcttcctgggcatcatctatacaaaatggattataagatgctaatcgaagatcatagaagaagcagagcggatataaccattgttggactaagctctgttacagaccatgactttggtttcggtttcatggaagttgattccacaaatgctgtcactagattcactatcaagggtcaacaagatttaatctctgtggcgaacagaacagcgacaagaagtgatggaacgtcttcttgctctgtcccaagcgcaggaatttacgtgatcggtcgagaacagatggtgaagcttctgagagaatgtttaataaaatcgaaagacttggccagcgaaatcattcctggtgcgatctctgaaggaatgaaggtgaaagctcatatgtttgatggatattgggaagatgtgaggagcattggagcttactatagagctaacatggagagtattaagaggtgtagattggatctcaaattctacgacagacaatgtcctctgtacacaatgcctcggtgtttgcctccaagctccatgagtgtagctgtaataaccaacagtattatcggagacgggtgcattctagataaatgtgtcatcagaggatcggtggttggaatgagaacaagaatcgctgatgaagtgattgtagaggattcgatcattgtcggttctgatatttatgagatggaagaagatgtgagaagaaaagggaaggagaagaagatagagattcgaatagggatcggtgaaaagagtcgaataagacgagccattgttgataaaaatgccaggattggtaaaaacgttatgataatcaacagagacaatgttgaagaaggaaaccgagaagctcaaggatacgtaataagagaaggaatcattatcatacttcgaaacgcagtgatcccgaacgactccatcctctga

SEQ ID NO: 81629 - protein, 480 aa, Arabidopsis thaliana
  peptide (1)..(480): Ceres Seq. ID no. 12660540
  misc_feature (56)..(324): Pfam Name: Nucleotidyl transferase Pfam Description: Nucleotidyl transferase
  misc_feature (1)..(480): Homolog of NCBI NO: 15220592 NR Description: putative ADP-glucose pyrophosphorylase, small
  misc_feature (28)..(480): Homolog of NCBI NO: 1707943 NR Description: Glucose-1-phosphate adenylyltransferase small
  misc_feature (44)..(480): Homolog of NCBI NO: 7340287 NR Description: small subunit ADP glucose pyrophosphorylase aestivum] >gi|20127139|gb|AAM10977.1|AF492644_1 small subunit ADP
  misc_feature (44)..(480): Homolog of NCBI NO: 2130035 NR Description: glucose-1-phosphate adenylyltransferase (EC
  misc_feature (44)..(480): Homolog of NCBI NO: 232172 NR Description: Glucose-1-phosphate adenylyltransferase small
  misc_feature (34)..(480): Homolog of NCBI NO: 1237082 NR Description: ADP-glucose pyrophosphorylase [Pisum sativum]
  misc_feature (28)..(480): Homolog of NCBI NO: 232164 NR Description: Glucose-1-phosphate adenylyltransferase small
  misc_feature (28)..(480): Homolog of NCBI NO: 1071859 NR Description: glucose-1-phosphate adenylyltransferase (EC
  misc_feature (28)..(480): Homolog of NCBI NO: 27819107 NR Description: ADP-glucose pyrophosphorylase small subunit
  misc_feature (54)..(480): Homolog of NCBI NO: 1707940 NR Description: Glucose-1-phosphate adenylyltransferase small
MQISSSSFITKFTNLHMVRSTSDHHQWRHNYNLKQLFIPNLSVSNSQHLPLNQSVAAIVFGGGSDSELYPLTKTRSKGAIPIAANYRLIDAVISNCINSGITKIYAITQFNSTSLNSHLSKAYSGFGLGKDRFVEVIAAYQSLEDQGWFQGTADAIRRCLWVFEEFPVTEFLVLPGHHLYKMDYKMLIEDHRRSRADITIVGLSSVTDHDFGFGFMEVDSTNAVTRFTIKGQQDLISVANRTATRSDGTSSCSVPSAGIYVIGREQMVKLLRECLIKSKDLASEIIPGAISEGMKVKAHMFDGYWEDVRSIGAYYRANMESIKRCRLDLKFYDRQCPLYTMPRCLPPSSMSVAVITNSIIGDGCILDKCVIRGSVVGMRTRIADEVIVEDSIIVGSDIYEMEEDVRRKGKEKKIEIRIGIGEKSRIRRAIVDKNARIGKNVMIINRDNVEEGNREAQGYVIREGIIIILRNAVIPNDSIL

SEQ ID NO: 81630 - protein, 464 aa, Arabidopsis thaliana
  peptide (1)..(464): Ceres Seq. ID no. 12660541
  misc_feature (40)..(308): Pfam Name: Nucleotidyl transferase Pfam Description: Nucleotidyl transferase
  misc_feature (1)..(464): Homolog of NCBI NO: 15220592 NR Description: putative ADP-glucose pyrophosphorylase, small
  misc_feature (12)..(464): Homolog of NCBI NO: 1707943 NR Description: Glucose-1-phosphate adenylyltransferase small
  misc_feature (28)..(464): Homolog of NCBI NO: 7340287 NR Description: small subunit ADP glucose pyrophosphorylase aestivum] >gi|20127139|gb|AAM10977.1|AF492644_1 small subunit ADP
  misc_feature (28)..(464): Homolog of NCBI NO: 2130035 NR Description: glucose-1-phosphate adenylyltransferase (EC
  misc_feature (28)..(464): Homolog of NCBI NO: 232172 NR Description: Glucose-1-phosphate adenylyltransferase small
  misc_feature (18)..(464): Homolog of NCBI NO: 1237082 NR Description: ADP-glucose pyrophosphorylase [Pisum sativum]
  misc_feature (12)..(464): Homolog of NCBI NO: 232164 NR Description: Glucose-1-phosphate adenylyltransferase small
  misc_feature (12)..(464): Homolog of NCBI NO: 1071859 NR Description: glucose-1-phosphate adenylyltransferase (EC
  misc_feature (12)..(464): Homolog of NCBI NO: 27819107 NR Description: ADP-glucose pyrophosphorylase small subunit
  misc_feature (38)..(464): Homolog of NCBI NO: 1707940 NR Description: Glucose-1-phosphate adenylyltransferase small
MVRSTSDHHQWRHNYNLKQLFIPNLSVSNSQHLPLNQSVAAIVFGGGSDSELYPLTKTRSKGAIPIAANYRLIDAVISNCINSGITKIYAITQFNSTSLNSHLSKAYSGFGLGKDRFVEVIAAYQSLEDQGWFQGTADAIRRCLWVFEEFPVTEFLVLPGHHLYKMDYKMLIEDHRRSRADITIVGLSSVTDHDFGFGFMEVDSTNAVTRFTIKGQQDLISVANRTATRSDGTSSCSVPSAGIYVIGREQMVKLLRECLIKSKDLASEIIPGAISEGMKVKAHMFDGYWEDVRSIGAYYRANMESIKRCRLDLKFYDRQCPLYTMPRCLPPSSMSVAVITNSIIGDGCILDKCVIRGSVVGMRTRIADEVIVEDSIIVGSDIYEMEEDVRRKGKEKKIEIRIGIGEKSRIRRAIVDKNARIGKNVMIINRDNVEEGNREAQGYVIREGIIIILRNAVIPNDSIL

SEQ ID NO: 81631 - protein, 299 aa, Arabidopsis thaliana
  peptide (1)..(299): Ceres Seq. ID no. 12660542
  misc_feature (1)..(143): Pfam Name: Nucleotidyl transferase Pfam Description: Nucleotidyl transferase
  misc_feature (1)..(299): Homolog of NCBI NO: 15220592 NR Description: putative ADP-glucose pyrophosphorylase, small
  misc_feature (1)..(299): Homolog of NCBI NO: 1707943 NR Description: Glucose-1-phosphate adenylyltransferase small
  misc_feature (1)..(299): Homolog of NCBI NO: 7340287 NR Description: small subunit ADP glucose pyrophosphorylase aestivum] >gi|20127139|gb|AAM10977.1|AF492644_1 small subunit ADP
  misc_feature (1)..(299): Homolog of NCBI NO: 2130035 NR Description: glucose-1-phosphate adenylyltransferase (EC
  misc_feature (1)..(299): Homolog of NCBI NO: 232172 NR Description: Glucose-1-phosphate adenylyltransferase small
  misc_feature (1)..(299): Homolog of NCBI NO: 1237082 NR Description: ADP-glucose pyrophosphorylase [Pisum sativum]
  misc_feature (1)..(299): Homolog of NCBI NO: 232164 NR Description: Glucose-1-phosphate adenylyltransferase small
  misc_feature (1)..(299): Homolog of NCBI NO: 1071859 NR Description: glucose-1-phosphate adenylyltransferase (EC
  misc_feature (1)..(299): Homolog of NCBI NO: 27819107 NR Description: ADP-glucose pyrophosphorylase small subunit
  misc_feature (1)..(299): Homolog of NCBI NO: 1707940 NR Description: Glucose-1-phosphate adenylyltransferase small
MDYKMLIEDHRRSRADITIVGLSSVTDHDFGFGFMEVDSTNAVTRFTIKGQQDLISVANRTATRSDGTSSCSVPSAGIYVIGREQMVKLLRECLIKSKDLASEIIPGAISEGMKVKAHMFDGYWEDVRSIGAYYRANMESIKRCRLDLKFYDRQCPLYTMPRCLPPSSMSVAVITNSIIGDGCILDKCVIRGSVVGMRTRIADEVIVEDSIIVGSDIYEMEEDVRRKGKEKKIEIRIGIGEKSRIRRAIVDKNARIGKNVMIINRDNVEEGNREAQGYVIREGIIIILRNAVIPNDSIL

SEQ ID NO: 81632 - DNA, 2532 bp, Arabidopsis thaliana
  misc_feature (1)..(2532): Ceres Seq. ID no. 12660561
  misc_feature: MA Experiment ID: 20000314 Result: Up-regulated in Transcription
  misc_feature: MA Experiment 20000314 PARAMETER Experiment Name: At_14day_Shoots-Roots_Sub_P Parameter: Age (day) Value: 14
  misc_feature: MA Experiment 20000314 PARAMETER Experiment Name: At_14day_Shoots-Roots_Sub_P Parameter: Organism Value: A. thaliana
  misc_feature: MA Experiment 20000314 PARAMETER Experiment Name: At_14day_Shoots-Roots_Sub_P Parameter: Plant Line Value: WS
  misc_feature: MA Experiment 20000314 PARAMETER Experiment Name: At_14day_Shoots-Roots_Sub_P Parameter: Tissue Value: Roots vs. Whole Plant
  misc_feature: MA Experiment ID: 20000352 Result: Down-regulated in Transcription
  misc_feature: MA Experiment 20000352 PARAMETER Experiment Name: At_Drought_Sub_P Parameter: Age (day) Value: 7
  misc_feature: MA Experiment 20000352 PARAMETER Experiment Name: At_Drought_Sub_P Parameter: Organism Value: A. thaliana
  misc_feature: MA Experiment 20000352 PARAMETER Experiment Name: At_Drought_Sub_P Parameter: Plant Line Value: WS
  misc_feature: MA Experiment 20000352 PARAMETER Experiment Name: At_Drought_Sub_P Parameter: Timepoint (hr) Value: 6
  misc_feature: MA Experiment 20000352 PARAMETER Experiment Name: At_Drought_Sub_P Parameter: Tissue Value: Whole Plant
  misc_feature: MA Experiment 20000352 PARAMETER Experiment Name: At_Drought_Sub_P Parameter: Treatment Value: Drought vs. No Drought
atggaagagtttcgttttctctatttgatatattcagcagcatttgcattgtgtctcgtcgtttctgttcttgctcaagaccaatcaggtttcataagcatcgattgtggaattccaagtggatcatcgtacaaagacgacacaacaggtataaactacgtctcagattcatcctttgtcgaaaccggagtctccaaatcgatccctttcacagctcaaagacagcttcaaaacctgaggagctttcccgaaggttcaagaaactgctatacattgattccaatacaagggaagggcaagaaatatctcataagagctagtttcatgtacggtaactacgatggagaaaatggttcaccggagtttgatctgtttcttggtggcaatatttgggataccgtcttgctcagcaatgggtcgagcattgtttccaaagaagtcgtttacttgagccaatctgagaacatatttgtgtgtttgggaaacaaaggcaaaggaactccatttatctcgactttagagcttaggtttctcgggaacgacaatacgacatatgattctccaaacggtgctctcttcttctctagacgctgggacttacgctctctcatgggttcacctgttagatatgatgatgatgtgtacgacagaatctggatacctcgcaactttggctattgtagagagatcaatacctcactccccgtgacctcagacaataatagttatagtctttcaagtttggtgatgagcacagcgatgactccaataaacacaacaagacccatcacaatgactttggaaaacagtgatccaaatgtcaggtactttgtctacatgcacttcgcagaggttgaagatcttagtctcaaaccgaaccagacaagagagttcgacatcagcattaacggagtgacagttgctgctggattcagccccaagtatcttcagacaaacacgttttttctaaaccctgagagccaatcgaaaattgcgttttcactcgttcgaaccccaaagtccactcttccgccaattgttaacgctctagagatctacgtcgcaaatagtttctcgcagtctctcactaaccaagaggatggtgacgcggttacgagtctaaagacgagttataaagtgaagaagaactggcacggagatccttgtttgcctaatgactacatttgggagggccttaattgcagttatgatagtcttactcctccaagaatcacatcactgaacttatcatcaagcgggttaacgggtcatatatcttcctccttctctaacctcacaatgattcaagagctagacttatcaaacaatggcttaaccggagacattccggagttcctctcaaaactgaagttcttgagggttttaaatctagaaaataacactcttaccggttcagttccatccgagttattagaaagatcaaacaccggatcattctcgctaaggctaggagaaaatccaggactctgtactgagatttcttgcagaaaaagcaacagcaaaaaactcgttatcccgcttgtcgcatcatttgcagcattgttcatcctcttgttattgtctggtgtgttttggagaatcagaaaccggagaaacaatccaatggcgaaatcggagaacaaattactgtttacctttgcagacgttataaagatgacaaataacttcggtcaagtcctcggcaaaggagggtttggaacagtctaccatggcttctatgacaaccttcaagtagctgttaaacttttatcagaaacatcagctcaaggattcaaagagtttcgctctgaggtcgaagttcttgtgagggttcatcatgttaacctcactgcgctgatcggttatttccatgaaggtgaccaaatgggattgatctatgagttcatggctaacggcaacatggcggatcatctcgcgggaaagtatcagcacacattgagctggagacaaaggcttcagattgcacttgatgcagcacaagggcttgagtatcttcactgtggatgcaaacctccaatagtccacagagatgtgaagacttcaaacatattgttgaacgagaaaaacagagcaaagcttgcagatttcggactctcacggagttttcatacagagagtcgttctcacgtatccaccctagtcgctggaactcccggatatctcgatccgctatgctttgagacaaatgggctaaacgagaagagtgacatttacagctttggagttgttctgttggagatgattacaggcaaaaccgtgatcaaagagtcacaaacgaaacgtgttcatgtgagtgattgggtgatatcgatcttgaggtctacgaatgatgtgaacaatgttatagattcaaagatggcgaaagattttgatgtaaactctgtatggaaagttgtggagcttgcattatcctctgtttcgcagaacgtctctgataggccaaacatgccacatattgttagaggattgaatgagtgtcttcaaagagaagagagtaacaagaactattga

SEQ ID NO: 81633 - protein, 843 aa, Arabidopsis thaliana
  peptide (1)..(843): Ceres Seq. ID no. 12660562
  misc_feature (1)..(836): Homolog of NCBI NO: 15224738 NR Description: putative receptor-like protein kinase; protein id:
  misc_feature (1)..(840): Homolog of NCBI NO: 15224743 NR Description: putative receptor-like protein kinase; protein id:
  misc_feature (73)..(842): Homolog of NCBI NO: 2129635 NR Description: serine/threonine-specific receptor protein kinase
  misc_feature (73)..(842): Homolog of NCBI NO: 15233796 NR Description: serine threonine-specific receptor protein kinase protein id: At4g29990.1 [Arabidopsis thaliana]
  misc_feature (1)..(832): Homolog of NCBI NO: 15224735 NR Description: putative receptor-like protein kinase; protein At2g19190.1, supported by cDNA: gi_19569556 [Arabidopsis
  misc_feature (16)..(546): Homolog of NCBI NO: 9837280 NR Description: leaf senescence-associated receptor-like protein
  misc_feature (668)..(837): Homolog of NCBI NO: 9837280 NR Description: leaf senescence-associated receptor-like protein
  misc_feature (544)..(668): Homolog of NCBI NO: 9837280 NR Description: leaf senescence-associated receptor-like protein
  misc_feature (6)..(524): Homolog of NCBI NO: 15218033 NR Description: receptor protein kinase, putative; protein id: [Arabidopsis thaliana] >gi|25405499|pir||B96557 probable receptor
  misc_feature (541)..(837): Homolog of NCBI NO: 15218033 NR Description: receptor protein kinase, putative; protein id: [Arabidopsis thaliana] >gi|25405499|pir||B96557 probable receptor
MEEFRFLYLIYSAAFALCLVVSVLAQDQSGFISIDCGIPSGSSYKDDTTGINYVSDSSFVETGVSKSIPFTAQRQLQNLRSFPEGSRNCYTLIPIQGKGKKYLIRASFMYGNYDGENGSPEFDLFLGGNIWDTVLLSNGSSIVSKEVVYLSQSENIFVCLGNKGKGTPFISTLELRFLGNDNTTYDSPNGALFFSRRWDLRSLMGSPVRYDDDVYDRIWIPRNFGYCREINTSLPVTSDNNSYSLSSLVMSTAMTPINTTRPITMTLENSDPNVRYFVYMHFAEVEDLSLKPNQTREFDISINGVTVAAGFSPKYLQTNTFFLNPESQSKIAFSLVRTPKSTLPPIVNALEIYVANSFSQSLTNQEDGDAVTSLKTSYKVKKNWHGDPCLPNDYIWEGLNCSYDSLTPPRITSLNLSSSGLTGHISSSFSNLTMIQELDLSNNGLTGDIPEFLSKLKFLRVLNLENNTLTGSVPSELLERSNTGSFSLRLGENPGLCTEISCRKSNSKKLVIPLVASFAALFILLLLSGVFWRIRNRRNNPMAKSENKLLFTFADVIKMTNNFGQVLGKGGFGTVYHGFYDNLQVAVKLLSETSAQGFKEFRSEVEVLVRVHHVNLTALIGYFHEGDQMGLIYEFMANGNMADHLAGKYQHTLSWRQRLQIALDAAQGLEYLHCGCKPPIVHRDVKTSNILLNEKNRAKLADFGLSRSFHTESRSHVSTLVAGTPGYLDPLCFETNGLNEKSDIYSFGVVLLEMITGKTVIKESQTKRVHVSDWVISILRSTNDVNNVIDSKMAKDFDVNSVWKVVELALSSVSQNVSDRPNMPHIVRGLNECLQREESNKNY

SEQ ID NO: 81634 - protein, 735 aa, Arabidopsis thaliana
  peptide (1)..(735): Ceres Seq. ID no. 12660563
  misc_feature (1)..(728): Homolog of NCBI NO: 15224738 NR Description: putative receptor-like protein kinase; protein id:
  misc_feature (1)..(732): Homolog of NCBI NO: 15224743 NR Description: putative receptor-like protein kinase; protein id:
  misc_feature (1)..(734): Homolog of NCBI NO: 2129635 NR Description: serine/threonine-specific receptor protein kinase
  misc_feature (1)..(734): Homolog of NCBI NO: 15233796 NR Description: serine threonine-specific receptor protein kinase protein id: At4g29990.1 [Arabidopsis thaliana]
  misc_feature (1)..(724): Homolog of NCBI NO: 15224735 NR Description: putative receptor-like protein kinase; protein At2g19190.1, supported by cDNA: gi_19569556 [Arabidopsis
  misc_feature (1)..(438): Homolog of NCBI NO: 9837280 NR Description: leaf senescence-associated receptor-like protein
  misc_feature (560)..(729): Homolog of NCBI NO: 9837280 NR Description: leaf senescence-associated receptor-like protein
  misc_feature (436)..(560): Homolog of NCBI NO: 9837280 NR Description: leaf senescence-associated receptor-like protein
  misc_feature (1)..(416): Homolog of NCBI NO: 15218033 NR Description: receptor protein kinase, putative; protein id: [Arabidopsis thaliana] >gi|25405499|pir||B96557 probable receptor
  misc_feature (433)..(729): Homolog of NCBI NO: 15218033 NR Description: receptor protein kinase, putative; protein id: [Arabidopsis thaliana] >gi|25405499|pir||B96557 probable receptor
MYGNYDGENGSPEFDLFLGGNIWDTVLLSNGSSIVSKEVVYLSQSENIFVCLGNKGKGTPFISTLELRFLGNDNTTYDSPNGALFFSRRWDLRSLMGSPVRYDDDVYDRIWIPRNFGYCREINTSLPVTSDNNSYSLSSLVMSTAMTPINTTRPITMTLENSDPNVRYFVYMHFAEVEDLSLKPNQTREFDISINGVTVAAGFSPKYLQTNTFFLNPESQSKIAFSLVRTPKSTLPPIVNALEIYVANSFSQSLTNQEDGDAVTSLKTSYKVKKNWHGDPCLPNDYIWEGLNCSYDSLTPPRITSLNLSSSGLTGHISSSFSNLTMIQELDLSNNGLTGDIPEFLSKLKFLRVLNLENNTLTGSVPSELLERSNTGSFSLRLGENPGLCTEISCRKSNSKKLVIPLVASFAALFILLLLSGVFWRIRNRRNNPMAKSENKLLFTFADVIKMTNNFGQVLGKGGFGTVYHGFYDNLQVAVKLLSETSAQGFKEFRSEVEVLVRVHHVNLTALIGYFHEGDQMGLIYEFMANGNMADHLAGKYQHTLSWRQRLQIALDAAQGLEYLHCGCKPPIVHRDVKTSNILLNEKNRAKLADFGLSRSFHTESRSHVSTLVAGTPGYLDPLCFETNGLNEKSDIYSFGVVLLEMITGKTVIKESQTKRVHVSDWVISILRSTNDVNNVIDSKMAKDFDVNSVWKVVELALSSVSQNVSDRPNMPHIVRGLNECLQREESNKNY

SEQ ID NO: 81635 - protein, 640 aa, Arabidopsis thaliana
  peptide (1)..(640): Ceres Seq. ID no. 12660564
  misc_feature (1)..(633): Homolog of NCBI NO: 15224738 NR Description: putative receptor-like protein kinase; protein id:
  misc_feature (1)..(637): Homolog of NCBI NO: 15224743 NR Description: putative receptor-like protein kinase; protein id:
  misc_feature (1)..(639): Homolog of NCBI NO: 2129635 NR Description: serine/threonine-specific receptor protein kinase
  misc_feature (1)..(639): Homolog of NCBI NO: 15233796 NR Description: serine threonine-specific receptor protein kinase protein id: At4g29990.1 [Arabidopsis thaliana]
  misc_feature (1)..(629): Homolog of NCBI NO: 15224735 NR Description: putative receptor-like protein kinase; protein At2g19190.1, supported by cDNA: gi_19569556 [Arabidopsis
  misc_feature (1)..(343): Homolog of NCBI NO: 9837280 NR Description: leaf senescence-associated receptor-like protein
  misc_feature (465)..(634): Homolog of NCBI NO: 9837280 NR Description: leaf senescence-associated receptor-like protein
  misc_feature (341)..(465): Homolog of NCBI NO: 9837280 NR Description: leaf senescence-associated receptor-like protein
  misc_feature (1)..(321): Homolog of NCBI NO: 15218033 NR Description: receptor protein kinase, putative; protein id: [Arabidopsis thaliana] >gi|25405499|pir||B96557 probable receptor
  misc_feature (338)..(634): Homolog of NCBI NO: 15218033 NR Description: receptor protein kinase, putative; protein id: [Arabidopsis thaliana] >gi|25405499|pir||B96557 probable receptor
MGSPVRYDDDVYDRIWIPRNFGYCREINTSLPVTSDNNSYSLSSLVMSTAMTPINTTRPITMTLENSDPNVRYFVYMHFAEVEDLSLKPNQTREFDISINGVTVAAGFSPKYLQTNTFFLNPESQSKIAFSLVRTPKSTLPPIVNALEIYVANSFSQSLTNQEDGDAVTSLKTSYKVKKNWHGDPCLPNDYIWEGLNCSYDSLTPPRITSLNLSSSGLTGHISSSFSNLTMIQELDLSNNGLTGDIPEFLSKLKFLRVLNLENNTLTGSVPSELLERSNTGSFSLRLGENPGLCTEISCRKSNSKKLVIPLVASFAALFILLLLSGVFWRIRNRRNNPMAKSENKLLFTFADVIKMTNNFGQVLGKGGFGTVYHGFYDNLQVAVKLLSETSAQGFKEFRSEVEVLVRVHHVNLTALIGYFHEGDQMGLIYEFMANGNMADHLAGKYQHTLSWRQRLQIALDAAQGLEYLHCGCKPPIVHRDVKTSNILLNEKNRAKLADFGLSRSFHTESRSHVSTLVAGTPGYLDPLCFETNGLNEKSDIYSFGVVLLEMITGKTVIKESQTKRVHVSDWVISILRSTNDVNNVIDSKMAKDFDVNSVWKVVELALSSVSQNVSDRPNMPHIVRGLNECLQREESNKNY

SEQ ID NO: 81636 - DNA, 3942 bp, Arabidopsis thaliana
  misc_feature (1)..(3942): Ceres Seq. ID no. 12660588
  misc_feature: MA Experiment ID: 20000173 Result: Down-regulated in Transcription
  misc_feature: MA Experiment 20000173 PARAMETER Experiment Name: At_42deg_Heat_P Parameter: Age (day) Value: 14
  misc_feature: MA Experiment 20000173 PARAMETER Experiment Name: At_42deg_Heat_P Parameter: Organism Value: A. thaliana
  misc_feature: MA Experiment 20000173 PARAMETER Experiment Name: At_42deg_Heat_P Parameter: Plant Line Value: WS
  misc_feature: MA Experiment 20000173 PARAMETER Experiment Name: At_42deg_Heat_P Parameter: Temperature (deg C) Value: 42 vs. 22
  misc_feature: MA Experiment 20000173 PARAMETER Experiment Name: At_42deg_Heat_P Parameter: Timepoint (hr) Value: 6
  misc_feature: MA Experiment 20000173 PARAMETER Experiment Name: At_42deg_Heat_P Parameter: Tissue Value: Aerial
  misc_feature: MA Experiment ID: 20000179 Result: Down-regulated in Transcription
  misc_feature: MA Experiment 20000179 PARAMETER Experiment Name: At_Germinating_Seeds_P Parameter: Age (hr) Value: 6 vs. 0
  misc_feature: MA Experiment 20000179 PARAMETER Experiment Name: At_Germinating_Seeds_P Parameter: Tissue Value: Germinating Seeds
  misc_feature: MA Experiment ID: 20000180 Result: Down-regulated in Transcription
  misc_feature: MA Experiment 20000180 PARAMETER Experiment Name: At_Germinating_Seeds_P Parameter: Age (hr) Value: 24 vs. 0
  misc_feature: MA Experiment 20000180 PARAMETER Experiment Name: At_Germinating_Seeds_P Parameter: Tissue Value: Germinating Seeds
  misc_feature: MA Experiment ID: 20000234 Result: Up-regulated in Transcription
  misc_feature: MA Experiment 20000234 PARAMETER Experiment Name: At_Siliques_P Parameter: Age (day) Value: 21
  misc_feature: MA Experiment 20000234 PARAMETER Experiment Name: At_Siliques_P Parameter: Organism Value: A. thaliana
  misc_feature: MA Experiment 20000234 PARAMETER Experiment Name: At_Siliques_P Parameter: Plant Line Value: WS
  misc_feature: MA Experiment 20000234 PARAMETER Experiment Name: At_Siliques_P Parameter: Tissue Value: Less Than 5mm Siliques vs. Whole Plant
aaaaaacgttcgaagaggaaaaaaaaaaaagagggagaagagcaacgaagacggacctgcaaattctgcagtctccactgacactttcgatctttctctctgtccactttcttcaatcctcagttgtttatggaaggagataaccatcagaggtagcatttatccatgcatcccaagcgatcaagtcaaggagatggttcagttactaagccagttagaaccagtgataggcttaggaggaggcccaaattgcatggtcgctcatacttgtactactcttcaccaaacatgttacataatcggaaaagaaacacaaagacaagaacggcagcctctcagatcgcaaagatgctgcacaaaggaaaccgtccagcgagggcatcaaatgccgcgccaattgcatctgatctccggcgttccacgaggaagagaagaatttctgtaaacctggaggactatacagacagttctggagcggaggatgaggatatgatgagtccagcatatcgaactttgaggaggagagttcataaaaacttctcaacttcaaaaagtagaaaggacatggatgctgaattggcaccacgtcgtgagggtctccgtcctcgtcgttcaacaacaattgctaataaacgactgaaaacagaatctggcgctgaccaagatacatcagaagagaaagatggccaagatgaaactgagaatgggaatgaattagatgatgcggatgatggtgaaaatgaggttgaggctgaagacgagggtaatggagaagatgaaggcgatggcgaagatgagggagaagaagatggtgatgatgatgaagagggtgatgaagaacaagagggaaggaagagatatgatctgcgaaaccgtgctgaagtccggagaatgcctacgggagaaatcaacaagcaacaacaacctagatctcctcggagagtattgcatcagggcatgggcaccagggttggaagagatggtaggagaggtgggtctcggcctcacaagcgccatcgctttacaagaacagatgattcagatgattctcttcttgtggacgagttggaccagggccctgcaattccctgggctcgaggtggaaacagatctggagcaccttggctatttgggggtttggacacgtatgggtcaagttcattggggttgaacgttggagcttctggttggggtcaccagagtgatggtttggctgcattaacttctggtgttcagactgctggcccaagctctaaaggaggtgcagatatccagccactgcagattaatgaggatataaattttgatgacattggtgggctgtccgaatacattaatgatttgaaggaaatggttttctttccgttgctgtatccagagttctttgcaagttacagcattactcctcccagaggtgtactgctgtgtggtcctccaggcactggtaaaacactgattgctcgagcattagcatgtgctgcttcaaaagctggacagaaagttagcttttatatgcggaagggtgctgatgttcttagtaagtgggttggcgaggctgagagacagctaaagctactctttgaggaggctcagcgaaaccagccttccataatcttttttgatgaaattgatggtcttgctcctgtaagatctagcaagcaggaacaaatacataattctattgtttcaactttactggcgctgatggatggcctcgattctcgtggtcaagttgttctcattggagcaacaaacagggtagatgcaatagacggagctttacgccgccctggcagattcgatcgggagtttaatttttccttaccaggttgcgaagcacgagccgaaatattggatattcacactcgtaaatggaagcacccacctactagggagctgaaagaggaactggcagctacttgtgtagggtattgtggtgctgatctaaaagctttgtgcactgaagctgcgattcgtgcttttcgtgagaaatatccacaagtttataccagtgatgataaatacgccatagatgttgggttggttaatgttgaaaagagccactttgtagaggcaatgtcagctattactcctgctgcccatagagggtctgttgtgcaatccagaccactctctccggttgtgttgccatgtttacatcgacacctccttgaatccatgagtttaatatcagatatttttccctcgtcagccacgtcatcggagttgacgaagctgtcaatacttacatttggatctgcaattcctcttgtttatcgacctcgacttttgctgcttggtggtgaaggagttggactggatcatcttgggcctgcaattttacatgagctagaaaagttccctattcattctctgggacttccatctctcctttcggatcctggtgcaaagaccccagaagaagcgttagtacatatatttagtgaagctagaagaacaacaccttcaatactttacataccaatgttcaataattggtgggaaaatgctcatgaacagcttagggctgtatttctgactttgttagaagaattgccatcaaatctacccatattattacttgctacatcttatggtgaattgtctgacatggaagagcagtcagtatttgacaatcgatctgtctatactgtggacaaaccatcaagtgaagacaggtctttgttctttgaccgtttgattgaagctgctctctcagtcatttctggcttaaatggcaaacctgatggaccacaaccccttccagaacttcccaaggttccaaaagaacctactggtccaaaacccgcagaagtaaaagccaaggtggaagcagagcagcatgcccttcggcgattgcgtatgtgtctcagagatgtttgcaatagaatactatatgataaaagattcagcgcattccactttccagttactgacgaggatgctccaaactatcgctcaataattcaaattccaatggatacggctactctgctgcagcgtgttgatactgggcagtatctgacatgtacaccgtttttgcaagatgtggatctcattgtgagaaatgccaaggcttacaatggagatgattacgctggagcgagaattgtcagtagagcctatgagcttcgagatgtagtgcatgggatgctgtcacagatggacccagcactgctaacatattgtgataagatcgcagctgaaggtggtccttcactgataccagatgatctgagtggatcaatcctcggtttagctcctgttgtgcagatgggaactgttactagaaccagtgccagacttcgaaatgtgcagccagaggttaatttagatcgagattatgaaggtcttaaaaagcccaagaaaactactgatgctgtcagtatagattcagctgcagacaaatcacagaaccaagattcaggccaagaaatgccatctccggatgcggccaacccacagtcagcagctccttctccaacagatggtgatagagaagaccaaagcgagccaccaagtaaagaggcatctgcagaagatatgagtggtgattcttgcaagggtcctgcggccaagtcggataaagaaatttcaagccgaacagaatctgtaaagggagtattcatggaacgtactgacaactacagcattccgcagatggagaggctttacactcgaatcatgaagggtgttcttgagactctggacaaagggcttcgtgatgatgataataatcctaagcattcaattttgagatttttgtcggaattcgcacagcatcaggcgaatttctgaatctaaattttctcatatcggtcactaggataggtttgctaggagaaagaatgaaaggaacaaaagattttttttggttttttaaaatccggattcttcttttgactgaaaaagttgcaagaacaaaaggtaatagtttatcgg

SEQ ID NO: 81637 - protein, 1210 aa, Arabidopsis thaliana
  peptide (1)..(1210): Ceres Seq. ID no. 12660589
  misc_feature (417)..(607): Pfam Name: ATPase family associated with various cellular Pfam Description: ATPase family associated with various cellular
  misc_feature (701)..(1011): Homolog of NCBI NO: 24497618 NR Description: PRO2000 protein [Homo sapiens]
  misc_feature (9)..(295): Homolog of NCBI NO: 24497618 NR Description: PRO2000 protein [Homo sapiens]
  misc_feature (367)..(680): Homolog of NCBI NO: 24497618 NR Description: PRO2000 protein [Homo sapiens]
  misc_feature (165)..(300): Homolog of NCBI NO: 24497618 NR Description: PRO2000 protein [Homo sapiens]
  misc_feature (701)..(1011): Homolog of NCBI NO: 34863089 NR Description: similar to Hypothetical protein KIAA1240 [Rattus
  misc_feature (367)..(685): Homolog of NCBI NO: 34863089 NR Description: similar to Hypothetical protein KIAA1240 [Rattus
  misc_feature (9)..(295): Homolog of NCBI NO: 21756799 NR Description: unnamed protein product [Homo sapiens]
  misc_feature (367)..(680): Homolog of NCBI NO: 21756799 NR Description: unnamed protein product [Homo sapiens]
  misc_feature (701)..(885): Homolog of NCBI NO: 21756799 NR Description: unnamed protein product [Homo sapiens]
  misc_feature (165)..(300): Homolog of NCBI NO: 21756799 NR Description: unnamed protein product [Homo sapiens]
MHPKRSSQGDGSVTKPVRTSDRLRRRPKLHGRSYLYYSSPNMLHNRKRNTKTRTAASQIAKMLHKGNRPARASNAAPIASDLRRSTRKRRISVNLEDYTDSSGAEDEDMMSPAYRTLRRRVHKNFSTSKSRKDMDAELAPRREGLRPRRSTTIANKRLKTESGADQDTSEEKDGQDETENGNELDDADDGENEVEAEDEGNGEDEGDGEDEGEEDGDDDEEGDEEQEGRKRYDLRNRAEVRRMPTGEINKQQQPRSPRRVLHQGMGTRVGRDGRRGGSRPHKRHRFTRTDDSDDSLLVDELDQGPAIPWARGGNRSGAPWLFGGLDTYGSSSLGLNVGASGWGHQSDGLAALTSGVQTAGPSSKGGADIQPLQINEDINFDDIGGLSEYINDLKEMVFFPLLYPEFFASYSITPPRGVLLCGPPGTGKTLIARALACAASKAGQKVSFYMRKGADVLSKWVGEAERQLKLLFEEAQRNQPSIIFFDEIDGLAPVRSSKQEQIHNSIVSTLLALMDGLDSRGQVVLIGATNRVDAIDGALRRPGRFDREFNFSLPGCEARAEILDIHTRKWKHPPTRELKEELAATCVGYCGADLKALCTEAAIRAFREKYPQVYTSDDKYAIDVGLVNVEKSHFVEAMSAITPAAHRGSVVQSRPLSPVVLPCLHRHLLESMSLISDIFPSSATSSELTKLSILTFGSAIPLVYRPRLLLLGGEGVGLDHLGPAILHELEKFPIHSLGLPSLLSDPGAKTPEEALVHIFSEARRTTPSILYIPMFNNWWENAHEQLRAVFLTLLEELPSNLPILLLATSYGELSDMEEQSVFDNRSVYTVDKPSSEDRSLFFDRLIEAALSVISGLNGKPDGPQPLPELPKVPKEPTGPKPAEVKAKVEAEQHALRRLRMCLRDVCNRILYDKRFSAFHFPVTDEDAPNYRSIIQIPMDTATLLQRVDTGQYLTCTPFLQDVDLIVRNAKAYNGDDYAGARIVSRAYELRDVVHGMLSQMDPALLTYCDKIAAEGGPSLIPDDLSGSILGLAPVVQMGTVTRTSARLRNVQPEVNLDRDYEGLKKPKKTTDAVSIDSAADKSQNQDSGQEMPSPDAANPQSAAPSPTDGDREDQSEPPSKEASAEDMSGDSCKGPAAKSDKEISSRTESVKGVFMERTDNYSIPQMERLYTRIMKGVLETLDKGLRDDDNNPKHSILRFLSEFAQHQANF

SEQ ID NO: 81638 - protein, 1169 aa, Arabidopsis thaliana
  peptide (1)..(1169): Ceres Seq. ID no. 12660590
  misc_feature (376)..(566): Pfam Name: ATPase family associated with various cellular Pfam Description: ATPase family associated with various cellular
  misc_feature (660)..(970): Homolog of NCBI NO: 24497618 NR Description: PRO2000 protein [Homo sapiens]
  misc_feature (1)..(254): Homolog of NCBI NO: 24497618 NR Description: PRO2000 protein [Homo sapiens]
  misc_feature (326)..(639): Homolog of NCBI NO: 24497618 NR Description: PRO2000 protein [Homo sapiens]
  misc_feature (124)..(259): Homolog of NCBI NO: 24497618 NR Description: PRO2000 protein [Homo sapiens]
  misc_feature (660)..(970): Homolog of NCBI NO: 34863089 NR Description: similar to Hypothetical protein KIAA1240 [Rattus
  misc_feature (326)..(644): Homolog of NCBI NO: 34863089 NR Description: similar to Hypothetical protein KIAA1240 [Rattus
  misc_feature (1)..(254): Homolog of NCBI NO: 21756799 NR Description: unnamed protein product [Homo sapiens]
  misc_feature (326)..(639): Homolog of NCBI NO: 21756799 NR Description: unnamed protein product [Homo sapiens]
  misc_feature (660)..(844): Homolog of NCBI NO: 21756799 NR Description: unnamed protein product [Homo sapiens]
  misc_feature (124)..(259): Homolog of NCBI NO: 21756799 NR Description: unnamed protein product [Homo sapiens]
MLHNRKRNTKTRTAASQIAKMLHKGNRPARASNAAPIASDLRRSTRKRRISVNLEDYTDSSGAEDEDMMSPAYRTLRRRVHKNFSTSKSRKDMDAELAPRREGLRPRRSTTIANKRLKTESGADQDTSEEKDGQDETENGNELDDADDGENEVEAEDEGNGEDEGDGEDEGEEDGDDDEEGDEEQEGRKRYDLRNRAEVRRMPTGEINKQQQPRSPRRVLHQGMGTRVGRDGRRGGSRPHKRHRFTRTDDSDDSLLVDELDQGPAIPWARGGNRSGAPWLFGGLDTYGSSSLGLNVGASGWGHQSDGLAALTSGVQTAGPSSKGGADIQPLQINEDINFDDIGGLSEYINDLKEMVFFPLLYPEFFASYSITPPRGVLLCGPPGTGKTLIARALACAASKAGQKVSFYMRKGADVLSKWVGEAERQLKLLFEEAQRNQPSIIFFDEIDGLAPVRSSKQEQIHNSIVSTLLALMDGLDSRGQVVLIGATNRVDAIDGALRRPGRFDREFNFSLPGCEARAEILDIHTRKWKHPPTRELKEELAATCVGYCGADLKALCTEAAIRAFREKYPQVYTSDDKYAIDVGLVNVEKSHFVEAMSAITPAAHRGSVVQSRPLSPVVLPCLHRHLLESMSLISDIFPSSATSSELTKLSILTFGSAIPLVYRPRLLLLGGEGVGLDHLGPAILHELEKFPIHSLGLPSLLSDPGAKTPEEALVHIFSEARRTTPSILYIPMFNNWWENAHEQLRAVFLTLLEELPSNLPILLLATSYGELSDMEEQSVFDNRSVYTVDKPSSEDRSLFFDRLIEAALSVISGLNGKPDGPQPLPELPKVPKEPTGPKPAEVKAKVEAEQHALRRLRMCLRDVCNRILYDKRFSAFHFPVTDEDAPNYRSIIQIPMDTATLLQRVDTGQYLTCTPFLQDVDLIVRNAKAYNGDDYAGARIVSRAYELRDVVHGMLSQMDPALLTYCDKIAAEGGPSLIPDDLSGSILGLAPVVQMGTVTRTSARLRNVQPEVNLDRDYEGLKKPKKTTDAVSIDSAADKSQNQDSGQEMPSPDAANPQSAAPSPTDGDREDQSEPPSKEASAEDMSGDSCKGPAAKSDKEISSRTESVKGVFMERTDNYSIPQMERLYTRIMKGVLETLDKGLRDDDNNPKHSILRFLSEFAQHQANF

SEQ ID NO: 81639 - protein, 1149 aa, Arabidopsis thaliana
  peptide (1)..(1149): Ceres Seq. ID no. 12660591
  misc_feature (356)..(546): Pfam Name: ATPase family associated with various cellular Pfam Description: ATPase family associated with various cellular
  misc_feature (640)..(950): Homolog of NCBI NO: 24497618 NR Description: PRO2000 protein [Homo sapiens]
  misc_feature (1)..(234): Homolog of NCBI NO: 24497618 NR Description: PRO2000 protein [Homo sapiens]
  misc_feature (306)..(619): Homolog of NCBI NO: 24497618 NR Description: PRO2000 protein [Homo sapiens]
  misc_feature (104)..(239): Homolog of NCBI NO: 24497618 NR Description: PRO2000 protein [Homo sapiens]
  misc_feature (640)..(950): Homolog of NCBI NO: 34863089 NR Description: similar to Hypothetical protein KIAA1240 [Rattus
  misc_feature (306)..(624): Homolog of NCBI NO: 34863089 NR Description: similar to Hypothetical protein KIAA1240 [Rattus
  misc_feature (1)..(234): Homolog of NCBI NO: 21756799 NR Description: unnamed protein product [Homo sapiens]
  misc_feature (306)..(619): Homolog of NCBI NO: 21756799 NR Description: unnamed protein product [Homo sapiens]
  misc_feature (640)..(824): Homolog of NCBI NO: 21756799 NR Description: unnamed protein product [Homo sapiens]
  misc_feature (104)..(239): Homolog of NCBI NO: 21756799 NR Description: unnamed protein product [Homo sapiens]
MLHKGNRPARASNAAPIASDLRRSTRKRRISVNLEDYTDSSGAEDEDMMSPAYRTLRRRVHKNFSTSKSRKDMDAELAPRREGLRPRRSTTIANKRLKTESGADQDTSEEKDGQDETENGNELDDADDGENEVEAEDEGNGEDEGDGEDEGEEDGDDDEEGDEEQEGRKRYDLRNRAEVRRMPTGEINKQQQPRSPRRVLHQGMGTRVGRDGRRGGSRPHKRHRFTRTDDSDDSLLVDELDQGPAIPWARGGNRSGAPWLFGGLDTYGSSSLGLNVGASGWGHQSDGLAALTSGVQTAGPSSKGGADIQPLQINEDINFDDIGGLSEYINDLKEMVFFPLLYPEFFASYSITPPRGVLLCGPPGTGKTLIARALACAASKAGQKVSFYMRKGADVLSKWVGEAERQLKLLFEEAQRNQPSIIFFDEIDGLAPVRSSKQEQIHNSIVSTLLALMDGLDSRGQVVLIGATNRVDAIDGALRRPGRFDREFNFSLPGCEARAEILDIHTRKWKHPPTRELKEELAATCVGYCGADLKALCTEAAIRAFREKYPQVYTSDDKYAIDVGLVNVEKSHFVEAMSAITPAAHRGSVVQSRPLSPVVLPCLHRHLLESMSLISDIFPSSATSSELTKLSILTFGSAIPLVYRPRLLLLGGEGVGLDHLGPAILHELEKFPIHSLGLPSLLSDPGAKTPEEALVHIFSEARRTTPSILYIPMFNNWWENAHEQLRAVFLTLLEELPSNLPILLLATSYGELSDMEEQSVFDNRSVYTVDKPSSEDRSLFFDRLIEAALSVISGLNGKPDGPQPLPELPKVPKEPTGPKPAEVKAKVEAEQHALRRLRMCLRDVCNRILYDKRFSAFHFPVTDEDAPNYRSIIQIPMDTATLLQRVDTGQYLTCTPFLQDVDLIVRNAKAYNGDDYAGARIVSRAYELRDVVHGMLSQMDPALLTYCDKIAAEGGPSLIPDDLSGSILGLAPVVQMGTVTRTSARLRNVQPEVNLDRDYEGLKKPKKTTDAVSIDSAADKSQNQDSGQEMPSPDAANPQSAAPSPTDGDREDQSEPPSKEASAEDMSGDSCKGPAAKSDKEISSRTESVKGVFMERTDNYSIPQMERLYTRIMKGVLETLDKGLRDDDNNPKHSILRFLSEFAQHQANF

SEQ ID NO: 81640 - DNA, 1038 bp, Arabidopsis thaliana
  misc_feature (1)..(1038): Ceres Seq. ID no. 12660608
atggcatcatccaccggcgagaaaggtctcatcgtgagcttcggcgagatgctcattgacttcgtccctaccgtatccggcgtctccctctccgaatcccccggatttctcaaagctcccggcggtgctccggccaacgtcgccatcgctgtttcacgtcttggaggtcgtgccgccttcgttgggaagctgggagacgatgatttcggtcatatgctcgccggaatcttgagaaagaacggtgtcgacgatcaggggatcaatttcgacgaaggggcgagaactgcactcgcttttgtcactttgcgttctgacggagaacgagagtttatgttttaccggaatcccagcgccgatatgcttctccggccagatgaactgaatcttgaacttatcagatccgcgaaagtgttccactatggatcaataagtttgataacagagccatgtagatcagctcacatgaaggcaatggaagtggcgaaagaagctggagctcttctttcctacgatccaaacctcagggaacctctttggccatcacctgaagaagctaggacacagatcatgagtatctgggacaaggctgacatcattaaggtcagtgacgtggagcttgaattcttgaccgaaaacaaaaccatggatgataagacagcaatgtctctatggcatcccaaccttaagctcttgcttgttactctcggcgaaaagggatgtacttatttcacaaagaaattccatggatcggtagaaacattccatgtggacgccgtggatactaccggagctggagattcgtttgttggtgcacttctacaacagattgttgatgaccagtccgtactcgaggatgaagcgaggttgagaaaagtgctgagatttgcaaacgcttgtggagccatcacaacaactaaaaaaggagccattccagctcttcctacagacattgaagctctcagttttcttaaagaccaaaagaaacgtcaaaccaatcttaaattctcaaaatggtgttgtacggcttctccttgttaa

SEQ ID NO: 81641 - protein, 345 aa, Arabidopsis thaliana
  peptide (1)..(345): Ceres Seq. ID no. 12660609
  misc_feature (8)..(316): Pfam Name: pfkB family carbohydrate kinase Pfam Description: pfkB family carbohydrate kinase
  misc_feature (1)..(345): Homolog of NCBI NO: 15221364 NR Description: fructokinase, putative; protein id: At1g06020.1
  misc_feature (1)..(326): Homolog of NCBI NO: 15221365 NR Description: fructokinase, putative; protein id: At1g06030.1, by cDNA: gi_20258777 [Arabidopsis thaliana]
  misc_feature (3)..(324): Homolog of NCBI NO: 15224669 NR Description: putative fructokinase; protein id: At2g31390.1, by cDNA: 17664., supported by cDNA: gi_14423527, supported by gi_18389235, supported by cDNA: gi_20259070 [Arabidopsis
  misc_feature (3)..(324): Homolog of NCBI NO: 14423528 NR Description: putative fructokinase [Arabidopsis thaliana]
  misc_feature (1)..(324): Homolog of NCBI NO: 21592495 NR Description: fructokinase-like protein [Arabidopsis thaliana]
  misc_feature (1)..(324): Homolog of NCBI NO: 15231692 NR Description: fructokinase-like protein; protein id: supported by cDNA: 24751. [Arabidopsis thaliana]
  misc_feature (3)..(324): Homolog of NCBI NO: 1915974 NR Description: fructokinase [Lycopersicon esculentum]
  misc_feature (3)..(324): Homolog of NCBI NO: 32765547 NR Description: fructokinase 2 [Lycopersicon hirsutum]
  misc_feature (8)..(324): Homolog of NCBI NO: 7434223 NR Description: fructokinase (EC 2.7.1.4) - beet
  misc_feature (9)..(324): Homolog of NCBI NO: 585973 NR Description: FRUCTOKINASE >gi|626018|pir||S39997 fructokinase
MASSTGEKGLIVSFGEMLIDFVPTVSGVSLSESPGFLKAPGGAPANVAIAVSRLGGRAAFVGKLGDDDFGHMLAGILRKNGVDDQGINFDEGARTALAFVTLRSDGEREFMFYRNPSADMLLRPDELNLELIRSAKVFHYGSISLITEPCRSAHMKAMEVAKEAGALLSYDPNLREPLWPSPEEARTQIMSIWDKADIIKVSDVELEFLTENKTMDDKTAMSLWHPNLKLLLVTLGEKGCTYFTKKFHGSVETFHVDAVDTTGAGDSFVGALLQQIVDDQSVLEDEARLRKVLRFANACGAITTTKKGAIPALPTDIEALSFLKDQKKRQTNLKFSKWCCTASPC

SEQ ID NO: 81642 - protein, 329 aa, Arabidopsis thaliana
  peptide (1)..(329): Ceres Seq. ID no. 12660610
  misc_feature (1)..(300): Pfam Name: pfkB family carbohydrate kinase Pfam Description: pfkB family carbohydrate kinase
  misc_feature (1)..(329): Homolog of NCBI NO: 15221364 NR Description: fructokinase, putative; protein id: At1g06020.1
  misc_feature (1)..(310): Homolog of NCBI NO: 15221365 NR Description: fructokinase, putative; protein id: At1g06030.1, by cDNA: gi_20258777 [Arabidopsis thaliana]
  misc_feature (1)..(308): Homolog of NCBI NO: 15224669 NR Description: putative fructokinase; protein id: At2g31390.1, by cDNA: 17664., supported by cDNA: gi_14423527, supported by gi_18389235, supported by cDNA: gi_20259070 [Arabidopsis
  misc_feature (1)..(308): Homolog of NCBI NO: 14423528 NR Description: putative fructokinase [Arabidopsis thaliana]
  misc_feature (1)..(308): Homolog of NCBI NO: 21592495 NR Description: fructokinase-like protein [Arabidopsis thaliana]
  misc_feature (1)..(308): Homolog of NCBI NO: 15231692 NR Description: fructokinase-like protein; protein id: supported by cDNA: 24751. [Arabidopsis thaliana]
  misc_feature (1)..(308): Homolog of NCBI NO: 1915974 NR Description: fructokinase [Lycopersicon esculentum]
  misc_feature (1)..(308): Homolog of NCBI NO: 32765547 NR Description: fructokinase 2 [Lycopersicon hirsutum]
  misc_feature (1)..(308): Homolog of NCBI NO: 7434223 NR Description: fructokinase (EC 2.7.1.4) - beet
  misc_feature (1)..(308): Homolog of NCBI NO: 585973 NR Description: FRUCTOKINASE >gi|626018|pir||S39997 fructokinase
MLIDFVPTVSGVSLSESPGFLKAPGGAPANVAIAVSRLGGRAAFVGKLGDDDFGHMLAGILRKNGVDDQGINFDEGARTALAFVTLRSDGEREFMFYRNPSADMLLRPDELNLELIRSAKVFHYGSISLITEPCRSAHMKAMEVAKEAGALLSYDPNLREPLWPSPEEARTQIMSIWDKADIIKVSDVELEFLTENKTMDDKTAMSLWHPNLKLLLVTLGEKGCTYFTKKFHGSVETFHVDAVDTTGAGDSFVGALLQQIVDDQSVLEDEARLRKVLRFANACGAITTTKKGAIPALPTDIEALSFLKDQKKRQTNLKFSKWCCTASPC

SEQ ID NO: 81643 - protein, 274 aa, Arabidopsis thaliana
  peptide (1)..(274): Ceres Seq. ID no. 12660611
  misc_feature (1)..(245): Pfam Name: pfkB family carbohydrate kinase Pfam Description: pfkB family carbohydrate kinase
  misc_feature (1)..(274): Homolog of NCBI NO: 15221364 NR Description: fructokinase, putative; protein id: At1g06020.1
  misc_feature (1)..(255): Homolog of NCBI NO: 15221365 NR Description: fructokinase, putative; protein id: At1g06030.1, by cDNA: gi_20258777 [Arabidopsis thaliana]
  misc_feature (1)..(253): Homolog of NCBI NO: 15224669 NR Description: putative fructokinase; protein id: At2g31390.1, by cDNA: 17664., supported by cDNA: gi_14423527, supported by gi_18389235, supported by cDNA: gi_20259070 [Arabidopsis
  misc_feature (1)..(253): Homolog of NCBI NO: 14423528 NR Description: putative fructokinase [Arabidopsis thaliana]
  misc_feature (1)..(253): Homolog of NCBI NO: 21592495 NR Description: fructokinase-like protein [Arabidopsis thaliana]
  misc_feature (1)..(253): Homolog of NCBI NO: 15231692 NR Description: fructokinase-like protein; protein id: supported by cDNA: 24751. [Arabidopsis thaliana]
  misc_feature (1)..(253): Homolog of NCBI NO: 1915974 NR Description: fructokinase [Lycopersicon esculentum]
  misc_feature (1)..(253): Homolog of NCBI NO: 32765547 NR Description: fructokinase 2 [Lycopersicon hirsutum]
  misc_feature (1)..(253): Homolog of NCBI NO: 7434223 NR Description: fructokinase (EC 2.7.1.4) - beet
  misc_feature (1)..(253): Homolog of NCBI NO: 585973 NR Description: FRUCTOKINASE >gi|626018|pir||S39997 fructokinase
MLAGILRKNGVDDQGINFDEGARTALAFVTLRSDGEREFMFYRNPSADMLLRPDELNLELIRSAKVFHYGSISLITEPCRSAHMKAMEVAKEAGALLSYDPNLREPLWPSPEEARTQIMSIWDKADIIKVSDVELEFLTENKTMDDKTAMSLWHPNLKLLLVTLGEKGCTYFTKKFHGSVETFHVDAVDTTGAGDSFVGALLQQIVDDQSVLEDEARLRKVLRFANACGAITTTKKGAIPALPTDIEALSFLKDQKKRQTNLKFSKWCCTASPC

SEQ ID NO: 81644 - DNA, 1021 bp, Arabidopsis thaliana
  misc_feature (1)..(1021): Ceres Seq. ID no. 12660612
  misc_feature: MA Experiment ID: 20000327 Result: Up-regulated in Transcription
  misc_feature: MA Experiment 20000327 PARAMETER Experiment Name: At_42deg_Heat_Sub_P Parameter: Age (day) Value: 14
  misc_feature: MA Experiment 20000327 PARAMETER Experiment Name: At_42deg_Heat_Sub_P Parameter: Organism Value: A. thaliana
  misc_feature: MA Experiment 20000327 PARAMETER Experiment Name: At_42deg_Heat_Sub_P Parameter: Plant Line Value: WS
  misc_feature: MA Experiment 20000327 PARAMETER Experiment Name: At_42deg_Heat_Sub_P Parameter: Temperature (deg C) Value: 42 vs. 22
  misc_feature: MA Experiment 20000327 PARAMETER Experiment Name: At_42deg_Heat_Sub_P Parameter: Timepoint (hr) Value: 1
  misc_feature: MA Experiment 20000327 PARAMETER Experiment Name: At_42deg_Heat_Sub_P Parameter: Tissue Value: Aerial
  misc_feature: MA Experiment ID: 20000328 Result: Up-regulated in Transcription
  misc_feature: MA Experiment 20000328 PARAMETER Experiment Name: At_42deg_Heat_Sub_P Parameter: Age (day) Value: 14
  misc_feature: MA Experiment 20000328 PARAMETER Experiment Name: At_42deg_Heat_Sub_P Parameter: Organism Value: A. thaliana
  misc_feature: MA Experiment 20000328 PARAMETER Experiment Name: At_42deg_Heat_Sub_P Parameter: Plant Line Value: WS
  misc_feature: MA Experiment 20000328 PARAMETER Experiment Name: At_42deg_Heat_Sub_P Parameter: Temperature (deg C) Value: 42 vs. 22
  misc_feature: MA Experiment 20000328 PARAMETER Experiment Name: At_42deg_Heat_Sub_P Parameter: Timepoint (hr) Value: 6
  misc_feature: MA Experiment 20000328 PARAMETER Experiment Name: At_42deg_Heat_Sub_P Parameter: Tissue Value: Aerial
atgacgtcatccaacggcgataataaaggtctcgtcgttagcttcggcgagatgctcattgacttcgtgcccacggaatccggcgtctccctctctgaatcctctggatttctcaaagctcctggtggtgctccagcaaacgtcgctatcgctgtttcccgtctcggaggtcgcgccgccttcgtcggaaaactcggggacgatgagtttggccatatgcttgccggaatcttgagaaagaacgatgtcgacgatcaggggatcaatttcgataaaggagcaagaaccgcactcgcttttgtgactctgcgttctgacggagaacgagagtttatgttttaccggaatcccagcgccgatatgcttctccggccagatgaactcaacctcgaactaatcagatccgcgaaagtgtttcactatggatcaataagtttgattacagagccatgtagatcagctcacatgaaggcgatggaggtggcgaaagaagctggagctcttctttcctacgatccaaacctcagggaacctctgtggccatcccctgaagaagctaggaaacagatcatgagtatctgggacaaggctgacattattaaggtcagtgacgtcgagcttgagttcttgacaggaaacaaaacgattgatgatgagacagctatgtctctgtggcatcctaatttgaagctcttgcttgttacacttggcgaaaatggatgtcgttactacactaaggatttccatggatctgttgaaactttccatgttgacgctgtggatactactggagctggtgattcttttgttggcgcgcttctaaaccagattgttgatgatcaatctgtactcgaggaggaagagagattgagaaaagtgctgagatttgcaaacgcttgtggagcaatcacgacgactaaaaagggagccattccagctcttcctacagattgtgaagctctcagttttcttaagatacaagtagaatagtaaaacttctcttcgagtccagaattctcct

SEQ ID NO: 81645 - protein, 329 aa, Arabidopsis thaliana
  peptide (1)..(329): Ceres Seq. ID no. 12660613
  misc_feature (9)..(317): Pfam Name: pfkB family carbohydrate kinase Pfam Description: pfkB family carbohydrate kinase
  misc_feature (1)..(329): Homolog of NCBI NO: 15221365 NR Description: fructokinase, putative; protein id: At1g06030.1, by cDNA: gi_20258777 [Arabidopsis thaliana]
  misc_feature (1)..(327): Homolog of NCBI NO: 15221364 NR Description: fructokinase, putative; protein id: At1g06020.1
  misc_feature (3)..(325): Homolog of NCBI NO: 15224669 NR Description: putative fructokinase; protein id: At2g31390.1, by cDNA: 17664., supported by cDNA: gi_14423527, supported by gi_18389235, supported by cDNA: gi_20259070 [Arabidopsis
  misc_feature (3)..(325): Homolog of NCBI NO: 14423528 NR Description: putative fructokinase [Arabidopsis thaliana]
  misc_feature (1)..(325): Homolog of NCBI NO: 15231692 NR Description: fructokinase-like protein; protein id: supported by cDNA: 24751. [Arabidopsis thaliana]
  misc_feature (1)..(325): Homolog of NCBI NO: 21592495 NR Description: fructokinase-like protein [Arabidopsis thaliana]
  misc_feature (3)..(325): Homolog of NCBI NO: 7434223 NR Description: fructokinase (EC 2.7.1.4) - beet
  misc_feature (1)..(325): Homolog of NCBI NO: 1915974 NR Description: fructokinase [Lycopersicon esculentum]
  misc_feature (1)..(325): Homolog of NCBI NO: 32765547 NR Description: fructokinase 2 [Lycopersicon hirsutum]
  misc_feature (5)..(325): Homolog of NCBI NO: 585973 NR Description: FRUCTOKINASE >gi|626018|pir||S39997 fructokinase
MTSSNGDNKGLVVSFGEMLIDFVPTESGVSLSESSGFLKAPGGAPANVAIAVSRLGGRAAFVGKLGDDEFGHMLAGILRKNDVDDQGINFDKGARTALAFVTLRSDGEREFMFYRNPSADMLLRPDELNLELIRSAKVFHYGSISLITEPCRSAHMKAMEVAKEAGALLSYDPNLREPLWPSPEEARKQIMSIWDKADIIKVSDVELEFLTGNKTIDDETAMSLWHPNLKLLLVTLGENGCRYYTKDFHGSVETFHVDAVDTTGAGDSFVGALLNQIVDDQSVLEEEERLRKVLRFANACGAITTTKKGAIPALPTDCEALSFLKIQVE

SEQ ID NO: 81646 - protein, 312 aa, Arabidopsis thaliana
  peptide (1)..(312): Ceres Seq. ID no. 12660614
  misc_feature (1)..(300): Pfam Name: pfkB family carbohydrate kinase Pfam Description: pfkB family carbohydrate kinase
  misc_feature (1)..(312): Homolog of NCBI NO: 15221365 NR Description: fructokinase, putative; protein id: At1g06030.1, by cDNA: gi_20258777 [Arabidopsis thaliana]
  misc_feature (1)..(310): Homolog of NCBI NO: 15221364 NR Description: fructokinase, putative; protein id: At1g06020.1
  misc_feature (1)..(308): Homolog of NCBI NO: 15224669 NR Description: putative fructokinase; protein id: At2g31390.1, by cDNA: 17664., supported by cDNA: gi_14423527, supported by gi_18389235, supported by cDNA: gi_20259070 [Arabidopsis
  misc_feature (1)..(308): Homolog of NCBI NO: 14423528 NR Description: putative fructokinase [Arabidopsis thaliana]
  misc_feature (1)..(308): Homolog of NCBI NO: 15231692 NR Description: fructokinase-like protein; protein id: supported by cDNA: 24751. [Arabidopsis thaliana]
  misc_feature (1)..(308): Homolog of NCBI NO: 21592495 NR Description: fructokinase-like protein [Arabidopsis thaliana]
  misc_feature (1)..(308): Homolog of NCBI NO: 7434223 NR Description: fructokinase (EC 2.7.1.4) - beet
  misc_feature (1)..(308): Homolog of NCBI NO: 1915974 NR Description: fructokinase [Lycopersicon esculentum]
  misc_feature (1)..(308): Homolog of NCBI NO: 32765547 NR Description: fructokinase 2 [Lycopersicon hirsutum]
  misc_feature (1)..(308): Homolog of NCBI NO: 585973 NR Description: FRUCTOKINASE >gi|626018|pir||S39997 fructokinase
MLIDFVPTESGVSLSESSGFLKAPGGAPANVAIAVSRLGGRAAFVGKLGDDEFGHMLAGILRKNDVDDQGINFDKGARTALAFVTLRSDGEREFMFYRNPSADMLLRPDELNLELIRSAKVFHYGSISLITEPCRSAHMKAMEVAKEAGALLSYDPNLREPLWPSPEEARKQIMSIWDKADIIKVSDVELEFLTGNKTIDDETAMSLWHPNLKLLLVTLGENGCRYYTKDFHGSVETFHVDAVDTTGAGDSFVGALLNQIVDDQSVLEEEERLRKVLRFANACGAITTTKKGAIPALPTDCEALSFLKIQVE

SEQ ID NO: 81647 - protein, 257 aa, Arabidopsis thaliana
  peptide (1)..(257): Ceres Seq. ID no. 12660615
  misc_feature (1)..(245): Pfam Name: pfkB family carbohydrate kinase Pfam Description: pfkB family carbohydrate kinase
  misc_feature (1)..(257): Homolog of NCBI NO: 15221365 NR Description: fructokinase, putative; protein id: At1g06030.1, by cDNA: gi_20258777 [Arabidopsis thaliana]
  misc_feature (1)..(255): Homolog of NCBI NO: 15221364 NR Description: fructokinase, putative; protein id: At1g06020.1
  misc_feature (1)..(253): Homolog of NCBI NO: 15224669 NR Description: putative fructokinase; protein id: At2g31390.1, by cDNA: 17664., supported by cDNA: gi_14423527, supported by gi_18389235, supported by cDNA: gi_20259070 [Arabidopsis
  misc_feature (1)..(253): Homolog of NCBI NO: 14423528 NR Description: putative fructokinase [Arabidopsis thaliana]
  misc_feature (1)..(253): Homolog of NCBI NO: 15231692 NR Description: fructokinase-like protein; protein id: supported by cDNA: 24751. [Arabidopsis thaliana]
  misc_feature (1)..(253): Homolog of NCBI NO: 21592495 NR Description: fructokinase-like protein [Arabidopsis thaliana]
  misc_feature (1)..(253): Homolog of NCBI NO: 7434223 NR Description: fructokinase (EC 2.7.1.4) - beet
  misc_feature (1)..(253): Homolog of NCBI NO: 1915974 NR Description: fructokinase [Lycopersicon esculentum]
  misc_feature (1)..(253): Homolog of NCBI NO: 32765547 NR Description: fructokinase 2 [Lycopersicon hirsutum]
  misc_feature (1)..(253): Homolog of NCBI NO: 585973 NR Description: FRUCTOKINASE >gi|626018|pir||S39997 fructokinase
MLAGILRKNDVDDQGINFDKGARTALAFVTLRSDGEREFMFYRNPSADMLLRPDELNLELIRSAKVFHYGSISLITEPCRSAHMKAMEVAKEAGALLSYDPNLREPLWPSPEEARKQIMSIWDKADIIKVSDVELEFLTGNKTIDDETAMSLWHPNLKLLLVTLGENGCRYYTKDFHGSVETFHVDAVDTTGAGDSFVGALLNQIVDDQSVLEEEERLRKVLRFANACGAITTTKKGAIPALPTDCEALSFLKIQVE

SEQ ID NO: 81648 - DNA, 1555 bp, Arabidopsis thaliana
  misc_feature (1)..(1555): Ceres Seq. ID no. 12660622
  misc_feature: MA Experiment ID: 20001450 Result: Up-regulated in Transcription
  misc_feature: MA Experiment 20001450 PARAMETER Experiment Name: At_Far-red-induction_P Parameter: Age (day) Value: 7
  misc_feature: MA Experiment 20001450 PARAMETER Experiment Name: At_Far-red-induction_P Parameter: Light Value: Far-red vs. White
  misc_feature: MA Experiment 20001450 PARAMETER Experiment Name: At_Far-red-induction_P Parameter: Organism Value: A. thaliana
  misc_feature: MA Experiment 20001450 PARAMETER Experiment Name: At_Far-red-induction_P Parameter: Plant Line Value: Columbia
  misc_feature: MA Experiment 20001450 PARAMETER Experiment Name: At_Far-red-induction_P Parameter: Timepoint (hr) Value: 8
  misc_feature: MA Experiment 20001450 PARAMETER Experiment Name: At_Far-red-induction_P Parameter: Tissue Value: Whole Plant
  misc_feature: MA Experiment ID: 20001451 Result: Up-regulated in Transcription
  misc_feature: MA Experiment 20001451 PARAMETER Experiment Name: At_Far-red-induction_P Parameter: Age (day) Value: 7
  misc_feature: MA Experiment 20001451 PARAMETER Experiment Name: At_Far-red-induction_P Parameter: Light Value: Far-red vs. White
  misc_feature: MA Experiment 20001451 PARAMETER Experiment Name: At_Far-red-induction_P Parameter: Organism Value: A. thaliana
  misc_feature: MA Experiment 20001451 PARAMETER Experiment Name: At_Far-red-induction_P Parameter: Plant Line Value: Columbia
  misc_feature: MA Experiment 20001451 PARAMETER Experiment Name: At_Far-red-induction_P Parameter: Timepoint (hr) Value: 24
  misc_feature: MA Experiment 20001451 PARAMETER Experiment Name: At_Far-red-induction_P Parameter: Tissue Value: Whole Plant
  misc_feature: MA Experiment ID: 20001557 Result: Down-regulated in Transcription
  misc_feature: MA Experiment 20001557 PARAMETER Experiment Name: At_Drought_Soil_Dry_P Parameter: Age (day) Value: 27
  misc_feature: MA Experiment 20001557 PARAMETER Experiment Name: At_Drought_Soil_Dry_P Parameter: Organism Value: A. thaliana
  misc_feature: MA Experiment 20001557 PARAMETER Experiment Name: At_Drought_Soil_Dry_P Parameter: Plant Line Value: WS
  misc_feature: MA Experiment 20001557 PARAMETER Experiment Name: At_Drought_Soil_Dry_P Parameter: Post Timepoint (hr) Value: 3
  misc_feature: MA Experiment 20001557 PARAMETER Experiment Name: At_Drought_Soil_Dry_P Parameter: Post-Treatment Value: Re-Water vs. No Drought
  misc_feature: MA Experiment 20001557 PARAMETER Experiment Name: At_Drought_Soil_Dry_P Parameter: Timepoint (day) Value: 13
  misc_feature: MA Experiment 20001557 PARAMETER Experiment Name: At_Drought_Soil_Dry_P Parameter: Treatment Value: Drought vs. No Drought
  misc_feature: MA Experiment ID: 20001558 Result: Down-regulated in Transcription
  misc_feature: MA Experiment 20001558 PARAMETER Experiment Name: At_Drought_Soil_Dry_P Parameter: Age (day) Value: 27
  misc_feature: MA Experiment 20001558 PARAMETER Experiment Name: At_Drought_Soil_Dry_P Parameter: Organism Value: A. thaliana
  misc_feature: MA Experiment 20001558 PARAMETER Experiment Name: At_Drought_Soil_Dry_P Parameter: Plant Line Value: WS
  misc_feature: MA Experiment 20001558 PARAMETER Experiment Name: At_Drought_Soil_Dry_P Parameter: Post Timepoint (hr) Value: 6
  misc_feature: MA Experiment 20001558 PARAMETER Experiment Name: At_Drought_Soil_Dry_P Parameter: Post-Treatment Value: Re-Water vs. No Drought
  misc_feature: MA Experiment 20001558 PARAMETER Experiment Name: At_Drought_Soil_Dry_P Parameter: Timepoint (day) Value: 13
  misc_feature: MA Experiment 20001558 PARAMETER Experiment Name: At_Drought_Soil_Dry_P Parameter: Treatment Value: Drought vs. No Drought
  misc_feature: MA Experiment ID: 20001911 Result: Up-regulated in Transcription
  misc_feature: MA Experiment 20001911 PARAMETER Experiment Name: At_Drought_Reproduction_P Parameter: Age (day) Value: 40
  misc_feature: MA Experiment 20001911 PARAMETER Experiment Name: At_Drought_Reproduction_P Parameter: Organism Value: A. thaliana
  misc_feature: MA Experiment 20001911 PARAMETER Experiment Name: At_Drought_Reproduction_P Parameter: Plant Line Value: WS
  misc_feature: MA Experiment 20001911 PARAMETER Experiment Name: At_Drought_Reproduction_P Parameter: Timepoint (day) Value: 10
  misc_feature: MA Experiment 20001911 PARAMETER Experiment Name: At_Drought_Reproduction_P Parameter: Tissue Value: Flowers
  misc_feature: MA Experiment 20001911 PARAMETER Experiment Name: At_Drought_Reproduction_P Parameter: Treatment Value: Drought vs. No Drought
aaagaactgaactgaaacagagccgacaaaagcaaccgagagaaagaaagcgaacaagggttgttgtctgagacgacgaaagctatgggtctagaggatgctggagatttggttctccacatcgtcttatccaaaatcggccctgaaaacaccgcgagagtggcttgtgtcagtaaacgccttaaggtctccgcctccgaggaatctctctggtctatcttctgctccaatgatcttaatatctctactcctctcgatccccatggagatcctgctccttccttcaagagagcatatcaattgtggagggagtcatttagaatgtatccttggaatctggttaaaagagttagactttgttgggacaacctcaaacaatggttgaccttaaacttccctgaagcaaaggcaacactgaggaaaggtgtcacagaagatgatcttcaagaattcgagacttctctcaaagtgaaacttcctttgcccacaaggcttctctaccgtttcgttgatggtcaagagctttcttcccccaatgggcttgatggctctttggggcttataggtggctattccgcttattctcatgacgttaatgtctacttgctacctcttaaggaagtgatgagggagacaaaggaaagtttcatgcgcgacctcggtttctcgagtagattagaccttattgttatggctgcatccgtagttgccagtctgaaaatatttttattagactgcacaaccggacagctttttactgggacaagtaaccgccaattgcttccttgtgtacccgatgctttggttagatcggttcatgataccaacggcgatcagcaacaggatgccatgctgctttggttggaagaacatggccggcggttacaaaccggcactataaatgtccgtcaacagaacaatgtcaagagtatcagtttgttcccggagattcctcccttgtgttctgtctccgtaactaatggtgtgcaggtacgtgcttcgtctgtttttatcccggaaatatcgaaccttcgggatcagccaccggcatactggtatgcatattcaatccggatgtctctcatgccagaaggatgcatcttgaatgggacacatcatagctcttgccaactgtattggagacattgggttatccgagctgataatgaagtgatagataatgttaatggagaagctgtcataggaaagtacccgctcttacaagccggggaggaagagtttgtgtatgagagttgttccagttttccgacaactgctggatccattgatggctctttcacctttgtacctggaagtttgagagatccaaaagggagtcaattcgaagtcaaagtcgtagagtttcctctggagttaccggactacatcttctgaactctttctggcacaaggttcgttactctttcaagataatttgttgtatcgtttgctttgtccgtacagcatgcaatgtcctaataaaataaaggtgttggatcaactggtttacaagttcatgagaacagattattcttaacagttttacataaatagc

SEQ ID NO: 81649 - protein, 436 aa, Arabidopsis thaliana
  peptide (1)..(436): Ceres Seq. ID no. 12660623
  misc_feature (295)..(432): Pfam Name: Protein of unknown function (DUF525) Pfam Description: Protein of unknown function (DUF525)
  misc_feature (1)..(436): Homolog of NCBI NO: 18390613 NR Description: F-box protein family; protein id: At1g06110.1, by cDNA: gi_16930490, supported by cDNA: gi_20466210 [Arabidopsis >gi|25373377|pir||D86196 hypothetical protein [imported]
  misc_feature (309)..(432): Homolog of NCBI NO: 33594167 NR Description: conserved hypothetical protein [Bordetella >gi|33598643|ref|NP_886286.1| conserved hypothetical protein parapertussis] >gi|33564242|emb|CAE43533.1| conserved
  misc_feature (309)..(432): Homolog of NCBI NO: 33603595 NR Description: conserved hypothetical protein [Bordetella >gi|33577720|emb|CAE34985.1| conserved hypothetical protein
  misc_feature (296)..(433): Homolog of NCBI NO: 27376212 NR Description: ApaG protein [Bradyrhizobium japonicum]
  misc_feature (296)..(432): Homolog of NCBI NO: 23108582 NR Description: hypothetical protein [Novosphingobium
  misc_feature (296)..(433): Homolog of NCBI NO: 22961933 NR Description: hypothetical protein [Rhodopseudomonas palustris]
  misc_feature (340)..(432): Homolog of NCBI NO: 22978985 NR Description: hypothetical protein [Ralstonia metallidurans]
MGLEDAGDLVLHIVLSKIGPENTARVACVSKRLKVSASEESLWSIFCSNDLNISTPLDPHGDPAPSFKRAYQLWRESFRMYPWNLVKRVRLCWDNLKQWLTLNFPEAKATLRKGVTEDDLQEFETSLKVKLPLPTRLLYRFVDGQELSSPNGLDGSLGLIGGYSAYSHDVNVYLLPLKEVMRETKESFMRDLGFSSRLDLIVMAASVVASLKIFLLDCTTGQLFTGTSNRQLLPCVPDALVRSVHDTNGDQQQDAMLLWLEEHGRRLQTGTINVRQQNNVKSISLFPEIPPLCSVSVTNGVQVRASSVFIPEISNLRDQPPAYWYAYSIRMSLMPEGCILNGTHHSSCQLYWRHWVIRADNEVIDNVNGEAVIGKYPLLQAGEEEFVYESCSSFPTTAGSIDGSFTFVPGSLRDPKGSQFEVKVVEFPLELPDYIF

SEQ ID NO: 81650 - protein, 357 aa, Arabidopsis thaliana
  peptide (1)..(357): Ceres Seq. ID no. 12660624
  misc_feature (216)..(353): Pfam Name: Protein of unknown function (DUF525) Pfam Description: Protein of unknown function (DUF525)
  misc_feature (1)..(357): Homolog of NCBI NO: 18390613 NR Description: F-box protein family; protein id: At1g06110.1, by cDNA: gi_16930490, supported by cDNA: gi_20466210 [Arabidopsis >gi|25373377|pir||D86196 hypothetical protein [imported]
  misc_feature (230)..(353): Homolog of NCBI NO: 33594167 NR Description: conserved hypothetical protein [Bordetella >gi|33598643|ref|NP_886286.1| conserved hypothetical protein parapertussis] >gi|33564242|emb|CAE43533.1| conserved
  misc_feature (230)..(353): Homolog of NCBI NO: 33603595 NR Description: conserved hypothetical protein [Bordetella >gi|33577720|emb|CAE34985.1| conserved hypothetical protein
  misc_feature (217)..(354): Homolog of NCBI NO: 27376212 NR Description: ApaG protein [Bradyrhizobium japonicum]
  misc_feature (217)..(353): Homolog of NCBI NO: 23108582 NR Description: hypothetical protein [Novosphingobium
  misc_feature (217)..(354): Homolog of NCBI NO: 22961933 NR Description: hypothetical protein [Rhodopseudomonas palustris]
  misc_feature (261)..(353): Homolog of NCBI NO: 22978985 NR Description: hypothetical protein [Ralstonia metallidurans]
MYPWNLVKRVRLCWDNLKQWLTLNFPEAKATLRKGVTEDDLQEFETSLKVKLPLPTRLLYRFVDGQELSSPNGLDGSLGLIGGYSAYSHDVNVYLLPLKEVMRETKESFMRDLGFSSRLDLIVMAASVVASLKIFLLDCTTGQLFTGTSNRQLLPCVPDALVRSVHDTNGDQQQDAMLLWLEEHGRRLQTGTINVRQQNNVKSISLFPEIPPLCSVSVTNGVQVRASSVFIPEISNLRDQPPAYWYAYSIRMSLMPEGCILNGTHHSSCQLYWRHWVIRADNEVIDNVNGEAVIGKYPLLQAGEEEFVYESCSSFPTTAGSIDGSFTFVPGSLRDPKGSQFEVKVVEFPLELPDYIF

SEQ ID NO: 81651 - protein, 256 aa, Arabidopsis thaliana
  peptide (1)..(256): Ceres Seq. ID no. 12660625
  misc_feature (115)..(252): Pfam Name: Protein of unknown function (DUF525) Pfam Description: Protein of unknown function (DUF525)
  misc_feature (1)..(256): Homolog of NCBI NO: 18390613 NR Description: F-box protein family; protein id: At1g06110.1, by cDNA: gi_16930490, supported by cDNA: gi_20466210 [Arabidopsis >gi|25373377|pir||D86196 hypothetical protein [imported]
  misc_feature (129)..(252): Homolog of NCBI NO: 33594167 NR Description: conserved hypothetical protein [Bordetella >gi|33598643|ref|NP_886286.1| conserved hypothetical protein parapertussis] >gi|33564242|emb|CAE43533.1| conserved
  misc_feature (129)..(252): Homolog of NCBI NO: 33603595 NR Description: conserved hypothetical protein [Bordetella >gi|33577720|emb|CAE34985.1| conserved hypothetical protein
  misc_feature (116)..(253): Homolog of NCBI NO: 27376212 NR Description: ApaG protein [Bradyrhizobium japonicum]
  misc_feature (116)..(252): Homolog of NCBI NO: 23108582 NR Description: hypothetical protein [Novosphingobium
  misc_feature (116)..(253): Homolog of NCBI NO: 22961933 NR Description: hypothetical protein [Rhodopseudomonas palustris]
  misc_feature (160)..(252): Homolog of NCBI NO: 22978985 NR Description: hypothetical protein [Ralstonia metallidurans]
MRETKESFMRDLGFSSRLDLIVMAASVVASLKIFLLDCTTGQLFTGTSNRQLLPCVPDALVRSVHDTNGDQQQDAMLLWLEEHGRRLQTGTINVRQQNNVKSISLFPEIPPLCSVSVTNGVQVRASSVFIPEISNLRDQPPAYWYAYSIRMSLMPEGCILNGTHHSSCQLYWRHWVIRADNEVIDNVNGEAVIGKYPLLQAGEEEFVYESCSSFPTTAGSIDGSFTFVPGSLRDPKGSQFEVKVVEFPLELPDYIF

SEQ ID NO: 81652 - DNA, 621 bp, Arabidopsis thaliana
  misc_feature (1)..(621): Ceres Seq. ID no. 12660636
  misc_feature: MA Experiment ID: 20000329 Result: Down-regulated in Transcription
  misc_feature: MA Experiment 20000329 PARAMETER Experiment Name: At_4deg_Cold_Sub_P Parameter: Age (day) Value: 14
  misc_feature: MA Experiment 20000329 PARAMETER Experiment Name: At_4deg_Cold_Sub_P Parameter: Organism Value: A. thaliana
  misc_feature: MA Experiment 20000329 PARAMETER Experiment Name: At_4deg_Cold_Sub_P Parameter: Plant Line Value: WS
  misc_feature: MA Experiment 20000329 PARAMETER Experiment Name: At_4deg_Cold_Sub_P Parameter: Temperature (deg C) Value: 4 vs. 22
  misc_feature: MA Experiment 20000329 PARAMETER Experiment Name: At_4deg_Cold_Sub_P Parameter: Timepoint (hr) Value: 6
  misc_feature: MA Experiment 20000329 PARAMETER Experiment Name: At_4deg_Cold_Sub_P Parameter: Tissue Value: Aerial
atggcttccatcacgaattatgtccgatacatggctcacaagctcgagtactctctcactctcagccttaagaaacatactagagagaagctcagtgaccgggaactctttggtgtagtcatgaagaatctattctatggaagaataagctacttacactcggacaaaggaaaagagatggccccaaccatgggaacaaatgaaagcacgctacttgtccgtaagctaccagttgttgatacaaggtacattttcgtaggggatgctgttgtcttgaaggacccgaatgaaacaaataagtatatagtcagaagactagcagctttagagggatctgaaatggtatcaagtgatgagaaagatgagccttttgttctcgaaaaggatcagtgctgggtcgttgctgagaatcaagagatgaaatctaaagaagcatatgatagtcgaacatttggtccaatttcaatggcggacatagtgggaagagctatatattgtctgaggacagcagtggatcatggtccagtaagcaacagtgaatttgccatggacgaggattccccaatcctggcggtagaacttgacgtggatgaattggctaaaggccacaaggcgtcataa

SEQ ID NO: 81653 - protein, 206 aa, Arabidopsis thaliana; identical to SEQ ID NO: 40177
  peptide (1)..(206): Ceres Seq. ID no. 12660637
  misc_feature (1)..(206): Homolog of NCBI NO: 15221421 NR Description: hypothetical protein; protein id: At1g06200.1, by cDNA: gi_17065431, supported by cDNA: gi_20148504 [Arabidopsis >gi|17065432|gb|AAL32870.1| Unknown protein [Arabidopsis
  misc_feature (1)..(206): Homolog of NCBI NO: 25406903 NR Description: hypothetical protein [imported] - Arabidopsis >gi|8844125|gb|AAF80217.1|AC025290_6 Contains similarity to an protein T16B12.5 gi|3746062 from Arabidopsis thaliana
  misc_feature (1)..(205): Homolog of NCBI NO: 30684839 NR Description: expressed protein [Arabidopsis thaliana]
  misc_feature (1)..(179): Homolog of NCBI NO: 25408133 NR Description: hypothetical protein At2g31140 [imported] - thaliana >gi|3746062|gb|AAC63837.1| hypothetical protein
  misc_feature (1)..(204): Homolog of NCBI NO: 38344766 NR Description: OSJNBa0068L06.9 [Oryza sativa (japonica

SEQ ID NO: 81654 - protein, 196 aa, Arabidopsis thaliana; identical to SEQ ID NO: 40178
  peptide (1)..(196): Ceres Seq. ID no. 12660638
  misc_feature (1)..(196): Homolog of NCBI NO: 15221421 NR Description: hypothetical protein; protein id: At1g06200.1, by cDNA: gi_17065431, supported by cDNA: gi_20148504 [Arabidopsis >gi|17065432|gb|AAL32870.1| Unknown protein [Arabidopsis
  misc_feature (1)..(196): Homolog of NCBI NO: 25406903 NR Description: hypothetical protein [imported] - Arabidopsis >gi|8844125|gb|AAF80217.1|AC025290_6 Contains similarity to an protein T16B12.5 gi|3746062 from Arabidopsis thaliana
  misc_feature (1)..(195): Homolog of NCBI NO: 30684839 NR Description: expressed protein [Arabidopsis thaliana]
  misc_feature (1)..(169): Homolog of NCBI NO: 25408133 NR Description: hypothetical protein At2g31140 [imported] - thaliana >gi|3746062|gb|AAC63837.1| hypothetical protein
  misc_feature (1)..(194): Homolog of NCBI NO: 38344766 NR Description: OSJNBa0068L06.9 [Oryza sativa (japonica

SEQ ID NO: 81655 - protein, 166 aa, Arabidopsis thaliana
  peptide (1)..(166): Ceres Seq. ID no. 12660639
  misc_feature (1)..(166): Homolog of NCBI NO: 15221421 NR Description: hypothetical protein; protein id: At1g06200.1, by cDNA: gi_17065431, supported by cDNA: gi_20148504 [Arabidopsis >gi|17065432|gb|AAL32870.1| Unknown protein [Arabidopsis
  misc_feature (1)..(166): Homolog of NCBI NO: 25406903 NR Description: hypothetical protein [imported] - Arabidopsis >gi|8844125|gb|AAF80217.1|AC025290_6 Contains similarity to an protein T16B12.5 gi|3746062 from Arabidopsis thaliana
  misc_feature (1)..(165): Homolog of NCBI NO: 30684839 NR Description: expressed protein [Arabidopsis thaliana]
  misc_feature (1)..(139): Homolog of NCBI NO: 25408133 NR Description: hypothetical protein At2g31140 [imported] - thaliana >gi|3746062|gb|AAC63837.1| hypothetical protein
  misc_feature (1)..(164): Homolog of NCBI NO: 38344766 NR Description: OSJNBa0068L06.9 [Oryza sativa (japonica
MKNLFYGRISYLHSDKGKEMAPTMGTNESTLLVRKLPVVDTRYIFVGDAVVLKDPNETNKYIVRRLAALEGSEMVSSDEKDEPFVLEKDQCWVVAENQEMKSKEAYDSRTFGPISMADIVGRAIYCLRTAVDHGPVSNSEFAMDEDSPILAVELDVDELAKGHKAS

SEQ ID NO: 81656 - DNA, 1948 bp, Arabidopsis thaliana
  misc_feature (1)..(1948): Ceres Seq. ID no. 12660693
  misc_feature: MA Experiment ID: 20001557 Result: Up-regulated in Transcription
  misc_feature: MA Experiment 20001557 PARAMETER Experiment Name: At_Drought_Soil_Dry_P Parameter: Age (day) Value: 27
  misc_feature: MA Experiment 20001557 PARAMETER Experiment Name: At_Drought_Soil_Dry_P Parameter: Organism Value: A. thaliana
  misc_feature: MA Experiment 20001557 PARAMETER Experiment Name: At_Drought_Soil_Dry_P Parameter: Plant Line Value: WS
  misc_feature: MA Experiment 20001557 PARAMETER Experiment Name: At_Drought_Soil_Dry_P Parameter: Post Timepoint (hr) Value: 3
  misc_feature: MA Experiment 20001557 PARAMETER Experiment Name: At_Drought_Soil_Dry_P Parameter: Post-Treatment Value: Re-Water vs. No Drought
  misc_feature: MA Experiment 20001557 PARAMETER Experiment Name: At_Drought_Soil_Dry_P Parameter: Timepoint (day) Value: 13
  misc_feature: MA Experiment 20001557 PARAMETER Experiment Name: At_Drought_Soil_Dry_P Parameter: Treatment Value: Drought vs. No Drought
  misc_feature: MA Experiment ID: 20001558 Result: Up-regulated in Transcription
  misc_feature: MA Experiment 20001558 PARAMETER Experiment Name: At_Drought_Soil_Dry_P Parameter: Age (day) Value: 27
  misc_feature: MA Experiment 20001558 PARAMETER Experiment Name: At_Drought_Soil_Dry_P Parameter: Organism Value: A. thaliana
  misc_feature: MA Experiment 20001558 PARAMETER Experiment Name: At_Drought_Soil_Dry_P Parameter: Plant Line Value: WS
  misc_feature: MA Experiment 20001558 PARAMETER Experiment Name: At_Drought_Soil_Dry_P Parameter: Post Timepoint (hr) Value: 6
  misc_feature: MA Experiment 20001558 PARAMETER Experiment Name: At_Drought_Soil_Dry_P Parameter: Post-Treatment Value: Re-Water vs. No Drought
  misc_feature: MA Experiment 20001558 PARAMETER Experiment Name: At_Drought_Soil_Dry_P Parameter: Timepoint (day) Value: 13
  misc_feature: MA Experiment 20001558 PARAMETER Experiment Name: At_Drought_Soil_Dry_P Parameter: Treatment Value: Drought vs. No Drought
  misc_feature: MA Experiment ID: 20001560 Result: Up-regulated in Transcription
  misc_feature: MA Experiment 20001560 PARAMETER Experiment Name: At_Drought_Soil_Dry_P Parameter: Age (day) Value: 28
  misc_feature: MA Experiment 20001560 PARAMETER Experiment Name: At_Drought_Soil_Dry_P Parameter: Organism Value: A. thaliana
  misc_feature: MA Experiment 20001560 PARAMETER Experiment Name: At_Drought_Soil_Dry_P Parameter: Plant Line Value: WS
  misc_feature: MA Experiment 20001560 PARAMETER Experiment Name: At_Drought_Soil_Dry_P Parameter: Post Timepoint (hr) Value: None
  misc_feature: MA Experiment 20001560 PARAMETER Experiment Name: At_Drought_Soil_Dry_P Parameter: Post-Treatment Value: None
  misc_feature: MA Experiment 20001560 PARAMETER Experiment Name: At_Drought_Soil_Dry_P Parameter: Timepoint (day) Value: 14
  misc_feature: MA Experiment 20001560 PARAMETER Experiment Name: At_Drought_Soil_Dry_P Parameter: Treatment Value: Drought vs. No Drought
atttcaagaagattgaagacgaaggagaagctgagagagaacgacgaagcagattcaaaatcaactctctttcttcttcattcttttttcctgggtttttctgaatgtatcaccacgctttttccctaaaatttcactccttctctcctcactatgcgttatccctctccaatttctccacccaaagccctaatcctctcctcccgccattcgctagagtccctcatgtgaccagctctgtttgcctccgctgccggagcagcgccgctgatgtatctccggttatatacgccgatggctcctcctccatctgttctttcggggaaactggagatgtcgcggtggtcgagaaacctatagatgtctcaaccttgggtaatctctgcgtcgacattgttctcagtgttcacgaattgccccctccttctcgtggagaacgcaaggccctcatggacgaactctctatgtctcccccagataagaaatactgggaagcaggtggcaactgtaacatggctatagcagctgctagattggggcttcattgtgttgctattggtcacgttggggatgaaatctatggtgagtttcttcttgatgtgcttcatgaggaaggaataggtacggttgcattgaatggaggaacaaatgaaaaagataccagctcattctgtgaaactctcatttgctgggttcttgtggatcctttgcagaggcatgggttttgcagtcgagctgatttcaaggaggaacctgctttcagttggatcactgacctatctgatgaagtaaagatggcaatcagacagtcaaaagttcttttctgcaatggttatgactttgacgatttcagccctagttttattatgtcaacgatagattacgctgccaaagttgggacagctatcttcttcgatcctggaccacggggaaagagtctgtccaagggaactcctgatgagcgtagagcacttgctcatttcttaagaatgagtgatgttcttcttctaacatctgaggaggtggaggctctaactggcatcaggaaccctgttaaagcaggacaagaaattctgaggaacggaaagggaacgaaatgggtgattgtaaagatgggcccaaagggttcaattctagtgacgaaatctagtgtctcagtggcacctgcgtttaaggtggaagtggttgacactgttggatgtggagacagttttgtggctgcaattgcattaggttatatacgcaacatgccgcttgttaataccttaacaattgcaaatgcggttggagcagcaactgcaatgggctgtggagcaggtagaaatgttgcaaaaaggcatcaggtggtggatctgatgaaggcctcgaaactcaatgatgaagagaagtttttcgaacaactcctggctgaaaattcagagtcatctagaatcaatcttctttcaaaagggatgataaaggatgggaggagcaacaagcagctgatagaaacaatctcaatggaaaaagtggtttctgaattgcttgcagaacttgaacttgggaggtgttgtgtgaaggcttcatcttgaatctttgaaacaaactcgcctgacacacatattttctttggcggcgtgattttggagacctttgatggctctcaaggatttgcatagagacttgtaaaccagaagataacatcgggtaatgatggagattttttgtttcagctgaatcttattagtggatgaagaaatttcaggtaaatgattggttggcaatatttttttctttgggagatatgaaagagaaggtgatcttacaacattagtgataaatagttcacataaagagaagtttggcactattttctgtttgtcttcatattgttaaagtcgttaagatgcgatagtttggtcgggattttgtggaagttatgttagtaccaaacttgaagatttacttc

SEQ ID NO: 81657 - protein, 488 aa, Arabidopsis thaliana
  peptide (1)..(488): Ceres Seq. ID no. 12660694
  misc_feature (84)..(411): Pfam Name: pfkB family carbohydrate kinase Pfam Description: pfkB family carbohydrate kinase
  misc_feature (1)..(488): Homolog of NCBI NO: 15222179 NR Description: sugar kinase, putative; protein id: At1g06730.1, by cDNA: gi_13605672 [Arabidopsis thaliana]
  misc_feature (1)..(307): Homolog of NCBI NO: 25373383 NR Description: hypothetical protein [imported] - Arabidopsis >gi|7523706|gb|AAF63145.1|AC011001_15 Hypothetical protein
  misc_feature (83)..(478): Homolog of NCBI NO: 34902576 NR Description: Putative sugar kinase [Oryza sativa (japonica group)] >gi|20219054|gb|AAM15798.1| Putative sugar kinase [Oryza
  misc_feature (132)..(396): Homolog of NCBI NO: 23100153 NR Description: 2-keto-3-deoxygluconate kinase [Oceanobacillus
  misc_feature (254)..(422): Homolog of NCBI NO: 28210620 NR Description: ribokinase [Clostridium tetani E88]
  misc_feature (132)..(172): Homolog of NCBI NO: 28210620 NR Description: ribokinase [Clostridium tetani E88]
  misc_feature (119)..(396): Homolog of NCBI NO: 15643065 NR Description: fructokinase [Thermotoga maritima]
  misc_feature (132)..(418): Homolog of NCBI NO: 21225264 NR Description: putative carbohydrate kinase. [Streptomyces A3(2)] >gi|7649623|emb|CAB88955.1| putative carbohydrate kinase.
  misc_feature (127)..(399): Homolog of NCBI NO: 19551408 NR Description: sugar kinases, ribokinase family [Corynebacterium
  misc_feature (127)..(399): Homolog of NCBI NO: 21322922 NR Description: Sugar kinases, ribokinase family [Corynebacterium
MYHHAFSLKFHSFSPHYALSLSNFSTQSPNPLLPPFARVPHVTSSVCLRCRSSAADVSPVIYADGSSSICSFGETGDVAVVEKPIDVSTLGNLCVDIVLSVHELPPPSRGERKALMDELSMSPPDKKYWEAGGNCNMAIAAARLGLHCVAIGHVGDEIYGEFLLDVLHEEGIGTVALNGGTNEKDTSSFCETLICWVLVDPLQRHGFCSRADFKEEPAFSWITDLSDEVKMAIRQSKVLFCNGYDFDDFSPSFIMSTIDYAAKVGTAIFFDPGPRGKSLSKGTPDERRALAHFLRMSDVLLLTSEEVEALTGIRNPVKAGQEILRNGKGTKWVIVKMGPKGSILVTKSSVSVAPAFKVEVVDTVGCGDSFVAAIALGYIRNMPLVNTLTIANAVGAATAMGCGAGRNVAKRHQVVDLMKASKLNDEEKFFEQLLAENSESSRINLLSKGMIKDGRSNKQLIETISMEKVVSELLAELELGRCCVKASS

SEQ ID NO: 81658 - protein, 373 aa, Arabidopsis thaliana
  peptide (1)..(373): Ceres Seq. ID no. 12660695
  misc_feature (1)..(296): Pfam Name: pfkB family carbohydrate kinase Pfam Description: pfkB family carbohydrate kinase
  misc_feature (1)..(373): Homolog of NCBI NO: 15222179 NR Description: sugar kinase, putative; protein id: At1g06730.1, by cDNA: gi_13605672 [Arabidopsis thaliana]
  misc_feature (1)..(192): Homolog of NCBI NO: 25373383 NR Description: hypothetical protein [imported] - Arabidopsis >gi|7523706|gb|AAF63145.1|AC011001_15 Hypothetical protein
  misc_feature (1)..(363): Homolog of NCBI NO: 34902576 NR Description: Putative sugar kinase [Oryza sativa (japonica group)] >gi|20219054|gb|AAM15798.1| Putative sugar kinase [Oryza
  misc_feature (17)..(281): Homolog of NCBI NO: 23100153 NR Description: 2-keto-3-deoxygluconate kinase [Oceanobacillus
  misc_feature (139)..(307): Homolog of NCBI NO: 28210620 NR Description: ribokinase [Clostridium tetani E88]
  misc_feature (17)..(57): Homolog of NCBI NO: 28210620 NR Description: ribokinase [Clostridium tetani E88]
  misc_feature (4)..(281): Homolog of NCBI NO: 15643065 NR Description: fructokinase [Thermotoga maritima]
  misc_feature (17)..(303): Homolog of NCBI NO: 21225264 NR Description: putative carbohydrate kinase. [Streptomyces A3(2)] >gi|7649623|emb|CAB88955.1| putative carbohydrate kinase.
  misc_feature (12)..(284): Homolog of NCBI NO: 19551408 NR Description: sugar kinases, ribokinase family [Corynebacterium
  misc_feature (12)..(284): Homolog of NCBI NO: 21322922 NR Description: Sugar kinases, ribokinase family [Corynebacterium
MDELSMSPPDKKYWEAGGNCNMAIAAARLGLHCVAIGHVGDEIYGEFLLDVLHEEGIGTVALNGGTNEKDTSSFCETLICWVLVDPLQRHGFCSRADFKEEPAFSWITDLSDEVKMAIRQSKVLFCNGYDFDDFSPSFIMSTIDYAAKVGTAIFFDPGPRGKSLSKGTPDERRALAHFLRMSDVLLLTSEEVEALTGIRNPVKAGQEILRNGKGTKWVIVKMGPKGSILVTKSSVSVAPAFKVEVVDTVGCGDSFVAAIALGYIRNMPLVNTLTIANAVGAATAMGCGAGRNVAKRHQVVDLMKASKLNDEEKFFEQLLAENSESSRINLLSKGMIKDGRSNKQLIETISMEKVVSELLAELELGRCCVKASS

SEQ ID NO: 81659 - protein, 368 aa, Arabidopsis thaliana
  peptide (1)..(368): Ceres Seq. ID no. 12660696
  misc_feature (1)..(291): Pfam Name: pfkB family carbohydrate kinase Pfam Description: pfkB family carbohydrate kinase
  misc_feature (1)..(368): Homolog of NCBI NO: 15222179 NR Description: sugar kinase, putative; protein id: At1g06730.1, by cDNA: gi_13605672 [Arabidopsis thaliana]
  misc_feature (1)..(187): Homolog of NCBI NO: 25373383 NR Description: hypothetical protein [imported] - Arabidopsis >gi|7523706|gb|AAF63145.1|AC011001_15 Hypothetical protein
  misc_feature (1)..(358): Homolog of NCBI NO: 34902576 NR Description: Putative sugar kinase [Oryza sativa (japonica group)] >gi|20219054|gb|AAM15798.1| Putative sugar kinase [Oryza
  misc_feature (12)..(276): Homolog of NCBI NO: 23100153 NR Description: 2-keto-3-deoxygluconate kinase [Oceanobacillus
  misc_feature (134)..(302): Homolog of NCBI NO: 28210620 NR Description: ribokinase [Clostridium tetani E88]
  misc_feature (12)..(52): Homolog of NCBI NO: 28210620 NR Description: ribokinase [Clostridium tetani E88]
  misc_feature (1)..(276): Homolog of NCBI NO: 15643065 NR Description: fructokinase [Thermotoga maritima]
  misc_feature (12)..(298): Homolog of NCBI NO: 21225264 NR Description: putative carbohydrate kinase. [Streptomyces A3(2)] >gi|7649623|emb|CAB88955.1| putative carbohydrate kinase.
  misc_feature (7)..(279): Homolog of NCBI NO: 19551408 NR Description: sugar kinases, ribokinase family [Corynebacterium
  misc_feature (7)..(279): Homolog of NCBI NO: 21322922 NR Description: Sugar kinases, ribokinase family [Corynebacterium
MSPPDKKYWEAGGNCNMAIAAARLGLHCVAIGHVGDEIYGEFLLDVLHEEGIGTVALNGGTNEKDTSSFCETLICWVLVDPLQRHGFCSRADFKEEPAFSWITDLSDEVKMAIRQSKVLFCNGYDFDDFSPSFIMSTIDYAAKVGTAIFFDPGPRGKSLSKGTPDERRALAHFLRMSDVLLLTSEEVEALTGIRNPVKAGQEILRNGKGTKWVIVKMGPKGSILVTKSSVSVAPAFKVEVVDTVGCGDSFVAAIALGYIRNMPLVNTLTIANAVGAATAMGCGAGRNVAKRHQVVDLMKASKLNDEEKFFEQLLAENSESSRINLLSKGMIKDGRSNKQLIETISMEKVVSELLAELELGRCCVKASS

SEQ ID NO: 81660 - DNA, 1398 bp, Arabidopsis thaliana
  misc_feature (1)..(1398): Ceres Seq. ID no. 12660704
  misc_feature: MA Experiment ID: 20000180 Result: Up-regulated in Transcription
  misc_feature: MA Experiment 20000180 PARAMETER Experiment Name: At_Germinating_Seeds_P Parameter: Age (hr) Value: 24 vs. 0
  misc_feature: MA Experiment 20000180 PARAMETER Experiment Name: At_Germinating_Seeds_P Parameter: Tissue Value: Germinating Seeds
  misc_feature: MA Experiment ID: 20000184 Result: Up-regulated in Transcription
  misc_feature: MA Experiment 20000184 PARAMETER Experiment Name: At_Shoots__P Parameter: Age (day) Value: 7
  misc_feature: MA Experiment 20000184 PARAMETER Experiment Name: At_Shoots__P Parameter: Tissue Value: Shoots vs. Whole Plant
  misc_feature: MA Experiment ID: 20000286 Result: Up-regulated in Transcription
  misc_feature: MA Experiment 20000286 PARAMETER Experiment Name: At_Open_Flower_P Parameter: Age (day) Value: 21
  misc_feature: MA Experiment 20000286 PARAMETER Experiment Name: At_Open_Flower_P Parameter: Plant Line Value: WS
  misc_feature: MA Experiment 20000286 PARAMETER Experiment Name: At_Open_Flower_P Parameter: Tissue Value: Half Open vs. Whole Plant
  misc_feature: MA Experiment ID: 20000439 Result: Up-regulated in Transcription
  misc_feature: MA Experiment 20000439 PARAMETER Experiment Name: At_Roots__P Parameter: Age (day) Value: 14 vs. 21
  misc_feature: MA Experiment 20000439 PARAMETER Experiment Name: At_Roots__P Parameter: Organism Value: A. thaliana
  misc_feature: MA Experiment 20000439 PARAMETER Experiment Name: At_Roots__P Parameter: Tissue Value: Roots vs. Whole Plant
  misc_feature: MA Experiment ID: 20001247 Result: Up-regulated in Transcription
  misc_feature: MA Experiment 20001247 PARAMETER Experiment Name: At_Far-red-induction_P Parameter: Age (day) Value: 7
  misc_feature: MA Experiment 20001247 PARAMETER Experiment Name: At_Far-red-induction_P Parameter: Light Value: Far-red vs. White
  misc_feature: MA Experiment 20001247 PARAMETER Experiment Name: At_Far-red-induction_P Parameter: Organism Value: A. thaliana
  misc_feature: MA Experiment 20001247 PARAMETER Experiment Name: At_Far-red-induction_P Parameter: Plant Line Value: Columbia
  misc_feature: MA Experiment 20001247 PARAMETER Experiment Name: At_Far-red-induction_P Parameter: Timepoint (hr) Value: 1
  misc_feature: MA Experiment 20001247 PARAMETER Experiment Name: At_Far-red-induction_P Parameter: Tissue Value: Whole Plant
  misc_feature: MA Experiment ID: 20001248 Result: Up-regulated in Transcription
  misc_feature: MA Experiment 20001248 PARAMETER Experiment Name: At_Far-red-induction_P Parameter: Age (day) Value: 7
  misc_feature: MA Experiment 20001248 PARAMETER Experiment Name: At_Far-red-induction_P Parameter: Light Value: Far-red vs. White
  misc_feature: MA Experiment 20001248 PARAMETER Experiment Name: At_Far-red-induction_P Parameter: Organism Value: A. thaliana
  misc_feature: MA Experiment 20001248 PARAMETER Experiment Name: At_Far-red-induction_P Parameter: Plant Line Value: Columbia
  misc_feature: MA Experiment 20001248 PARAMETER Experiment Name: At_Far-red-induction_P Parameter: Timepoint (hr) Value: 4
  misc_feature: MA Experiment 20001248 PARAMETER Experiment Name: At_Far-red-induction_P Parameter: Tissue Value: Whole Plant
  misc_feature: MA Experiment ID: 20001911 Result: Down-regulated in Transcription
  misc_feature: MA Experiment 20001911 PARAMETER Experiment Name: At_Drought_Reproduction_P Parameter: Age (day) Value: 40
  misc_feature: MA Experiment 20001911 PARAMETER Experiment Name: At_Drought_Reproduction_P Parameter: Organism Value: A. thaliana
  misc_feature: MA Experiment 20001911 PARAMETER Experiment Name: At_Drought_Reproduction_P Parameter: Plant Line Value: WS
  misc_feature: MA Experiment 20001911 PARAMETER Experiment Name: At_Drought_Reproduction_P Parameter: Timepoint (day) Value: 10
  misc_feature: MA Experiment 20001911 PARAMETER Experiment Name: At_Drought_Reproduction_P Parameter: Tissue Value: Flowers
  misc_feature: MA Experiment 20001911 PARAMETER Experiment Name: At_Drought_Reproduction_P Parameter: Treatment Value: Drought vs. No Drought
tttgatagagagagagagagagagagagagagagaaagagcttcgtcttcttcatctccatcattatctccattgacattgttctcaattgcgaataataatcataattattcacacaaccaaagcattcatctctcagattctcttaaaaaaatggagaaatcagatcctccaccagtcccaaagcccggcgccactattatcccctcctccgatccaattcctaatgccgatccgattccatcttcttccttccaccgccgatctcgctccgacgatatgtccatgttcatgttcatggatcccctctcctccgccgcaccaccttcctccgacgaccttccctccgacgacgatctcttctcttctttcatcgatgtcgatagcctcacctctaatcccaatccctttcaaaatccttccctctcctccaactccgtttccggcgctgctaatcctcctcctcctccttcctctcgtcctcgccaccgtcacagcaattccgttgacgctggatgcgccatgtatgccggtgatatcatggacgctaagaaagctatgcctcctgaaaaactctctgagctttggaacatcgatcccaaacgcgccaaaaggattctagcgaatcgacaatctgcagctcgatccaaagagagaaaagctcgatacattcaagaacttgagcgcaaagttcaatctcttcaaaccgaagctaccactctctctgctcagcttactctctaccagagagacacaaatggactagcaaacgaaaacacagagctgaaacttaggttgcaagcaatggaacaacaagctcagcttcgtaatgctttaaacgaagcgttgaggaaagaagttgaaaggatgaagatggagacaggagaaatctctggtaattcagattcgtttgatatgggaatgcagcagattcagtattcttcctcaactttcatggctattccaccatatcatggctcaatgaacctccatgatatgcagatgcattctagtttcaatcctatggagatgtccaattctcaaagcgtgtcggactttctacagaacggccgaatgcaagggctggagattagtagcaatagctcaagcttagtcaaatctgaaggaccttctctctctgctagtgagagtagctctgcctattgacgacaagattatgatgaggctcatttttctgttaataggtttttttttttttcaattcatttgattcacttttgattatttattctttcttttttttgaggtgccattgtgcaagaaaggacgtacgtatacatttgtgttggttatgtgtcgtgagtttcgttgtttgctattcccattgtttgttcttcaaggaacaaaggagactaataaatttcatttttcttttgt

SEQ ID NO: 81661 - protein, 388 aa, Arabidopsis thaliana
  peptide (1)..(388): Ceres Seq. ID no. 12660705
  misc_feature (197)..(261): Pfam Name: bZIP transcription factor Pfam Description: bZIP transcription factor
  misc_feature (52)..(382): Homolog of NCBI NO: 25406943 NR Description: hypothetical protein [imported] - Arabidopsis >gi|7523698|gb|AAF63137.1|AC011001_7 Similar to bZIP
  misc_feature (52)..(388): Homolog of NCBI NO: 15222213 NR Description: bZIP protein; protein id: At1g06850.1, supported cDNA: gi_17064795 [Arabidopsis thaliana] Similar to bZIP transcription factors [Arabidopsis thaliana]
  misc_feature (52)..(298): Homolog of NCBI NO: 17065884 NR Description: AtbZIP transcription factor [Arabidopsis thaliana]
  misc_feature (76)..(388): Homolog of NCBI NO: 39579226 NR Description: bZIP transcription factor RF2b [Oryza sativa
  misc_feature (56)..(351): Homolog of NCBI NO: 15226727 NR Description: bZip DNA binding protein; protein id: supported by cDNA: gi_18377631, supported by cDNA: gi_20465782 thaliana] >gi|25408715|pir||G84831 probable bZIP transcription
  misc_feature (56)..(351): Homolog of NCBI NO: 25453519 NR Description: b-Zip DNA binding protein [imported] -
  misc_feature (179)..(386): Homolog of NCBI NO: 34394739 NR Description: putative transcription activator RF2a [Oryza
  misc_feature (86)..(348): Homolog of NCBI NO: 7489564 NR Description: probable transcription activator RF2a - rice
  misc_feature (151)..(384): Homolog of NCBI NO: 21740783 NR Description: OSJNBa0067K08.24 [Oryza sativa (japonica
  misc_feature (83)..(360): Homolog of NCBI NO: 15224665 NR Description: bZIP transcription factor (POSF21); protein id: supported by cDNA: gi_15982853 [Arabidopsis thaliana] Possible transcription factor PosF21 >gi|99685|pir||S21883 bZIP
FDRERERERERERASSSSSPSLSPLTLFSIANNNHNYSHNQSIHLSDSLKKMEKSDPPPVPKPGATIIPSSDPIPNADPIPSSSFHRRSRSDDMSMFMFMDPLSSAAPPSSDDLPSDDDLFSSFIDVDSLTSNPNPFQNPSLSSNSVSGAANPPPPPSSRPRHRHSNSVDAGCAMYAGDIMDAKKAMPPEKLSELWNIDPKRAKRILANRQSAARSKERKARYIQELERKVQSLQTEATTLSAQLTLYQRDTNGLANENTELKLRLQAMEQQAQLRNALNEALRKEVERMKMETGEISGNSDSFDMGMQQIQYSSSTFMAIPPYHGSMNLHDMQMHSSFNPMEMSNSQSVSDFLQNGRMQGLEISSNSSSLVKSEGPSLSASESSSAY

SEQ ID NO: 81662 - protein, 337 aa, Arabidopsis thaliana
  peptide (1)..(337): Ceres Seq. ID no. 12660706
  misc_feature (146)..(210): Pfam Name: bZIP transcription factor Pfam Description: bZIP transcription factor
  misc_feature (1)..(331): Homolog of NCBI NO: 25406943 NR Description: hypothetical protein [imported] - Arabidopsis >gi|7523698|gb|AAF63137.1|AC011001_7 Similar to bZIP
  misc_feature (1)..(337): Homolog of NCBI NO: 15222213 NR Description: bZIP protein; protein id: At1g06850.1, supported cDNA: gi_17064795 [Arabidopsis thaliana] Similar to bZIP transcription factors [Arabidopsis thaliana]
  misc_feature (1)..(247): Homolog of NCBI NO: 17065884 NR Description: AtbZIP transcription factor [Arabidopsis thaliana]
  misc_feature (25)..(337): Homolog of NCBI NO: 39579226 NR Description: bZIP transcription factor RF2b [Oryza sativa
  misc_feature (5)..(300): Homolog of NCBI NO: 15226727 NR Description: bZip DNA binding protein; protein id: supported by cDNA: gi_18377631, supported by cDNA: gi_20465782 thaliana] >gi|25408715|pir||G84831 probable bZIP transcription
  misc_feature (5)..(300): Homolog of NCBI NO: 25453519 NR Description: b-Zip DNA binding protein [imported] -
  misc_feature (128)..(335): Homolog of NCBI NO: 34394739 NR Description: putative transcription activator RF2a [Oryza
  misc_feature (35)..(297): Homolog of NCBI NO: 7489564 NR Description: probable transcription activator RF2a - rice
  misc_feature (100)..(333): Homolog of NCBI NO: 21740783 NR Description: OSJNBa0067K08.24 [Oryza sativa (japonica
  misc_feature (32)..(309): Homolog of NCBI NO: 15224665 NR Description: bZIP transcription factor (POSF21); protein id: supported by cDNA: gi_15982853 [Arabidopsis thaliana] Possible transcription factor PosF21 >gi|99685|pir||S21883 bZIP
MEKSDPPPVPKPGATIIPSSDPIPNADPIPSSSFHRRSRSDDMSMFMFMDPLSSAAPPSSDDLPSDDDLFSSFIDVDSLTSNPNPFQNPSLSSNSVSGAANPPPPPSSRPRHRHSNSVDAGCAMYAGDIMDAKKAMPPEKLSELWNIDPKRAKRILANRQSAARSKERKARYIQELERKVQSLQTEATTLSAQLTLYQRDTNGLANENTELKLRLQAMEQQAQLRNALNEALRKEVERMKMETGEISGNSDSFDMGMQQIQYSSSTFMAIPPYHGSMNLHDMQMHSSFNPMEMSNSQSVSDFLQNGRMQGLEISSNSSSLVKSEGPSLSASESSSAY

SEQ ID NO: 81663 - protein, 295 aa, Arabidopsis thaliana
  peptide (1)..(295): Ceres Seq. ID no. 12660707
  misc_feature (104)..(168): Pfam Name: bZIP transcription factor Pfam Description: bZIP transcription factor
  misc_feature (1)..(289): Homolog of NCBI NO: 25406943 NR Description: hypothetical protein [imported] - Arabidopsis >gi|7523698|gb|AAF63137.1|AC011001_7 Similar to bZIP
  misc_feature (1)..(295): Homolog of NCBI NO: 15222213 NR Description: bZIP protein; protein id: At1g06850.1, supported cDNA: gi_17064795 [Arabidopsis thaliana] Similar to bZIP transcription factors [Arabidopsis thaliana]
  misc_feature (1)..(205): Homolog of NCBI NO: 17065884 NR Description: AtbZIP transcription factor [Arabidopsis thaliana]
  misc_feature (1)..(295): Homolog of NCBI NO: 39579226 NR Description: bZIP transcription factor RF2b [Oryza sativa
  misc_feature (1)..(258): Homolog of NCBI NO: 15226727 NR Description: bZip DNA binding protein; protein id: supported by cDNA: gi_18377631, supported by cDNA: gi_20465782 thaliana] >gi|25408715|pir||G84831 probable bZIP transcription
  misc_feature (1)..(258): Homolog of NCBI NO: 25453519 NR Description: b-Zip DNA binding protein [imported] -
  misc_feature (86)..(293): Homolog of NCBI NO: 34394739 NR Description: putative transcription activator RF2a [Oryza
  misc_feature (1)..(255): Homolog of NCBI NO: 7489564 NR Description: probable transcription activator RF2a - rice
  misc_feature (58)..(291): Homolog of NCBI NO: 21740783 NR Description: OSJNBa0067K08.24 [Oryza sativa (japonica
  misc_feature (1)..(267): Homolog of NCBI NO: 15224665 NR Description: bZIP transcription factor (POSF21); protein id: supported by cDNA: gi_15982853 [Arabidopsis thaliana] Possible transcription factor PosF21 >gi|99685|pir||S21883 bZIP
MSMFMFMDPLSSAAPPSSDDLPSDDDLFSSFIDVDSLTSNPNPFQNPSLSSNSVSGAANPPPPPSSRPRHRHSNSVDAGCAMYAGDIMDAKKAMPPEKLSELWNIDPKRAKRILANRQSAARSKERKARYIQELERKVQSLQTEATTLSAQLTLYQRDTNGLANENTELKLRLQAMEQQAQLRNALNEALRKEVERMKMETGEISGNSDSFDMGMQQIQYSSSTFMAIPPYHGSMNLHDMQMHSSFNPMEMSNSQSVSDFLQNGRMQGLEISSNSSSLVKSEGPSLSASESSSAY

SEQ ID NO: 81664 - DNA, 2014 bp, Arabidopsis thaliana
  misc_feature (1)..(2014): Ceres Seq. ID no. 12660719
  misc_feature: MA Experiment ID: 20000171 Result: Down-regulated in Transcription
  misc_feature: MA Experiment 20000171 PARAMETER Experiment Name: At_42deg_Heat_P Parameter: Age (day) Value: 14
  misc_feature: MA Experiment 20000171 PARAMETER Experiment Name: At_42deg_Heat_P Parameter: Organism Value: A. thaliana
  misc_feature: MA Experiment 20000171 PARAMETER Experiment Name: At_42deg_Heat_P Parameter: Plant Line Value: WS
  misc_feature: MA Experiment 20000171 PARAMETER Experiment Name: At_42deg_Heat_P Parameter: Temperature (deg C) Value: 42 vs. 22
  misc_feature: MA Experiment 20000171 PARAMETER Experiment Name: At_42deg_Heat_P Parameter: Timepoint (hr) Value: 1
  misc_feature: MA Experiment 20000171 PARAMETER Experiment Name: At_42deg_Heat_P Parameter: Tissue Value: Aerial
  misc_feature: MA Experiment ID: 20000173 Result: Down-regulated in Transcription
  misc_feature: MA Experiment 20000173 PARAMETER Experiment Name: At_42deg_Heat_P Parameter: Age (day) Value: 14
  misc_feature: MA Experiment 20000173 PARAMETER Experiment Name: At_42deg_Heat_P Parameter: Organism Value: A. thaliana
  misc_feature: MA Experiment 20000173 PARAMETER Experiment Name: At_42deg_Heat_P Parameter: Plant Line Value: WS
  misc_feature: MA Experiment 20000173 PARAMETER Experiment Name: At_42deg_Heat_P Parameter: Temperature (deg C) Value: 42 vs. 22
  misc_feature: MA Experiment 20000173 PARAMETER Experiment Name: At_42deg_Heat_P Parameter: Timepoint (hr) Value: 6
  misc_feature: MA Experiment 20000173 PARAMETER Experiment Name: At_42deg_Heat_P Parameter: Tissue Value: Aerial
  misc_feature: MA Experiment ID: 20000182 Result: Up-regulated in Transcription
  misc_feature: MA Experiment 20000182 PARAMETER Experiment Name: At_2mM_SA_P Parameter: Age (day) Value: 14
  misc_feature: MA Experiment 20000182 PARAMETER Experiment Name: At_2mM_SA_P Parameter: Organism Value: A. thaliana
  misc_feature: MA Experiment 20000182 PARAMETER Experiment Name: At_2mM_SA_P Parameter: Plant Line Value: WS
  misc_feature: MA Experiment 20000182 PARAMETER Experiment Name: At_2mM_SA_P Parameter: Timepoint (hr) Value: 6
  misc_feature: MA Experiment 20000182 PARAMETER Experiment Name: At_2mM_SA_P Parameter: Tissue Value: Aerial
  misc_feature: MA Experiment 20000182 PARAMETER Experiment Name: At_2mM_SA_P Parameter: Treatment Value: 2mM SA vs. No Treatment
  misc_feature: MA Experiment ID: 20000184 Result: Down-regulated in Transcription
  misc_feature: MA Experiment 20000184 PARAMETER Experiment Name: At_Shoots__P Parameter: Age (day) Value: 7
  misc_feature: MA Experiment 20000184 PARAMETER Experiment Name: At_Shoots__P Parameter: Tissue Value: Shoots vs. Whole Plant
  misc_feature: MA Experiment ID: 20000185 Result: Down-regulated in Transcription
  misc_feature: MA Experiment 20000185 PARAMETER Experiment Name: At_Roots__P Parameter: Age (day) Value: 7 vs. 21
  misc_feature: MA Experiment 20000185 PARAMETER Experiment Name: At_Roots__P Parameter: Organism Value: A. thaliana
  misc_feature: MA Experiment 20000185 PARAMETER Experiment Name: At_Roots__P Parameter: Tissue Value: Roots vs. Whole Plant
  misc_feature: MA Experiment ID: 20000234 Result: Down-regulated in Transcription
  misc_feature: MA Experiment 20000234 PARAMETER Experiment Name: At_Siliques_P Parameter: Age (day) Value: 21
  misc_feature: MA Experiment 20000234 PARAMETER Experiment Name: At_Siliques_P Parameter: Organism Value: A. thaliana
  misc_feature: MA Experiment 20000234 PARAMETER Experiment Name: At_Siliques_P Parameter: Plant Line Value: WS
  misc_feature: MA Experiment 20000234 PARAMETER Experiment Name: At_Siliques_P Parameter: Tissue Value: Less Than 5mm Siliques vs. Whole Plant
  misc_feature: MA Experiment ID: 20000235 Result: Down-regulated in Transcription
  misc_feature: MA Experiment 20000235 PARAMETER Experiment Name: At_Siliques_P Parameter: Age (day) Value: 21
  misc_feature: MA Experiment 20000235 PARAMETER Experiment Name: At_Siliques_P Parameter: Organism Value: A. thaliana
  misc_feature: MA Experiment 20000235 PARAMETER Experiment Name: At_Siliques_P Parameter: Plant Line Value: WS
  misc_feature: MA Experiment 20000235 PARAMETER Experiment Name: At_Siliques_P Parameter: Tissue Value: 5-10mm Siliques vs. Whole Plant
  misc_feature: MA Experiment ID: 20000264 Result: Down-regulated in Transcription
  misc_feature: MA Experiment 20000264 PARAMETER Experiment Name: At_Open_Flower_P Parameter: Age (day) Value: 21
  misc_feature: MA Experiment 20000264 PARAMETER Experiment Name: At_Open_Flower_P Parameter: Plant Line Value: WS
  misc_feature: MA Experiment 20000264 PARAMETER Experiment Name: At_Open_Flower_P Parameter: Tissue Value: Open Flower vs. Whole Plant
  misc_feature: MA Experiment ID: 20000265 Result: Down-regulated in Transcription
  misc_feature: MA Experiment 20000265 PARAMETER Experiment Name: At_Open_Flower_P Parameter: Age (day) Value: 21
  misc_feature: MA Experiment 20000265 PARAMETER Experiment Name: At_Open_Flower_P Parameter: Plant Line Value: WS
  misc_feature: MA Experiment 20000265 PARAMETER Experiment Name: At_Open_Flower_P Parameter: Tissue Value: Closed Flower vs. Whole Plant
  misc_feature: MA Experiment ID: 20000286 Result: Down-regulated in Transcription
  misc_feature: MA Experiment 20000286 PARAMETER Experiment Name: At_Open_Flower_P Parameter: Age (day) Value: 21
  misc_feature: MA Experiment 20000286 PARAMETER Experiment Name: At_Open_Flower_P Parameter: Plant Line Value: WS
  misc_feature: MA Experiment 20000286 PARAMETER Experiment Name: At_Open_Flower_P Parameter: Tissue Value: Half Open vs. Whole Plant
  misc_feature: MA Experiment ID: 20000438 Result: Down-regulated in Transcription
  misc_feature: MA Experiment 20000438 PARAMETER Experiment Name: At_Shoots__P Parameter: Age (day) Value: 14
  misc_feature: MA Experiment 20000438 PARAMETER Experiment Name: At_Shoots__P Parameter: Tissue Value: Shoots vs. Whole Plant
  misc_feature: MA Experiment ID: 20000439 Result: Down-regulated in Transcription
  misc_feature: MA Experiment 20000439 PARAMETER Experiment Name: At_Roots__P Parameter: Age (day) Value: 14 vs. 21
  misc_feature: MA Experiment 20000439 PARAMETER Experiment Name: At_Roots__P Parameter: Organism Value: A. thaliana
  misc_feature: MA Experiment 20000439 PARAMETER Experiment Name: At_Roots__P Parameter: Tissue Value: Roots vs. Whole Plant
  misc_feature: MA Experiment ID: 20000606 Result: Up-regulated in Transcription
  misc_feature: MA Experiment 20000606 PARAMETER Experiment Name: At_CS8548_Mutant_P Parameter: Age (day) Value: 14
  misc_feature: MA Experiment 20000606 PARAMETER Experiment Name: At_CS8548_Mutant_P Parameter: Plant Line Value: CS8548 vs. wt
  misc_feature: MA Experiment 20000606 PARAMETER Experiment Name: At_CS8548_Mutant_P Parameter: Tissue Value: Whole Plant
  misc_feature: MA Experiment ID: 20000794 Result: Down-regulated in Transcription
  misc_feature: MA Experiment 20000794 PARAMETER Experiment Name: At_Petals_P Parameter: Age (day) Value: 23-25 days
  misc_feature: MA Experiment 20000794 PARAMETER Experiment Name: At_Petals_P Parameter: Plant Line Value: WS
  misc_feature: MA Experiment 20000794 PARAMETER Experiment Name: At_Petals_P Parameter: Tissue Value: Petals vs. Whole plant
  misc_feature: MA Experiment ID: 20001247 Result: Up-regulated in Transcription
  misc_feature: MA Experiment 20001247 PARAMETER Experiment Name: At_Far-red-induction_P Parameter: Age (day) Value: 7
  misc_feature: MA Experiment 20001247 PARAMETER Experiment Name: At_Far-red-induction_P Parameter: Light Value: Far-red vs. White
  misc_feature: MA Experiment 20001247 PARAMETER Experiment Name: At_Far-red-induction_P Parameter: Organism Value: A. thaliana
  misc_feature: MA Experiment 20001247 PARAMETER Experiment Name: At_Far-red-induction_P Parameter: Plant Line Value: Columbia
  misc_feature: MA Experiment 20001247 PARAMETER Experiment Name: At_Far-red-induction_P Parameter: Timepoint (hr) Value: 1
  misc_feature: MA Experiment 20001247 PARAMETER Experiment Name: At_Far-red-induction_P Parameter: Tissue Value: Whole Plant
  misc_feature: MA Experiment ID: 20001248 Result: Up-regulated in Transcription
  misc_feature: MA Experiment 20001248 PARAMETER Experiment Name: At_Far-red-induction_P Parameter: Age (day) Value: 7
  misc_feature: MA Experiment 20001248 PARAMETER Experiment Name: At_Far-red-induction_P Parameter: Light Value: Far-red vs. White
  misc_feature: MA Experiment 20001248 PARAMETER Experiment Name: At_Far-red-induction_P Parameter: Organism Value: A. thaliana
  misc_feature: MA Experiment 20001248 PARAMETER Experiment Name: At_Far-red-induction_P Parameter: Plant Line Value: Columbia
  misc_feature: MA Experiment 20001248 PARAMETER Experiment Name: At_Far-red-induction_P Parameter: Timepoint (hr) Value: 4
  misc_feature: MA Experiment 20001248 PARAMETER Experiment Name: At_Far-red-induction_P Parameter: Tissue Value: Whole Plant
  misc_feature: MA Experiment ID: 20001554 Result: Down-regulated in Transcription
  misc_feature: MA Experiment 20001554 PARAMETER Experiment Name: At_Drought_Soil_Dry_P Parameter: Age (day) Value: 21
  misc_feature: MA Experiment 20001554 PARAMETER Experiment Name: At_Drought_Soil_Dry_P Parameter: Organism Value: A. thaliana
  misc_feature: MA Experiment 20001554 PARAMETER Experiment Name: At_Drought_Soil_Dry_P Parameter: Plant Line Value: WS
  misc_feature: MA Experiment 20001554 PARAMETER Experiment Name: At_Drought_Soil_Dry_P Parameter: Post Timepoint (hr) Value: None
  misc_feature: MA Experiment 20001554 PARAMETER Experiment Name: At_Drought_Soil_Dry_P Parameter: Post-Treatment Value: None
  misc_feature: MA Experiment 20001554 PARAMETER Experiment Name: At_Drought_Soil_Dry_P Parameter: Timepoint (day) Value: 7
  misc_feature: MA Experiment 20001554 PARAMETER Experiment Name: At_Drought_Soil_Dry_P Parameter: Treatment Value: Drought vs. No Drought
  misc_feature: MA Experiment ID: 20001555 Result: Down-regulated in Transcription
  misc_feature: MA Experiment 20001555 PARAMETER Experiment Name: At_Drought_Soil_Dry_P Parameter: Age (day) Value: 24
  misc_feature: MA Experiment 20001555 PARAMETER Experiment Name: At_Drought_Soil_Dry_P Parameter: Organism Value: A. thaliana
  misc_feature: MA Experiment 20001555 PARAMETER Experiment Name: At_Drought_Soil_Dry_P Parameter: Plant Line Value: WS
  misc_feature: MA Experiment 20001555 PARAMETER Experiment Name: At_Drought_Soil_Dry_P Parameter: Post Timepoint (hr) Value: None
  misc_feature: MA Experiment 20001555 PARAMETER Experiment Name: At_Drought_Soil_Dry_P Parameter: Post-Treatment Value: None
  misc_feature: MA Experiment 20001555 PARAMETER Experiment Name: At_Drought_Soil_Dry_P Parameter: Timepoint (day) Value: 10
  misc_feature: MA Experiment 20001555 PARAMETER Experiment Name: At_Drought_Soil_Dry_P Parameter: Treatment Value: Drought vs. No Drought
  misc_feature: MA Experiment ID: 20001556 Result: Down-regulated in Transcription
  misc_feature: MA Experiment 20001556 PARAMETER Experiment Name: At_Drought_Soil_Dry_P Parameter: Age (day) Value: 26
  misc_feature: MA Experiment 20001556 PARAMETER Experiment Name: At_Drought_Soil_Dry_P Parameter: Organism Value: A. thaliana
  misc_feature: MA Experiment 20001556 PARAMETER Experiment Name: At_Drought_Soil_Dry_P Parameter: Plant Line Value: WS
  misc_feature: MA Experiment 20001556 PARAMETER Experiment Name: At_Drought_Soil_Dry_P Parameter: Post Timepoint (hr) Value: None
  misc_feature: MA Experiment 20001556 PARAMETER Experiment Name: At_Drought_Soil_Dry_P Parameter: Post-Treatment Value: None
  misc_feature: MA Experiment 20001556 PARAMETER Experiment Name: At_Drought_Soil_Dry_P Parameter: Timepoint (day) Value: 12
  misc_feature: MA Experiment 20001556 PARAMETER Experiment Name: At_Drought_Soil_Dry_P Parameter: Treatment Value: Drought vs. No Drought
  misc_feature: MA Experiment ID: 20001558 Result: Down-regulated in Transcription
  misc_feature: MA Experiment 20001558 PARAMETER Experiment Name: At_Drought_Soil_Dry_P Parameter: Age (day) Value: 27
  misc_feature: MA Experiment 20001558 PARAMETER Experiment Name: At_Drought_Soil_Dry_P Parameter: Organism Value: A. thaliana
  misc_feature: MA Experiment 20001558 PARAMETER Experiment Name: At_Drought_Soil_Dry_P Parameter: Plant Line Value: WS
  misc_feature: MA Experiment 20001558 PARAMETER Experiment Name: At_Drought_Soil_Dry_P Parameter: Post Timepoint (hr) Value: 6
  misc_feature: MA Experiment 20001558 PARAMETER Experiment Name: At_Drought_Soil_Dry_P Parameter: Post-Treatment Value: Re-Water vs. No Drought
  misc_feature: MA Experiment 20001558 PARAMETER Experiment Name: At_Drought_Soil_Dry_P Parameter: Timepoint (day) Value: 13
  misc_feature: MA Experiment 20001558 PARAMETER Experiment Name: At_Drought_Soil_Dry_P Parameter: Treatment Value: Drought vs. No Drought
  misc_feature: MA Experiment ID: 20001560 Result: Down-regulated in Transcription
  misc_feature: MA Experiment 20001560 PARAMETER Experiment Name: At_Drought_Soil_Dry_P Parameter: Age (day) Value: 28
  misc_feature: MA Experiment 20001560 PARAMETER Experiment Name: At_Drought_Soil_Dry_P Parameter: Organism Value: A. thaliana
  misc_feature: MA Experiment 20001560 PARAMETER Experiment Name: At_Drought_Soil_Dry_P Parameter: Plant Line Value: WS
  misc_feature: MA Experiment 20001560 PARAMETER Experiment Name: At_Drought_Soil_Dry_P Parameter: Post Timepoint (hr) Value: None
  misc_feature: MA Experiment 20001560 PARAMETER Experiment Name: At_Drought_Soil_Dry_P Parameter: Post-Treatment Value: None
  misc_feature: MA Experiment 20001560 PARAMETER Experiment Name: At_Drought_Soil_Dry_P Parameter: Timepoint (day) Value: 14
  misc_feature: MA Experiment 20001560 PARAMETER Experiment Name: At_Drought_Soil_Dry_P Parameter: Treatment Value: Drought vs. No Drought
  misc_feature: MA Experiment ID: 20001904 Result: Down-regulated in Transcription
  misc_feature: MA Experiment 20001904 PARAMETER Experiment Name: At_Drought_Reproduction_P Parameter: Age (day) Value: 37
  misc_feature: MA Experiment 20001904 PARAMETER Experiment Name: At_Drought_Reproduction_P Parameter: Organism Value: A. thaliana
  misc_feature: MA Experiment 20001904 PARAMETER Experiment Name: At_Drought_Reproduction_P Parameter: Plant Line Value: WS
  misc_feature: MA Experiment 20001904 PARAMETER Experiment Name: At_Drought_Reproduction_P Parameter: Timepoint (day) Value: 7
  misc_feature: MA Experiment 20001904 PARAMETER Experiment Name: At_Drought_Reproduction_P Parameter: Tissue Value: Rosettes
  misc_feature: MA Experiment 20001904 PARAMETER Experiment Name: At_Drought_Reproduction_P Parameter: Treatment Value: Drought vs. No Drought
atccaatcatatggctgaagccggtgacgagaatctttacgccgccgccagagacatcgccagagctctcggcaaggatccaagtgccgccggagatatcttacagattctctccggttatggcgcttccggaaaccgcggcggagatcctcgacccaccccatcccgcggcggctcaaacgtcaactttgaccgagccctcacctctttagagagacagatctccagctacatcgtggaagatcgaccgatctggtctgatcccgttgactcgcgcaccttcctcgactctgttgatgagctacttgcgattgccggagacttgagatccatggccggagataaatccgtcgccgtctgtcaatcccgtgccgatgagctgattcaacaggtgatgtttaggcttcaagaagagtttggatttgtaatggaccgagcccctgactcgtttgactcggacgatgagttccccggcgaagaagacaacgacacaagcgacggggtaatcgttgctcgtccaatcactgattacaaaatcgtgatcgaggcgttacaatctagcgttattggcgatctaaacgcgatcgctgtgcgcatggtcgctggtggatttgcaaaagagtgttcaagagtgtacagcagtcgacgaagagagtttctagaggagagtttgtcgaggttacatctcagaggactaagtatggaggaagtgcaagagagtccatggcaagatcttgaagacgaaatcgaccgttggattaaagccgtaacgctgatattccacgttttcttcccgagcgagcgtcttctctgcgatcgcgttttctctgatcttcctgtttcctctgtaaccgatctttctttcatggaagtttgtcgcggaaccacaacacagcttctgaatttcgcagacgcgatcgctttaggaagccgtttacctgaacgtttgtttaaggttgtggatttatacgaagcgatgcaagaccttattcctaagatggaaacgctattttctgatcgatattgttcgccgctaaggcatgaggcgctcgcgattcataaacggttaggagaagcgattagagggatatttatggagctggagaatttaatccgacgtgaccctcccaaaacagcgtttcctggcggtgggattcacccgatcacgcggtacgtgatgaattatctgcgtgcggcgtgtaaatcgcggcaatcgttggagcagatacttgaccagacaggaaatgaaaccggatcagatacgagaccgttgtctgtgcaaatcatatgggttttggagttgttggagagtaacttggaaggcaagaaaagaacttatcgtgatccgtctttgtgtttcttgttcatgatgaacaatgacaagtatattcttgataaggctaaggataacgagctaggtttagtcctaggagaagattggattgtgaagcacgcagcgaaactgaggcaataccattctaattaccgaaggagctcatggaaccaagtggtgggattgcttaggaccgatggtccgtatcccaagttagtagagaacctaagattgttcaaatcacagttcgatgaggtgtgtaaggtgcaatctcaatgggttgttagtgatgggcaattgagggaggagttaagaagctctgttgccggaattgtatctccggcgtactcgaatttcatcagaagattgaaggagtcaccggagattaatgggaggcgtggagagccgtttattccgtatactgttgaagatgtggagtttataatcaaacggttgttcaaggaaagctcaagttgattaaattagatatgaaaagaaattaaaaaattcttattaattgaatttttttgtaaaattgtgaatcattctgtgtttttttatctttcttgggtgaataatgttcatggatcggtggaatcaccttttcgacattgatttgttcatgtattgcttttttgatgtaagaaatttccttaaggttaaaatataattcgtttgggt

SEQ ID NO: 81665 - protein, 602 aa, Arabidopsis thaliana
  peptide (1)..(602): Ceres Seq. ID no. 12660720
  misc_feature (51)..(598): Pfam Name: Exo70 exocyst complex subunit Pfam Description: Exo70 exocyst complex subunit
  misc_feature (4)..(602): Homolog of NCBI NO: 15237198 NR Description: leucine zipper-containing protein; protein id: supported by cDNA: gi_20453215 [Arabidopsis thaliana] leucine zipper protein [Arabidopsis thaliana]
  misc_feature (4)..(510): Homolog of NCBI NO: 100226 NR Description: tomato leucine zipper-containing protein - tomato protein of unknown function [Lycopersicon esculentum]
  misc_feature (62)..(598): Homolog of NCBI NO: 34907918 NR Description: putative leucine zipper protein [Oryza sativa
  misc_feature (4)..(40): Homolog of NCBI NO: 34907918 NR Description: putative leucine zipper protein [Oryza sativa
  misc_feature (67)..(598): Homolog of NCBI NO: 34907920 NR Description: putative leucine zipper protein [Oryza sativa
  misc_feature (67)..(602): Homolog of NCBI NO: 15240761 NR Description: leucine zipper protein-like; protein id:
  misc_feature (181)..(510): Homolog of NCBI NO: 9758920 NR Description: gb|AAD25781.1~gene_id:MXI22.10~strong similarity
  misc_feature (181)..(510): Homolog of NCBI NO: 30695880 NR Description: exocyst subunit EXO70 family [Arabidopsis
  misc_feature (516)..(598): Homolog of NCBI NO: 9758920 NR Description: gb|AAD25781.1~gene_id:MXI22.10~strong similarity
  misc_feature (516)..(598): Homolog of NCBI NO: 30695880 NR Description: exocyst subunit EXO70 family [Arabidopsis
SNHMAEAGDENLYAAARDIARALGKDPSAAGDILQILSGYGASGNRGGDPRPTPSRGGSNVNFDRALTSLERQISSYIVEDRPIWSDPVDSRTFLDSVDELLAIAGDLRSMAGDKSVAVCQSRADELIQQVMFRLQEEFGFVMDRAPDSFDSDDEFPGEEDNDTSDGVIVARPITDYKIVIEALQSSVIGDLNAIAVRMVAGGFAKECSRVYSSRRREFLEESLSRLHLRGLSMEEVQESPWQDLEDEIDRWIKAVTLIFHVFFPSERLLCDRVFSDLPVSSVTDLSFMEVCRGTTTQLLNFADAIALGSRLPERLFKVVDLYEAMQDLIPKMETLFSDRYCSPLRHEALAIHKRLGEAIRGIFMELENLIRRDPPKTAFPGGGIHPITRYVMNYLRAACKSRQSLEQILDQTGNETGSDTRPLSVQIIWVLELLESNLEGKKRTYRDPSLCFLFMMNNDKYILDKAKDNELGLVLGEDWIVKHAAKLRQYHSNYRRSSWNQVVGLLRTDGPYPKLVENLRLFKSQFDEVCKVQSQWVVSDGQLREELRSSVAGIVSPAYSNFIRRLKESPEINGRRGEPFIPYTVEDVEFIIKRLFKESSS

SEQ ID NO: 81666 - protein, 599 aa, Arabidopsis thaliana
  peptide (1)..(599): Ceres Seq. ID no. 12660721
  misc_feature (48)..(595): Pfam Name: Exo70 exocyst complex subunit Pfam Description: Exo70 exocyst complex subunit
  misc_feature (1)..(599): Homolog of NCBI NO: 15237198 NR Description: leucine zipper-containing protein; protein id: supported by cDNA: gi_20453215 [Arabidopsis thaliana] leucine zipper protein [Arabidopsis thaliana]
  misc_feature (1)..(507): Homolog of NCBI NO: 100226 NR Description: tomato leucine zipper-containing protein - tomato protein of unknown function [Lycopersicon esculentum]
  misc_feature (59)..(595): Homolog of NCBI NO: 34907918 NR Description: putative leucine zipper protein [Oryza sativa
  misc_feature (1)..(37): Homolog of NCBI NO: 34907918 NR Description: putative leucine zipper protein [Oryza sativa
  misc_feature (64)..(595): Homolog of NCBI NO: 34907920 NR Description: putative leucine zipper protein [Oryza sativa
  misc_feature (64)..(599): Homolog of NCBI NO: 15240761 NR Description: leucine zipper protein-like; protein id:
  misc_feature (178)..(507): Homolog of NCBI NO: 9758920 NR Description: gb|AAD25781.1~gene_id:MXI22.10~strong similarity
  misc_feature (178)..(507): Homolog of NCBI NO: 30695880 NR Description: exocyst subunit EXO70 family [Arabidopsis
  misc_feature (513)..(595): Homolog of NCBI NO: 9758920 NR Description: gb|AAD25781.1~gene_id:MXI22.10~strong similarity
  misc_feature (513)..(595): Homolog of NCBI NO: 30695880 NR Description: exocyst subunit EXO70 family [Arabidopsis
MAEAGDENLYAAARDIARALGKDPSAAGDILQILSGYGASGNRGGDPRPTPSRGGSNVNFDRALTSLERQISSYIVEDRPIWSDPVDSRTFLDSVDELLAIAGDLRSMAGDKSVAVCQSRADELIQQVMFRLQEEFGFVMDRAPDSFDSDDEFPGEEDNDTSDGVIVARPITDYKIVIEALQSSVIGDLNAIAVRMVAGGFAKECSRVYSSRRREFLEESLSRLHLRGLSMEEVQESPWQDLEDEIDRWIKAVTLIFHVFFPSERLLCDRVFSDLPVSSVTDLSFMEVCRGTTTQLLNFADAIALGSRLPERLFKVVDLYEAMQDLIPKMETLFSDRYCSPLRHEALAIHKRLGEAIRGIFMELENLIRRDPPKTAFPGGGIHPITRYVMNYLRAACKSRQSLEQILDQTGNETGSDTRPLSVQIIWVLELLESNLEGKKRTYRDPSLCFLFMMNNDKYILDKAKDNELGLVLGEDWIVKHAAKLRQYHSNYRRSSWNQVVGLLRTDGPYPKLVENLRLFKSQFDEVCKVQSQWVVSDGQLREELRSSVAGIVSPAYSNFIRRLKESPEINGRRGEPFIPYTVEDVEFIIKRLFKESSS

SEQ ID NO: 81667 - protein, 492 aa, Arabidopsis thaliana
  peptide (1)..(492): Ceres Seq. ID no. 12660722
  misc_feature (1)..(488): Pfam Name: Exo70 exocyst complex subunit Pfam Description: Exo70 exocyst complex subunit
  misc_feature (1)..(492): Homolog of NCBI NO: 15237198 NR Description: leucine zipper-containing protein; protein id: supported by cDNA: gi_20453215 [Arabidopsis thaliana] leucine zipper protein [Arabidopsis thaliana]
  misc_feature (1)..(400): Homolog of NCBI NO: 100226 NR Description: tomato leucine zipper-containing protein - tomato protein of unknown function [Lycopersicon esculentum]
  misc_feature (1)..(488): Homolog of NCBI NO: 34907918 NR Description: putative leucine zipper protein [Oryza sativa
  misc_feature (1)..(488): Homolog of NCBI NO: 34907920 NR Description: putative leucine zipper protein [Oryza sativa
  misc_feature (1)..(492): Homolog of NCBI NO: 15240761 NR Description: leucine zipper protein-like; protein id:
  misc_feature (71)..(400): Homolog of NCBI NO: 9758920 NR Description: gb|AAD25781.1~gene_id:MXI22.10~strong similarity
  misc_feature (71)..(400): Homolog of NCBI NO: 30695880 NR Description: exocyst subunit EXO70 family [Arabidopsis
  misc_feature (406)..(488): Homolog of NCBI NO: 9758920 NR Description: gb|AAD25781.1~gene_id:MXI22.10~strong similarity
  misc_feature (406)..(488): Homolog of NCBI NO: 30695880 NR Description: exocyst subunit EXO70 family [Arabidopsis
  misc_feature (51)..(488): Homolog of NCBI NO: 19386798 NR Description: putative leucine zipper protein [Oryza sativa
MAGDKSVAVCQSRADELIQQVMFRLQEEFGFVMDRAPDSFDSDDEFPGEEDNDTSDGVIVARPITDYKIVIEALQSSVIGDLNAIAVRMVAGGFAKECSRVYSSRRREFLEESLSRLHLRGLSMEEVQESPWQDLEDEIDRWIKAVTLIFHVFFPSERLLCDRVFSDLPVSSVTDLSFMEVCRGTTTQLLNFADAIALGSRLPERLFKVVDLYEAMQDLIPKMETLFSDRYCSPLRHEALAIHKRLGEAIRGIFMELENLIRRDPPKTAFPGGGIHPITRYVMNYLRAACKSRQSLEQILDQTGNETGSDTRPLSVQIIWVLELLESNLEGKKRTYRDPSLCFLFMMNNDKYILDKAKDNELGLVLGEDWIVKHAAKLRQYHSNYRRSSWNQVVGLLRTDGPYPKLVENLRLFKSQFDEVCKVQSQWVVSDGQLREELRSSVAGIVSPAYSNFIRRLKESPEINGRRGEPFIPYTVEDVEFIIKRLFKESSS

SEQ ID NO: 81668 - DNA, 1407 bp, Arabidopsis thaliana
  misc_feature (1)..(1407): Ceres Seq. ID no. 12660756
  misc_feature: MA Experiment ID: 20000265 Result: Up-regulated in Transcription
  misc_feature: MA Experiment 20000265 PARAMETER Experiment Name: At_Open_Flower_P Parameter: Age (day) Value: 21
  misc_feature: MA Experiment 20000265 PARAMETER Experiment Name: At_Open_Flower_P Parameter: Plant Line Value: WS
  misc_feature: MA Experiment 20000265 PARAMETER Experiment Name: At_Open_Flower_P Parameter: Tissue Value: Closed Flower vs. Whole Plant
  misc_feature: MA Experiment ID: 20000443 Result: Up-regulated in Transcription
  misc_feature: MA Experiment 20000443 PARAMETER Experiment Name: At_1uM_BR-BRZ__P Parameter: Tissue Value: Shoot Apices
  misc_feature: MA Experiment 20000443 PARAMETER Experiment Name: At_1uM_BR-BRZ__P Parameter: Treatment Value: 1uM BRZ vs. No Treatment
atggctgttggttcgatgaatgtcgaagaaggcactaaagcttttcctgcgaagctgacaggtcaagtctttctttgctgtgtcattgctgctgttggtggtctcatgtttggttacgacatcggaatctcaggaggtgtaacgagtatggacactttcttgttagattttttcccacacgtgtacgagaagaaacacagagtacacgaaaacaactactgcaaattcgatgaccagctcttgcagttgttcacttcctcactctacttggctggaatcttcgctagctttatttcttcctatgtttctagggcttttggaagaaaacccacaatcatgctcgcctccatcttcttcctcgtcggtgctatcctcaacttatctgcccaagaactcggcatgttgatcggtggtcgtattcttctcggctttggtatcggtttcggtaaccagaccgttccattgttcatctcagagattgctccggcgagatacagaggaggactaaacgtcatgttccagtttctcatcaccattggaatcttagcagcaagttatgtgaactacttaacttccacgttgaaaaacggctggagatattctctcggtggtgctgctgtccccgctttaatcctcttgataggatccttctttatccacgagactccggctagtctcatcgagcgcggtaaagacgaaaaggggaagcaagtcctgaggaagatcagaggcattgaagatattgagctcgagttcaatgagatcaaatacgcaacagaggtagcgacaaaggtgaaaagcccattcaaagaactcttcaccaagagtgagaacagaccaccattggtgtgtggaacgttacttcagttctttcaacagttcaccggtatcaacgtggttatgttctacgctccagttttgttccagacgatgggtagtggtgacaacgcttctctgatctctactgttgtcaccaatggtgtgaacgcaatcgctacagttatctctcttttagtggttgatttcgccggtagaaggtgtcttctgatggaaggagctctccagatgaccgctacacagatgacaattggaggcattctcttagctcacttgaagctagttggtcctattactggccatgccatctaccctcttgaagtgagaaatgctggttacttctgtgcggtggcgatgaacatggtctgcactttcatcattggacagttcttcttgtctgctctctgcagattcagatcattattgttcttcttcttcggaataatgaacattatcatgggactatttgtcgtgttttttcttcccgaaaccaaaggtgttcctattgaggaaatggccgagaagcgttggaaaacgcacccgcgttggaagaaatatttcaaagactag

SEQ ID NO: 81669 - protein, 468 aa, Arabidopsis thaliana
  peptide (1)..(468): Ceres Seq. ID no. 12660757
  misc_feature (26)..(151): Pfam Name: Sugar (and other) transporter Pfam Description: Sugar (and other) transporter
  misc_feature (1)..(468): Homolog of NCBI NO: 15222376 NR Description: hexose transporter, putative; protein id:
  misc_feature (151)..(362): Homolog of NCBI NO: 25308948 NR Description: protein F22G5.32 [imported] - Arabidopsis >gi|8778557|gb|AAF79565.1|AC022464_23 F22G5.32 [Arabidopsis
  misc_feature (1)..(151): Homolog of NCBI NO: 25308948 NR Description: protein F22G5.32 [imported] - Arabidopsis >gi|8778557|gb|AAF79565.1|AC022464_23 F22G5.32 [Arabidopsis
  misc_feature (374)..(468): Homolog of NCBI NO: 25308948 NR Description: protein F22G5.32 [imported] - Arabidopsis >gi|8778557|gb|AAF79565.1|AC022464_23 F22G5.32 [Arabidopsis
  misc_feature (12)..(377): Homolog of NCBI NO: 15240279 NR Description: hexose transporter - like protein; protein id: [Arabidopsis thaliana] >gi|7446740|pir||T01844 probable sugar
  misc_feature (383)..(465): Homolog of NCBI NO: 15240279 NR Description: hexose transporter - like protein; protein id: [Arabidopsis thaliana] >gi|7446740|pir||T01844 probable sugar
  misc_feature (1)..(377): Homolog of NCBI NO: 15230590 NR Description: putative hexose transporter; protein id: [Arabidopsis thaliana] >gi|6671961|gb|AAF23220.1|AC013454_7 hexose transporter [Arabidopsis thaliana]
  misc_feature (383)..(465): Homolog of NCBI NO: 15230590 NR Description: putative hexose transporter; protein id: [Arabidopsis thaliana] >gi|6671961|gb|AAF23220.1|AC013454_7 hexose transporter [Arabidopsis thaliana]
  misc_feature (13)..(375): Homolog of NCBI NO: 34393308 NR Description: putative hexose transporter [Oryza sativa
  misc_feature (383)..(468): Homolog of NCBI NO: 34393308 NR Description: putative hexose transporter [Oryza sativa
MAVGSMNVEEGTKAFPAKLTGQVFLCCVIAAVGGLMFGYDIGISGGVTSMDTFLLDFFPHVYEKKHRVHENNYCKFDDQLLQLFTSSLYLAGIFASFISSYVSRAFGRKPTIMLASIFFLVGAILNLSAQELGMLIGGRILLGFGIGFGNQTVPLFISEIAPARYRGGLNVMFQFLITIGILAASYVNYLTSTLKNGWRYSLGGAAVPALILLIGSFFIHETPASLIERGKDEKGKQVLRKIRGIEDIELEFNEIKYATEVATKVKSPFKELFTKSENRPPLVCGTLLQFFQQFTGINVVMFYAPVLFQTMGSGDNASLISTVVTNGVNAIATVISLLVVDFAGRRCLLMEGALQMTATQMTIGGILLAHLKLVGPITGHAIYPLEVRNAGYFCAVAMNMVCTFIIGQFFLSALCRFRSLLFFFFGIMNIIMGLFVVFFLPETKGVPIEEMAEKRWKTHPRWKKYFKD

SEQ ID NO: 81670 - protein, 463 aa, Arabidopsis thaliana
  peptide (1)..(463): Ceres Seq. ID no. 12660758
  misc_feature (21)..(146): Pfam Name: Sugar (and other) transporter Pfam Description: Sugar (and other) transporter
  misc_feature (1)..(463): Homolog of NCBI NO: 15222376 NR Description: hexose transporter, putative; protein id:
  misc_feature (146)..(357): Homolog of NCBI NO: 25308948 NR Description: protein F22G5.32 [imported] - Arabidopsis >gi|8778557|gb|AAF79565.1|AC022464_23 F22G5.32 [Arabidopsis
  misc_feature (1)..(146): Homolog of NCBI NO: 25308948 NR Description: protein F22G5.32 [imported] - Arabidopsis >gi|8778557|gb|AAF79565.1|AC022464_23 F22G5.32 [Arabidopsis
  misc_feature (369)..(463): Homolog of NCBI NO: 25308948 NR Description: protein F22G5.32 [imported] - Arabidopsis >gi|8778557|gb|AAF79565.1|AC022464_23 F22G5.32 [Arabidopsis
  misc_feature (7)..(372): Homolog of NCBI NO: 15240279 NR Description: hexose transporter - like protein; protein id: [Arabidopsis thaliana] >gi|7446740|pir||T01844 probable sugar
  misc_feature (378)..(460): Homolog of NCBI NO: 15240279 NR Description: hexose transporter - like protein; protein id: [Arabidopsis thaliana] >gi|7446740|pir||T01844 probable sugar
  misc_feature (1)..(372): Homolog of NCBI NO: 15230590 NR Description: putative hexose transporter; protein id: [Arabidopsis thaliana] >gi|6671961|gb|AAF23220.1|AC013454_7 hexose transporter [Arabidopsis thaliana]
  misc_feature (378)..(460): Homolog of NCBI NO: 15230590 NR Description: putative hexose transporter; protein id: [Arabidopsis thaliana] >gi|6671961|gb|AAF23220.1|AC013454_7 hexose transporter [Arabidopsis thaliana]
  misc_feature (8)..(370): Homolog of NCBI NO: 34393308 NR Description: putative hexose transporter [Oryza sativa
  misc_feature (378)..(463): Homolog of NCBI NO: 34393308 NR Description: putative hexose transporter [Oryza sativa
MNVEEGTKAFPAKLTGQVFLCCVIAAVGGLMFGYDIGISGGVTSMDTFLLDFFPHVYEKKHRVHENNYCKFDDQLLQLFTSSLYLAGIFASFISSYVSRAFGRKPTIMLASIFFLVGAILNLSAQELGMLIGGRILLGFGIGFGNQTVPLFISEIAPARYRGGLNVMFQFLITIGILAASYVNYLTSTLKNGWRYSLGGAAVPALILLIGSFFIHETPASLIERGKDEKGKQVLRKIRGIEDIELEFNEIKYATEVATKVKSPFKELFTKSENRPPLVCGTLLQFFQQFTGINVVMFYAPVLFQTMGSGDNASLISTVVTNGVNAIATVISLLVVDFAGRRCLLMEGALQMTATQMTIGGILLAHLKLVGPITGHAIYPLEVRNAGYFCAVAMNMVCTFIIGQFFLSALCRFRSLLFFFFGIMNIIMGLFVVFFLPETKGVPIEEMAEKRWKTHPRWKKYFKD

SEQ ID NO: 81671 - protein, 433 aa, Arabidopsis thaliana
  peptide (1)..(433): Ceres Seq. ID no. 12660759
  misc_feature (1)..(116): Pfam Name: Sugar (and other) transporter Pfam Description: Sugar (and other) transporter
  misc_feature (1)..(433): Homolog of NCBI NO: 15222376 NR Description: hexose transporter, putative; protein id:
  misc_feature (116)..(327): Homolog of NCBI NO: 25308948 NR Description: protein F22G5.32 [imported] - Arabidopsis >gi|8778557|gb|AAF79565.1|AC022464_23 F22G5.32 [Arabidopsis
  misc_feature (1)..(116): Homolog of NCBI NO: 25308948 NR Description: protein F22G5.32 [imported] - Arabidopsis >gi|8778557|gb|AAF79565.1|AC022464_23 F22G5.32 [Arabidopsis
  misc_feature (339)..(433): Homolog of NCBI NO: 25308948 NR Description: protein F22G5.32 [imported] - Arabidopsis >gi|8778557|gb|AAF79565.1|AC022464_23 F22G5.32 [Arabidopsis
  misc_feature (1)..(342): Homolog of NCBI NO: 15240279 NR Description: hexose transporter - like protein; protein id: [Arabidopsis thaliana] >gi|7446740|pir||T01844 probable sugar
  misc_feature (348)..(430): Homolog of NCBI NO: 15240279 NR Description: hexose transporter - like protein; protein id: [Arabidopsis thaliana] >gi|7446740|pir||T01844 probable sugar
  misc_feature (1)..(342): Homolog of NCBI NO: 15230590 NR Description: putative hexose transporter; protein id: [Arabidopsis thaliana] >gi|6671961|gb|AAF23220.1|AC013454_7 hexose transporter [Arabidopsis thaliana]
  misc_feature (348)..(430): Homolog of NCBI NO: 15230590 NR Description: putative hexose transporter; protein id: [Arabidopsis thaliana] >gi|6671961|gb|AAF23220.1|AC013454_7 hexose transporter [Arabidopsis thaliana]
  misc_feature (1)..(340): Homolog of NCBI NO: 34393308 NR Description: putative hexose transporter [Oryza sativa
  misc_feature (348)..(433): Homolog of NCBI NO: 34393308 NR Description: putative hexose transporter [Oryza sativa
MFGYDIGISGGVTSMDTFLLDFFPHVYEKKHRVHENNYCKFDDQLLQLFTSSLYLAGIFASFISSYVSRAFGRKPTIMLASIFFLVGAILNLSAQELGMLIGGRILLGFGIGFGNQTVPLFISEIAPARYRGGLNVMFQFLITIGILAASYVNYLTSTLKNGWRYSLGGAAVPALILLIGSFFIHETPASLIERGKDEKGKQVLRKIRGIEDIELEFNEIKYATEVATKVKSPFKELFTKSENRPPLVCGTLLQFFQQFTGINVVMFYAPVLFQTMGSGDNASLISTVVTNGVNAIATVISLLVVDFAGRRCLLMEGALQMTATQMTIGGILLAHLKLVGPITGHAIYPLEVRNAGYFCAVAMNMVCTFIIGQFFLSALCRFRSLLFFFFGIMNIIMGLFVVFFLPETKGVPIEEMAEKRWKTHPRWKKYFKD

SEQ ID NO: 81672 - DNA, 1462 bp, Arabidopsis thaliana
  misc_feature (1)..(1462): Ceres Seq. ID no. 12660760
  misc_feature: MA Experiment ID: 20000171 Result: Up-regulated in Transcription
  misc_feature: MA Experiment 20000171 PARAMETER Experiment Name: At_42deg_Heat_P Parameter: Age (day) Value: 14
  misc_feature: MA Experiment 20000171 PARAMETER Experiment Name: At_42deg_Heat_P Parameter: Organism Value: A. thaliana
  misc_feature: MA Experiment 20000171 PARAMETER Experiment Name: At_42deg_Heat_P Parameter: Plant Line Value: WS
  misc_feature: MA Experiment 20000171 PARAMETER Experiment Name: At_42deg_Heat_P Parameter: Temperature (deg C) Value: 42 vs. 22
  misc_feature: MA Experiment 20000171 PARAMETER Experiment Name: At_42deg_Heat_P Parameter: Timepoint (hr) Value: 1
  misc_feature: MA Experiment 20000171 PARAMETER Experiment Name: At_42deg_Heat_P Parameter: Tissue Value: Aerial
  misc_feature: MA Experiment ID: 20000173 Result: Up-regulated in Transcription
  misc_feature: MA Experiment 20000173 PARAMETER Experiment Name: At_42deg_Heat_P Parameter: Age (day) Value: 14
  misc_feature: MA Experiment 20000173 PARAMETER Experiment Name: At_42deg_Heat_P Parameter: Organism Value: A. thaliana
  misc_feature: MA Experiment 20000173 PARAMETER Experiment Name: At_42deg_Heat_P Parameter: Plant Line Value: WS
  misc_feature: MA Experiment 20000173 PARAMETER Experiment Name: At_42deg_Heat_P Parameter: Temperature (deg C) Value: 42 vs. 22
  misc_feature: MA Experiment 20000173 PARAMETER Experiment Name: At_42deg_Heat_P Parameter: Timepoint (hr) Value: 6
  misc_feature: MA Experiment 20000173 PARAMETER Experiment Name: At_42deg_Heat_P Parameter: Tissue Value: Aerial
  misc_feature: MA Experiment ID: 20000179 Result: Up-regulated in Transcription
  misc_feature: MA Experiment 20000179 PARAMETER Experiment Name: At_Germinating_Seeds_P Parameter: Age (hr) Value: 6 vs. 0
  misc_feature: MA Experiment 20000179 PARAMETER Experiment Name: At_Germinating_Seeds_P Parameter: Tissue Value: Germinating Seeds
  misc_feature: MA Experiment ID: 20000180 Result: Up-regulated in Transcription
  misc_feature: MA Experiment 20000180 PARAMETER Experiment Name: At_Germinating_Seeds_P Parameter: Age (hr) Value: 24 vs. 0
  misc_feature: MA Experiment 20000180 PARAMETER Experiment Name: At_Germinating_Seeds_P Parameter: Tissue Value: Germinating Seeds
  misc_feature: MA Experiment ID: 20000185 Result: Up-regulated in Transcription
  misc_feature: MA Experiment 20000185 PARAMETER Experiment Name: At_Roots__P Parameter: Age (day) Value: 7 vs. 21
  misc_feature: MA Experiment 20000185 PARAMETER Experiment Name: At_Roots__P Parameter: Organism Value: A. thaliana
  misc_feature: MA Experiment 20000185 PARAMETER Experiment Name: At_Roots__P Parameter: Tissue Value: Roots vs. Whole Plant
  misc_feature: MA Experiment ID: 20000443 Result: Up-regulated in Transcription
  misc_feature: MA Experiment 20000443 PARAMETER Experiment Name: At_1uM_BR-BRZ__P Parameter: Tissue Value: Shoot Apices
  misc_feature: MA Experiment 20000443 PARAMETER Experiment Name: At_1uM_BR-BRZ__P Parameter: Treatment Value: 1uM BRZ vs. No Treatment
  misc_feature: MA Experiment ID: 20000495 Result: Up-regulated in Transcription
  misc_feature: MA Experiment 20000495 PARAMETER Experiment Name: At_Guard_Cells_P Parameter: Harvest Date Value: 8/2/2002
  misc_feature: MA Experiment 20000495 PARAMETER Experiment Name: At_Guard_Cells_P Parameter: Organism Value: A. thaliana
  misc_feature: MA Experiment 20000495 PARAMETER Experiment Name: At_Guard_Cells_P Parameter: Tissue Value: Guard Cells vs. Leaves
  misc_feature: MA Experiment ID: 20001248 Result: Down-regulated in Transcription
  misc_feature: MA Experiment 20001248 PARAMETER Experiment Name: At_Far-red-induction_P Parameter: Age (day) Value: 7
  misc_feature: MA Experiment 20001248 PARAMETER Experiment Name: At_Far-red-induction_P Parameter: Light Value: Far-red vs. White
  misc_feature: MA Experiment 20001248 PARAMETER Experiment Name: At_Far-red-induction_P Parameter: Organism Value: A. thaliana
  misc_feature: MA Experiment 20001248 PARAMETER Experiment Name: At_Far-red-induction_P Parameter: Plant Line Value: Columbia
  misc_feature: MA Experiment 20001248 PARAMETER Experiment Name: At_Far-red-induction_P Parameter: Timepoint (hr) Value: 4
  misc_feature: MA Experiment 20001248 PARAMETER Experiment Name: At_Far-red-induction_P Parameter: Tissue Value: Whole Plant
  misc_feature: MA Experiment ID: 20001450 Result: Down-regulated in Transcription
  misc_feature: MA Experiment 20001450 PARAMETER Experiment Name: At_Far-red-induction_P Parameter: Age (day) Value: 7
  misc_feature: MA Experiment 20001450 PARAMETER Experiment Name: At_Far-red-induction_P Parameter: Light Value: Far-red vs. White
  misc_feature: MA Experiment 20001450 PARAMETER Experiment Name: At_Far-red-induction_P Parameter: Organism Value: A. thaliana
  misc_feature: MA Experiment 20001450 PARAMETER Experiment Name: At_Far-red-induction_P Parameter: Plant Line Value: Columbia
  misc_feature: MA Experiment 20001450 PARAMETER Experiment Name: At_Far-red-induction_P Parameter: Timepoint (hr) Value: 8
  misc_feature: MA Experiment 20001450 PARAMETER Experiment Name: At_Far-red-induction_P Parameter: Tissue Value: Whole Plant
  misc_feature: MA Experiment ID: 20001555 Result: Up-regulated in Transcription
  misc_feature: MA Experiment 20001555 PARAMETER Experiment Name: At_Drought_Soil_Dry_P Parameter: Age (day) Value: 24
  misc_feature: MA Experiment 20001555 PARAMETER Experiment Name: At_Drought_Soil_Dry_P Parameter: Organism Value: A. thaliana
  misc_feature: MA Experiment 20001555 PARAMETER Experiment Name: At_Drought_Soil_Dry_P Parameter: Plant Line Value: WS
  misc_feature: MA Experiment 20001555 PARAMETER Experiment Name: At_Drought_Soil_Dry_P Parameter: Post Timepoint (hr) Value: None
  misc_feature: MA Experiment 20001555 PARAMETER Experiment Name: At_Drought_Soil_Dry_P Parameter: Post-Treatment Value: None
  misc_feature: MA Experiment 20001555 PARAMETER Experiment Name: At_Drought_Soil_Dry_P Parameter: Timepoint (day) Value: 10
  misc_feature: MA Experiment 20001555 PARAMETER Experiment Name: At_Drought_Soil_Dry_P Parameter: Treatment Value: Drought vs. No Drought
  misc_feature: MA Experiment ID: 20001559 Result: Up-regulated in Transcription
  misc_feature: MA Experiment 20001559 PARAMETER Experiment Name: At_Drought_Soil_Dry_P Parameter: Age (day) Value: 28
  misc_feature: MA Experiment 20001559 PARAMETER Experiment Name: At_Drought_Soil_Dry_P Parameter: Organism Value: A. thaliana
  misc_feature: MA Experiment 20001559 PARAMETER Experiment Name: At_Drought_Soil_Dry_P Parameter: Plant Line Value: WS
  misc_feature: MA Experiment 20001559 PARAMETER Experiment Name: At_Drought_Soil_Dry_P Parameter: Post Timepoint (hr) Value: 29
  misc_feature: MA Experiment 20001559 PARAMETER Experiment Name: At_Drought_Soil_Dry_P Parameter: Post-Treatment Value: Re-Water vs. No Drought
  misc_feature: MA Experiment 20001559 PARAMETER Experiment Name: At_Drought_Soil_Dry_P Parameter: Timepoint (day) Value: 14
  misc_feature: MA Experiment 20001559 PARAMETER Experiment Name: At_Drought_Soil_Dry_P Parameter: Treatment Value: Drought vs. No Drought
  misc_feature: MA Experiment ID: 20001905 Result: Up-regulated in Transcription
  misc_feature: MA Experiment 20001905 PARAMETER Experiment Name: At_Drought_Reproduction_P Parameter: Age (day) Value: 40
  misc_feature: MA Experiment 20001905 PARAMETER Experiment Name: At_Drought_Reproduction_P Parameter: Organism Value: A. thaliana
  misc_feature: MA Experiment 20001905 PARAMETER Experiment Name: At_Drought_Reproduction_P Parameter: Plant Line Value: WS
  misc_feature: MA Experiment 20001905 PARAMETER Experiment Name: At_Drought_Reproduction_P Parameter: Timepoint (day) Value: 10
  misc_feature: MA Experiment 20001905 PARAMETER Experiment Name: At_Drought_Reproduction_P Parameter: Tissue Value: Rosettes
  misc_feature: MA Experiment 20001905 PARAMETER Experiment Name: At_Drought_Reproduction_P Parameter: Treatment Value: Drought vs. No Drought
  misc_feature: MA Experiment ID: 20001906 Result: Up-regulated in Transcription
  misc_feature: MA Experiment 20001906 PARAMETER Experiment Name: At_Drought_Reproduction_P Parameter: Age (day) Value: 35
  misc_feature: MA Experiment 20001906 PARAMETER Experiment Name: At_Drought_Reproduction_P Parameter: Organism Value: A. thaliana
  misc_feature: MA Experiment 20001906 PARAMETER Experiment Name: At_Drought_Reproduction_P Parameter: Plant Line Value: WS
  misc_feature: MA Experiment 20001906 PARAMETER Experiment Name: At_Drought_Reproduction_P Parameter: Timepoint (day) Value: 5
  misc_feature: MA Experiment 20001906 PARAMETER Experiment Name: At_Drought_Reproduction_P Parameter: Tissue Value: Siliques
  misc_feature: MA Experiment 20001906 PARAMETER Experiment Name: At_Drought_Reproduction_P Parameter: Treatment Value: Drought vs. No Drought
  misc_feature: MA Experiment ID: 20001908 Result: Up-regulated in Transcription
  misc_feature: MA Experiment 20001908 PARAMETER Experiment Name: At_Drought_Reproduction_P Parameter: Age (day) Value: 40
  misc_feature: MA Experiment 20001908 PARAMETER Experiment Name: At_Drought_Reproduction_P Parameter: Organism Value: A. thaliana
  misc_feature: MA Experiment 20001908 PARAMETER Experiment Name: At_Drought_Reproduction_P Parameter: Plant Line Value: WS
  misc_feature: MA Experiment 20001908 PARAMETER Experiment Name: At_Drought_Reproduction_P Parameter: Timepoint (day) Value: 10
  misc_feature: MA Experiment 20001908 PARAMETER Experiment Name: At_Drought_Reproduction_P Parameter: Tissue Value: Siliques
  misc_feature: MA Experiment 20001908 PARAMETER Experiment Name: At_Drought_Reproduction_P Parameter: Treatment Value: Drought vs. No Drought
  misc_feature: MA Experiment ID: 20001911 Result: Up-regulated in Transcription
  misc_feature: MA Experiment 20001911 PARAMETER Experiment Name: At_Drought_Reproduction_P Parameter: Age (day) Value: 40
  misc_feature: MA Experiment 20001911 PARAMETER Experiment Name: At_Drought_Reproduction_P Parameter: Organism Value: A. thaliana
  misc_feature: MA Experiment 20001911 PARAMETER Experiment Name: At_Drought_Reproduction_P Parameter: Plant Line Value: WS
  misc_feature: MA Experiment 20001911 PARAMETER Experiment Name: At_Drought_Reproduction_P Parameter: Timepoint (day) Value: 10
  misc_feature: MA Experiment 20001911 PARAMETER Experiment Name: At_Drought_Reproduction_P Parameter: Tissue Value: Flowers
  misc_feature: MA Experiment 20001911 PARAMETER Experiment Name: At_Drought_Reproduction_P Parameter: Treatment Value: Drought vs. No Drought
gaaattcattttactccggtgggtcgtcaggtgcagagagttctggaatatccattgcgcttggagaatcgttcgccgatgtcttactcaagaaggtcaagatactctccttcactatctccttatgacaagcgtcgtggaaggtctgtgtcaaggtcattgtctagaagcccgacgaggagtgtctcaagcgatgctgagaatcctggtaacagtttatatgtaactggattgtctcaccgggttactgaaagagatctggaggatcatttcgctaaagaaggaaaggtaactgatgttcaccttgtcctggacccatggactagagaatctcgcggatttggttttatctctatgaaaagtgttggtgatgctaaccgttgcatcagatctctagatcactctgttctgcagggccgcgtcatcactgttgagaagtttctgtggcagcaggtctgctgtttgtagcagcagtgcttcaccaaatagcaaacgttgcaacagttcaaacacatcaagtttcagacatttagggcaagacgtcgtagaggacgtactccaactccaggaaagtacttggggctgagaactgctcgaggacgacataagtctcctagctactctccccgcaggtctgttagctgctctcgtagtcgtagtcgaagctactcatctgatcggggcagatcttattctccaagctatgggagaagaggaaggtcatcctcgtactcacccttctatcgacgacgcagattctactctccttcgagatctccttcacctgatgatcgttacaacaggagacgcgacagatcatactcaccttactacaggcggagggaccggtccagatcctactcacgtaactgtagagcacgggacagatcaccttactacatgcggaggtacaggtccagatccaggtcatactcgcctcgctacagagcacgtgaccgatcatgctcaccctactacaggggaagagaccggtcttattcaccccactaccaagggagagacagatcctactcacctgaaagtcgttactacagaaggcacaggtcggtatcgggaagcgtaagccctggagggagaagcatgtcacgtagcatatccccaaggaagggaaggaaagagagcagaagcaagtctcggaggcacgacaggcaatcttcaatgtgtcattcgaggagcgcaagatcaagcacctccagatccgtcagcccataacagtctctacttacttgaagttgacatcaatcactcacgtctgttgttgtattaagcattttgggacttgtctattccttgtatttggaattgatgacagtacgtatgttatgttggtttggtgttaggatactttattacttctgtggaaatgttgctttggcgacgagtcgtgagagaaatggaatctcttctttgttacaaaaaatctattttcatgtctttctac

SEQ ID NO: 81673 - protein, 155 aa, Arabidopsis thaliana
  peptide (1)..(155): Ceres Seq. ID no. 12660761
  misc_feature (73)..(144): Pfam Name: RNA recognition motif. (a.k.a. RRM, RBD, or RNP domain) Pfam Description: RNA recognition motif. (a.k.a. RRM, RBD, or RNP
  misc_feature (1)..(26): Homolog of NCBI NO: 8778550 NR Description: F22G5.31 [Arabidopsis thaliana]
  misc_feature (1)..(155): Homolog of NCBI NO: 28973767 NR Description: putative transformer-SR ribonucleoprotein
  misc_feature (60)..(155): Homolog of NCBI NO: 8778550 NR Description: F22G5.31 [Arabidopsis thaliana]
  misc_feature (27)..(155): Homolog of NCBI NO: 18390758 NR Description: transformer serine/arginine-rich putative; protein id: At1g07350.1, supported by cDNA: gi_15292732
  misc_feature (53)..(146): Homolog of NCBI NO: 34902002 NR Description: putative transformer serine/arginine-rich
  misc_feature (27)..(155): Homolog of NCBI NO: 30680096 NR Description: transformer serine/arginine-rich putative [Arabidopsis thaliana] >gi|15450753|gb|AAK96648.1|
  misc_feature (18)..(146): Homolog of NCBI NO: 7489207 NR Description: transformer-SR ribonucleoprotein - common tobacco
  misc_feature (5)..(155): Homolog of NCBI NO: 40253470 NR Description: putative transformer-SR ribonucleoprotein [Oryza
  misc_feature (25)..(155): Homolog of NCBI NO: 11275253 NR Description: transformer-2-like protein - liverwort
  misc_feature (72)..(145): Homolog of NCBI NO: 14141216 NR Description: SRp46 splicing factor [Homo sapiens]
EIHFTPVGRQVQRVLEYPLRLENRSPMSYSRRSRYSPSLSPYDKRRGRSVSRSLSRSPTRSVSSDAENPGNSLYVTGLSHRVTERDLEDHFAKEGKVTDVHLVLDPWTRESRGFGFISMKSVGDANRCIRSLDHSVLQGRVITVEKFLWQQVCCL

SEQ ID NO: 81674 - protein, 129 aa, Arabidopsis thaliana
  peptide (1)..(129): Ceres Seq. ID no. 12660762
  misc_feature (47)..(118): Pfam Name: RNA recognition motif. (a.k.a. RRM, RBD, or RNP domain) Pfam Description: RNA recognition motif. (a.k.a. RRM, RBD, or RNP
  misc_feature (1)..(129): Homolog of NCBI NO: 28973767 NR Description: putative transformer-SR ribonucleoprotein
  misc_feature (34)..(129): Homolog of NCBI NO: 8778550 NR Description: F22G5.31 [Arabidopsis thaliana]
  misc_feature (1)..(129): Homolog of NCBI NO: 18390758 NR Description: transformer serine/arginine-rich putative; protein id: At1g07350.1, supported by cDNA: gi_15292732
  misc_feature (27)..(120): Homolog of NCBI NO: 34902002 NR Description: putative transformer serine/arginine-rich
  misc_feature (1)..(129): Homolog of NCBI NO: 30680096 NR Description: transformer serine/arginine-rich putative [Arabidopsis thaliana] >gi|15450753|gb|AAK96648.1|
  misc_feature (1)..(120): Homolog of NCBI NO: 7489207 NR Description: transformer-SR ribonucleoprotein - common tobacco
  misc_feature (1)..(129): Homolog of NCBI NO: 40253470 NR Description: putative transformer-SR ribonucleoprotein [Oryza
  misc_feature (1)..(129): Homolog of NCBI NO: 11275253 NR Description: transformer-2-like protein - liverwort
  misc_feature (46)..(119): Homolog of NCBI NO: 14141216 NR Description: SRp46 splicing factor [Homo sapiens]
  misc_feature (46)..(119): Homolog of NCBI NO: 9837439 NR Description: splicing factor arginine/serine rich 2 [Oryzias
MSYSRRSRYSPSLSPYDKRRGRSVSRSLSRSPTRSVSSDAENPGNSLYVTGLSHRVTERDLEDHFAKEGKVTDVHLVLDPWTRESRGFGFISMKSVGDANRCIRSLDHSVLQGRVITVEKFLWQQVCCL

SEQ ID NO: 81675 - protein, 126 aa, Arabidopsis thaliana
  peptide (1)..(126): Ceres Seq. ID no. 12660763
MGEEEGHPRTHPSIDDADSTLLRDLLHLMIVTTGDATDHTHLTTGGGTGPDPTHVTVEHGTDHLTTCGGTGPDPGHTRLATEHVTDHAHPTTGEETGLIHPTTKGETDPTHLKVVTTEGTGRYREA

SEQ ID NO: 81676 - DNA, 1159 bp, Arabidopsis thaliana
  misc_feature (1)..(1159): Ceres Seq. ID no. 12660767
  misc_feature: MA Experiment ID: 108434 Result: Down-regulated in Transcription
  misc_feature: MA Experiment 108434 PARAMETER Experiment Name: At_Root_Tips_cDNA_P Parameter: Tissue Value: Root Tips
  misc_feature: MA Experiment ID: 108461 Result: Up-regulated in Transcription
  misc_feature: MA Experiment 108461 PARAMETER Experiment Name: At_Germinating_Seeds_cDNA_P Parameter: Age (day) Value: 1 vs. 0
  misc_feature: MA Experiment 108461 PARAMETER Experiment Name: At_Germinating_Seeds_cDNA_P Parameter: Tissue Value: Germinating Seeds
  misc_feature: MA Experiment ID: 108462 Result: Up-regulated in Transcription
  misc_feature: MA Experiment 108462 PARAMETER Experiment Name: At_Germinating_Seeds_cDNA_P Parameter: Age (day) Value: 2 vs. 0
  misc_feature: MA Experiment 108462 PARAMETER Experiment Name: At_Germinating_Seeds_cDNA_P Parameter: Tissue Value: Germinating Seeds
  misc_feature: MA Experiment ID: 108463 Result: Up-regulated in Transcription
  misc_feature: MA Experiment 108463 PARAMETER Experiment Name: At_Germinating_Seeds_cDNA_P Parameter: Age (day) Value: 3 vs. 0
  misc_feature: MA Experiment 108463 PARAMETER Experiment Name: At_Germinating_Seeds_cDNA_P Parameter: Tissue Value: Germinating Seeds
  misc_feature: MA Experiment ID: 108464 Result: Up-regulated in Transcription
  misc_feature: MA Experiment 108464 PARAMETER Experiment Name: At_Germinating_Seeds_cDNA_P Parameter: Age (day) Value: 4 vs. 0
  misc_feature: MA Experiment 108464 PARAMETER Experiment Name: At_Germinating_Seeds_cDNA_P Parameter: Tissue Value: Germinating Seeds
  misc_feature: MA Experiment ID: 108501 Result: Up-regulated in Transcription
  misc_feature: MA Experiment 108501 PARAMETER Experiment Name: At_ap2_floral_buds_cDNA_P Parameter: Plant Line Value: ap2 (Ler.)
  misc_feature: MA Experiment 108501 PARAMETER Experiment Name: At_ap2_floral_buds_cDNA_P Parameter: Tissue Value: Closed Flower
  misc_feature: MA Experiment ID: 108579 Result: Down-regulated in Transcription
  misc_feature: MA Experiment 108579 PARAMETER Experiment Name: At_4deg_Cold_cDNA_P Parameter: Temperature (deg C) Value: 4 vs. 22
  misc_feature: MA Experiment 108579 PARAMETER Experiment Name: At_4deg_Cold_cDNA_P Parameter: Timepoint (hr) Value: 6
  misc_feature: MA Experiment 108579 PARAMETER Experiment Name: At_4deg_Cold_cDNA_P Parameter: Tissue Value: Aerial
  misc_feature: MA Experiment ID: 108667 Result: Down-regulated in Transcription
  misc_feature: MA Experiment 108667 PARAMETER Experiment Name: At_2mM_SA_cDNA_P Parameter: Plant Line Value: WS
  misc_feature: MA Experiment 108667 PARAMETER Experiment Name: At_2mM_SA_cDNA_P Parameter: Timepoint (hr) Value: 1
  misc_feature: MA Experiment 108667 PARAMETER Experiment Name: At_2mM_SA_cDNA_P Parameter: Treatment Value: 2mM SA vs. No Treatment
  misc_feature: MA Experiment ID: 20000111 Result: Down-regulated in Transcription
  misc_feature: MA Experiment 20000111 PARAMETER Experiment Name: At_42deg_Heat_cDNA_P Parameter: Temperature (deg C) Value: 42 vs. 22
  misc_feature: MA Experiment 20000111 PARAMETER Experiment Name: At_42deg_Heat_cDNA_P Parameter: Timepoint (hr) Value: 6
  misc_feature: MA Experiment 20000111 PARAMETER Experiment Name: At_42deg_Heat_cDNA_P Parameter: Tissue Value: Aerial
  misc_feature: MA Experiment ID: 20000113 Result: Down-regulated in Transcription
  misc_feature: MA Experiment 20000113 PARAMETER Experiment Name: At_42deg_Heat_cDNA_P Parameter: Temperature (deg C) Value: 42 vs. 22
  misc_feature: MA Experiment 20000113 PARAMETER Experiment Name: At_42deg_Heat_cDNA_P Parameter: Timepoint (hr) Value: 8
  misc_feature: MA Experiment 20000113 PARAMETER Experiment Name: At_42deg_Heat_cDNA_P Parameter: Tissue Value: Aerial
  misc_feature: MA Experiment ID: 20000144 Result: Down-regulated in Transcription
  misc_feature: MA Experiment 20000144 PARAMETER Experiment Name: At_42deg_Heat_cDNA_P Parameter: Temperature (deg C) Value: 42 vs. 22
  misc_feature: MA Experiment 20000144 PARAMETER Experiment Name: At_42deg_Heat_cDNA_P Parameter: Timepoint (hr) Value: 1
  misc_feature: MA Experiment 20000144 PARAMETER Experiment Name: At_42deg_Heat_cDNA_P Parameter: Tissue Value: Aerial
  misc_feature: MA Experiment ID: 20000180 Result: Up-regulated in Transcription
  misc_feature: MA Experiment 20000180 PARAMETER Experiment Name: At_Germinating_Seeds_P Parameter: Age (hr) Value: 24 vs. 0
  misc_feature: MA Experiment 20000180 PARAMETER Experiment Name: At_Germinating_Seeds_P Parameter: Tissue Value: Germinating Seeds
  misc_feature: MA Experiment ID: 20000184 Result: Down-regulated in Transcription
  misc_feature: MA Experiment 20000184 PARAMETER Experiment Name: At_Shoots__P Parameter: Age (day) Value: 7
  misc_feature: MA Experiment 20000184 PARAMETER Experiment Name: At_Shoots__P Parameter: Tissue Value: Shoots vs. Whole Plant
  misc_feature: MA Experiment ID: 20000185 Result: Down-regulated in Transcription
  misc_feature: MA Experiment 20000185 PARAMETER Experiment Name: At_Roots__P Parameter: Age (day) Value: 7 vs. 21
  misc_feature: MA Experiment 20000185 PARAMETER Experiment Name: At_Roots__P Parameter: Organism Value: A. thaliana
  misc_feature: MA Experiment 20000185 PARAMETER Experiment Name: At_Roots__P Parameter: Tissue Value: Roots vs. Whole Plant
  misc_feature: MA Experiment ID: 20000224 Result: Up-regulated in Transcription
  misc_feature: MA Experiment ID: 20000439 Result: Down-regulated in Transcription
  misc_feature: MA Experiment 20000439 PARAMETER Experiment Name: At_Roots__P Parameter: Age (day) Value: 14 vs. 21
  misc_feature: MA Experiment 20000439 PARAMETER Experiment Name: At_Roots__P Parameter: Organism Value: A. thaliana
  misc_feature: MA Experiment 20000439 PARAMETER Experiment Name: At_Roots__P Parameter: Tissue Value: Roots vs. Whole Plant
  misc_feature: MA Experiment ID: 20001247 Result: Up-regulated in Transcription
  misc_feature: MA Experiment 20001247 PARAMETER Experiment Name: At_Far-red-induction_P Parameter: Age (day) Value: 7
  misc_feature: MA Experiment 20001247 PARAMETER Experiment Name: At_Far-red-induction_P Parameter: Light Value: Far-red vs. White
  misc_feature: MA Experiment 20001247 PARAMETER Experiment Name: At_Far-red-induction_P Parameter: Organism Value: A. thaliana
  misc_feature: MA Experiment 20001247 PARAMETER Experiment Name: At_Far-red-induction_P Parameter: Plant Line Value: Columbia
  misc_feature: MA Experiment 20001247 PARAMETER Experiment Name: At_Far-red-induction_P Parameter: Timepoint (hr) Value: 1
  misc_feature: MA Experiment 20001247 PARAMETER Experiment Name: At_Far-red-induction_P Parameter: Tissue Value: Whole Plant
  misc_feature: MA Experiment ID: 20001450 Result: Up-regulated in Transcription
  misc_feature: MA Experiment 20001450 PARAMETER Experiment Name: At_Far-red-induction_P Parameter: Age (day) Value: 7
  misc_feature: MA Experiment 20001450 PARAMETER Experiment Name: At_Far-red-induction_P Parameter: Light Value: Far-red vs. White
  misc_feature: MA Experiment 20001450 PARAMETER Experiment Name: At_Far-red-induction_P Parameter: Organism Value: A. thaliana
  misc_feature: MA Experiment 20001450 PARAMETER Experiment Name: At_Far-red-induction_P Parameter: Plant Line Value: Columbia
  misc_feature: MA Experiment 20001450 PARAMETER Experiment Name: At_Far-red-induction_P Parameter: Timepoint (hr) Value: 8
  misc_feature: MA Experiment 20001450 PARAMETER Experiment Name: At_Far-red-induction_P Parameter: Tissue Value: Whole Plant
  misc_feature: MA Experiment ID: 20001451 Result: Up-regulated in Transcription
  misc_feature: MA Experiment 20001451 PARAMETER Experiment Name: At_Far-red-induction_P Parameter: Age (day) Value: 7
  misc_feature: MA Experiment 20001451 PARAMETER Experiment Name: At_Far-red-induction_P Parameter: Light Value: Far-red vs. White
  misc_feature: MA Experiment 20001451 PARAMETER Experiment Name: At_Far-red-induction_P Parameter: Organism Value: A. thaliana
  misc_feature: MA Experiment 20001451 PARAMETER Experiment Name: At_Far-red-induction_P Parameter: Plant Line Value: Columbia
  misc_feature: MA Experiment 20001451 PARAMETER Experiment Name: At_Far-red-induction_P Parameter: Timepoint (hr) Value: 24
  misc_feature: MA Experiment 20001451 PARAMETER Experiment Name: At_Far-red-induction_P Parameter: Tissue Value: Whole Plant
  misc_feature: MA Experiment ID: 20001906 Result: Down-regulated in Transcription
  misc_feature: MA Experiment 20001906 PARAMETER Experiment Name: At_Drought_Reproduction_P Parameter: Age (day) Value: 35
  misc_feature: MA Experiment 20001906 PARAMETER Experiment Name: At_Drought_Reproduction_P Parameter: Organism Value: A. thaliana
  misc_feature: MA Experiment 20001906 PARAMETER Experiment Name: At_Drought_Reproduction_P Parameter: Plant Line Value: WS
  misc_feature: MA Experiment 20001906 PARAMETER Experiment Name: At_Drought_Reproduction_P Parameter: Timepoint (day) Value: 5
  misc_feature: MA Experiment 20001906 PARAMETER Experiment Name: At_Drought_Reproduction_P Parameter: Tissue Value: Siliques
  misc_feature: MA Experiment 20001906 PARAMETER Experiment Name: At_Drought_Reproduction_P Parameter: Treatment Value: Drought vs. No Drought
aaaattctctctttctctcttcttcgaaattcttcctcctctttttctgcagaaactatccaaaaatctcttcgttttcacaatttctcattattaaaaaaaaaactttaaattcttcttcttcaagaaaaaatggcggtggatcttttatcggaaaattctaatatgagtccaagaatctcattttcacgtgacttttgtcaatcagacgcaataccaatcgagaaacgtcccttaagatcatcaaactcgaaaccatcaagcctcaattcaagcatagatttcgatttctgcattcccggcggcgtaaattccggcgaaagcttcgatcaaggttcttggtccgccgatgaactcttctctaacggcaaaatcttaccaacggaaatcaagaaaaaaccagaaccgggtaaaaaagaaccagaaccaaaaccggttaaatctaaaccggattcaagaaaacagaggaaacaaccaaacgaagaacaacaagaagacgacgtgataatcacgacggaggagaaaaccaatacgaagtcgttttgggggtttaagagaagcagtagtttaaactgtggaagtacttatggacggagtttatgtccgttaccattactaaaccggagtaattcaaccggttcaacgtcgagtaaacagaaacagagcagctcaaggaaacataacgagcatgttaagttacaacaatcttcatcgttgtcttcttcttcttctgcttcgtcttctttgagtaataatggtttttcgaaaccaccattgaagaaaagctatggaggttatagttatggtagccatggtggtggtgggattagagtgagtccggttataaacgttgttccttctgggaatttgtttggttttggttcaatgttttctggtaatggaagagacaagaacaagaaaagataaaaaaaatgtaagaatagatatgtttctggttttactgttttattcttctgatttgttcttcttcttgttctctgaactctgaagattttctgacagtgtgttttgtggatcccatgccagtattattttttagactattgtggtgtaattgtgttttgtttgatttgttagtttgtgttctattcatgtttaaatctagattttttttttaataagaggctgctaatttcag

SEQ ID NO: 81677 - protein, 264 aa, Arabidopsis thaliana; identical to SEQ ID NO: 28939
  peptide (1)..(264): Ceres Seq. ID no. 12660768
  misc_feature (1)..(264): Homolog of NCBI NO: 18408679 NR Description: expressed protein; protein id: At1g67050.1, by cDNA: 12461., supported by cDNA: gi_20260171 [Arabidopsis
  misc_feature (6)..(92): Homolog of NCBI NO: 15240881 NR Description: putative protein; protein id: At5g38320.1 thaliana] >gi|9758865|dbj|BAB09447.1| gene_id:MSI17.5~unknown
  misc_feature (192)..(264): Homolog of NCBI NO: 15240881 NR Description: putative protein; protein id: At5g38320.1 thaliana] >gi|9758865|dbj|BAB09447.1| gene_id:MSI17.5~unknown
  misc_feature (15)..(193): Homolog of NCBI NO: 15221963 NR Description: hypothetical protein; protein id: At1g48780.1 thaliana] >gi|12597824|gb|AAG60135.1|AC073555_19 hypothetical
  misc_feature (97)..(263): Homolog of NCBI NO: 15229617 NR Description: hypothetical protein; protein id: At3g18300.1 thaliana] >gi|11994093|dbj|BAB01096.1|

SEQ ID NO: 81678 - protein, 253 aa, Arabidopsis thaliana; identical to SEQ ID NO: 28940
  peptide (1)..(253): Ceres Seq. ID no. 12660769
  misc_feature (1)..(253): Homolog of NCBI NO: 18408679 NR Description: expressed protein; protein id: At1g67050.1, by cDNA: 12461., supported by cDNA: gi_20260171 [Arabidopsis
  misc_feature (1)..(81): Homolog of NCBI NO: 15240881 NR Description: putative protein; protein id: At5g38320.1 thaliana] >gi|9758865|dbj|BAB09447.1| gene_id:MSI17.5~unknown
  misc_feature (181)..(253): Homolog of NCBI NO: 15240881 NR Description: putative protein; protein id: At5g38320.1 thaliana] >gi|9758865|dbj|BAB09447.1| gene_id:MSI17.5~unknown
  misc_feature (4)..(182): Homolog of NCBI NO: 15221963 NR Description: hypothetical protein; protein id: At1g48780.1 thaliana] >gi|12597824|gb|AAG60135.1|AC073555_19 hypothetical
  misc_feature (86)..(252): Homolog of NCBI NO: 15229617 NR Description: hypothetical protein; protein id: At3g18300.1 thaliana] >gi|11994093|dbj|BAB01096.1|

SEQ ID NO: 81679 - DNA, 1127 bp, Arabidopsis thaliana
  misc_feature (1)..(1127): Ceres Seq. ID no. 12660774
  misc_feature: MA Experiment ID: 108434 Result: Up-regulated in Transcription
  misc_feature: MA Experiment 108434 PARAMETER Experiment Name: At_Root_Tips_cDNA_P Parameter: Tissue Value: Root Tips
  misc_feature: MA Experiment ID: 108461 Result: Up-regulated in Transcription
  misc_feature: MA Experiment 108461 PARAMETER Experiment Name: At_Germinating_Seeds_cDNA_P Parameter: Age (day) Value: 1 vs. 0
  misc_feature: MA Experiment 108461 PARAMETER Experiment Name: At_Germinating_Seeds_cDNA_P Parameter: Tissue Value: Germinating Seeds
  misc_feature: MA Experiment ID: 20000179 Result: Down-regulated in Transcription
  misc_feature: MA Experiment 20000179 PARAMETER Experiment Name: At_Germinating_Seeds_P Parameter: Age (hr) Value: 6 vs. 0
  misc_feature: MA Experiment 20000179 PARAMETER Experiment Name: At_Germinating_Seeds_P Parameter: Tissue Value: Germinating Seeds
  misc_feature: MA Experiment ID: 20000180 Result: Down-regulated in Transcription
  misc_feature: MA Experiment 20000180 PARAMETER Experiment Name: At_Germinating_Seeds_P Parameter: Age (hr) Value: 24 vs. 0
  misc_feature: MA Experiment 20000180 PARAMETER Experiment Name: At_Germinating_Seeds_P Parameter: Tissue Value: Germinating Seeds
  misc_feature: MA Experiment ID: 20000495 Result: Up-regulated in Transcription
  misc_feature: MA Experiment 20000495 PARAMETER Experiment Name: At_Guard_Cells_P Parameter: Harvest Date Value: 8/2/2002
  misc_feature: MA Experiment 20000495 PARAMETER Experiment Name: At_Guard_Cells_P Parameter: Organism Value: A. thaliana
  misc_feature: MA Experiment 20000495 PARAMETER Experiment Name: At_Guard_Cells_P Parameter: Tissue Value: Guard Cells vs. Leaves
  misc_feature: MA Experiment ID: 20001248 Result: Up-regulated in Transcription
  misc_feature: MA Experiment 20001248 PARAMETER Experiment Name: At_Far-red-induction_P Parameter: Age (day) Value: 7
  misc_feature: MA Experiment 20001248 PARAMETER Experiment Name: At_Far-red-induction_P Parameter: Light Value: Far-red vs. White
  misc_feature: MA Experiment 20001248 PARAMETER Experiment Name: At_Far-red-induction_P Parameter: Organism Value: A. thaliana
  misc_feature: MA Experiment 20001248 PARAMETER Experiment Name: At_Far-red-induction_P Parameter: Plant Line Value: Columbia
  misc_feature: MA Experiment 20001248 PARAMETER Experiment Name: At_Far-red-induction_P Parameter: Timepoint (hr) Value: 4
  misc_feature: MA Experiment 20001248 PARAMETER Experiment Name: At_Far-red-induction_P Parameter: Tissue Value: Whole Plant
  misc_feature: MA Experiment ID: 20001450 Result: Up-regulated in Transcription
  misc_feature: MA Experiment 20001450 PARAMETER Experiment Name: At_Far-red-induction_P Parameter: Age (day) Value: 7
  misc_feature: MA Experiment 20001450 PARAMETER Experiment Name: At_Far-red-induction_P Parameter: Light Value: Far-red vs. White
  misc_feature: MA Experiment 20001450 PARAMETER Experiment Name: At_Far-red-induction_P Parameter: Organism Value: A. thaliana
  misc_feature: MA Experiment 20001450 PARAMETER Experiment Name: At_Far-red-induction_P Parameter: Plant Line Value: Columbia
  misc_feature: MA Experiment 20001450 PARAMETER Experiment Name: At_Far-red-induction_P Parameter: Timepoint (hr) Value: 8
  misc_feature: MA Experiment 20001450 PARAMETER Experiment Name: At_Far-red-induction_P Parameter: Tissue Value: Whole Plant
  misc_feature: MA Experiment ID: 20001451 Result: Up-regulated in Transcription
  misc_feature: MA Experiment 20001451 PARAMETER Experiment Name: At_Far-red-induction_P Parameter: Age (day) Value: 7
  misc_feature: MA Experiment 20001451 PARAMETER Experiment Name: At_Far-red-induction_P Parameter: Light Value: Far-red vs. White
  misc_feature: MA Experiment 20001451 PARAMETER Experiment Name: At_Far-red-induction_P Parameter: Organism Value: A. thaliana
  misc_feature: MA Experiment 20001451 PARAMETER Experiment Name: At_Far-red-induction_P Parameter: Plant Line Value: Columbia
  misc_feature: MA Experiment 20001451 PARAMETER Experiment Name: At_Far-red-induction_P Parameter: Timepoint (hr) Value: 24
  misc_feature: MA Experiment 20001451 PARAMETER Experiment Name: At_Far-red-induction_P Parameter: Tissue Value: Whole Plant
tttctcctaccgtcgaactaaatcctagggcacaggtgaaatcgccgagtgacgtctagccaccgcaccgcctccttctccggttatctcgctactaatcagactattccacagctatgtcacaggtagacaacagaaattcatcagcagccaagcgtgctagaactgacggggggcgtagagaagatgattggatctgcccaagttgtggcaatgtcaacttttcattcaggacaacttgcaatatgcgtaattgcactcagcctagacctgcagatcataatggaaagtctgctcccaaacctatgcaacatcaacaaggtttctcatcacccggggcatacttaggatctgggggtccccctccagtatatatgggcgggtcaccatatggatctcctctctttaatggatcgtctatgcctccttatgacgtcccattttctgggggttcgccttaccattttaactataatagccgaatgcctgccggagctcattacagaccattacatatgtctggaccaccaccataccatggcggatctatgatgggaagtggtggtatgtatggaatgcctccaccaatagacaggtatggccttggtatggcaatgggtcctggttctgccgctgccatgatgccaagaccaaggttttacccagatgaaaaatcacaaaagagagattcaactcgcgataatgattggacatgtccgaattgtggtaatgtaaacttctcattcagaactgtatgtaacatgaggaagtgcaacactccaaagcctggttctcagcagggtggaagctcagataaaatatccaaacaaaatgcaccggaagggagctggaagtgtgataactgtggaaatataaactacccattcaggagcaaatgcaacaggcaaaactgtggagctgataagcctggggatcggtcgaatggatctccgtcccgtgcaccagaagagaacgatcaggtttgtaagatgtatctatgtggtcacaactgtttgttaataaaatgtttgcctctgaaactcgtaaatgtaacaacctgtgtagattttatgccttgtgaaagcagaggttatatgtttatgaaaaaattgactccgactacgttt

SEQ ID NO: 81680 - protein, 337 aa, Arabidopsis thaliana
  peptide (1)..(337): Ceres Seq. ID no. 12660775
  misc_feature (48)..(141): Pfam Name: Extensin-like region Pfam Description: Extensin-like region
  misc_feature (1)..(288): Homolog of NCBI NO: 22330480 NR Description: similar to RRM-containing RNA-binding protein, protein id: At1g67325.1 [Arabidopsis thaliana] unknown protein [Arabidopsis thaliana]
  misc_feature (44)..(288): Homolog of NCBI NO: 25404955 NR Description: protein F1N21.14 [imported] - Arabidopsis >gi|9828626|gb|AAG00249.1|AC002130_14 F1N21.14 [Arabidopsis
  misc_feature (1)..(286): Homolog of NCBI NO: 27817857 NR Description: OJ1081_B12.5 [Oryza sativa (japonica
  misc_feature (1)..(271): Homolog of NCBI NO: 33146999 NR Description: putative p53 binding protein [Oryza sativa
  misc_feature (191)..(271): Homolog of NCBI NO: 18698995 NR Description: p53 binding protein [Oryza sativa]
  misc_feature (177)..(226): Homolog of NCBI NO: 18698995 NR Description: p53 binding protein [Oryza sativa]
  misc_feature (10)..(53): Homolog of NCBI NO: 18698995 NR Description: p53 binding protein [Oryza sativa]
  misc_feature (194)..(273): Homolog of NCBI NO: 15865325 NR Description: putative non-ribosomal nucleolar protein
  misc_feature (191)..(262): Homolog of NCBI NO: 23510073 NR Description: hypothetical protein [Plasmodium falciparum 3D7]
  misc_feature (89)..(284): Homolog of NCBI NO: 33146999 NR Description: putative p53 binding protein [Oryza sativa
MSQVDNRNSSAAKRARTDGGRREDDWICPSCGNVNFSFRTTCNMRNCTQPRPADHNGKSAPKPMQHQQGFSSPGAYLGSGGPPPVYMGGSPYGSPLFNGSSMPPYDVPFSGGSPYHFNYNSRMPAGAHYRPLHMSGPPPYHGGSMMGSGGMYGMPPPIDRYGLGMAMGPGSAAAMMPRPRFYPDEKSQKRDSTRDNDWTCPNCGNVNFSFRTVCNMRKCNTPKPGSQQGGSSDKISKQNAPEGSWKCDNCGNINYPFRSKCNRQNCGADKPGDRSNGSPSRAPEENDQVCKMYLCGHNCLLIKCLPLKLVNVTTCVDFMPCESRGYMFMKKLTPTTF

SEQ ID NO: 81681 - protein, 294 aa, Arabidopsis thaliana; identical to SEQ ID NO: 39148
  peptide (1)..(294): Ceres Seq. ID no. 12660776
  misc_feature (5)..(98): Pfam Name: Extensin-like region Pfam Description: Extensin-like region
  misc_feature (1)..(245): Homolog of NCBI NO: 22330480 NR Description: similar to RRM-containing RNA-binding protein, protein id: At1g67325.1 [Arabidopsis thaliana] unknown protein [Arabidopsis thaliana]
  misc_feature (1)..(245): Homolog of NCBI NO: 25404955 NR Description: protein F1N21.14 [imported] - Arabidopsis >gi|9828626|gb|AAG00249.1|AC002130_14 F1N21.14 [Arabidopsis
  misc_feature (1)..(243): Homolog of NCBI NO: 27817857 NR Description: OJ1081_B12.5 [Oryza sativa (japonica
  misc_feature (1)..(228): Homolog of NCBI NO: 33146999 NR Description: putative p53 binding protein [Oryza sativa
  misc_feature (148)..(228): Homolog of NCBI NO: 18698995 NR Description: p53 binding protein [Oryza sativa]
  misc_feature (134)..(183): Homolog of NCBI NO: 18698995 NR Description: p53 binding protein [Oryza sativa]
  misc_feature (151)..(230): Homolog of NCBI NO: 15865325 NR Description: putative non-ribosomal nucleolar protein
  misc_feature (148)..(219): Homolog of NCBI NO: 23510073 NR Description: hypothetical protein [Plasmodium falciparum 3D7]
  misc_feature (46)..(241): Homolog of NCBI NO: 33146999 NR Description: putative p53 binding protein [Oryza sativa
  misc_feature (144)..(222): Homolog of NCBI NO: 30962835 NR Description: Unknown (protein for MGC:56597) [Danio rerio]

SEQ ID NO: 81682 - protein, 274 aa, Arabidopsis thaliana; identical to SEQ ID NO: 39149
  peptide (1)..(274): Ceres Seq. ID no. 12660777
  misc_feature (1)..(78): Pfam Name: Extensin-like region Pfam Description: Extensin-like region
  misc_feature (1)..(225): Homolog of NCBI NO: 22330480 NR Description: similar to RRM-containing RNA-binding protein, protein id: At1g67325.1 [Arabidopsis thaliana] unknown protein [Arabidopsis thaliana]
  misc_feature (1)..(225): Homolog of NCBI NO: 25404955 NR Description: protein F1N21.14 [imported] - Arabidopsis >gi|9828626|gb|AAG00249.1|AC002130_14 F1N21.14 [Arabidopsis
  misc_feature (1)..(223): Homolog of NCBI NO: 27817857 NR Description: OJ1081_B12.5 [Oryza sativa (japonica
  misc_feature (1)..(208): Homolog of NCBI NO: 33146999 NR Description: putative p53 binding protein [Oryza sativa
  misc_feature (128)..(208): Homolog of NCBI NO: 18698995 NR Description: p53 binding protein [Oryza sativa]
  misc_feature (114)..(163): Homolog of NCBI NO: 18698995 NR Description: p53 binding protein [Oryza sativa]
  misc_feature (131)..(210): Homolog of NCBI NO: 15865325 NR Description: putative non-ribosomal nucleolar protein
  misc_feature (128)..(199): Homolog of NCBI NO: 23510073 NR Description: hypothetical protein [Plasmodium falciparum 3D7]
  misc_feature (26)..(221): Homolog of NCBI NO: 33146999 NR Description: putative p53 binding protein [Oryza sativa
  misc_feature (124)..(202): Homolog of NCBI NO: 30962835 NR Description: Unknown (protein for MGC:56597) [Danio rerio]

SEQ ID NO: 81683 - DNA, 3330 bp, Arabidopsis thaliana
  misc_feature (1)..(3330): Ceres Seq. ID no. 12660788
  misc_feature: MA Experiment ID: 20000184 Result: Down-regulated in Transcription
  misc_feature: MA Experiment 20000184 PARAMETER Experiment Name: At_Shoots__P Parameter: Age (day) Value: 7
  misc_feature: MA Experiment 20000184 PARAMETER Experiment Name: At_Shoots__P Parameter: Tissue Value: Shoots vs. Whole Plant
  misc_feature: MA Experiment ID: 20000495 Result: Up-regulated in Transcription
  misc_feature: MA Experiment 20000495 PARAMETER Experiment Name: At_Guard_Cells_P Parameter: Harvest Date Value: 8/2/2002
  misc_feature: MA Experiment 20000495 PARAMETER Experiment Name: At_Guard_Cells_P Parameter: Organism Value: A. thaliana
  misc_feature: MA Experiment 20000495 PARAMETER Experiment Name: At_Guard_Cells_P Parameter: Tissue Value: Guard Cells vs. Leaves
  misc_feature: MA Experiment ID: 20001557 Result: Up-regulated in Transcription
  misc_feature: MA Experiment 20001557 PARAMETER Experiment Name: At_Drought_Soil_Dry_P Parameter: Age (day) Value: 27
  misc_feature: MA Experiment 20001557 PARAMETER Experiment Name: At_Drought_Soil_Dry_P Parameter: Organism Value: A. thaliana
  misc_feature: MA Experiment 20001557 PARAMETER Experiment Name: At_Drought_Soil_Dry_P Parameter: Plant Line Value: WS
  misc_feature: MA Experiment 20001557 PARAMETER Experiment Name: At_Drought_Soil_Dry_P Parameter: Post Timepoint (hr) Value: 3
  misc_feature: MA Experiment 20001557 PARAMETER Experiment Name: At_Drought_Soil_Dry_P Parameter: Post-Treatment Value: Re-Water vs. No Drought
  misc_feature: MA Experiment 20001557 PARAMETER Experiment Name: At_Drought_Soil_Dry_P Parameter: Timepoint (day) Value: 13
  misc_feature: MA Experiment 20001557 PARAMETER Experiment Name: At_Drought_Soil_Dry_P Parameter: Treatment Value: Drought vs. No Drought
aattaacaaagttggagtctttgttcacttcactgtctctcatcacacgctttccttctttatctcgtgaccactttcaaagccgaaaagaacttggtatttttgcattgaattatagagatttaagagccatcgatgtgtgtgtgatcttcaatgggtttatgcttagctcaattggctgtaacatgtttgttcctagtaccttttgttctgtctcaagttacagagtttgtaagtatagattgtggttgctcaagtaactacacagacccaagaactggactaggatgggtttcagattcagagatcatcaaacagggcaagccagtaactttggccaataccaattggaactcgatgcaataccgtaggagaagagatttcccaactgacaataagaagtattgttacagactcagtaccaaagagagaaggcgatacattgtcagaactacatttctttatggtggtttgggtagtgaggaagcctacccaaagtttcaactttacttggatgcaacgaaatgggctactgtgacgattcaggaggtctctagggtttatgttgaggagttgatcgtaagggcaacttcaagttatgtggatgtttgtgtatgctgtgctatcaccggttctcctttcatgtccactcttgagcttcgcccgttgaacctttcgatgtatgccactgactacgaggataatttcttcttgaaggttgctgccagagtgaattttggtgctccgaacatggatgccttgaggtacccagatgatccatatgacagaatctgggagtcagatattaacaaacggccaaactatcttgttggtgtggctcctggaacgacaagaatcaatacgtcaaagactataaatacgttgactagagagtatccgcctatgaaagtcatgcaaacagcagtagttggcacacaaggactgatcagctatagattgaacctggaagacttccctgccaatgctcgtgcgtatgcttattttgctgaaattgaagaacttggtgctaacgagacccggaaatttaagttggtgcagccatactttcctgactatagtaatgcagtggtgaacattgccgagaatgccaatgggagctatactctctatgaacctagctatatgaatgtgactttggattttgttttgacgttctcatttgggaagactaaggattctacgcaagggccactcctaaatgcaattgaaattagcaagtatctaccaatatccgtgaaaactgataggagtgacgtgtctgttcttgatgcaattcgttcgatgtcccctgatagcgattgggccagtgaaggaggagacccttgtatcccagttctttggtcgtgggtaaactgtagctcaacttcaccaccaagagtcacgaaaattgctctatcaaggaaaaatctgaggggtgagattccgcctgggatcaattatatggaggcattgacagagttgtgagcggttcaatgctgcatttgagatatcatcttgtattagtctctctgtcattcttttgttgagtaaacttgttctttgataggtggcttgacgataatgaattgaccggaactcttccagacatgagcaaacttgtcaacctgaaaatcatgcatctagaaaacaaccaacttagtggttcactcccaccataccttgctcatctgcctaacctacaagaactgtctatagaaaataactcctttaaaggaaaaattccttcagcgctattaaaggggaaagttttgttcaaatataataataatcctgagcttcagaacgaggcacagcgaaagcacttttggcagatactggggatatcaatagccgctgtcgcaattctgttgctactagttggaggaagtcttgttttactttgtgcccttcgtaagaccaaaagagctgataaaggtgattccacagagactaagaaaaaaggtttagtagcttactcagcagtgcggggcggacacttattagatgaaggtgtagcatatttcatatcacttcctgtgctcgaagaggcaaccgataatttttccaagaaagttggaagaggaagttttgggtctgtctactatggtaggatgaaagatgggaaagaagttgcagttaagataactgcagatccttctagccacttgaacagacaatttgtgactgaggttgctctattatcgagaattcaccacaggaacttggttcctttgattggatattgtgaagaagcagatcggcgtattttggtttacgaatatatgcataatggaagcttgggagatcacttgcatggttcaagcgactacaagccactagactggctaactcggctacaaattgcacaagatgctgccaaaggtttgtagcacaatctcaagattaaatctttagtgtggctataatatgaatccattggacagacaaaacttcagattattacaggtcttgaatacttgcatactggctgcaatcctagtattattcatagggatgtgaaatcaagtaatattctcctggacattaacatgagagccaaagtatctgactttggactctcgagacagacagaggaagacttaactcatgtatccagtgtcgcaaaaggaactgttggataccttgatccagagtattatgctagtcagcagctgactgagaagagcgatgtctacagttttggcgttgttctttttgaattactctctggaaagaagccagtctcagcagaagattttggtcctgaactgaatatagttcactgggcaagatcgctgatccgtaaaggagacgtgtgcgggatcatagatccatgtatagcaagcaacgtgaagatcgagtcagtctggagagttgcagaggtcgcaaaccaatgtgttgagcagcgtggacataacaggccaaggatgcaggaagtaatagtggcaatacaagacgcgatcaggatcgagagaggaaacgaaaatggactgaagtcatcgagttcaagcagctcaaaggcacaatcatctcgtaaaaccttgcttactagcttcctcgagctagagagccctgacatctcaagaaacagcctagctccagctgctaggtgagtcctcttaaagctcgagctctcatgtttaccctttggacttaccatcgtcacatagatgaatacattatatacgtattaaaatgtgtgtatgtgatgtagtgtcaaatttaatctgtatctctttacacacttctgacatgacattgtgtagatgttttagttgatgatagcacaaaaccataatttaattattgaaggtaacaacataatatgct

SEQ ID NO: 81684 - protein, 443 aa, Arabidopsis thaliana
  peptide (1)..(443): Ceres Seq. ID no. 12660789
  misc_feature (3)..(443): Homolog of NCBI NO: 27754635 NR Description: putative receptor protein kinase [Arabidopsis
  misc_feature (3)..(443): Homolog of NCBI NO: 15228078 NR Description: putative receptor-like protein kinase; protein id:
  misc_feature (9)..(443): Homolog of NCBI NO: 34906098 NR Description: putative receptor-like protein kinase [Oryza
  misc_feature (26)..(443): Homolog of NCBI NO: 9837280 NR Description: leaf senescence-associated receptor-like protein
  misc_feature (26)..(443): Homolog of NCBI NO: 25387121 NR Description: probable protein kinase [imported] - Arabidopsis >gi|9802790|gb|AAF99859.1|AC015448_9 Putative protein kinase
  misc_feature (5)..(443): Homolog of NCBI NO: 2129635 NR Description: serine/threonine-specific receptor protein kinase
  misc_feature (5)..(443): Homolog of NCBI NO: 15233796 NR Description: serine threonine-specific receptor protein kinase protein id: At4g29990.1 [Arabidopsis thaliana]
  misc_feature (8)..(443): Homolog of NCBI NO: 15225949 NR Description: putative receptor-like protein kinase; protein id:
  misc_feature (1)..(443): Homolog of NCBI NO: 22327979 NR Description: serine/threonine-specific protein kinase - like; id: At5g59670.1, supported by cDNA: gi_20466279 [Arabidopsis
  misc_feature (18)..(443): Homolog of NCBI NO: 25387154 NR Description: protein F22G5.6 [imported] - Arabidopsis thaliana
MGLCLAQLAVTCLFLVPFVLSQVTEFVSIDCGCSSNYTDPRTGLGWVSDSEIIKQGKPVTLANTNWNSMQYRRRRDFPTDNKKYCYRLSTKERRRYIVRTTFLYGGLGSEEAYPKFQLYLDATKWATVTIQEVSRVYVEELIVRATSSYVDVCVCCAITGSPFMSTLELRPLNLSMYATDYEDNFFLKVAARVNFGAPNMDALRYPDDPYDRIWESDINKRPNYLVGVAPGTTRINTSKTINTLTREYPPMKVMQTAVVGTQGLISYRLNLEDFPANARAYAYFAEIEELGANETRKFKLVQPYFPDYSNAVVNIAENANGSYTLYEPSYMNVTLDFVLTFSFGKTKDSTQGPLLNAIEISKYLPISVKTDRSDVSVLDAIRSMSPDSDWASEGGDPCIPVLWSWVNCSSTSPPRVTKIALSRKNLRGEIPPGINYMEALTEL

SEQ ID NO: 81685 - protein, 375 aa, Arabidopsis thaliana
  peptide (1)..(375): Ceres Seq. ID no. 12660790
  misc_feature (1)..(375): Homolog of NCBI NO: 27754635 NR Description: putative receptor protein kinase [Arabidopsis
  misc_feature (1)..(375): Homolog of NCBI NO: 15228078 NR Description: putative receptor-like protein kinase; protein id:
  misc_feature (1)..(375): Homolog of NCBI NO: 34906098 NR Description: putative receptor-like protein kinase [Oryza
  misc_feature (1)..(375): Homolog of NCBI NO: 9837280 NR Description: leaf senescence-associated receptor-like protein
  misc_feature (1)..(375): Homolog of NCBI NO: 25387121 NR Description: probable protein kinase [imported] - Arabidopsis >gi|9802790|gb|AAF99859.1|AC015448_9 Putative protein kinase
  misc_feature (1)..(375): Homolog of NCBI NO: 2129635 NR Description: serine/threonine-specific receptor protein kinase
  misc_feature (1)..(375): Homolog of NCBI NO: 15233796 NR Description: serine threonine-specific receptor protein kinase protein id: At4g29990.1 [Arabidopsis thaliana]
  misc_feature (1)..(375): Homolog of NCBI NO: 15225949 NR Description: putative receptor-like protein kinase; protein id:
  misc_feature (1)..(375): Homolog of NCBI NO: 22327979 NR Description: serine/threonine-specific protein kinase - like; id: At5g59670.1, supported by cDNA: gi_20466279 [Arabidopsis
  misc_feature (1)..(375): Homolog of NCBI NO: 25387154 NR Description: protein F22G5.6 [imported] - Arabidopsis thaliana
MQYRRRRDFPTDNKKYCYRLSTKERRRYIVRTTFLYGGLGSEEAYPKFQLYLDATKWATVTIQEVSRVYVEELIVRATSSYVDVCVCCAITGSPFMSTLELRPLNLSMYATDYEDNFFLKVAARVNFGAPNMDALRYPDDPYDRIWESDINKRPNYLVGVAPGTTRINTSKTINTLTREYPPMKVMQTAVVGTQGLISYRLNLEDFPANARAYAYFAEIEELGANETRKFKLVQPYFPDYSNAVVNIAENANGSYTLYEPSYMNVTLDFVLTFSFGKTKDSTQGPLLNAIEISKYLPISVKTDRSDVSVLDAIRSMSPDSDWASEGGDPCIPVLWSWVNCSSTSPPRVTKIALSRKNLRGEIPPGINYMEALTEL

SEQ ID NO: 81686 - protein, 280 aa, Arabidopsis thaliana
  peptide (1)..(280): Ceres Seq. ID no. 12660791
  misc_feature (1)..(280): Homolog of NCBI NO: 27754635 NR Description: putative receptor protein kinase [Arabidopsis
  misc_feature (1)..(280): Homolog of NCBI NO: 15228078 NR Description: putative receptor-like protein kinase; protein id:
  misc_feature (1)..(280): Homolog of NCBI NO: 34906098 NR Description: putative receptor-like protein kinase [Oryza
  misc_feature (1)..(280): Homolog of NCBI NO: 9837280 NR Description: leaf senescence-associated receptor-like protein
  misc_feature (1)..(280): Homolog of NCBI NO: 25387121 NR Description: probable protein kinase [imported] - Arabidopsis >gi|9802790|gb|AAF99859.1|AC015448_9 Putative protein kinase
  misc_feature (1)..(280): Homolog of NCBI NO: 2129635 NR Description: serine/threonine-specific receptor protein kinase
  misc_feature (1)..(280): Homolog of NCBI NO: 15233796 NR Description: serine threonine-specific receptor protein kinase protein id: At4g29990.1 [Arabidopsis thaliana]
  misc_feature (1)..(280): Homolog of NCBI NO: 15225949 NR Description: putative receptor-like protein kinase; protein id:
  misc_feature (1)..(280): Homolog of NCBI NO: 22327979 NR Description: serine/threonine-specific protein kinase - like; id: At5g59670.1, supported by cDNA: gi_20466279 [Arabidopsis
  misc_feature (1)..(280): Homolog of NCBI NO: 25387154 NR Description: protein F22G5.6 [imported] - Arabidopsis thaliana
MSTLELRPLNLSMYATDYEDNFFLKVAARVNFGAPNMDALRYPDDPYDRIWESDINKRPNYLVGVAPGTTRINTSKTINTLTREYPPMKVMQTAVVGTQGLISYRLNLEDFPANARAYAYFAEIEELGANETRKFKLVQPYFPDYSNAVVNIAENANGSYTLYEPSYMNVTLDFVLTFSFGKTKDSTQGPLLNAIEISKYLPISVKTDRSDVSVLDAIRSMSPDSDWASEGGDPCIPVLWSWVNCSSTSPPRVTKIALSRKNLRGEIPPGINYMEALTEL

SEQ ID NO: 81687 - DNA, 2046 bp, Arabidopsis thaliana
  misc_feature (1)..(2046): Ceres Seq. ID no. 12660824
  misc_feature: MA Experiment ID: 20000307 Result: Down-regulated in Transcription
  misc_feature: MA Experiment 20000307 PARAMETER Experiment Name: At_Germinating_Seeds_Sub_P Parameter: Age (hr) Value: 24 vs. 0
  misc_feature: MA Experiment 20000307 PARAMETER Experiment Name: At_Germinating_Seeds_Sub_P Parameter: Organism Value: A. thaliana
  misc_feature: MA Experiment 20000307 PARAMETER Experiment Name: At_Germinating_Seeds_Sub_P Parameter: Plant Line Value: WS
  misc_feature: MA Experiment 20000307 PARAMETER Experiment Name: At_Germinating_Seeds_Sub_P Parameter: Tissue Value: Germinating Seeds
  misc_feature: MA Experiment ID: 20000315 Result: Down-regulated in Transcription
  misc_feature: MA Experiment 20000315 PARAMETER Experiment Name: At_14day_Shoots-Roots_Sub_P Parameter: Age (day) Value: 14
  misc_feature: MA Experiment 20000315 PARAMETER Experiment Name: At_14day_Shoots-Roots_Sub_P Parameter: Organism Value: A. thaliana
  misc_feature: MA Experiment 20000315 PARAMETER Experiment Name: At_14day_Shoots-Roots_Sub_P Parameter: Plant Line Value: WS
  misc_feature: MA Experiment 20000315 PARAMETER Experiment Name: At_14day_Shoots-Roots_Sub_P Parameter: Tissue Value: Shoots vs. Whole Plant
  misc_feature: MA Experiment ID: 20000355 Result: Down-regulated in Transcription
  misc_feature: MA Experiment 20000355 PARAMETER Experiment Name: At_Siliques_Sub_P Parameter: Age (day) Value: 21
  misc_feature: MA Experiment 20000355 PARAMETER Experiment Name: At_Siliques_Sub_P Parameter: Organism Value: A. thaliana
  misc_feature: MA Experiment 20000355 PARAMETER Experiment Name: At_Siliques_Sub_P Parameter: Plant Line Value: WS
  misc_feature: MA Experiment 20000355 PARAMETER Experiment Name: At_Siliques_Sub_P Parameter: Tissue Value: Less Than 5mm Siliques vs. Whole Plant
aaacatacatttatgatttaacgcaaacccaaaaagagccttcaccttttttctcttcgtcttcttcaccatcttgtggggaaaaacaaaacttctccggccatggatcctggcgacccaacttcaataatcttttcaaagatcagaactttcgaacttgagaacgcttccagagtcattgactattttctcttgcaagacatggaacaaagagatttgattcgaattgcttttggtcctgactctctcatacagactttctgtcagaaagctaaagtcgatttaggtttttcctcgaacggtttctcgagacccatcaatatccatggccagtcattgtcctcgtcttctcccagaaatgggttcttagagttctcgagaaaccctagtaaccctttgtcttcttcgttaactttgaacacactcagagataataagcctaacttcaattctagtccttttcgtgaaagttcatcactttttgcctcttcttccggcgatgagcagcagcaacaacaattcagtaacaactttctgttcacaaacgacgaggacccatttgccaattctcacaagaggagtttctctgctaacgatgcttgttttgagtcagaggaaccatggtttggaggaggaaatggttgtcatcaatttccacaaggcggtttagttgatggttttggttcctctggtgtctttggatcgccgagtgagatggattacatgcttgaggggatgatgaggatgaagttagctcagcaaaagagcatggttgctgctcagtttatggcggcttgtggctctccaatgttgcatagacacggatcaggacattttggagaagaatgtggtaactattttagtcaaggaaggcatgaaagagaggattcagtctctaaacagatttacttgacatttccatctgaaagctccttcactgatgaagacgtctcaacctatttcagagattttggacttgtggatgatgtgaggattccatatcagcagcaaaggatgtatgggtttgtaacttttgctaaggctgaaactgtgagaaccatattagctcgtggaaaccctcatttcatatgtgactcacgtgtgctcgttaaaccatacaaggagaaaggaaaaatccttcaaaagaggcagcagcaacaactacacgagttgttggagagagggaactattcaccttcttcaagtccgtctggaaaggactcgagggaactatatgaatgtcgcttaggaccaaggatgttttcaaagaagacacaggagatgttgcgaagaaaaaccgagcaagctgatttacaacatgccatagaagtagaactccaaagatgaaggttcttgaatctgcaactacctgacatggagaataaatatattcaccatcaccaccagcgtagtccttctattggttctccctctcatttcccacctcgattcaatcatagtcttctctttcaatcaggaaacaacaacgaagaaatcatggaaggcgacagtgatagaagtgagaaagatcttcaacaagtagcaaccagcaacgaagaacgtggttacaataacggtttctacaaagggcaagagacgagtctggagaatactctccctgatagcttgtttggttctccaaaaaaatctggcgaaacctaccaaaccgagtctgataccgagcataataataaggaagcctcatcaaatcagttagcgtagcaatgggcagaaagaagcatgtgtatgaatgaaaagaaaggtgtagaagactgataaaagaatgaagtagaagagaagaattgtctatatatagtaaaagctaagaggtcacatggaacacaagagagaaggttaaagagaacagttttaggattataatatcatctacaataataggattttaccactaatctcagcaacatatgaatacagatcaacacagtaactgtaactcacaagtaggtttctttttggtaatttctttttaccttatcggatacaacacagttaccatggttgtatgaaatgcatgtgttttttctt

SEQ ID NO: 81688 - protein, 414 aa, Arabidopsis thaliana
  peptide (1)..(414): Ceres Seq. ID no. 12660825
  misc_feature (279)..(336): Pfam Name: RNA recognition motif. (a.k.a. RRM, RBD, or RNP domain) Pfam Description: RNA recognition motif. (a.k.a. RRM, RBD, or RNP
  misc_feature (1)..(409): Homolog of NCBI NO: 30695000 NR Description: expressed protein [Arabidopsis thaliana]
  misc_feature (1)..(414): Homolog of NCBI NO: 15217946 NR Description: unknown protein; protein id: At1g51520.1, by cDNA: gi_20268749, supported by cDNA: gi_21281142 [Arabidopsis
  misc_feature (238)..(414): Homolog of NCBI NO: 22331232 NR Description: RRM-containing protein; protein id: At3g21100.1
  misc_feature (1)..(197): Homolog of NCBI NO: 22331232 NR Description: RRM-containing protein; protein id: At3g21100.1
  misc_feature (238)..(414): Homolog of NCBI NO: 11994270 NR Description: emb|CAB41315.1~gene_id:MSA6.14~similar to unknown
  misc_feature (1)..(197): Homolog of NCBI NO: 11994270 NR Description: emb|CAB41315.1~gene_id:MSA6.14~similar to unknown
  misc_feature (128)..(262): Homolog of NCBI NO: 22331232 NR Description: RRM-containing protein; protein id: At3g21100.1
  misc_feature (128)..(262): Homolog of NCBI NO: 11994270 NR Description: emb|CAB41315.1~gene_id:MSA6.14~similar to unknown
  misc_feature (259)..(414): Homolog of NCBI NO: 26453236 NR Description: unknown protein [Arabidopsis thaliana]
  misc_feature (1)..(102): Homolog of NCBI NO: 26453236 NR Description: unknown protein [Arabidopsis thaliana]
MDPGDPTSIIFSKIRTFELENASRVIDYFLLQDMEQRDLIRIAFGPDSLIQTFCQKAKVDLGFSSNGFSRPINIHGQSLSSSSPRNGFLEFSRNPSNPLSSSLTLNTLRDNKPNFNSSPFRESSSLFASSSGDEQQQQQFSNNFLFTNDEDPFANSHKRSFSANDACFESEEPWFGGGNGCHQFPQGGLVDGFGSSGVFGSPSEMDYMLEGMMRMKLAQQKSMVAAQFMAACGSPMLHRHGSGHFGEECGNYFSQGRHEREDSVSKQIYLTFPSESSFTDEDVSTYFRDFGLVDDVRIPYQQQRMYGFVTFAKAETVRTILARGNPHFICDSRVLVKPYKEKGKILQKRQQQQLHELLERGNYSPSSSPSGKDSRELYECRLGPRMFSKKTQEMLRRKTEQADLQHAIEVELQR

SEQ ID NO: 81689 - protein, 381 aa, Arabidopsis thaliana
  peptide (1)..(381): Ceres Seq. ID no. 12660826
  misc_feature (246)..(303): Pfam Name: RNA recognition motif. (a.k.a. RRM, RBD, or RNP domain) Pfam Description: RNA recognition motif. (a.k.a. RRM, RBD, or RNP
  misc_feature (1)..(376): Homolog of NCBI NO: 30695000 NR Description: expressed protein [Arabidopsis thaliana]
  misc_feature (1)..(381): Homolog of NCBI NO: 15217946 NR Description: unknown protein; protein id: At1g51520.1, by cDNA: gi_20268749, supported by cDNA: gi_21281142 [Arabidopsis
  misc_feature (205)..(381): Homolog of NCBI NO: 22331232 NR Description: RRM-containing protein; protein id: At3g21100.1
  misc_feature (1)..(164): Homolog of NCBI NO: 22331232 NR Description: RRM-containing protein; protein id: At3g21100.1
  misc_feature (205)..(381): Homolog of NCBI NO: 11994270 NR Description: emb|CAB41315.1~gene_id:MSA6.14~similar to unknown
  misc_feature (1)..(164): Homolog of NCBI NO: 11994270 NR Description: emb|CAB41315.1~gene_id:MSA6.14~similar to unknown
  misc_feature (95)..(229): Homolog of NCBI NO: 22331232 NR Description: RRM-containing protein; protein id: At3g21100.1
  misc_feature (95)..(229): Homolog of NCBI NO: 11994270 NR Description: emb|CAB41315.1~gene_id:MSA6.14~similar to unknown
  misc_feature (226)..(381): Homolog of NCBI NO: 26453236 NR Description: unknown protein [Arabidopsis thaliana]
  misc_feature (1)..(69): Homolog of NCBI NO: 26453236 NR Description: unknown protein [Arabidopsis thaliana]
MEQRDLIRIAFGPDSLIQTFCQKAKVDLGFSSNGFSRPINIHGQSLSSSSPRNGFLEFSRNPSNPLSSSLTLNTLRDNKPNFNSSPFRESSSLFASSSGDEQQQQQFSNNFLFTNDEDPFANSHKRSFSANDACFESEEPWFGGGNGCHQFPQGGLVDGFGSSGVFGSPSEMDYMLEGMMRMKLAQQKSMVAAQFMAACGSPMLHRHGSGHFGEECGNYFSQGRHEREDSVSKQIYLTFPSESSFTDEDVSTYFRDFGLVDDVRIPYQQQRMYGFVTFAKAETVRTILARGNPHFICDSRVLVKPYKEKGKILQKRQQQQLHELLERGNYSPSSSPSGKDSRELYECRLGPRMFSKKTQEMLRRKTEQADLQHAIEVELQR

SEQ ID NO: 81690 - protein, 210 aa, Arabidopsis thaliana
  peptide (1)..(210): Ceres Seq. ID no. 12660827
  misc_feature (75)..(132): Pfam Name: RNA recognition motif. (a.k.a. RRM, RBD, or RNP domain) Pfam Description: RNA recognition motif. (a.k.a. RRM, RBD, or RNP
  misc_feature (1)..(205): Homolog of NCBI NO: 30695000 NR Description: expressed protein [Arabidopsis thaliana]
  misc_feature (1)..(210): Homolog of NCBI NO: 15217946 NR Description: unknown protein; protein id: At1g51520.1, by cDNA: gi_20268749, supported by cDNA: gi_21281142 [Arabidopsis
  misc_feature (34)..(210): Homolog of NCBI NO: 22331232 NR Description: RRM-containing protein; protein id: At3g21100.1
  misc_feature (34)..(210): Homolog of NCBI NO: 11994270 NR Description: emb|CAB41315.1~gene_id:MSA6.14~similar to unknown
  misc_feature (1)..(58): Homolog of NCBI NO: 22331232 NR Description: RRM-containing protein; protein id: At3g21100.1
  misc_feature (1)..(58): Homolog of NCBI NO: 11994270 NR Description: emb|CAB41315.1~gene_id:MSA6.14~similar to unknown
  misc_feature (55)..(210): Homolog of NCBI NO: 26453236 NR Description: unknown protein [Arabidopsis thaliana]
  misc_feature (42)..(210): Homolog of NCBI NO: 38230504 NR Description: predicted protein [Populus alba x Populus tremula]
  misc_feature (55)..(210): Homolog of NCBI NO: 14586374 NR Description: putative protein [Arabidopsis thaliana]
  misc_feature (55)..(210): Homolog of NCBI NO: 30684113 NR Description: expressed protein [Arabidopsis thaliana]
MDYMLEGMMRMKLAQQKSMVAAQFMAACGSPMLHRHGSGHFGEECGNYFSQGRHEREDSVSKQIYLTFPSESSFTDEDVSTYFRDFGLVDDVRIPYQQQRMYGFVTFAKAETVRTILARGNPHFICDSRVLVKPYKEKGKILQKRQQQQLHELLERGNYSPSSSPSGKDSRELYECRLGPRMFSKKTQEMLRRKTEQADLQHAIEVELQR

SEQ ID NO: 81691 - DNA, 988 bp, Arabidopsis thaliana
  misc_feature (1)..(988): Ceres Seq. ID no. 12660828
  misc_feature: MA Experiment ID: 108573 Result: Up-regulated in Transcription
  misc_feature: MA Experiment 108573 PARAMETER Experiment Name: At_Drought_cDNA_P Parameter: Timepoint (hr) Value: 6
  misc_feature: MA Experiment 108573 PARAMETER Experiment Name: At_Drought_cDNA_P Parameter: Tissue Value: Aerial
  misc_feature: MA Experiment 108573 PARAMETER Experiment Name: At_Drought_cDNA_P Parameter: Treatment Value: Drought vs. No Drought
  misc_feature: MA Experiment ID: 20000112 Result: Up-regulated in Transcription
  misc_feature: MA Experiment 20000112 PARAMETER Experiment Name: At_42deg_Heat_cDNA_P Parameter: Temperature (deg C) Value: 42 vs. 22
  misc_feature: MA Experiment 20000112 PARAMETER Experiment Name: At_42deg_Heat_cDNA_P Parameter: Timepoint (hr) Value: 2
  misc_feature: MA Experiment 20000112 PARAMETER Experiment Name: At_42deg_Heat_cDNA_P Parameter: Tissue Value: Aerial
  misc_feature: MA Experiment ID: 20000113 Result: Up-regulated in Transcription
  misc_feature: MA Experiment 20000113 PARAMETER Experiment Name: At_42deg_Heat_cDNA_P Parameter: Temperature (deg C) Value: 42 vs. 22
  misc_feature: MA Experiment 20000113 PARAMETER Experiment Name: At_42deg_Heat_cDNA_P Parameter: Timepoint (hr) Value: 8
  misc_feature: MA Experiment 20000113 PARAMETER Experiment Name: At_42deg_Heat_cDNA_P Parameter: Tissue Value: Aerial
  misc_feature: MA Experiment ID: 20000224 Result: Down-regulated in Transcription
  misc_feature: MA Experiment ID: 20000227 Result: Down-regulated in Transcription
  misc_feature: MA Experiment 20000227 PARAMETER Experiment Name: At_Root-Tips-vs-Tops_P Parameter: Tissue Value: Root Tips vs. Root Tops
  misc_feature: MA Experiment ID: 20000234 Result: Down-regulated in Transcription
  misc_feature: MA Experiment 20000234 PARAMETER Experiment Name: At_Siliques_P Parameter: Age (day) Value: 21
  misc_feature: MA Experiment 20000234 PARAMETER Experiment Name: At_Siliques_P Parameter: Organism Value: A. thaliana
  misc_feature: MA Experiment 20000234 PARAMETER Experiment Name: At_Siliques_P Parameter: Plant Line Value: WS
  misc_feature: MA Experiment 20000234 PARAMETER Experiment Name: At_Siliques_P Parameter: Tissue Value: Less Than 5mm Siliques vs. Whole Plant
  misc_feature: MA Experiment ID: 20000264 Result: Down-regulated in Transcription
  misc_feature: MA Experiment 20000264 PARAMETER Experiment Name: At_Open_Flower_P Parameter: Age (day) Value: 21
  misc_feature: MA Experiment 20000264 PARAMETER Experiment Name: At_Open_Flower_P Parameter: Plant Line Value: WS
  misc_feature: MA Experiment 20000264 PARAMETER Experiment Name: At_Open_Flower_P Parameter: Tissue Value: Open Flower vs. Whole Plant
  misc_feature: MA Experiment ID: 20000265 Result: Down-regulated in Transcription
  misc_feature: MA Experiment 20000265 PARAMETER Experiment Name: At_Open_Flower_P Parameter: Age (day) Value: 21
  misc_feature: MA Experiment 20000265 PARAMETER Experiment Name: At_Open_Flower_P Parameter: Plant Line Value: WS
  misc_feature: MA Experiment 20000265 PARAMETER Experiment Name: At_Open_Flower_P Parameter: Tissue Value: Closed Flower vs. Whole Plant
  misc_feature: MA Experiment ID: 20000286 Result: Down-regulated in Transcription
  misc_feature: MA Experiment 20000286 PARAMETER Experiment Name: At_Open_Flower_P Parameter: Age (day) Value: 21
  misc_feature: MA Experiment 20000286 PARAMETER Experiment Name: At_Open_Flower_P Parameter: Plant Line Value: WS
  misc_feature: MA Experiment 20000286 PARAMETER Experiment Name: At_Open_Flower_P Parameter: Tissue Value: Half Open vs. Whole Plant
  misc_feature: MA Experiment ID: 20000496 Result: Down-regulated in Transcription
  misc_feature: MA Experiment 20000496 PARAMETER Experiment Name: At_Guard_Cells_P Parameter: Harvest Date Value: 7/19/2002
  misc_feature: MA Experiment 20000496 PARAMETER Experiment Name: At_Guard_Cells_P Parameter: Organism Value: Canola
  misc_feature: MA Experiment 20000496 PARAMETER Experiment Name: At_Guard_Cells_P Parameter: Tissue Value: Guard Cells vs. Leaves
  misc_feature: MA Experiment ID: 20000794 Result: Down-regulated in Transcription
  misc_feature: MA Experiment 20000794 PARAMETER Experiment Name: At_Petals_P Parameter: Age (day) Value: 23-25 days
  misc_feature: MA Experiment 20000794 PARAMETER Experiment Name: At_Petals_P Parameter: Plant Line Value: WS
  misc_feature: MA Experiment 20000794 PARAMETER Experiment Name: At_Petals_P Parameter: Tissue Value: Petals vs. Whole plant
  misc_feature: MA Experiment ID: 20001558 Result: Down-regulated in Transcription
  misc_feature: MA Experiment 20001558 PARAMETER Experiment Name: At_Drought_Soil_Dry_P Parameter: Age (day) Value: 27
  misc_feature: MA Experiment 20001558 PARAMETER Experiment Name: At_Drought_Soil_Dry_P Parameter: Organism Value: A. thaliana
  misc_feature: MA Experiment 20001558 PARAMETER Experiment Name: At_Drought_Soil_Dry_P Parameter: Plant Line Value: WS
  misc_feature: MA Experiment 20001558 PARAMETER Experiment Name: At_Drought_Soil_Dry_P Parameter: Post Timepoint (hr) Value: 6
  misc_feature: MA Experiment 20001558 PARAMETER Experiment Name: At_Drought_Soil_Dry_P Parameter: Post-Treatment Value: Re-Water vs. No Drought
  misc_feature: MA Experiment 20001558 PARAMETER Experiment Name: At_Drought_Soil_Dry_P Parameter: Timepoint (day) Value: 13
  misc_feature: MA Experiment 20001558 PARAMETER Experiment Name: At_Drought_Soil_Dry_P Parameter: Treatment Value: Drought vs. No Drought
  misc_feature: MA Experiment ID: 20001560 Result: Down-regulated in Transcription
  misc_feature: MA Experiment 20001560 PARAMETER Experiment Name: At_Drought_Soil_Dry_P Parameter: Age (day) Value: 28
  misc_feature: MA Experiment 20001560 PARAMETER Experiment Name: At_Drought_Soil_Dry_P Parameter: Organism Value: A. thaliana
  misc_feature: MA Experiment 20001560 PARAMETER Experiment Name: At_Drought_Soil_Dry_P Parameter: Plant Line Value: WS
  misc_feature: MA Experiment 20001560 PARAMETER Experiment Name: At_Drought_Soil_Dry_P Parameter: Post Timepoint (hr) Value: None
  misc_feature: MA Experiment 20001560 PARAMETER Experiment Name: At_Drought_Soil_Dry_P Parameter: Post-Treatment Value: None
  misc_feature: MA Experiment 20001560 PARAMETER Experiment Name: At_Drought_Soil_Dry_P Parameter: Timepoint (day) Value: 14
  misc_feature: MA Experiment 20001560 PARAMETER Experiment Name: At_Drought_Soil_Dry_P Parameter: Treatment Value: Drought vs. No Drought
aatttcatttccatttcgattcgattcctcctttgtgtgggaggcctttgttcggtcaacttatgtgttctgtttttgtctcttttttattgattagggaccgatctatcaaggcttcaagggcaaacagaaatggaccacgacaagacaggatgccaaagcccacctgaaggtcccaagctatgtactaacaactgcggtttctttggaagcgctgccacaatgaacatgtgttctaagtgtcacaaggatatgttgttccaacaggagcagggcgctaagtttgcatctgcagtgtctggaacatcgtcatccagcaacatcataaaggaaacctttaccgctgcgttggtcgatattgaaaccaaatccgttgagccgatgactgtttctgtacagccatcctctgtccaagtcgttgcagaggtagtagcaccagaagaagctgcgaaaccaaagggaccaagccgatgtactacttgcaataagcgggttggcctgactggattcaaatgtcgctgtgggagcctcttctgcggaacacaccgctatgcagacgtacatgactgctccttcaattaccatgctgctgcgcaagaggcgatagctaaggcaaacccggttgtgaaagcagagaagcttgacaaaatctgaaaatctaagtaaacttctctggtttcatcaggtggcctggtgtttccttctcctgtctgtgtctggttcaagtattctcatgttaaaaaggttttatataaggtcgaatgaaagcgtgcttgatctttagcgtcttccatctctctgtggtgtggaactttctattatctgtgtttgcaagcagagaaacgtgctcttaaaaaaaatgctttgtgtgtttatctttctactatttttgagcactgtgttattgtttcctgtttggtctgtatcatattgagattgtctctgtagctacatgaagcttatttaaaaaggcctgtgtttgtccttc

SEQ ID NO: 81692 - protein, 173 aa, Arabidopsis thaliana
  peptide (1)..(173): Ceres Seq. ID no. 12660829
  misc_feature (114)..(154): Pfam Name: AN1-like Zinc finger Pfam Description: AN1-like Zinc finger
  misc_feature (1)..(173): Homolog of NCBI NO: 18403408 NR Description: expressed protein; protein id: At1g51200.1, by cDNA: gi_15912334 [Arabidopsis thaliana]
  misc_feature (1)..(173): Homolog of NCBI NO: 25082726 NR Description: expressed protein [Arabidopsis thaliana]
  misc_feature (1)..(173): Homolog of NCBI NO: 11361253 NR Description: hypothetical protein p85RF [imported] - Prunus
  misc_feature (1)..(173): Homolog of NCBI NO: 35187687 NR Description: zinc-finger protein [Oryza sativa (indica
  misc_feature (8)..(173): Homolog of NCBI NO: 18404102 NR Description: expressed protein; protein id: At2g36320.1, by cDNA: 24255. [Arabidopsis thaliana] >gi|25408460|pir||C84779
  misc_feature (8)..(173): Homolog of NCBI NO: 15231686 NR Description: zinc finger - like protein; protein id: supported by cDNA: gi_14596166 [Arabidopsis thaliana]
  misc_feature (11)..(173): Homolog of NCBI NO: 15234402 NR Description: putative protein; protein id: At4g12040.1, by cDNA: 45., supported by cDNA: gi_13605498 [Arabidopsis
  misc_feature (8)..(173): Homolog of NCBI NO: 14596167 NR Description: zinc finger-like protein [Arabidopsis thaliana]
  misc_feature (15)..(173): Homolog of NCBI NO: 15225894 NR Description: putative zinc finger protein; protein id: supported by cDNA: 14203., supported by cDNA: gi_18253038
  misc_feature (1)..(173): Homolog of NCBI NO: 8778645 NR Description: F5O11.17 [Arabidopsis thaliana]
MDHDKTGCQSPPEGPKLCTNNCGFFGSAATMNMCSKCHKDMLFQQEQGAKFASAVSGTSSSSNIIKETFTAALVDIETKSVEPMTVSVQPSSVQVVAEVVAPEEAAKPKGPSRCTTCNKRVGLTGFKCRCGSLFCGTHRYADVHDCSFNYHAAAQEAIAKANPVVKAEKLDKI

SEQ ID NO: 81693 - protein, 143 aa, Arabidopsis thaliana
  peptide (1)..(143): Ceres Seq. ID no. 12660830
  misc_feature (84)..(124): Pfam Name: AN1-like Zinc finger Pfam Description: AN1-like Zinc finger
  misc_feature (1)..(143): Homolog of NCBI NO: 18403408 NR Description: expressed protein; protein id: At1g51200.1, by cDNA: gi_15912334 [Arabidopsis thaliana]
  misc_feature (1)..(143): Homolog of NCBI NO: 25082726 NR Description: expressed protein [Arabidopsis thaliana]
  misc_feature (1)..(143): Homolog of NCBI NO: 11361253 NR Description: hypothetical protein p85RF [imported] - Prunus
  misc_feature (1)..(143): Homolog of NCBI NO: 35187687 NR Description: zinc-finger protein [Oryza sativa (indica
  misc_feature (1)..(143): Homolog of NCBI NO: 18404102 NR Description: expressed protein; protein id: At2g36320.1, by cDNA: 24255. [Arabidopsis thaliana] >gi|25408460|pir||C84779
  misc_feature (1)..(143): Homolog of NCBI NO: 15231686 NR Description: zinc finger - like protein; protein id: supported by cDNA: gi_14596166 [Arabidopsis thaliana]
  misc_feature (1)..(143): Homolog of NCBI NO: 15234402 NR Description: putative protein; protein id: At4g12040.1, by cDNA: 45., supported by cDNA: gi_13605498 [Arabidopsis
  misc_feature (1)..(143): Homolog of NCBI NO: 14596167 NR Description: zinc finger-like protein [Arabidopsis thaliana]
  misc_feature (1)..(143): Homolog of NCBI NO: 15225894 NR Description: putative zinc finger protein; protein id: supported by cDNA: 14203., supported by cDNA: gi_18253038
  misc_feature (1)..(143): Homolog of NCBI NO: 8778645 NR Description: F5O11.17 [Arabidopsis thaliana]
MNMCSKCHKDMLFQQEQGAKFASAVSGTSSSSNIIKETFTAALVDIETKSVEPMTVSVQPSSVQVVAEVVAPEEAAKPKGPSRCTTCNKRVGLTGFKCRCGSLFCGTHRYADVHDCSFNYHAAAQEAIAKANPVVKAEKLDKI

SEQ ID NO: 81694 - protein, 141 aa, Arabidopsis thaliana
  peptide (1)..(141): Ceres Seq. ID no. 12660831
  misc_feature (82)..(122): Pfam Name: AN1-like Zinc finger Pfam Description: AN1-like Zinc finger
  misc_feature (1)..(141): Homolog of NCBI NO: 18403408 NR Description: expressed protein; protein id: At1g51200.1, by cDNA: gi_15912334 [Arabidopsis thaliana]
  misc_feature (1)..(141): Homolog of NCBI NO: 25082726 NR Description: expressed protein [Arabidopsis thaliana]
  misc_feature (1)..(141): Homolog of NCBI NO: 11361253 NR Description: hypothetical protein p85RF [imported] - Prunus
  misc_feature (1)..(141): Homolog of NCBI NO: 35187687 NR Description: zinc-finger protein [Oryza sativa (indica
  misc_feature (1)..(141): Homolog of NCBI NO: 18404102 NR Description: expressed protein; protein id: At2g36320.1, by cDNA: 24255. [Arabidopsis thaliana] >gi|25408460|pir||C84779
  misc_feature (1)..(141): Homolog of NCBI NO: 15231686 NR Description: zinc finger - like protein; protein id: supported by cDNA: gi_14596166 [Arabidopsis thaliana]
  misc_feature (1)..(141): Homolog of NCBI NO: 15234402 NR Description: putative protein; protein id: At4g12040.1, by cDNA: 45., supported by cDNA: gi_13605498 [Arabidopsis
  misc_feature (1)..(141): Homolog of NCBI NO: 14596167 NR Description: zinc finger-like protein [Arabidopsis thaliana]
  misc_feature (1)..(141): Homolog of NCBI NO: 15225894 NR Description: putative zinc finger protein; protein id: supported by cDNA: 14203., supported by cDNA: gi_18253038
  misc_feature (1)..(141): Homolog of NCBI NO: 8778645 NR Description: F5O11.17 [Arabidopsis thaliana]
MCSKCHKDMLFQQEQGAKFASAVSGTSSSSNIIKETFTAALVDIETKSVEPMTVSVQPSSVQVVAEVVAPEEAAKPKGPSRCTTCNKRVGLTGFKCRCGSLFCGTHRYADVHDCSFNYHAAAQEAIAKANPVVKAEKLDKI

SEQ ID NO: 81695 - DNA, 535 bp, Arabidopsis thaliana
  misc_feature (1)..(535): Ceres Seq. ID no. 12660847
  misc_feature: MA Experiment ID: 108569 Result: Down-regulated in Transcription
  misc_feature: MA Experiment 108569 PARAMETER Experiment Name: At_0.001%_MeJA__cDNA_P Parameter: Timepoint (hr) Value: 6
  misc_feature: MA Experiment 108569 PARAMETER Experiment Name: At_0.001%_MeJA__cDNA_P Parameter: Tissue Value: Aerial
  misc_feature: MA Experiment 108569 PARAMETER Experiment Name: At_0.001%_MeJA__cDNA_P Parameter: Treatment Value: 0.001% MeJA vs. No Treatment
  misc_feature: MA Experiment ID: 20000173 Result: Up-regulated in Transcription
  misc_feature: MA Experiment 20000173 PARAMETER Experiment Name: At_42deg_Heat_P Parameter: Age (day) Value: 14
  misc_feature: MA Experiment 20000173 PARAMETER Experiment Name: At_42deg_Heat_P Parameter: Organism Value: A. thaliana
  misc_feature: MA Experiment 20000173 PARAMETER Experiment Name: At_42deg_Heat_P Parameter: Plant Line Value: WS
  misc_feature: MA Experiment 20000173 PARAMETER Experiment Name: At_42deg_Heat_P Parameter: Temperature (deg C) Value: 42 vs. 22
  misc_feature: MA Experiment 20000173 PARAMETER Experiment Name: At_42deg_Heat_P Parameter: Timepoint (hr) Value: 6
  misc_feature: MA Experiment 20000173 PARAMETER Experiment Name: At_42deg_Heat_P Parameter: Tissue Value: Aerial
  misc_feature: MA Experiment ID: 20000437 Result: Down-regulated in Transcription
  misc_feature: MA Experiment 20000437 PARAMETER Experiment Name: At_Drought_P Parameter: Age (day) Value: 8
  misc_feature: MA Experiment 20000437 PARAMETER Experiment Name: At_Drought_P Parameter: Organism Value: A. thaliana
  misc_feature: MA Experiment 20000437 PARAMETER Experiment Name: At_Drought_P Parameter: Plant Line Value: WS
  misc_feature: MA Experiment 20000437 PARAMETER Experiment Name: At_Drought_P Parameter: Timepoint (hr) Value: 24
  misc_feature: MA Experiment 20000437 PARAMETER Experiment Name: At_Drought_P Parameter: Tissue Value: Whole Plant
  misc_feature: MA Experiment 20000437 PARAMETER Experiment Name: At_Drought_P Parameter: Treatment Value: Drought vs. No Drought
  misc_feature: MA Experiment ID: 20000495 Result: Up-regulated in Transcription
  misc_feature: MA Experiment 20000495 PARAMETER Experiment Name: At_Guard_Cells_P Parameter: Harvest Date Value: 8/2/2002
  misc_feature: MA Experiment 20000495 PARAMETER Experiment Name: At_Guard_Cells_P Parameter: Organism Value: A. thaliana
  misc_feature: MA Experiment 20000495 PARAMETER Experiment Name: At_Guard_Cells_P Parameter: Tissue Value: Guard Cells vs. Leaves
  misc_feature: MA Experiment ID: 20000794 Result: Down-regulated in Transcription
  misc_feature: MA Experiment 20000794 PARAMETER Experiment Name: At_Petals_P Parameter: Age (day) Value: 23-25 days
  misc_feature: MA Experiment 20000794 PARAMETER Experiment Name: At_Petals_P Parameter: Plant Line Value: WS
  misc_feature: MA Experiment 20000794 PARAMETER Experiment Name: At_Petals_P Parameter: Tissue Value: Petals vs. Whole plant
  misc_feature: MA Experiment ID: 20001558 Result: Up-regulated in Transcription
  misc_feature: MA Experiment 20001558 PARAMETER Experiment Name: At_Drought_Soil_Dry_P Parameter: Age (day) Value: 27
  misc_feature: MA Experiment 20001558 PARAMETER Experiment Name: At_Drought_Soil_Dry_P Parameter: Organism Value: A. thaliana
  misc_feature: MA Experiment 20001558 PARAMETER Experiment Name: At_Drought_Soil_Dry_P Parameter: Plant Line Value: WS
  misc_feature: MA Experiment 20001558 PARAMETER Experiment Name: At_Drought_Soil_Dry_P Parameter: Post Timepoint (hr) Value: 6
  misc_feature: MA Experiment 20001558 PARAMETER Experiment Name: At_Drought_Soil_Dry_P Parameter: Post-Treatment Value: Re-Water vs. No Drought
  misc_feature: MA Experiment 20001558 PARAMETER Experiment Name: At_Drought_Soil_Dry_P Parameter: Timepoint (day) Value: 13
  misc_feature: MA Experiment 20001558 PARAMETER Experiment Name: At_Drought_Soil_Dry_P Parameter: Treatment Value: Drought vs. No Drought
  misc_feature: MA Experiment ID: 20001560 Result: Up-regulated in Transcription
  misc_feature: MA Experiment 20001560 PARAMETER Experiment Name: At_Drought_Soil_Dry_P Parameter: Age (day) Value: 28
  misc_feature: MA Experiment 20001560 PARAMETER Experiment Name: At_Drought_Soil_Dry_P Parameter: Organism Value: A. thaliana
  misc_feature: MA Experiment 20001560 PARAMETER Experiment Name: At_Drought_Soil_Dry_P Parameter: Plant Line Value: WS
  misc_feature: MA Experiment 20001560 PARAMETER Experiment Name: At_Drought_Soil_Dry_P Parameter: Post Timepoint (hr) Value: None
  misc_feature: MA Experiment 20001560 PARAMETER Experiment Name: At_Drought_Soil_Dry_P Parameter: Post-Treatment Value: None
  misc_feature: MA Experiment 20001560 PARAMETER Experiment Name: At_Drought_Soil_Dry_P Parameter: Timepoint (day) Value: 14
  misc_feature: MA Experiment 20001560 PARAMETER Experiment Name: At_Drought_Soil_Dry_P Parameter: Treatment Value: Drought vs. No Drought
  misc_feature: MA Experiment ID: 20001757 Result: Up-regulated in Transcription
  misc_feature: MA Experiment 20001757 PARAMETER Experiment Name: At_50mM_NH4NO3_L-to-H_P Parameter: Timepoint (hr) Value: 6
  misc_feature: MA Experiment 20001757 PARAMETER Experiment Name: At_50mM_NH4NO3_L-to-H_P Parameter: Tissue Value: Leaf
  misc_feature: MA Experiment 20001757 PARAMETER Experiment Name: At_50mM_NH4NO3_L-to-H_P Parameter: Treatment Value: 50mM NH4NO3 vs 100mM Mannitol
acttccttctcttgaagccggaaaccttaaggttttatatctgggaaaaaactcgcatccgcttcaatgactaagggaacgggaagtttcggaaagagaagaaacaagagtcacacactctgtgtcagatgtggccgtcgcagtttccacatccagaagagtcgttgctctgcttgtgcttatcccgccgctcgcaagaggacttacaactggagtgtgaaggcaatccgtagaaagactactggaactggaaggatgaggtatcttcgcaatgtgcctcgcaggttcaagaccggtttcagagagggtaccgaagccaagccaaggaacaagggagttgcttcatcagcttaaacttgtttttgagcatcaagggagagagaattctgagtttgttgttcacaagattactactcttaagtgtctgattatgactatctttttgtgtggtctttgcgtttttaaagttttggacatggatggatttcaatttgcaagtcttttaattctctttattctaatcattatggttcct

SEQ ID NO: 81696 - protein, 95 aa, Arabidopsis thaliana; identical to SEQ ID NO: 42325
  peptide (1)..(95): Ceres Seq. ID no. 12660848
  misc_feature (2)..(55): Pfam Name: Ribosomal protein L37e Pfam Description: Ribosomal protein L37e
  misc_feature (1)..(95): Homolog of NCBI NO: 15218208 NR Description: 60S ribosomal protein L37, putative; protein id: supported by cDNA: gi_13877906, supported by cDNA: gi_21280804 thaliana] >gi|20143906|sp|Q43292|RL37_ARATH 60S F19K6.12
  misc_feature (1)..(95): Homolog of NCBI NO: 18401007 NR Description: putative ribosomal protein; protein id: supported by cDNA: 14710. [Arabidopsis thaliana]
  misc_feature (1)..(95): Homolog of NCBI NO: 15218094 NR Description: putative 60s ribosomal protein L37; protein id: supported by cDNA: 11912. [Arabidopsis thaliana] putative 60s ribosomal protein L37 [Arabidopsis thaliana]
  misc_feature (1)..(93): Homolog of NCBI NO: 24642107 NR Description: CG9091-PA [Drosophila melanogaster]
  misc_feature (1)..(87): Homolog of NCBI NO: 38047707 NR Description: similar to Drosophila melanogaster CG9091 yakuba] >gi|38048279|gb|AAR10042.1| similar to Drosophila
  misc_feature (1)..(95): Homolog of NCBI NO: 20139516 NR Description: 60S ribosomal protein L37
  misc_feature (1)..(95): Homolog of NCBI NO: 4506641 NR Description: ribosomal protein L37; 60S ribosomal protein L37; [Homo sapiens] >gi|13385572|ref|NP_080345.1| RIKEN cDNA [Mus musculus] >gi|13592063|ref|NP_112368.1| ribosomal protein
  misc_feature (1)..(95): Homolog of NCBI NO: 19852052 NR Description: 60S ribosomal protein L37 [Aplysia californica]
  misc_feature (1)..(87): Homolog of NCBI NO: 39583062 NR Description: Hypothetical protein CBG04239 [Caenorhabditis
  misc_feature (1)..(95): Homolog of NCBI NO: 37779096 NR Description: ribosomal protein L37 [Pagrus major]

SEQ ID NO: 81697 - protein, 88 aa, Arabidopsis thaliana; identical to SEQ ID NO: 42326
  peptide (1)..(88): Ceres Seq. ID no. 12660849

SEQ ID NO: 81698 - DNA, 615 bp, Arabidopsis thaliana
  misc_feature (1)..(615): Ceres Seq. ID no. 12660870
  misc_feature: MA Experiment ID: 20000185 Result: Down-regulated in Transcription
  misc_feature: MA Experiment 20000185 PARAMETER Experiment Name: At_Roots__P Parameter: Age (day) Value: 7 vs. 21
  misc_feature: MA Experiment 20000185 PARAMETER Experiment Name: At_Roots__P Parameter: Organism Value: A. thaliana
  misc_feature: MA Experiment 20000185 PARAMETER Experiment Name: At_Roots__P Parameter: Tissue Value: Roots vs. Whole Plant
  misc_feature: MA Experiment ID: 20000438 Result: Up-regulated in Transcription
  misc_feature: MA Experiment 20000438 PARAMETER Experiment Name: At_Shoots__P Parameter: Age (day) Value: 14
  misc_feature: MA Experiment 20000438 PARAMETER Experiment Name: At_Shoots__P Parameter: Tissue Value: Shoots vs. Whole Plant
  misc_feature: MA Experiment ID: 20000439 Result: Down-regulated in Transcription
  misc_feature: MA Experiment 20000439 PARAMETER Experiment Name: At_Roots__P Parameter: Age (day) Value: 14 vs. 21
  misc_feature: MA Experiment 20000439 PARAMETER Experiment Name: At_Roots__P Parameter: Organism Value: A. thaliana
  misc_feature: MA Experiment 20000439 PARAMETER Experiment Name: At_Roots__P Parameter: Tissue Value: Roots vs. Whole Plant
  misc_feature: MA Experiment ID: 20001248 Result: Down-regulated in Transcription
  misc_feature: MA Experiment 20001248 PARAMETER Experiment Name: At_Far-red-induction_P Parameter: Age (day) Value: 7
  misc_feature: MA Experiment 20001248 PARAMETER Experiment Name: At_Far-red-induction_P Parameter: Light Value: Far-red vs. White
  misc_feature: MA Experiment 20001248 PARAMETER Experiment Name: At_Far-red-induction_P Parameter: Organism Value: A. thaliana
  misc_feature: MA Experiment 20001248 PARAMETER Experiment Name: At_Far-red-induction_P Parameter: Plant Line Value: Columbia
  misc_feature: MA Experiment 20001248 PARAMETER Experiment Name: At_Far-red-induction_P Parameter: Timepoint (hr) Value: 4
  misc_feature: MA Experiment 20001248 PARAMETER Experiment Name: At_Far-red-induction_P Parameter: Tissue Value: Whole Plant
  misc_feature: MA Experiment ID: 20001557 Result: Down-regulated in Transcription
  misc_feature: MA Experiment 20001557 PARAMETER Experiment Name: At_Drought_Soil_Dry_P Parameter: Age (day) Value: 27
  misc_feature: MA Experiment 20001557 PARAMETER Experiment Name: At_Drought_Soil_Dry_P Parameter: Organism Value: A. thaliana
  misc_feature: MA Experiment 20001557 PARAMETER Experiment Name: At_Drought_Soil_Dry_P Parameter: Plant Line Value: WS
  misc_feature: MA Experiment 20001557 PARAMETER Experiment Name: At_Drought_Soil_Dry_P Parameter: Post Timepoint (hr) Value: 3
  misc_feature: MA Experiment 20001557 PARAMETER Experiment Name: At_Drought_Soil_Dry_P Parameter: Post-Treatment Value: Re-Water vs. No Drought
  misc_feature: MA Experiment 20001557 PARAMETER Experiment Name: At_Drought_Soil_Dry_P Parameter: Timepoint (day) Value: 13
  misc_feature: MA Experiment 20001557 PARAMETER Experiment Name: At_Drought_Soil_Dry_P Parameter: Treatment Value: Drought vs. No Drought
attctctgtttcgtgttccacttcacgattgagagaacactttcctaagtttatcaagaacatttcttttcaatttctcgattctttctggctcattctctcatctctgtttcatatctaaattattgattgagaattcgacttgtggaaatggcaacagttgcatcaaatctcgcttgtatcggaaaagtaacgatgtctagagctagttcaatggtaggatggaggttgcagataaattgcagaaagaaagagaaaggaagagatcagagtcattatccttacaaagtcattgaaatcactcctcctcctaaatctctcggcattcgttgccttcctcataaccttcaatgtggagagaacgtgatgatcgaagggcaaacgtacacaatctctgctgtgactcaccggtatcagctccggaaaggcaaatacgagccgagtgagaggcggctcgatgttctctctgctgctagatacgttttaaacctttacttcgacaatttgctccaaaactcctgacaacttttatttagctaaaaagtttggtctagaggattttcattgtatccatgaatgcttgtgaatttgttaagcaatgatttgtacttctct

SEQ ID NO: 81699 - protein, 123 aa, Arabidopsis thaliana
  peptide (1)..(123): Ceres Seq. ID no. 12660871
  misc_feature (1)..(123): Homolog of NCBI NO: 22327475 NR Description: hypothetical protein; protein id: At5g40500.1, by cDNA: gi_17644174 [Arabidopsis thaliana] unknown protein [Arabidopsis thaliana]
  misc_feature (26)..(123): Homolog of NCBI NO: 32488468 NR Description: OSJNBa0081L15.1 [Oryza sativa (japonica
MATVASNLACIGKVTMSRASSMVGWRLQINCRKKEKGRDQSHYPYKVIEITPPPKSLGIRCLPHNLQCGENVMIEGQTYTISAVTHRYQLRKGKYEPSERRLDVLSAARYVLNLYFDNLLQNS

SEQ ID NO: 81700 - protein, 108 aa, Arabidopsis thaliana
  peptide (1)..(108): Ceres Seq. ID no. 12660872
  misc_feature (1)..(108): Homolog of NCBI NO: 22327475 NR Description: hypothetical protein; protein id: At5g40500.1, by cDNA: gi_17644174 [Arabidopsis thaliana] unknown protein [Arabidopsis thaliana]
  misc_feature (11)..(108): Homolog of NCBI NO: 32488468 NR Description: OSJNBa0081L15.1 [Oryza sativa (japonica
MSRASSMVGWRLQINCRKKEKGRDQSHYPYKVIEITPPPKSLGIRCLPHNLQCGENVMIEGQTYTISAVTHRYQLRKGKYEPSERRLDVLSAARYVLNLYFDNLLQNS

SEQ ID NO: 81701 - protein, 102 aa, Arabidopsis thaliana
  peptide (1)..(102): Ceres Seq. ID no. 12660873
  misc_feature (1)..(102): Homolog of NCBI NO: 22327475 NR Description: hypothetical protein; protein id: At5g40500.1, by cDNA: gi_17644174 [Arabidopsis thaliana] unknown protein [Arabidopsis thaliana]
  misc_feature (5)..(102): Homolog of NCBI NO: 32488468 NR Description: OSJNBa0081L15.1 [Oryza sativa (japonica
MVGWRLQINCRKKEKGRDQSHYPYKVIEITPPPKSLGIRCLPHNLQCGENVMIEGQTYTISAVTHRYQLRKGKYEPSERRLDVLSAARYVLNLYFDNLLQNS

SEQ ID NO: 81702 - DNA, 1062 bp, Arabidopsis thaliana
  misc_feature (1)..(1062): Ceres Seq. ID no. 12660874
  misc_feature: MA Experiment ID: 20000179 Result: Up-regulated in Transcription
  misc_feature: MA Experiment 20000179 PARAMETER Experiment Name: At_Germinating_Seeds_P Parameter: Age (hr) Value: 6 vs. 0
  misc_feature: MA Experiment 20000179 PARAMETER Experiment Name: At_Germinating_Seeds_P Parameter: Tissue Value: Germinating Seeds
  misc_feature: MA Experiment ID: 20000182 Result: Up-regulated in Transcription
  misc_feature: MA Experiment 20000182 PARAMETER Experiment Name: At_2mM_SA_P Parameter: Age (day) Value: 14
  misc_feature: MA Experiment 20000182 PARAMETER Experiment Name: At_2mM_SA_P Parameter: Organism Value: A. thaliana
  misc_feature: MA Experiment 20000182 PARAMETER Experiment Name: At_2mM_SA_P Parameter: Plant Line Value: WS
  misc_feature: MA Experiment 20000182 PARAMETER Experiment Name: At_2mM_SA_P Parameter: Timepoint (hr) Value: 6
  misc_feature: MA Experiment 20000182 PARAMETER Experiment Name: At_2mM_SA_P Parameter: Tissue Value: Aerial
  misc_feature: MA Experiment 20000182 PARAMETER Experiment Name: At_2mM_SA_P Parameter: Treatment Value: 2mM SA vs. No Treatment
  misc_feature: MA Experiment ID: 20000185 Result: Up-regulated in Transcription
  misc_feature: MA Experiment 20000185 PARAMETER Experiment Name: At_Roots__P Parameter: Age (day) Value: 7 vs. 21
  misc_feature: MA Experiment 20000185 PARAMETER Experiment Name: At_Roots__P Parameter: Organism Value: A. thaliana
  misc_feature: MA Experiment 20000185 PARAMETER Experiment Name: At_Roots__P Parameter: Tissue Value: Roots vs. Whole Plant
  misc_feature: MA Experiment ID: 20000439 Result: Up-regulated in Transcription
  misc_feature: MA Experiment 20000439 PARAMETER Experiment Name: At_Roots__P Parameter: Age (day) Value: 14 vs. 21
  misc_feature: MA Experiment 20000439 PARAMETER Experiment Name: At_Roots__P Parameter: Organism Value: A. thaliana
  misc_feature: MA Experiment 20000439 PARAMETER Experiment Name: At_Roots__P Parameter: Tissue Value: Roots vs. Whole Plant
  misc_feature: MA Experiment ID: 20001451 Result: Down-regulated in Transcription
  misc_feature: MA Experiment 20001451 PARAMETER Experiment Name: At_Far-red-induction_P Parameter: Age (day) Value: 7
  misc_feature: MA Experiment 20001451 PARAMETER Experiment Name: At_Far-red-induction_P Parameter: Light Value: Far-red vs. White
  misc_feature: MA Experiment 20001451 PARAMETER Experiment Name: At_Far-red-induction_P Parameter: Organism Value: A. thaliana
  misc_feature: MA Experiment 20001451 PARAMETER Experiment Name: At_Far-red-induction_P Parameter: Plant Line Value: Columbia
  misc_feature: MA Experiment 20001451 PARAMETER Experiment Name: At_Far-red-induction_P Parameter: Timepoint (hr) Value: 24
  misc_feature: MA Experiment 20001451 PARAMETER Experiment Name: At_Far-red-induction_P Parameter: Tissue Value: Whole Plant
  misc_feature: MA Experiment ID: 20001557 Result: Up-regulated in Transcription
  misc_feature: MA Experiment 20001557 PARAMETER Experiment Name: At_Drought_Soil_Dry_P Parameter: Age (day) Value: 27
  misc_feature: MA Experiment 20001557 PARAMETER Experiment Name: At_Drought_Soil_Dry_P Parameter: Organism Value: A. thaliana
  misc_feature: MA Experiment 20001557 PARAMETER Experiment Name: At_Drought_Soil_Dry_P Parameter: Plant Line Value: WS
  misc_feature: MA Experiment 20001557 PARAMETER Experiment Name: At_Drought_Soil_Dry_P Parameter: Post Timepoint (hr) Value: 3
  misc_feature: MA Experiment 20001557 PARAMETER Experiment Name: At_Drought_Soil_Dry_P Parameter: Post-Treatment Value: Re-Water vs. No Drought
  misc_feature: MA Experiment 20001557 PARAMETER Experiment Name: At_Drought_Soil_Dry_P Parameter: Timepoint (day) Value: 13
  misc_feature: MA Experiment 20001557 PARAMETER Experiment Name: At_Drought_Soil_Dry_P Parameter: Treatment Value: Drought vs. No Drought
  misc_feature: MA Experiment ID: 20001558 Result: Up-regulated in Transcription
  misc_feature: MA Experiment 20001558 PARAMETER Experiment Name: At_Drought_Soil_Dry_P Parameter: Age (day) Value: 27
  misc_feature: MA Experiment 20001558 PARAMETER Experiment Name: At_Drought_Soil_Dry_P Parameter: Organism Value: A. thaliana
  misc_feature: MA Experiment 20001558 PARAMETER Experiment Name: At_Drought_Soil_Dry_P Parameter: Plant Line Value: WS
  misc_feature: MA Experiment 20001558 PARAMETER Experiment Name: At_Drought_Soil_Dry_P Parameter: Post Timepoint (hr) Value: 6
  misc_feature: MA Experiment 20001558 PARAMETER Experiment Name: At_Drought_Soil_Dry_P Parameter: Post-Treatment Value: Re-Water vs. No Drought
  misc_feature: MA Experiment 20001558 PARAMETER Experiment Name: At_Drought_Soil_Dry_P Parameter: Timepoint (day) Value: 13
  misc_feature: MA Experiment 20001558 PARAMETER Experiment Name: At_Drought_Soil_Dry_P Parameter: Treatment Value: Drought vs. No Drought
  misc_feature: MA Experiment ID: 20001560 Result: Up-regulated in Transcription
  misc_feature: MA Experiment 20001560 PARAMETER Experiment Name: At_Drought_Soil_Dry_P Parameter: Age (day) Value: 28
  misc_feature: MA Experiment 20001560 PARAMETER Experiment Name: At_Drought_Soil_Dry_P Parameter: Organism Value: A. thaliana
  misc_feature: MA Experiment 20001560 PARAMETER Experiment Name: At_Drought_Soil_Dry_P Parameter: Plant Line Value: WS
  misc_feature: MA Experiment 20001560 PARAMETER Experiment Name: At_Drought_Soil_Dry_P Parameter: Post Timepoint (hr) Value: None
  misc_feature: MA Experiment 20001560 PARAMETER Experiment Name: At_Drought_Soil_Dry_P Parameter: Post-Treatment Value: None
  misc_feature: MA Experiment 20001560 PARAMETER Experiment Name: At_Drought_Soil_Dry_P Parameter: Timepoint (day) Value: 14
  misc_feature: MA Experiment 20001560 PARAMETER Experiment Name: At_Drought_Soil_Dry_P Parameter: Treatment Value: Drought vs. No Drought
atgggatctgttactgggttttactcaaatgaagtgtttgaattagatcctaaatgggttgttgatcctcaacatctctttgttggtcccaagattggtgaaggtgctcatgccaaaatctatgaaggaaagtataagaacaaaacagttgctattaagattgttaaaagaggagaatctcccgaagagattgcgaaaagagagagcagatttgcaagagaggtctctatgttgtctagagttcaacacaaaaatttggtcaagttcattggagcttgcaaagaaccaatcatggttatagtcaccgagcttttactcggtggtacattgcgtaaataccttgttagcttgcgtccagggagtttggacatacgtgtagctgttggatatgcccttgacattgctcgggcgatggaatgcttacactctcatggagtcatccatcgcgatctcaaaccagagagcttgatcttaactgcggattacaagactgttaaactagcagattttggtttagctagagaagaatcattaaccgagatgatgaccgcagaaactggtacatatcgttggatggctcccgagctttacagtacggtcacgttgaggcatggtgagaaaaaacactataaccataaggtagatgcatacagcttcgccattgtcttgtgggagcttatccacaacaaattaccttttgaaggcatgtcaaatctccaagccgcttacgctgctgcattcaagaacgtgaggccaagcgcagacgatttaccaaaggatttagcaatgattgtaacatcttgctggaaagaggatccaaacgatcgaccaaacttcacagagattattcaaatgcttctacgttgcctctccacaatctcatcaactgagcttgttcctccggccattaaacgtgttttctcgtcggaaaacacggtcttgccaccagaatcgccgggaacttgctcattgatgactgttagagacaaagatcagattcctaccgatgcaaactcggcgcagaatgaagttagaggaagcttcttcttcttctgctgctaa

SEQ ID NO: 81703 - protein, 353 aa, Arabidopsis thaliana
  peptide (1)..(353): Ceres Seq. ID no. 12660875
  misc_feature (1)..(353): Homolog of NCBI NO: 15237443 NR Description: protein kinase - like protein; protein id: [Arabidopsis thaliana] >gi|9758080|dbj|BAB08524.1| protein kinase
  misc_feature (1)..(353): Homolog of NCBI NO: 2129698 NR Description: protein kinase ATN1 (EC 2.7.1.-) - Arabidopsis
  misc_feature (1)..(353): Homolog of NCBI NO: 15232197 NR Description: putative protein kinase, ATN1; protein id: supported by cDNA: gi_16604327, supported by cDNA: gi_19699189 thaliana] >gi|11994183|dbj|BAB01286.1| nearly identical to
  misc_feature (1)..(328): Homolog of NCBI NO: 32815816 NR Description: protein kinase [Cucumis sativus]
  misc_feature (1)..(351): Homolog of NCBI NO: 15240630 NR Description: protein kinase ATN1-like protein; protein id:
  misc_feature (15)..(293): Homolog of NCBI NO: 28876011 NR Description: putative protein kinase [Oryza sativa (japonica
  misc_feature (15)..(294): Homolog of NCBI NO: 30679428 NR Description: protein kinase, putative [Arabidopsis thaliana]
  misc_feature (88)..(294): Homolog of NCBI NO: 11259780 NR Description: protein kinase ATN1-like protein - Arabidopsis
  misc_feature (15)..(88): Homolog of NCBI NO: 11259780 NR Description: protein kinase ATN1-like protein - Arabidopsis
  misc_feature (9)..(312): Homolog of NCBI NO: 15240070 NR Description: protein kinase ATN1-like protein; protein id:
MGSVTGFYSNEVFELDPKWVVDPQHLFVGPKIGEGAHAKIYEGKYKNKTVAIKIVKRGESPEEIAKRESRFAREVSMLSRVQHKNLVKFIGACKEPIMVIVTELLLGGTLRKYLVSLRPGSLDIRVAVGYALDIARAMECLHSHGVIHRDLKPESLILTADYKTVKLADFGLAREESLTEMMTAETGTYRWMAPELYSTVTLRHGEKKHYNHKVDAYSFAIVLWELIHNKLPFEGMSNLQAAYAAAFKNVRPSADDLPKDLAMIVTSCWKEDPNDRPNFTEIIQMLLRCLSTISSTELVPPAIKRVFSSENTVLPPESPGTCSLMTVRDKDQIPTDANSAQNEVRGSFFFFCC

SEQ ID NO: 81704 - protein, 277 aa, Arabidopsis thaliana
  peptide (1)..(277): Ceres Seq. ID no. 12660876
  misc_feature (1)..(277): Homolog of NCBI NO: 15237443 NR Description: protein kinase - like protein; protein id: [Arabidopsis thaliana] >gi|9758080|dbj|BAB08524.1| protein kinase
  misc_feature (1)..(277): Homolog of NCBI NO: 2129698 NR Description: protein kinase ATN1 (EC 2.7.1.-) - Arabidopsis
  misc_feature (1)..(277): Homolog of NCBI NO: 15232197 NR Description: putative protein kinase, ATN1; protein id: supported by cDNA: gi_16604327, supported by cDNA: gi_19699189 thaliana] >gi|11994183|dbj|BAB01286.1| nearly identical to
  misc_feature (1)..(252): Homolog of NCBI NO: 32815816 NR Description: protein kinase [Cucumis sativus]
  misc_feature (1)..(275): Homolog of NCBI NO: 15240630 NR Description: protein kinase ATN1-like protein; protein id:
  misc_feature (1)..(217): Homolog of NCBI NO: 28876011 NR Description: putative protein kinase [Oryza sativa (japonica
  misc_feature (1)..(218): Homolog of NCBI NO: 30679428 NR Description: protein kinase, putative [Arabidopsis thaliana]
  misc_feature (12)..(218): Homolog of NCBI NO: 11259780 NR Description: protein kinase ATN1-like protein - Arabidopsis
  misc_feature (1)..(12): Homolog of NCBI NO: 11259780 NR Description: protein kinase ATN1-like protein - Arabidopsis
  misc_feature (1)..(236): Homolog of NCBI NO: 15240070 NR Description: protein kinase ATN1-like protein; protein id:
MLSRVQHKNLVKFIGACKEPIMVIVTELLLGGTLRKYLVSLRPGSLDIRVAVGYALDIARAMECLHSHGVIHRDLKPESLILTADYKTVKLADFGLAREESLTEMMTAETGTYRWMAPELYSTVTLRHGEKKHYNHKVDAYSFAIVLWELIHNKLPFEGMSNLQAAYAAAFKNVRPSADDLPKDLAMIVTSCWKEDPNDRPNFTEIIQMLLRCLSTISSTELVPPAIKRVFSSENTVLPPESPGTCSLMTVRDKDQIPTDANSAQNEVRGSFFFFCC

SEQ ID NO: 81705 - protein, 256 aa, Arabidopsis thaliana
  peptide (1)..(256): Ceres Seq. ID no. 12660877
  misc_feature (1)..(256): Homolog of NCBI NO: 15237443 NR Description: protein kinase - like protein; protein id: [Arabidopsis thaliana] >gi|9758080|dbj|BAB08524.1| protein kinase
  misc_feature (1)..(256): Homolog of NCBI NO: 2129698 NR Description: protein kinase ATN1 (EC 2.7.1.-) - Arabidopsis
  misc_feature (1)..(256): Homolog of NCBI NO: 15232197 NR Description: putative protein kinase, ATN1; protein id: supported by cDNA: gi_16604327, supported by cDNA: gi_19699189 thaliana] >gi|11994183|dbj|BAB01286.1| nearly identical to
  misc_feature (1)..(231): Homolog of NCBI NO: 32815816 NR Description: protein kinase [Cucumis sativus]
  misc_feature (1)..(254): Homolog of NCBI NO: 15240630 NR Description: protein kinase ATN1-like protein; protein id:
  misc_feature (1)..(196): Homolog of NCBI NO: 28876011 NR Description: putative protein kinase [Oryza sativa (japonica
  misc_feature (1)..(197): Homolog of NCBI NO: 30679428 NR Description: protein kinase, putative [Arabidopsis thaliana]
  misc_feature (1)..(197): Homolog of NCBI NO: 11259780 NR Description: protein kinase ATN1-like protein - Arabidopsis
  misc_feature (1)..(215): Homolog of NCBI NO: 15240070 NR Description: protein kinase ATN1-like protein; protein id:
  misc_feature (1)..(198): Homolog of NCBI NO: 15230296 NR Description: protein kinase ATN1 - like protein; protein id:
MVIVTELLLGGTLRKYLVSLRPGSLDIRVAVGYALDIARAMECLHSHGVIHRDLKPESLILTADYKTVKLADFGLAREESLTEMMTAETGTYRWMAPELYSTVTLRHGEKKHYNHKVDAYSFAIVLWELIHNKLPFEGMSNLQAAYAAAFKNVRPSADDLPKDLAMIVTSCWKEDPNDRPNFTEIIQMLLRCLSTISSTELVPPAIKRVFSSENTVLPPESPGTCSLMTVRDKDQIPTDANSAQNEVRGSFFFFCC

SEQ ID NO: 81706 - DNA, 813 bp, Arabidopsis thaliana
  misc_feature (1)..(813): Ceres Seq. ID no. 12660878
  misc_feature: MA Experiment ID: 20000173 Result: Down-regulated in Transcription
  misc_feature: MA Experiment 20000173 PARAMETER Experiment Name: At_42deg_Heat_P Parameter: Age (day) Value: 14
  misc_feature: MA Experiment 20000173 PARAMETER Experiment Name: At_42deg_Heat_P Parameter: Organism Value: A. thaliana
  misc_feature: MA Experiment 20000173 PARAMETER Experiment Name: At_42deg_Heat_P Parameter: Plant Line Value: WS
  misc_feature: MA Experiment 20000173 PARAMETER Experiment Name: At_42deg_Heat_P Parameter: Temperature (deg C) Value: 42 vs. 22
  misc_feature: MA Experiment 20000173 PARAMETER Experiment Name: At_42deg_Heat_P Parameter: Timepoint (hr) Value: 6
  misc_feature: MA Experiment 20000173 PARAMETER Experiment Name: At_42deg_Heat_P Parameter: Tissue Value: Aerial
  misc_feature: MA Experiment ID: 20000184 Result: Down-regulated in Transcription
  misc_feature: MA Experiment 20000184 PARAMETER Experiment Name: At_Shoots__P Parameter: Age (day) Value: 7
  misc_feature: MA Experiment 20000184 PARAMETER Experiment Name: At_Shoots__P Parameter: Tissue Value: Shoots vs. Whole Plant
  misc_feature: MA Experiment ID: 20001451 Result: Down-regulated in Transcription
  misc_feature: MA Experiment 20001451 PARAMETER Experiment Name: At_Far-red-induction_P Parameter: Age (day) Value: 7
  misc_feature: MA Experiment 20001451 PARAMETER Experiment Name: At_Far-red-induction_P Parameter: Light Value: Far-red vs. White
  misc_feature: MA Experiment 20001451 PARAMETER Experiment Name: At_Far-red-induction_P Parameter: Organism Value: A. thaliana
  misc_feature: MA Experiment 20001451 PARAMETER Experiment Name: At_Far-red-induction_P Parameter: Plant Line Value: Columbia
  misc_feature: MA Experiment 20001451 PARAMETER Experiment Name: At_Far-red-induction_P Parameter: Timepoint (hr) Value: 24
  misc_feature: MA Experiment 20001451 PARAMETER Experiment Name: At_Far-red-induction_P Parameter: Tissue Value: Whole Plant
atgtcgtcaccagacattgtcggaattttggaaaacacgaaggaacttgatcggttaaggaaagaccaagaagaagttttggttgagatcaataagatgcataaaaagcttcaagcttctcctgagatagttgagaagcctggtgatatttcattagcaaagcttaagaatttgtacattcaagcgaaagagctctcagaaaatgaagtaaccgtatcgaacattttgcttactcagttggatttgctgcttccatatggaccaacagggcagcaaagaagaaagttaggcgaaggtaatgatcagaagaggaagaggatgaaagttgattcagatgtaataagactttctccttccatgagaaatcaaatcgaagcatatgcaagtcttaagggtgaacaggttgctgcaagagttactgcagagagtgctgataaggatgaatggtttgtggttaaagttattcacttcgatagagaaacaaaagaagttgaagtacttgatgaagaaccaggagatgatgaagaaggaagcggtcagaggacctataagttgccaatgttatgcattttaccattcccaaagcgaaacgatccttcgaacacccaagagtttccaccgggtaaacacgtcttagctgtatatcccgggacaacagcactctacaaagcaactgtagtaagtaccccacgaaagaggaagtctgacgagtatttgcttgaattcgacgatgatgaggaagatggagcattgcctcaaagaacagtacctttccacaaagtggtagctttaccagaaggtcatcgccagtga

SEQ ID NO: 81707 - protein, 270 aa, Arabidopsis thaliana
  peptide (1)..(270): Ceres Seq. ID no. 12660879
  misc_feature (1)..(270): Homolog of NCBI NO: 30693623 NR Description: expressed protein [Arabidopsis thaliana]
  misc_feature (1)..(232): Homolog of NCBI NO: 9758081 NR Description: dbj|BAA95721.1~gene_id:MNF13.7~strong similarity
  misc_feature (238)..(270): Homolog of NCBI NO: 9758081 NR Description: dbj|BAA95721.1~gene_id:MNF13.7~strong similarity
  misc_feature (2)..(270): Homolog of NCBI NO: 22331369 NR Description: hypothetical protein; protein id: At3g27460.1, by cDNA: gi_19347734 [Arabidopsis thaliana] unknown protein [Arabidopsis thaliana]
  misc_feature (2)..(270): Homolog of NCBI NO: 7939518 NR Description: gene_id:K1G2.17~unknown protein [Arabidopsis
  misc_feature (127)..(266): Homolog of NCBI NO: 34859208 NR Description: similar to hypothetical protein BC011981 [Rattus
  misc_feature (127)..(266): Homolog of NCBI NO: 19923935 NR Description: hypothetical protein BC011981 [Homo sapiens]
  misc_feature (127)..(266): Homolog of NCBI NO: 16552568 NR Description: unnamed protein product [Homo sapiens]
MSSPDIVGILENTKELDRLRKDQEEVLVEINKMHKKLQASPEIVEKPGDISLAKLKNLYIQAKELSENEVTVSNILLTQLDLLLPYGPTGQQRRKLGEGNDQKRKRMKVDSDVIRLSPSMRNQIEAYASLKGEQVAARVTAESADKDEWFVVKVIHFDRETKEVEVLDEEPGDDEEGSGQRTYKLPMLCILPFPKRNDPSNTQEFPPGKHVLAVYPGTTALYKATVVSTPRKRKSDEYLLEFDDDEEDGALPQRTVPFHKVVALPEGHRQ

SEQ ID NO: 81708 - protein, 238 aa, Arabidopsis thaliana
  peptide (1)..(238): Ceres Seq. ID no. 12660880
  misc_feature (1)..(238): Homolog of NCBI NO: 30693623 NR Description: expressed protein [Arabidopsis thaliana]
  misc_feature (1)..(200): Homolog of NCBI NO: 9758081 NR Description: dbj|BAA95721.1~gene_id:MNF13.7~strong similarity
  misc_feature (206)..(238): Homolog of NCBI NO: 9758081 NR Description: dbj|BAA95721.1~gene_id:MNF13.7~strong similarity
  misc_feature (1)..(238): Homolog of NCBI NO: 22331369 NR Description: hypothetical protein; protein id: At3g27460.1, by cDNA: gi_19347734 [Arabidopsis thaliana] unknown protein [Arabidopsis thaliana]
  misc_feature (1)..(238): Homolog of NCBI NO: 7939518 NR Description: gene_id:K1G2.17~unknown protein [Arabidopsis
  misc_feature (95)..(234): Homolog of NCBI NO: 34859208 NR Description: similar to hypothetical protein BC011981 [Rattus
  misc_feature (95)..(234): Homolog of NCBI NO: 19923935 NR Description: hypothetical protein BC011981 [Homo sapiens]
  misc_feature (95)..(234): Homolog of NCBI NO: 16552568 NR Description: unnamed protein product [Homo sapiens]
MHKKLQASPEIVEKPGDISLAKLKNLYIQAKELSENEVTVSNILLTQLDLLLPYGPTGQQRRKLGEGNDQKRKRMKVDSDVIRLSPSMRNQIEAYASLKGEQVAARVTAESADKDEWFVVKVIHFDRETKEVEVLDEEPGDDEEGSGQRTYKLPMLCILPFPKRNDPSNTQEFPPGKHVLAVYPGTTALYKATVVSTPRKRKSDEYLLEFDDDEEDGALPQRTVPFHKVVALPEGHRQ

SEQ ID NO: 81709 - protein, 164 aa, Arabidopsis thaliana
  peptide (1)..(164): Ceres Seq. ID no. 12660881
  misc_feature (1)..(164): Homolog of NCBI NO: 30693623 NR Description: expressed protein [Arabidopsis thaliana]
  misc_feature (1)..(126): Homolog of NCBI NO: 9758081 NR Description: dbj|BAA95721.1~gene_id:MNF13.7~strong similarity
  misc_feature (132)..(164): Homolog of NCBI NO: 9758081 NR Description: dbj|BAA95721.1~gene_id:MNF13.7~strong similarity
  misc_feature (1)..(164): Homolog of NCBI NO: 22331369 NR Description: hypothetical protein; protein id: At3g27460.1, by cDNA: gi_19347734 [Arabidopsis thaliana] unknown protein [Arabidopsis thaliana]
  misc_feature (1)..(164): Homolog of NCBI NO: 7939518 NR Description: gene_id:K1G2.17~unknown protein [Arabidopsis
  misc_feature (21)..(160): Homolog of NCBI NO: 34859208 NR Description: similar to hypothetical protein BC011981 [Rattus
  misc_feature (21)..(160): Homolog of NCBI NO: 19923935 NR Description: hypothetical protein BC011981 [Homo sapiens]
  misc_feature (21)..(160): Homolog of NCBI NO: 16552568 NR Description: unnamed protein product [Homo sapiens]
MKVDSDVIRLSPSMRNQIEAYASLKGEQVAARVTAESADKDEWFVVKVIHFDRETKEVEVLDEEPGDDEEGSGQRTYKLPMLCILPFPKRNDPSNTQEFPPGKHVLAVYPGTTALYKATVVSTPRKRKSDEYLLEFDDDEEDGALPQRTVPFHKVVALPEGHRQ

SEQ ID NO: 81710 - DNA, 912 bp, Arabidopsis thaliana
  misc_feature (1)..(912): Ceres Seq. ID no. 12660901
  misc_feature: MA Experiment ID: 20000171 Result: Up-regulated in Transcription
  misc_feature: MA Experiment 20000171 PARAMETER Experiment Name: At_42deg_Heat_P Parameter: Age (day) Value: 14
  misc_feature: MA Experiment 20000171 PARAMETER Experiment Name: At_42deg_Heat_P Parameter: Organism Value: A. thaliana
  misc_feature: MA Experiment 20000171 PARAMETER Experiment Name: At_42deg_Heat_P Parameter: Plant Line Value: WS
  misc_feature: MA Experiment 20000171 PARAMETER Experiment Name: At_42deg_Heat_P Parameter: Temperature (deg C) Value: 42 vs. 22
  misc_feature: MA Experiment 20000171 PARAMETER Experiment Name: At_42deg_Heat_P Parameter: Timepoint (hr) Value: 1
  misc_feature: MA Experiment 20000171 PARAMETER Experiment Name: At_42deg_Heat_P Parameter: Tissue Value: Aerial
  misc_feature: MA Experiment ID: 20001555 Result: Up-regulated in Transcription
  misc_feature: MA Experiment 20001555 PARAMETER Experiment Name: At_Drought_Soil_Dry_P Parameter: Age (day) Value: 24
  misc_feature: MA Experiment 20001555 PARAMETER Experiment Name: At_Drought_Soil_Dry_P Parameter: Organism Value: A. thaliana
  misc_feature: MA Experiment 20001555 PARAMETER Experiment Name: At_Drought_Soil_Dry_P Parameter: Plant Line Value: WS
  misc_feature: MA Experiment 20001555 PARAMETER Experiment Name: At_Drought_Soil_Dry_P Parameter: Post Timepoint (hr) Value: None
  misc_feature: MA Experiment 20001555 PARAMETER Experiment Name: At_Drought_Soil_Dry_P Parameter: Post-Treatment Value: None
  misc_feature: MA Experiment 20001555 PARAMETER Experiment Name: At_Drought_Soil_Dry_P Parameter: Timepoint (day) Value: 10
  misc_feature: MA Experiment 20001555 PARAMETER Experiment Name: At_Drought_Soil_Dry_P Parameter: Treatment Value: Drought vs. No Drought
  misc_feature: MA Experiment ID: 20001905 Result: Up-regulated in Transcription
  misc_feature: MA Experiment 20001905 PARAMETER Experiment Name: At_Drought_Reproduction_P Parameter: Age (day) Value: 40
  misc_feature: MA Experiment 20001905 PARAMETER Experiment Name: At_Drought_Reproduction_P Parameter: Organism Value: A. thaliana
  misc_feature: MA Experiment 20001905 PARAMETER Experiment Name: At_Drought_Reproduction_P Parameter: Plant Line Value: WS
  misc_feature: MA Experiment 20001905 PARAMETER Experiment Name: At_Drought_Reproduction_P Parameter: Timepoint (day) Value: 10
  misc_feature: MA Experiment 20001905 PARAMETER Experiment Name: At_Drought_Reproduction_P Parameter: Tissue Value: Rosettes
  misc_feature: MA Experiment 20001905 PARAMETER Experiment Name: At_Drought_Reproduction_P Parameter: Treatment Value: Drought vs. No Drought
atgcatggcaacggaaagcagtgtcaagcttctatttgcgacggtgcaacagatcaggacaagaccgttataagcaagataatgcaacggttccgtccgatcgcaccaaaaccagctgtcggcgaatcttcagacgatacaaatagtgatagattccttggaagaaacagaagatcgaaacgaaagtatgttagggttcgggacaagaaaaatagtagtggtagtaataataagaaggatattactggtaaaaagaatggttgcgatagagggaacataaagaccgatcttgataaaaagatagacggtgatgatagaaccgatatcgtcacgcttcagctgctgccagagaaggatagagatataggaaacaatggagataaagctggtgagttttgttcggatctgagtgatatggatccaaaaaagagcttgtataattcgatcatagggctatcgtcatcttttgatcggaaggtggtggagtcgtggttgacggtggagtgtgtgagtgacacgtgtactgacttgggatggtatcacatcctggagcagctaggccgcatggatcaggcagaggagagagtgatgaggatgttagaggttgacacgtgtccatggttagtgtcggatgggtcaaaccgggtctgttgggtaaaccgggcctaccggaggatgatgggagctcccgacgtggatgttatcagggtgtggctggtggtggccatggaccttatggaggagatagcatgcatggtggagttatacggtgcggtgacgtgcagggttagggttaggtacgagccgtccacgtggaggaagatgacggtgccgtgtgatgtatggaggataagatcaggtgggtttgcttggagattggatgttgaatcagctctaaggcttggcatgtga

SEQ ID NO: 81711 - protein, 303 aa, Arabidopsis thaliana
  peptide (1)..(303): Ceres Seq. ID no. 12660902
  misc_feature (1)..(303): Homolog of NCBI NO: 15237494 NR Description: putative protein; protein id: At5g40790.1 thaliana] >gi|10177958|dbj|BAB11341.1|
  misc_feature (1)..(302): Homolog of NCBI NO: 15240662 NR Description: putative protein; protein id: At5g50360.1, by cDNA: 103870., supported by cDNA: gi_13878116, supported by gi_17104788 [Arabidopsis thaliana] >gi|9758918|dbj|BAB09455.1|
  misc_feature (66)..(301): Homolog of NCBI NO: 15232126 NR Description: hypothetical protein; protein id: At3g27250.1 thaliana] >gi|9294218|dbj|BAB02120.1|
  misc_feature (1)..(301): Homolog of NCBI NO: 18408645 NR Description: expressed protein; protein id: At3g48510.1, by cDNA: 124275. [Arabidopsis thaliana] >gi|11280671|pir||T46195
  misc_feature (1)..(301): Homolog of NCBI NO: 21537225 NR Description: unknown [Arabidopsis thaliana]
  misc_feature (1)..(301): Homolog of NCBI NO: 15242729 NR Description: putative protein; protein id: At5g63350.1 thaliana] >gi|10177443|dbj|BAB10739.1| to unknown protein [Arabidopsis thaliana]
  misc_feature (71)..(301): Homolog of NCBI NO: 15237495 NR Description: putative protein; protein id: At5g40800.1 thaliana] >gi|10177959|dbj|BAB11342.1|
  misc_feature (19)..(174): Homolog of NCBI NO: 15232126 NR Description: hypothetical protein; protein id: At3g27250.1 thaliana] >gi|9294218|dbj|BAB02120.1|
MHGNGKQCQASICDGATDQDKTVISKIMQRFRPIAPKPAVGESSDDTNSDRFLGRNRRSKRKYVRVRDKKNSSGSNNKKDITGKKNGCDRGNIKTDLDKKIDGDDRTDIVTLQLLPEKDRDIGNNGDKAGEFCSDLSDMDPKKSLYNSIIGLSSSFDRKVVESWLTVECVSDTCTDLGWYHILEQLGRMDQAEERVMRMLEVDTCPWLVSDGSNRVCWVNRAYRRMMGAPDVDVIRVWLVVAMDLMEEIACMVELYGAVTCRVRVRYEPSTWRKMTVPCDVWRIRSGGFAWRLDVESALRLGM

SEQ ID NO: 81712 - protein, 276 aa, Arabidopsis thaliana
  peptide (1)..(276): Ceres Seq. ID no. 12660903
  misc_feature (1)..(276): Homolog of NCBI NO: 15237494 NR Description: putative protein; protein id: At5g40790.1 thaliana] >gi|10177958|dbj|BAB11341.1|
  misc_feature (1)..(275): Homolog of NCBI NO: 15240662 NR Description: putative protein; protein id: At5g50360.1, by cDNA: 103870., supported by cDNA: gi_13878116, supported by gi_17104788 [Arabidopsis thaliana] >gi|9758918|dbj|BAB09455.1|
  misc_feature (39)..(274): Homolog of NCBI NO: 15232126 NR Description: hypothetical protein; protein id: At3g27250.1 thaliana] >gi|9294218|dbj|BAB02120.1|
  misc_feature (1)..(274): Homolog of NCBI NO: 18408645 NR Description: expressed protein; protein id: At3g48510.1, by cDNA: 124275. [Arabidopsis thaliana] >gi|11280671|pir||T46195
  misc_feature (1)..(274): Homolog of NCBI NO: 21537225 NR Description: unknown [Arabidopsis thaliana]
  misc_feature (1)..(274): Homolog of NCBI NO: 15242729 NR Description: putative protein; protein id: At5g63350.1 thaliana] >gi|10177443|dbj|BAB10739.1| to unknown protein [Arabidopsis thaliana]
  misc_feature (44)..(274): Homolog of NCBI NO: 15237495 NR Description: putative protein; protein id: At5g40800.1 thaliana] >gi|10177959|dbj|BAB11342.1|
  misc_feature (1)..(147): Homolog of NCBI NO: 15232126 NR Description: hypothetical protein; protein id: At3g27250.1 thaliana] >gi|9294218|dbj|BAB02120.1|
MQRFRPIAPKPAVGESSDDTNSDRFLGRNRRSKRKYVRVRDKKNSSGSNNKKDITGKKNGCDRGNIKTDLDKKIDGDDRTDIVTLQLLPEKDRDIGNNGDKAGEFCSDLSDMDPKKSLYNSIIGLSSSFDRKVVESWLTVECVSDTCTDLGWYHILEQLGRMDQAEERVMRMLEVDTCPWLVSDGSNRVCWVNRAYRRMMGAPDVDVIRVWLVVAMDLMEEIACMVELYGAVTCRVRVRYEPSTWRKMTVPCDVWRIRSGGFAWRLDVESALRLGM

SEQ ID NO: 81713 - protein, 165 aa, Arabidopsis thaliana
  peptide (1)..(165): Ceres Seq. ID no. 12660904
  misc_feature (1)..(165): Homolog of NCBI NO: 15237494 NR Description: putative protein; protein id: At5g40790.1 thaliana] >gi|10177958|dbj|BAB11341.1|
  misc_feature (1)..(164): Homolog of NCBI NO: 15240662 NR Description: putative protein; protein id: At5g50360.1, by cDNA: 103870., supported by cDNA: gi_13878116, supported by gi_17104788 [Arabidopsis thaliana] >gi|9758918|dbj|BAB09455.1|
  misc_feature (1)..(163): Homolog of NCBI NO: 15232126 NR Description: hypothetical protein; protein id: At3g27250.1 thaliana] >gi|9294218|dbj|BAB02120.1|
  misc_feature (1)..(163): Homolog of NCBI NO: 18408645 NR Description: expressed protein; protein id: At3g48510.1, by cDNA: 124275. [Arabidopsis thaliana] >gi|11280671|pir||T46195
  misc_feature (1)..(163): Homolog of NCBI NO: 21537225 NR Description: unknown [Arabidopsis thaliana]
  misc_feature (1)..(163): Homolog of NCBI NO: 15242729 NR Description: putative protein; protein id: At5g63350.1 thaliana] >gi|10177443|dbj|BAB10739.1| to unknown protein [Arabidopsis thaliana]
  misc_feature (1)..(163): Homolog of NCBI NO: 15237495 NR Description: putative protein; protein id: At5g40800.1 thaliana] >gi|10177959|dbj|BAB11342.1|
  misc_feature (1)..(36): Homolog of NCBI NO: 15232126 NR Description: hypothetical protein; protein id: At3g27250.1 thaliana] >gi|9294218|dbj|BAB02120.1|
MDPKKSLYNSIIGLSSSFDRKVVESWLTVECVSDTCTDLGWYHILEQLGRMDQAEERVMRMLEVDTCPWLVSDGSNRVCWVNRAYRRMMGAPDVDVIRVWLVVAMDLMEEIACMVELYGAVTCRVRVRYEPSTWRKMTVPCDVWRIRSGGFAWRLDVESALRLGM

SEQ ID NO: 81714 - DNA, 696 bp, Arabidopsis thaliana
  misc_feature (1)..(696): Ceres Seq. ID no. 12660930
  misc_feature: MA Experiment ID: 20000173 Result: Down-regulated in Transcription
  misc_feature: MA Experiment 20000173 PARAMETER Experiment Name: At_42deg_Heat_P Parameter: Age (day) Value: 14
  misc_feature: MA Experiment 20000173 PARAMETER Experiment Name: At_42deg_Heat_P Parameter: Organism Value: A. thaliana
  misc_feature: MA Experiment 20000173 PARAMETER Experiment Name: At_42deg_Heat_P Parameter: Plant Line Value: WS
  misc_feature: MA Experiment 20000173 PARAMETER Experiment Name: At_42deg_Heat_P Parameter: Temperature (deg C) Value: 42 vs. 22
  misc_feature: MA Experiment 20000173 PARAMETER Experiment Name: At_42deg_Heat_P Parameter: Timepoint (hr) Value: 6
  misc_feature: MA Experiment 20000173 PARAMETER Experiment Name: At_42deg_Heat_P Parameter: Tissue Value: Aerial
  misc_feature: MA Experiment ID: 20001247 Result: Down-regulated in Transcription
  misc_feature: MA Experiment 20001247 PARAMETER Experiment Name: At_Far-red-induction_P Parameter: Age (day) Value: 7
  misc_feature: MA Experiment 20001247 PARAMETER Experiment Name: At_Far-red-induction_P Parameter: Light Value: Far-red vs. White
  misc_feature: MA Experiment 20001247 PARAMETER Experiment Name: At_Far-red-induction_P Parameter: Organism Value: A. thaliana
  misc_feature: MA Experiment 20001247 PARAMETER Experiment Name: At_Far-red-induction_P Parameter: Plant Line Value: Columbia
  misc_feature: MA Experiment 20001247 PARAMETER Experiment Name: At_Far-red-induction_P Parameter: Timepoint (hr) Value: 1
  misc_feature: MA Experiment 20001247 PARAMETER Experiment Name: At_Far-red-induction_P Parameter: Tissue Value: Whole Plant
  misc_feature: MA Experiment ID: 20001554 Result: Down-regulated in Transcription
  misc_feature: MA Experiment 20001554 PARAMETER Experiment Name: At_Drought_Soil_Dry_P Parameter: Age (day) Value: 21
  misc_feature: MA Experiment 20001554 PARAMETER Experiment Name: At_Drought_Soil_Dry_P Parameter: Organism Value: A. thaliana
  misc_feature: MA Experiment 20001554 PARAMETER Experiment Name: At_Drought_Soil_Dry_P Parameter: Plant Line Value: WS
  misc_feature: MA Experiment 20001554 PARAMETER Experiment Name: At_Drought_Soil_Dry_P Parameter: Post Timepoint (hr) Value: None
  misc_feature: MA Experiment 20001554 PARAMETER Experiment Name: At_Drought_Soil_Dry_P Parameter: Post-Treatment Value: None
  misc_feature: MA Experiment 20001554 PARAMETER Experiment Name: At_Drought_Soil_Dry_P Parameter: Timepoint (day) Value: 7
  misc_feature: MA Experiment 20001554 PARAMETER Experiment Name: At_Drought_Soil_Dry_P Parameter: Treatment Value: Drought vs. No Drought
  misc_feature: MA Experiment ID: 20001560 Result: Up-regulated in Transcription
  misc_feature: MA Experiment 20001560 PARAMETER Experiment Name: At_Drought_Soil_Dry_P Parameter: Age (day) Value: 28
  misc_feature: MA Experiment 20001560 PARAMETER Experiment Name: At_Drought_Soil_Dry_P Parameter: Organism Value: A. thaliana
  misc_feature: MA Experiment 20001560 PARAMETER Experiment Name: At_Drought_Soil_Dry_P Parameter: Plant Line Value: WS
  misc_feature: MA Experiment 20001560 PARAMETER Experiment Name: At_Drought_Soil_Dry_P Parameter: Post Timepoint (hr) Value: None
  misc_feature: MA Experiment 20001560 PARAMETER Experiment Name: At_Drought_Soil_Dry_P Parameter: Post-Treatment Value: None
  misc_feature: MA Experiment 20001560 PARAMETER Experiment Name: At_Drought_Soil_Dry_P Parameter: Timepoint (day) Value: 14
  misc_feature: MA Experiment 20001560 PARAMETER Experiment Name: At_Drought_Soil_Dry_P Parameter: Treatment Value: Drought vs. No Drought
atgccttcgatgccagaggaaccaatcctaacaccaacaccagatcgattctgtatgttcccaatccaatacccacagatttgggagatgtacaagaaagccgaagcatccttctggacagccgaagaagtcgatctctctcaagacaatcgcgactgggaaaactcactaaccaacgacgaacgtcacttcattaaacacgtcctcgccttcttcgccgcatcagacggaatcgttctcgagaatctctcaactagattcatgtccgatgttcagatctcagaagctcgtgccttctacggattccaaatcgcgattgagaatattcactccgagattcttcttagaactaagtttgatgaagatcgtttgaaagcgattgtttgtgatgctgttgagattgagagagagtttgtttgtgacgcgctttcttgtgccttggttgggatgaatcgtgagttgatgagtcagtacattgagttcgttgctgataggttgttggctgcgcttgggtgtggtaaggtgtatggtgtgactaatccttttgattggatggaattgatttcgcttcagggtaagaccaacttttttgagaagagagttggtgagtatcagaaagcttctgttatgtctagtgttcatggaaacgctgcgtttaatgatgatcatgtcttcaagcttgacgaggatttttag

SEQ ID NO: 81715 - protein, 231 aa, Arabidopsis thaliana
  peptide (1)..(231): Ceres Seq. ID no. 12660931
  misc_feature (7)..(122): Pfam Name: Ribonucleotide reductase, small chain Pfam Description: Ribonucleotide reductase, small chain
  misc_feature (1)..(231): Homolog of NCBI NO: 22327485 NR Description: similar to ribonucleoside-diphosphate reductase
  misc_feature (1)..(133): Homolog of NCBI NO: 1710401 NR Description: RIBONUCLEOSIDE-DIPHOSPHATE REDUCTASE SMALL CHAIN
  misc_feature (114)..(231): Homolog of NCBI NO: 1710401 NR Description: RIBONUCLEOSIDE-DIPHOSPHATE REDUCTASE SMALL CHAIN
  misc_feature (6)..(122): Homolog of NCBI NO: 34898038 NR Description: putative ribonucleoside-diphosphate reductase
  misc_feature (114)..(231): Homolog of NCBI NO: 34898038 NR Description: putative ribonucleoside-diphosphate reductase
MPSMPEEPILTPTPDRFCMFPIQYPQIWEMYKKAEASFWTAEEVDLSQDNRDWENSLTNDERHFIKHVLAFFAASDGIVLENLSTRFMSDVQISEARAFYGFQIAIENIHSEILLRTKFDEDRLKAIVCDAVEIEREFVCDALSCALVGMNRELMSQYIEFVADRLLAALGCGKVYGVTNPFDWMELISLQGKTNFFEKRVGEYQKASVMSSVHGNAAFNDDHVFKLDEDF

SEQ ID NO: 81716 - protein, 228 aa, Arabidopsis thaliana
  peptide (1)..(228): Ceres Seq. ID no. 12660932
  misc_feature (4)..(119): Pfam Name: Ribonucleotide reductase, small chain Pfam Description: Ribonucleotide reductase, small chain
  misc_feature (1)..(228): Homolog of NCBI NO: 22327485 NR Description: similar to ribonucleoside-diphosphate reductase
  misc_feature (1)..(130): Homolog of NCBI NO: 1710401 NR Description: RIBONUCLEOSIDE-DIPHOSPHATE REDUCTASE SMALL CHAIN
  misc_feature (111)..(228): Homolog of NCBI NO: 1710401 NR Description: RIBONUCLEOSIDE-DIPHOSPHATE REDUCTASE SMALL CHAIN
  misc_feature (3)..(119): Homolog of NCBI NO: 34898038 NR Description: putative ribonucleoside-diphosphate reductase
  misc_feature (111)..(228): Homolog of NCBI NO: 34898038 NR Description: putative ribonucleoside-diphosphate reductase
MPEEPILTPTPDRFCMFPIQYPQIWEMYKKAEASFWTAEEVDLSQDNRDWENSLTNDERHFIKHVLAFFAASDGIVLENLSTRFMSDVQISEARAFYGFQIAIENIHSEILLRTKFDEDRLKAIVCDAVEIEREFVCDALSCALVGMNRELMSQYIEFVADRLLAALGCGKVYGVTNPFDWMELISLQGKTNFFEKRVGEYQKASVMSSVHGNAAFNDDHVFKLDEDF

SEQ ID NO: 81717 - protein, 213 aa, Arabidopsis thaliana
  peptide (1)..(213): Ceres Seq. ID no. 12660933
  misc_feature (1)..(104): Pfam Name: Ribonucleotide reductase, small chain Pfam Description: Ribonucleotide reductase, small chain
  misc_feature (1)..(213): Homolog of NCBI NO: 22327485 NR Description: similar to ribonucleoside-diphosphate reductase
  misc_feature (1)..(115): Homolog of NCBI NO: 1710401 NR Description: RIBONUCLEOSIDE-DIPHOSPHATE REDUCTASE SMALL CHAIN
  misc_feature (96)..(213): Homolog of NCBI NO: 1710401 NR Description: RIBONUCLEOSIDE-DIPHOSPHATE REDUCTASE SMALL CHAIN
  misc_feature (1)..(104): Homolog of NCBI NO: 34898038 NR Description: putative ribonucleoside-diphosphate reductase
  misc_feature (96)..(213): Homolog of NCBI NO: 34898038 NR Description: putative ribonucleoside-diphosphate reductase
MFPIQYPQIWEMYKKAEASFWTAEEVDLSQDNRDWENSLTNDERHFIKHVLAFFAASDGIVLENLSTRFMSDVQISEARAFYGFQIAIENIHSEILLRTKFDEDRLKAIVCDAVEIEREFVCDALSCALVGMNRELMSQYIEFVADRLLAALGCGKVYGVTNPFDWMELISLQGKTNFFEKRVGEYQKASVMSSVHGNAAFNDDHVFKLDEDF

SEQ ID NO: 81718 - DNA, 1077 bp, Arabidopsis thaliana
  misc_feature (1)..(1077): Ceres Seq. ID no. 12660961
  misc_feature: MA Experiment ID: 20000328 Result: Down-regulated in Transcription
  misc_feature: MA Experiment 20000328 PARAMETER Experiment Name: At_42deg_Heat_Sub_P Parameter: Age (day) Value: 14
  misc_feature: MA Experiment 20000328 PARAMETER Experiment Name: At_42deg_Heat_Sub_P Parameter: Organism Value: A. thaliana
  misc_feature: MA Experiment 20000328 PARAMETER Experiment Name: At_42deg_Heat_Sub_P Parameter: Plant Line Value: WS
  misc_feature: MA Experiment 20000328 PARAMETER Experiment Name: At_42deg_Heat_Sub_P Parameter: Temperature (deg C) Value: 42 vs. 22
  misc_feature: MA Experiment 20000328 PARAMETER Experiment Name: At_42deg_Heat_Sub_P Parameter: Timepoint (hr) Value: 6
  misc_feature: MA Experiment 20000328 PARAMETER Experiment Name: At_42deg_Heat_Sub_P Parameter: Tissue Value: Aerial
  misc_feature: MA Experiment ID: 20000347 Result: Up-regulated in Transcription
  misc_feature: MA Experiment 20000347 PARAMETER Experiment Name: At_2mM_SA_Sub_P Parameter: Age (day) Value: 14
  misc_feature: MA Experiment 20000347 PARAMETER Experiment Name: At_2mM_SA_Sub_P Parameter: Organism Value: A. thaliana
  misc_feature: MA Experiment 20000347 PARAMETER Experiment Name: At_2mM_SA_Sub_P Parameter: Plant Line Value: WS
  misc_feature: MA Experiment 20000347 PARAMETER Experiment Name: At_2mM_SA_Sub_P Parameter: Timepoint (hr) Value: 6
  misc_feature: MA Experiment 20000347 PARAMETER Experiment Name: At_2mM_SA_Sub_P Parameter: Tissue Value: Aerial
  misc_feature: MA Experiment 20000347 PARAMETER Experiment Name: At_2mM_SA_Sub_P Parameter: Treatment Value: 2mM SA vs. No Treatment
atgttgctgcttaaggaagaagatgaaggaagacgaagaactagtgttcctacacaactcatgaaactaaatagaagccaatggtggattcttgttttcataagcatcttctttctcatctctgctcaagccatttctgttcttcttggtcggttttattacaatgaaggtggaaacagtaaatggatctctactcttgttcaaactggtggctttcccattctttatctccctctttctctccttcctgcttcacaatcttcttcttcttcttcttcttcttcttctttcaagactctggtttggatttatctttctcttggttttgctattggtttagataattttttatactctgttggacttttgtatctctctgcttcaacttattcgattctatgtgcttcacagttagctttcaatggtgtcttctattattacatcaattctcagaaaatcacttgtttgattttcttctcagtgttgtttctctctatctctgctgtgttggtttctcttgacgatgattcaaatagcccatcaggagattctaagtggagttacttgattgggtgtttctgtgcagtttttgcttctcttatctattctcttcagctctctcttatgcagttttctttcgagaaggttctcaagagtgagactctctctatggttctcgagatgcaaatctatacgtcgcttgtggcttcttgtgtagcggttatcggattgttcgcaagcggggaatggatgttgttgagtgtggagatggaagagtttcaggaaggtcaagtcatttatgttttgactttggtcggggcagcggtttcgtgtcaattgggttgtgtaggagccgtgtcgcttatatttctggtgtcttcgctgttttcaaaccttattagtacgctctcactcattgttacgcctctcgcggccattgcggtgttccatgacaagctgactgaggttaagatggtggcgatgcccatcgccttcacaggattcacgttttatatctaccagaactatcttgatgacttgaaagtacaaagagcacgagaagctcaggccgaatga

SEQ ID NO: 81719 - protein, 358 aa, Arabidopsis thaliana
  peptide (1)..(358): Ceres Seq. ID no. 12660962
  misc_feature (174)..(356): Pfam Name: Domain of unknown function, DUF250 Pfam Description: Domain of unknown function, DUF250
  misc_feature (1)..(358): Homolog of NCBI NO: 15237573 NR Description: purine permease-like protein; protein id:
  misc_feature (1)..(358): Homolog of NCBI NO: 18413147 NR Description: putative protein; protein id: At4g08700.1, by cDNA: 38901., supported by cDNA: gi_20465910 [Arabidopsis >gi|18491201|gb|AAL69503.1| unknown protein [Arabidopsis
  misc_feature (1)..(358): Homolog of NCBI NO: 25407443 NR Description: hypothetical protein AT4g08700 [imported] - thaliana >gi|7267512|emb|CAB77995.1| putative protein thaliana] >gi|7321059|emb|CAB82106.1| putative protein
  misc_feature (2)..(357): Homolog of NCBI NO: 15219436 NR Description: hypothetical protein; protein id: At1g44750.1, by cDNA: gi_17065411 [Arabidopsis thaliana]
  misc_feature (27)..(352): Homolog of NCBI NO: 38605752 NR Description: OSJNBb0016D16.5 [Oryza sativa (japonica
  misc_feature (27)..(352): Homolog of NCBI NO: 38344290 NR Description: OSJNBa0013K16.22 [Oryza sativa (japonica
  misc_feature (7)..(354): Homolog of NCBI NO: 30684325 NR Description: purine permease family [Arabidopsis thaliana]
  misc_feature (40)..(354): Homolog of NCBI NO: 15236799 NR Description: putative protein; protein id: At4g18220.1
  misc_feature (53)..(354): Homolog of NCBI NO: 7487849 NR Description: hypothetical protein T9A21.60 - Arabidopsis >gi|2832695|emb|CAA16793.1| putative protein [Arabidopsis >gi|7268614|emb|CAB78823.1| putative protein [Arabidopsis
  misc_feature (24)..(354): Homolog of NCBI NO: 15236794 NR Description: putative protein; protein id: At4g18190.1
MLLLKEEDEGRRRTSVPTQLMKLNRSQWWILVFISIFFLISAQAISVLLGRFYYNEGGNSKWISTLVQTGGFPILYLPLSLLPASQSSSSSSSSSSFKTLVWIYLSLGFAIGLDNFLYSVGLLYLSASTYSILCASQLAFNGVFYYYINSQKITCLIFFSVLFLSISAVLVSLDDDSNSPSGDSKWSYLIGCFCAVFASLIYSLQLSLMQFSFEKVLKSETLSMVLEMQIYTSLVASCVAVIGLFASGEWMLLSVEMEEFQEGQVIYVLTLVGAAVSCQLGCVGAVSLIFLVSSLFSNLISTLSLIVTPLAAIAVFHDKLTEVKMVAMPIAFTGFTFYIYQNYLDDLKVQRAREAQAE

SEQ ID NO: 81720 - protein, 338 aa, Arabidopsis thaliana
  peptide (1)..(338): Ceres Seq. ID no. 12660963
  misc_feature (154)..(336): Pfam Name: Domain of unknown function, DUF250 Pfam Description: Domain of unknown function, DUF250
  misc_feature (1)..(338): Homolog of NCBI NO: 15237573 NR Description: purine permease-like protein; protein id:
  misc_feature (1)..(338): Homolog of NCBI NO: 18413147 NR Description: putative protein; protein id: At4g08700.1, by cDNA: 38901., supported by cDNA: gi_20465910 [Arabidopsis >gi|18491201|gb|AAL69503.1| unknown protein [Arabidopsis
  misc_feature (1)..(338): Homolog of NCBI NO: 25407443 NR Description: hypothetical protein AT4g08700 [imported] - thaliana >gi|7267512|emb|CAB77995.1| putative protein thaliana] >gi|7321059|emb|CAB82106.1| putative protein
  misc_feature (1)..(337): Homolog of NCBI NO: 15219436 NR Description: hypothetical protein; protein id: At1g44750.1, by cDNA: gi_17065411 [Arabidopsis thaliana]
  misc_feature (7)..(332): Homolog of NCBI NO: 38605752 NR Description: OSJNBb0016D16.5 [Oryza sativa (japonica
  misc_feature (7)..(332): Homolog of NCBI NO: 38344290 NR Description: OSJNBa0013K16.22 [Oryza sativa (japonica
  misc_feature (1)..(334): Homolog of NCBI NO: 30684325 NR Description: purine permease family [Arabidopsis thaliana]
  misc_feature (20)..(334): Homolog of NCBI NO: 15236799 NR Description: putative protein; protein id: At4g18220.1
  misc_feature (33)..(334): Homolog of NCBI NO: 7487849 NR Description: hypothetical protein T9A21.60 - Arabidopsis >gi|2832695|emb|CAA16793.1| putative protein [Arabidopsis >gi|7268614|emb|CAB78823.1| putative protein [Arabidopsis
  misc_feature (4)..(334): Homolog of NCBI NO: 15236794 NR Description: putative protein; protein id: At4g18190.1
MKLNRSQWWILVFISIFFLISAQAISVLLGRFYYNEGGNSKWISTLVQTGGFPILYLPLSLLPASQSSSSSSSSSSFKTLVWIYLSLGFAIGLDNFLYSVGLLYLSASTYSILCASQLAFNGVFYYYINSQKITCLIFFSVLFLSISAVLVSLDDDSNSPSGDSKWSYLIGCFCAVFASLIYSLQLSLMQFSFEKVLKSETLSMVLEMQIYTSLVASCVAVIGLFASGEWMLLSVEMEEFQEGQVIYVLTLVGAAVSCQLGCVGAVSLIFLVSSLFSNLISTLSLIVTPLAAIAVFHDKLTEVKMVAMPIAFTGFTFYIYQNYLDDLKVQRAREAQAE

SEQ ID NO: 81721 - DNA, 2886 bp, Arabidopsis thaliana
  misc_feature (1)..(2886): Ceres Seq. ID no. 12660988
  misc_feature: MA Experiment ID: 20000440 Result: Up-regulated in Transcription
  misc_feature: MA Experiment 20000440 PARAMETER Experiment Name: At_Closed-Flower__Sub_P Parameter: Tissue Value: Closed Flower vs. Whole Plant
atgaaaaatcgaatcaaaaaaggatccagcatgattggtgtttatggaagatcagacggatcaagcagcattcagtcttctaatggatccgaaagtcgtgaaagtatagatgacaataagcaaggtcatcaaagtttagtagagtggttaaatgagacacttccttatttgaatttaccatgggaagcttcagaggaagaattgagagcatgtttggtggatggtactgtcttgtgcaatctcttaaatcagcttagtcccggttcgatgcgaatgggaggaagcttcgagcctggttgtgtaaatattgagcggtttttggcagctatggatgaaatgacattgcccagatttgagtctcttaaggcgcttaaagctagtttctctgatgatggatatgataagaatacactttctgcaagaagaagatggagtttgcctgcggaccattcaaagggagttgatagcaactttaatgatggaggatcacagtttatagaagcatctgagattaatacatctcatcacagcttacaaaatacttctacacgatcgttgtttgacatgctggataggcttcttgatgagagctcgcagaagatgaatgtgtctcatgtttatgtatctatcttgagaggcattgtgcaagttgttgagcaacggatctcaaatcaagctgagaacctaaaaaaccaaaatatactctttagggttcgtgaagaaaaatatagatcaagaataaatgttttagaaactttggcatctggaacaacagatgagaatgaggtcagaagaaaaagatgtgctccaaatagaaaaggaaaagagcgtagtaatgctgaactttctaagttgaagcaagaacttgaaattgtgaaagagacacatgaaaaacagtttttggaactaaaactaaatgctcaaaaagctaaagttgagttggagaggcaagtaaagaattcagagttacgtgtagtagaagcaaaagaactcgagaagttatgtgaaactaaaactaaaagatgggagaagaaagaacaaacatataagaggtttataaaccaccagacagaggctttgcaggagttgaaagctacttctatgtctttaaaacatgatgtattaaagataggagagaactacttcctggatctaacttactatggtataaagctcagaggagtggctcatgcagcaaaaaattaccagataataattgaagagaatcgaagactttacaatgaagtgcaagaattaaaaggaaatattagagtatattgccggataagaccattccttcaaggacaaaacaagaaacaaacatcaatagagtacacaggtgagaatggtgaactggtggttgcaaatcccttaaagcaaggcaaagatacgtatcgtttattcaaattcaacaaagtctttggccctgaatcaactcaagaggaagttttcttagatactcgacctatgattcgatccattcttgatggctacaatgtatgtatatttgcttatggccagacgggttctggaaagacttatacgatgagtggaccaagcataacttcagaagaagatcggggtgttaactatcgagctttgaatgacttgttccacttaactcaaagtagacaaaactcagtgatgtatgaagttggtgttcaaatggttgagatttacaatgagcaagttcgtgacctactttctcaggatgttcctgatgcaagcatgcattctgtaagatcaactgaagatgttcttgaactgatgaatattgggttgatgaatagaactgttggcgccacaacccttaatgaaaagagtagtagatcacacagtgttctttcggttcatgtacgcggtgttgatgttaaaacggaatccgtcttgcgtggtagtttgcatttggttgatcttgctggaagtgagagagttggtcgctctgaagtaaccggagagagactcaaagaagctcaacatataaacaaatcattgtctgctctcggagatgttatattcgctctagcacataagaatcctcatgtaccttatagaaacagcaagctaacacaagtcctccagaattctttaggagggcaagcgaaaactcttatgtttgttcaaattaatcctgatgaagattcatatgctgagactgtaagtactttgaaatttgcggaaagagtttctggtgtcgagttaggtgcagctagaagctataaggaaggaagagatgttagacaactcatggaacaggtatcgaacttgaaagatatgattgccaagaaagacgaagaacttcaaaagtttcaaaacataaatggtatccaaaaacgtggattaagcaaactaagaattgtctctcctcctagaaggcattctttaggaggagctttaacaaattctccaagaagaagacaaggacctggtttacttggaagaacaacttcagatatacatcgacatcaaaatgaatctcgatcatcgtctaagttttctggtggggctaaagacaataatatatttgaggatactgaactcttaggttttgaagaatcaaataatgaggaaagattgagtgatatctcagatagttgtctttcaatgggaacagaaactgatggctcgattagtagcggtgcaatggagttgacactcttccctgaaacctcaaatcctcctgaaatgtttgaacaatctgaacaaaatgacaaagctcatgttggagttggaccatcaaagccactgaaacatacaccaaaaccagacataagtaaaccttctcgtctgtcgatttccactacctcatctaaggctttaacaagttctaaaagaccggtcactggcatttcatcttcagtaaaacctcttaacagaaagagataa

SEQ ID NO: 81722 - protein, 961 aa, Arabidopsis thaliana
  peptide (1)..(961): Ceres Seq. ID no. 12660989
  misc_feature (176)..(480): Homolog of NCBI NO: 6633835 NR Description: F2K11.1 [Arabidopsis thaliana]
  misc_feature (547)..(840): Homolog of NCBI NO: 6633835 NR Description: F2K11.1 [Arabidopsis thaliana]
  misc_feature (816)..(937): Homolog of NCBI NO: 6633835 NR Description: F2K11.1 [Arabidopsis thaliana]
  misc_feature (1)..(340): Homolog of NCBI NO: 6633835 NR Description: F2K11.1 [Arabidopsis thaliana]
  misc_feature (191)..(783): Homolog of NCBI NO: 22329655 NR Description: kinesin-related protein; protein id: At1g18410.1
  misc_feature (481)..(596): Homolog of NCBI NO: 6633835 NR Description: F2K11.1 [Arabidopsis thaliana]
  misc_feature (218)..(569): Homolog of NCBI NO: 6714287 NR Description: F15H18.10 [Arabidopsis thaliana]
  misc_feature (572)..(783): Homolog of NCBI NO: 6714287 NR Description: F15H18.10 [Arabidopsis thaliana]
  misc_feature (253)..(551): Homolog of NCBI NO: 34909422 NR Description: putative kinesin-like protein [Oryza sativa
  misc_feature (596)..(771): Homolog of NCBI NO: 34909422 NR Description: putative kinesin-like protein [Oryza sativa
MKNRIKKGSSMIGVYGRSDGSSSIQSSNGSESRESIDDNKQGHQSLVEWLNETLPYLNLPWEASEEELRACLVDGTVLCNLLNQLSPGSMRMGGSFEPGCVNIERFLAAMDEMTLPRFESLKALKASFSDDGYDKNTLSARRRWSLPADHSKGVDSNFNDGGSQFIEASEINTSHHSLQNTSTRSLFDMLDRLLDESSQKMNVSHVYVSILRGIVQVVEQRISNQAENLKNQNILFRVREEKYRSRINVLETLASGTTDENEVRRKRCAPNRKGKERSNAELSKLKQELEIVKETHEKQFLELKLNAQKAKVELERQVKNSELRVVEAKELEKLCETKTKRWEKKEQTYKRFINHQTEALQELKATSMSLKHDVLKIGENYFLDLTYYGIKLRGVAHAAKNYQIIIEENRRLYNEVQELKGNIRVYCRIRPFLQGQNKKQTSIEYTGENGELVVANPLKQGKDTYRLFKFNKVFGPESTQEEVFLDTRPMIRSILDGYNVCIFAYGQTGSGKTYTMSGPSITSEEDRGVNYRALNDLFHLTQSRQNSVMYEVGVQMVEIYNEQVRDLLSQDVPDASMHSVRSTEDVLELMNIGLMNRTVGATTLNEKSSRSHSVLSVHVRGVDVKTESVLRGSLHLVDLAGSERVGRSEVTGERLKEAQHINKSLSALGDVIFALAHKNPHVPYRNSKLTQVLQNSLGGQAKTLMFVQINPDEDSYAETVSTLKFAERVSGVELGAARSYKEGRDVRQLMEQVSNLKDMIAKKDEELQKFQNINGIQKRGLSKLRIVSPPRRHSLGGALTNSPRRRQGPGLLGRTTSDIHRHQNESRSSSKFSGGAKDNNIFEDTELLGFEESNNEERLSDISDSCLSMGTETDGSISSGAMELTLFPETSNPPEMFEQSEQNDKAHVGVGPSKPLKHTPKPDISKPSRLSISTTSSKALTSSKRPVTGISSSVKPLNRKR

SEQ ID NO: 81723 - protein, 951 aa, Arabidopsis thaliana
  peptide (1)..(951): Ceres Seq. ID no. 12660990
  misc_feature (166)..(470): Homolog of NCBI NO: 6633835 NR Description: F2K11.1 [Arabidopsis thaliana]
  misc_feature (537)..(830): Homolog of NCBI NO: 6633835 NR Description: F2K11.1 [Arabidopsis thaliana]
  misc_feature (806)..(927): Homolog of NCBI NO: 6633835 NR Description: F2K11.1 [Arabidopsis thaliana]
  misc_feature (1)..(330): Homolog of NCBI NO: 6633835 NR Description: F2K11.1 [Arabidopsis thaliana]
  misc_feature (181)..(773): Homolog of NCBI NO: 22329655 NR Description: kinesin-related protein; protein id: At1g18410.1
  misc_feature (471)..(586): Homolog of NCBI NO: 6633835 NR Description: F2K11.1 [Arabidopsis thaliana]
  misc_feature (208)..(559): Homolog of NCBI NO: 6714287 NR Description: F15H18.10 [Arabidopsis thaliana]
  misc_feature (562)..(773): Homolog of NCBI NO: 6714287 NR Description: F15H18.10 [Arabidopsis thaliana]
  misc_feature (243)..(541): Homolog of NCBI NO: 34909422 NR Description: putative kinesin-like protein [Oryza sativa
  misc_feature (586)..(761): Homolog of NCBI NO: 34909422 NR Description: putative kinesin-like protein [Oryza sativa
MIGVYGRSDGSSSIQSSNGSESRESIDDNKQGHQSLVEWLNETLPYLNLPWEASEEELRACLVDGTVLCNLLNQLSPGSMRMGGSFEPGCVNIERFLAAMDEMTLPRFESLKALKASFSDDGYDKNTLSARRRWSLPADHSKGVDSNFNDGGSQFIEASEINTSHHSLQNTSTRSLFDMLDRLLDESSQKMNVSHVYVSILRGIVQVVEQRISNQAENLKNQNILFRVREEKYRSRINVLETLASGTTDENEVRRKRCAPNRKGKERSNAELSKLKQELEIVKETHEKQFLELKLNAQKAKVELERQVKNSELRVVEAKELEKLCETKTKRWEKKEQTYKRFINHQTEALQELKATSMSLKHDVLKIGENYFLDLTYYGIKLRGVAHAAKNYQIIIEENRRLYNEVQELKGNIRVYCRIRPFLQGQNKKQTSIEYTGENGELVVANPLKQGKDTYRLFKFNKVFGPESTQEEVFLDTRPMIRSILDGYNVCIFAYGQTGSGKTYTMSGPSITSEEDRGVNYRALNDLFHLTQSRQNSVMYEVGVQMVEIYNEQVRDLLSQDVPDASMHSVRSTEDVLELMNIGLMNRTVGATTLNEKSSRSHSVLSVHVRGVDVKTESVLRGSLHLVDLAGSERVGRSEVTGERLKEAQHINKSLSALGDVIFALAHKNPHVPYRNSKLTQVLQNSLGGQAKTLMFVQINPDEDSYAETVSTLKFAERVSGVELGAARSYKEGRDVRQLMEQVSNLKDMIAKKDEELQKFQNINGIQKRGLSKLRIVSPPRRHSLGGALTNSPRRRQGPGLLGRTTSDIHRHQNESRSSSKFSGGAKDNNIFEDTELLGFEESNNEERLSDISDSCLSMGTETDGSISSGAMELTLFPETSNPPEMFEQSEQNDKAHVGVGPSKPLKHTPKPDISKPSRLSISTTSSKALTSSKRPVTGISSSVKPLNRKR

SEQ ID NO: 81724 - protein, 872 aa, Arabidopsis thaliana
  peptide (1)..(872): Ceres Seq. ID no. 12660991
  misc_feature (87)..(391): Homolog of NCBI NO: 6633835 NR Description: F2K11.1 [Arabidopsis thaliana]
  misc_feature (458)..(751): Homolog of NCBI NO: 6633835 NR Description: F2K11.1 [Arabidopsis thaliana]
  misc_feature (727)..(848): Homolog of NCBI NO: 6633835 NR Description: F2K11.1 [Arabidopsis thaliana]
  misc_feature (1)..(251): Homolog of NCBI NO: 6633835 NR Description: F2K11.1 [Arabidopsis thaliana]
  misc_feature (102)..(694): Homolog of NCBI NO: 22329655 NR Description: kinesin-related protein; protein id: At1g18410.1
  misc_feature (392)..(507): Homolog of NCBI NO: 6633835 NR Description: F2K11.1 [Arabidopsis thaliana]
  misc_feature (129)..(480): Homolog of NCBI NO: 6714287 NR Description: F15H18.10 [Arabidopsis thaliana]
  misc_feature (483)..(694): Homolog of NCBI NO: 6714287 NR Description: F15H18.10 [Arabidopsis thaliana]
  misc_feature (164)..(462): Homolog of NCBI NO: 34909422 NR Description: putative kinesin-like protein [Oryza sativa
  misc_feature (507)..(682): Homolog of NCBI NO: 34909422 NR Description: putative kinesin-like protein [Oryza sativa
MRMGGSFEPGCVNIERFLAAMDEMTLPRFESLKALKASFSDDGYDKNTLSARRRWSLPADHSKGVDSNFNDGGSQFIEASEINTSHHSLQNTSTRSLFDMLDRLLDESSQKMNVSHVYVSILRGIVQVVEQRISNQAENLKNQNILFRVREEKYRSRINVLETLASGTTDENEVRRKRCAPNRKGKERSNAELSKLKQELEIVKETHEKQFLELKLNAQKAKVELERQVKNSELRVVEAKELEKLCETKTKRWEKKEQTYKRFINHQTEALQELKATSMSLKHDVLKIGENYFLDLTYYGIKLRGVAHAAKNYQIIIEENRRLYNEVQELKGNIRVYCRIRPFLQGQNKKQTSIEYTGENGELVVANPLKQGKDTYRLFKFNKVFGPESTQEEVFLDTRPMIRSILDGYNVCIFAYGQTGSGKTYTMSGPSITSEEDRGVNYRALNDLFHLTQSRQNSVMYEVGVQMVEIYNEQVRDLLSQDVPDASMHSVRSTEDVLELMNIGLMNRTVGATTLNEKSSRSHSVLSVHVRGVDVKTESVLRGSLHLVDLAGSERVGRSEVTGERLKEAQHINKSLSALGDVIFALAHKNPHVPYRNSKLTQVLQNSLGGQAKTLMFVQINPDEDSYAETVSTLKFAERVSGVELGAARSYKEGRDVRQLMEQVSNLKDMIAKKDEELQKFQNINGIQKRGLSKLRIVSPPRRHSLGGALTNSPRRRQGPGLLGRTTSDIHRHQNESRSSSKFSGGAKDNNIFEDTELLGFEESNNEERLSDISDSCLSMGTETDGSISSGAMELTLFPETSNPPEMFEQSEQNDKAHVGVGPSKPLKHTPKPDISKPSRLSISTTSSKALTSSKRPVTGISSSVKPLNRKR

SEQ ID NO: 81725 - DNA, 1575 bp, Arabidopsis thaliana
  misc_feature (1)..(1575): Ceres Seq. ID no. 12661011
  misc_feature: MA Experiment ID: 20000179 Result: Up-regulated in Transcription
  misc_feature: MA Experiment 20000179 PARAMETER Experiment Name: At_Germinating_Seeds_P Parameter: Age (hr) Value: 6 vs. 0
  misc_feature: MA Experiment 20000179 PARAMETER Experiment Name: At_Germinating_Seeds_P Parameter: Tissue Value: Germinating Seeds
  misc_feature: MA Experiment ID: 20000180 Result: Up-regulated in Transcription
  misc_feature: MA Experiment 20000180 PARAMETER Experiment Name: At_Germinating_Seeds_P Parameter: Age (hr) Value: 24 vs. 0
  misc_feature: MA Experiment 20000180 PARAMETER Experiment Name: At_Germinating_Seeds_P Parameter: Tissue Value: Germinating Seeds
  misc_feature: MA Experiment ID: 20000182 Result: Down-regulated in Transcription
  misc_feature: MA Experiment 20000182 PARAMETER Experiment Name: At_2mM_SA_P Parameter: Age (day) Value: 14
  misc_feature: MA Experiment 20000182 PARAMETER Experiment Name: At_2mM_SA_P Parameter: Organism Value: A. thaliana
  misc_feature: MA Experiment 20000182 PARAMETER Experiment Name: At_2mM_SA_P Parameter: Plant Line Value: WS
  misc_feature: MA Experiment 20000182 PARAMETER Experiment Name: At_2mM_SA_P Parameter: Timepoint (hr) Value: 6
  misc_feature: MA Experiment 20000182 PARAMETER Experiment Name: At_2mM_SA_P Parameter: Tissue Value: Aerial
  misc_feature: MA Experiment 20000182 PARAMETER Experiment Name: At_2mM_SA_P Parameter: Treatment Value: 2mM SA vs. No Treatment
  misc_feature: MA Experiment ID: 20000185 Result: Down-regulated in Transcription
  misc_feature: MA Experiment 20000185 PARAMETER Experiment Name: At_Roots__P Parameter: Age (day) Value: 7 vs. 21
  misc_feature: MA Experiment 20000185 PARAMETER Experiment Name: At_Roots__P Parameter: Organism Value: A. thaliana
  misc_feature: MA Experiment 20000185 PARAMETER Experiment Name: At_Roots__P Parameter: Tissue Value: Roots vs. Whole Plant
  misc_feature: MA Experiment ID: 20000227 Result: Down-regulated in Transcription
  misc_feature: MA Experiment 20000227 PARAMETER Experiment Name: At_Root-Tips-vs-Tops_P Parameter: Tissue Value: Root Tips vs. Root Tops
  misc_feature: MA Experiment ID: 20000234 Result: Up-regulated in Transcription
  misc_feature: MA Experiment 20000234 PARAMETER Experiment Name: At_Siliques_P Parameter: Age (day) Value: 21
  misc_feature: MA Experiment 20000234 PARAMETER Experiment Name: At_Siliques_P Parameter: Organism Value: A. thaliana
  misc_feature: MA Experiment 20000234 PARAMETER Experiment Name: At_Siliques_P Parameter: Plant Line Value: WS
  misc_feature: MA Experiment 20000234 PARAMETER Experiment Name: At_Siliques_P Parameter: Tissue Value: Less Than 5mm Siliques vs. Whole Plant
  misc_feature: MA Experiment ID: 20000235 Result: Up-regulated in Transcription
  misc_feature: MA Experiment 20000235 PARAMETER Experiment Name: At_Siliques_P Parameter: Age (day) Value: 21
  misc_feature: MA Experiment 20000235 PARAMETER Experiment Name: At_Siliques_P Parameter: Organism Value: A. thaliana
  misc_feature: MA Experiment 20000235 PARAMETER Experiment Name: At_Siliques_P Parameter: Plant Line Value: WS
  misc_feature: MA Experiment 20000235 PARAMETER Experiment Name: At_Siliques_P Parameter: Tissue Value: 5-10mm Siliques vs. Whole Plant
  misc_feature: MA Experiment ID: 20000264 Result: Up-regulated in Transcription
  misc_feature: MA Experiment 20000264 PARAMETER Experiment Name: At_Open_Flower_P Parameter: Age (day) Value: 21
  misc_feature: MA Experiment 20000264 PARAMETER Experiment Name: At_Open_Flower_P Parameter: Plant Line Value: WS
  misc_feature: MA Experiment 20000264 PARAMETER Experiment Name: At_Open_Flower_P Parameter: Tissue Value: Open Flower vs. Whole Plant
  misc_feature: MA Experiment ID: 20000265 Result: Up-regulated in Transcription
  misc_feature: MA Experiment 20000265 PARAMETER Experiment Name: At_Open_Flower_P Parameter: Age (day) Value: 21
  misc_feature: MA Experiment 20000265 PARAMETER Experiment Name: At_Open_Flower_P Parameter: Plant Line Value: WS
  misc_feature: MA Experiment 20000265 PARAMETER Experiment Name: At_Open_Flower_P Parameter: Tissue Value: Closed Flower vs. Whole Plant
  misc_feature: MA Experiment ID: 20000267 Result: Up-regulated in Transcription
  misc_feature: MA Experiment 20000267 PARAMETER Experiment Name: At_Drought_P Parameter: Age (day) Value: 7
  misc_feature: MA Experiment 20000267 PARAMETER Experiment Name: At_Drought_P Parameter: Organism Value: A. thaliana
  misc_feature: MA Experiment 20000267 PARAMETER Experiment Name: At_Drought_P Parameter: Plant Line Value: WS
  misc_feature: MA Experiment 20000267 PARAMETER Experiment Name: At_Drought_P Parameter: Timepoint (hr) Value: 6
  misc_feature: MA Experiment 20000267 PARAMETER Experiment Name: At_Drought_P Parameter: Tissue Value: Whole Plant
  misc_feature: MA Experiment 20000267 PARAMETER Experiment Name: At_Drought_P Parameter: Treatment Value: Drought vs. No Drought
  misc_feature: MA Experiment ID: 20000268 Result: Up-regulated in Transcription
  misc_feature: MA Experiment 20000268 PARAMETER Experiment Name: At_100mM_NaCl__P Parameter: Age (day) Value: 14
  misc_feature: MA Experiment 20000268 PARAMETER Experiment Name: At_100mM_NaCl__P Parameter: Organism Value: A. thaliana
  misc_feature: MA Experiment 20000268 PARAMETER Experiment Name: At_100mM_NaCl__P Parameter: Plant Line Value: WS
  misc_feature: MA Experiment 20000268 PARAMETER Experiment Name: At_100mM_NaCl__P Parameter: Timepoint (hr) Value: 6
  misc_feature: MA Experiment 20000268 PARAMETER Experiment Name: At_100mM_NaCl__P Parameter: Tissue Value: Whole Plant
  misc_feature: MA Experiment 20000268 PARAMETER Experiment Name: At_100mM_NaCl__P Parameter: Treatment Value: 100mM NaCl vs. No Treatment
  misc_feature: MA Experiment ID: 20000286 Result: Up-regulated in Transcription
  misc_feature: MA Experiment 20000286 PARAMETER Experiment Name: At_Open_Flower_P Parameter: Age (day) Value: 21
  misc_feature: MA Experiment 20000286 PARAMETER Experiment Name: At_Open_Flower_P Parameter: Plant Line Value: WS
  misc_feature: MA Experiment 20000286 PARAMETER Experiment Name: At_Open_Flower_P Parameter: Tissue Value: Half Open vs. Whole Plant
  misc_feature: MA Experiment ID: 20000439 Result: Down-regulated in Transcription
  misc_feature: MA Experiment 20000439 PARAMETER Experiment Name: At_Roots__P Parameter: Age (day) Value: 14 vs. 21
  misc_feature: MA Experiment 20000439 PARAMETER Experiment Name: At_Roots__P Parameter: Organism Value: A. thaliana
  misc_feature: MA Experiment 20000439 PARAMETER Experiment Name: At_Roots__P Parameter: Tissue Value: Roots vs. Whole Plant
  misc_feature: MA Experiment ID: 20000441 Result: Down-regulated in Transcription
  misc_feature: MA Experiment 20000441 PARAMETER Experiment Name: At_1uM_BR-BRZ__P Parameter: Tissue Value: Shoot Apices
  misc_feature: MA Experiment 20000441 PARAMETER Experiment Name: At_1uM_BR-BRZ__P Parameter: Treatment Value: 1uM BR vs. No Treatment
  misc_feature: MA Experiment ID: 20000443 Result: Down-regulated in Transcription
  misc_feature: MA Experiment 20000443 PARAMETER Experiment Name: At_1uM_BR-BRZ__P Parameter: Tissue Value: Shoot Apices
  misc_feature: MA Experiment 20000443 PARAMETER Experiment Name: At_1uM_BR-BRZ__P Parameter: Treatment Value: 1uM BRZ vs. No Treatment
  misc_feature: MA Experiment ID: 20000496 Result: Up-regulated in Transcription
  misc_feature: MA Experiment 20000496 PARAMETER Experiment Name: At_Guard_Cells_P Parameter: Harvest Date Value: 7/19/2002
  misc_feature: MA Experiment 20000496 PARAMETER Experiment Name: At_Guard_Cells_P Parameter: Organism Value: Canola
  misc_feature: MA Experiment 20000496 PARAMETER Experiment Name: At_Guard_Cells_P Parameter: Tissue Value: Guard Cells vs. Leaves
  misc_feature: MA Experiment ID: 20000573 Result: Down-regulated in Transcription
  misc_feature: MA Experiment 20000573 PARAMETER Experiment Name: At_100uM_ABA_Mutants__P Parameter: Organism Value: A. thaliana
  misc_feature: MA Experiment 20000573 PARAMETER Experiment Name: At_100uM_ABA_Mutants__P Parameter: Plant Line Value: CS22 vs. Ler wt
  misc_feature: MA Experiment 20000573 PARAMETER Experiment Name: At_100uM_ABA_Mutants__P Parameter: Timepoint (hr) Value: N/A
  misc_feature: MA Experiment 20000573 PARAMETER Experiment Name: At_100uM_ABA_Mutants__P Parameter: Tissue Value: Whole Plant
  misc_feature: MA Experiment 20000573 PARAMETER Experiment Name: At_100uM_ABA_Mutants__P Parameter: Treatment Value: None
  misc_feature: MA Experiment ID: 20000574 Result: Down-regulated in Transcription
  misc_feature: MA Experiment 20000574 PARAMETER Experiment Name: At_100uM_ABA_Mutants__P Parameter: Organism Value: A. thaliana
  misc_feature: MA Experiment 20000574 PARAMETER Experiment Name: At_100uM_ABA_Mutants__P Parameter: Plant Line Value: CS23 vs. Ler wt
  misc_feature: MA Experiment 20000574 PARAMETER Experiment Name: At_100uM_ABA_Mutants__P Parameter: Timepoint (hr) Value: N/A
  misc_feature: MA Experiment 20000574 PARAMETER Experiment Name: At_100uM_ABA_Mutants__P Parameter: Tissue Value: Whole Plant
  misc_feature: MA Experiment 20000574 PARAMETER Experiment Name: At_100uM_ABA_Mutants__P Parameter: Treatment Value: None
  misc_feature: MA Experiment ID: 20000794 Result: Down-regulated in Transcription
  misc_feature: MA Experiment 20000794 PARAMETER Experiment Name: At_Petals_P Parameter: Age (day) Value: 23-25 days
  misc_feature: MA Experiment 20000794 PARAMETER Experiment Name: At_Petals_P Parameter: Plant Line Value: WS
  misc_feature: MA Experiment 20000794 PARAMETER Experiment Name: At_Petals_P Parameter: Tissue Value: Petals vs. Whole plant
  misc_feature: MA Experiment ID: 20001248 Result: Down-regulated in Transcription
  misc_feature: MA Experiment 20001248 PARAMETER Experiment Name: At_Far-red-induction_P Parameter: Age (day) Value: 7
  misc_feature: MA Experiment 20001248 PARAMETER Experiment Name: At_Far-red-induction_P Parameter: Light Value: Far-red vs. White
  misc_feature: MA Experiment 20001248 PARAMETER Experiment Name: At_Far-red-induction_P Parameter: Organism Value: A. thaliana
  misc_feature: MA Experiment 20001248 PARAMETER Experiment Name: At_Far-red-induction_P Parameter: Plant Line Value: Columbia
  misc_feature: MA Experiment 20001248 PARAMETER Experiment Name: At_Far-red-induction_P Parameter: Timepoint (hr) Value: 4
  misc_feature: MA Experiment 20001248 PARAMETER Experiment Name: At_Far-red-induction_P Parameter: Tissue Value: Whole Plant
  misc_feature: MA Experiment ID: 20001450 Result: Down-regulated in Transcription
  misc_feature: MA Experiment 20001450 PARAMETER Experiment Name: At_Far-red-induction_P Parameter: Age (day) Value: 7
  misc_feature: MA Experiment 20001450 PARAMETER Experiment Name: At_Far-red-induction_P Parameter: Light Value: Far-red vs. White
  misc_feature: MA Experiment 20001450 PARAMETER Experiment Name: At_Far-red-induction_P Parameter: Organism Value: A. thaliana
  misc_feature: MA Experiment 20001450 PARAMETER Experiment Name: At_Far-red-induction_P Parameter: Plant Line Value: Columbia
  misc_feature: MA Experiment 20001450 PARAMETER Experiment Name: At_Far-red-induction_P Parameter: Timepoint (hr) Value: 8
  misc_feature: MA Experiment 20001450 PARAMETER Experiment Name: At_Far-red-induction_P Parameter: Tissue Value: Whole Plant
  misc_feature: MA Experiment ID: 20001451 Result: Down-regulated in Transcription
  misc_feature: MA Experiment 20001451 PARAMETER Experiment Name: At_Far-red-induction_P Parameter: Age (day) Value: 7
  misc_feature: MA Experiment 20001451 PARAMETER Experiment Name: At_Far-red-induction_P Parameter: Light Value: Far-red vs. White
  misc_feature: MA Experiment 20001451 PARAMETER Experiment Name: At_Far-red-induction_P Parameter: Organism Value: A. thaliana
  misc_feature: MA Experiment 20001451 PARAMETER Experiment Name: At_Far-red-induction_P Parameter: Plant Line Value: Columbia
  misc_feature: MA Experiment 20001451 PARAMETER Experiment Name: At_Far-red-induction_P Parameter: Timepoint (hr) Value: 24
  misc_feature: MA Experiment 20001451 PARAMETER Experiment Name: At_Far-red-induction_P Parameter: Tissue Value: Whole Plant
  misc_feature: MA Experiment ID: 20001554 Result: Up-regulated in Transcription
  misc_feature: MA Experiment 20001554 PARAMETER Experiment Name: At_Drought_Soil_Dry_P Parameter: Age (day) Value: 21
  misc_feature: MA Experiment 20001554 PARAMETER Experiment Name: At_Drought_Soil_Dry_P Parameter: Organism Value: A. thaliana
  misc_feature: MA Experiment 20001554 PARAMETER Experiment Name: At_Drought_Soil_Dry_P Parameter: Plant Line Value: WS
  misc_feature: MA Experiment 20001554 PARAMETER Experiment Name: At_Drought_Soil_Dry_P Parameter: Post Timepoint (hr) Value: None
  misc_feature: MA Experiment 20001554 PARAMETER Experiment Name: At_Drought_Soil_Dry_P Parameter: Post-Treatment Value: None
  misc_feature: MA Experiment 20001554 PARAMETER Experiment Name: At_Drought_Soil_Dry_P Parameter: Timepoint (day) Value: 7
  misc_feature: MA Experiment 20001554 PARAMETER Experiment Name: At_Drought_Soil_Dry_P Parameter: Treatment Value: Drought vs. No Drought
  misc_feature: MA Experiment ID: 20001556 Result: Up-regulated in Transcription
  misc_feature: MA Experiment 20001556 PARAMETER Experiment Name: At_Drought_Soil_Dry_P Parameter: Age (day) Value: 26
  misc_feature: MA Experiment 20001556 PARAMETER Experiment Name: At_Drought_Soil_Dry_P Parameter: Organism Value: A. thaliana
  misc_feature: MA Experiment 20001556 PARAMETER Experiment Name: At_Drought_Soil_Dry_P Parameter: Plant Line Value: WS
  misc_feature: MA Experiment 20001556 PARAMETER Experiment Name: At_Drought_Soil_Dry_P Parameter: Post Timepoint (hr) Value: None
  misc_feature: MA Experiment 20001556 PARAMETER Experiment Name: At_Drought_Soil_Dry_P Parameter: Post-Treatment Value: None
  misc_feature: MA Experiment 20001556 PARAMETER Experiment Name: At_Drought_Soil_Dry_P Parameter: Timepoint (day) Value: 12
  misc_feature: MA Experiment 20001556 PARAMETER Experiment Name: At_Drought_Soil_Dry_P Parameter: Treatment Value: Drought vs. No Drought
atgaagctgaataaccagaaagatccagcagagaagctaatgtgggaacggactttatccggatccggttcaccgacccgacccgtatccaaacttatggtaacgctcctcctcctcgtctccgccacttacgttgtctacacactaaagcttatctcaaactcacgtgcttgtcaagtggagccattctccgccgttgttcgtcgtctcaacgacattgtcaactcatctcaaccgttgattctcttccacacaaatcaaacggctgtaatcaaatcatacgcctctccaccaccttcaccaccaccaccacctccgccaccgcaaaccggtttccaacacgtggttttcggtatcgccgcgtcggcaagactatggaaacagagaaaagagtacatcaagatttggtacaaaccaaaccaaatgcgtagttatgtctggttagaaaaaccagttactgaagaagacgaagaagacgaaattagcctcccgccggtgaaaatctccggcgatacatcgaagtttccgtataaaaacaaacaaggacacagatcggcgattagaatttcaagaatcgttacggagacacttaaattaggactcaaagatgtgagatggttcgttatgggagacgatgatacagtctttgtcgccgagaatctaatcagagttttgagaaaatacgatcataatcaaatgtattacatcggcagtttatcggagagtcatcttcagaacatttatttctcttatggaatggcttatggcggtggaggatttgctataagttatccattagcggtggctttgagcaaaatgcaagatcggtgtattaaaaggtatccggcgttgtacggttccgatgatcggatgcaagcttgcatggctgaactcggtgttccactcactaaagaactcggttttcaccagtacgatgtgtatggcaatctctttggattactagcggctcacccggtggctccactggttacgcttcatcacctcgacgtggtcgaaccgattttcccaaacatgacacgtgttgatgccttgaagcatctacaagtcccggcaaagctagactctgctggacttatgcaacagtcgatatgctatgacaaacgccgcaaatggactgtttccgtctcttggggattcgcggttcagattttccgcggaatcttttcggctcgagagattgaaatgccgtcgagaactttcttaaattggtatcgacgggcggattacacggcatacgctttcaacacccgacccgtgagtcgtcatccgtgccagaaaccgtttgtgttctatatgacatcaaccagagttcatcgggtgacaaatatgacagtgagccgttatgaaatccaccgcgtggctcatcccgagtgtcggtggaagatggctaatcccagcgacattaagacagtcattgtttacaagaaaccggaccctcatctttgggacaggtctcctagaagaaattgttgtagggtgaaatcaaagaagaacaatactttggagattagtgttgcagtttgcaaagaaggtgaagtggttgaagtcgtgtaa

SEQ ID NO: 81726 - protein, 524 aa, Arabidopsis thaliana
  peptide (1)..(524): Ceres Seq. ID no. 12661012
  misc_feature (245)..(499): Pfam Name: Protein of unknown function, DUF604 Pfam Description: Protein of unknown function, DUF604
  misc_feature (1)..(524): Homolog of NCBI NO: 15238082 NR Description: putative protein; protein id: At5g41460.1 thaliana] >gi|9758054|dbj|BAB08517.1|
  misc_feature (1)..(523): Homolog of NCBI NO: 18416156 NR Description: Expressed protein; protein id: At4g23490.1, by cDNA: gi_15529152 [Arabidopsis thaliana]
  misc_feature (1)..(523): Homolog of NCBI NO: 15529153 NR Description: AT4g23490/F16G20_190 [Arabidopsis thaliana]
  misc_feature (104)..(523): Homolog of NCBI NO: 15233347 NR Description: putative protein; protein id: At4g11350.1
  misc_feature (1)..(59): Homolog of NCBI NO: 15233347 NR Description: putative protein; protein id: At4g11350.1
  misc_feature (93)..(523): Homolog of NCBI NO: 37536418 NR Description: hypothetical protein [Oryza sativa (japonica group)] >gi|22002140|gb|AAM88624.1| hypothetical protein [Oryza
  misc_feature (70)..(522): Homolog of NCBI NO: 15223433 NR Description: hypothetical protein; protein id: At1g01570.1
  misc_feature (70)..(522): Homolog of NCBI NO: 25336194 NR Description: F22L4.11 protein - Arabidopsis thaliana Contains similarity to a hypothetical protein F16G20.190
  misc_feature (110)..(491): Homolog of NCBI NO: 7485555 NR Description: hypothetical protein F16G20.190 - Arabidopsis >gi|3451074|emb|CAA20470.1| putative protein [Arabidopsis >gi|7269197|emb|CAB79304.1| putative protein [Arabidopsis
  misc_feature (173)..(491): Homolog of NCBI NO: 15223021 NR Description: hypothetical protein; protein id: At1g07850.1
MKLNNQKDPAEKLMWERTLSGSGSPTRPVSKLMVTLLLLVSATYVVYTLKLISNSRACQVEPFSAVVRRLNDIVNSSQPLILFHTNQTAVIKSYASPPPSPPPPPPPPQTGFQHVVFGIAASARLWKQRKEYIKIWYKPNQMRSYVWLEKPVTEEDEEDEISLPPVKISGDTSKFPYKNKQGHRSAIRISRIVTETLKLGLKDVRWFVMGDDDTVFVAENLIRVLRKYDHNQMYYIGSLSESHLQNIYFSYGMAYGGGGFAISYPLAVALSKMQDRCIKRYPALYGSDDRMQACMAELGVPLTKELGFHQYDVYGNLFGLLAAHPVAPLVTLHHLDVVEPIFPNMTRVDALKHLQVPAKLDSAGLMQQSICYDKRRKWTVSVSWGFAVQIFRGIFSAREIEMPSRTFLNWYRRADYTAYAFNTRPVSRHPCQKPFVFYMTSTRVHRVTNMTVSRYEIHRVAHPECRWKMANPSDIKTVIVYKKPDPHLWDRSPRRNCCRVKSKKNNTLEISVAVCKEGEVVEVV

SEQ ID NO: 81727 - protein, 511 aa, Arabidopsis thaliana
  peptide (1)..(511): Ceres Seq. ID no. 12661013
  misc_feature (232)..(486): Pfam Name: Protein of unknown function, DUF604 Pfam Description: Protein of unknown function, DUF604
  misc_feature (1)..(511): Homolog of NCBI NO: 15238082 NR Description: putative protein; protein id: At5g41460.1 thaliana] >gi|9758054|dbj|BAB08517.1|
  misc_feature (1)..(510): Homolog of NCBI NO: 18416156 NR Description: Expressed protein; protein id: At4g23490.1, by cDNA: gi_15529152 [Arabidopsis thaliana]
  misc_feature (1)..(510): Homolog of NCBI NO: 15529153 NR Description: AT4g23490/F16G20_190 [Arabidopsis thaliana]
  misc_feature (91)..(510): Homolog of NCBI NO: 15233347 NR Description: putative protein; protein id: At4g11350.1
  misc_feature (1)..(46): Homolog of NCBI NO: 15233347 NR Description: putative protein; protein id: At4g11350.1
  misc_feature (80)..(510): Homolog of NCBI NO: 37536418 NR Description: hypothetical protein [Oryza sativa (japonica group)] >gi|22002140|gb|AAM88624.1| hypothetical protein [Oryza
  misc_feature (57)..(509): Homolog of NCBI NO: 15223433 NR Description: hypothetical protein; protein id: At1g01570.1
  misc_feature (57)..(509): Homolog of NCBI NO: 25336194 NR Description: F22L4.11 protein - Arabidopsis thaliana Contains similarity to a hypothetical protein F16G20.190
  misc_feature (97)..(478): Homolog of NCBI NO: 7485555 NR Description: hypothetical protein F16G20.190 - Arabidopsis >gi|3451074|emb|CAA20470.1| putative protein [Arabidopsis >gi|7269197|emb|CAB79304.1| putative protein [Arabidopsis
  misc_feature (160)..(478): Homolog of NCBI NO: 15223021 NR Description: hypothetical protein; protein id: At1g07850.1
MWERTLSGSGSPTRPVSKLMVTLLLLVSATYVVYTLKLISNSRACQVEPFSAVVRRLNDIVNSSQPLILFHTNQTAVIKSYASPPPSPPPPPPPPQTGFQHVVFGIAASARLWKQRKEYIKIWYKPNQMRSYVWLEKPVTEEDEEDEISLPPVKISGDTSKFPYKNKQGHRSAIRISRIVTETLKLGLKDVRWFVMGDDDTVFVAENLIRVLRKYDHNQMYYIGSLSESHLQNIYFSYGMAYGGGGFAISYPLAVALSKMQDRCIKRYPALYGSDDRMQACMAELGVPLTKELGFHQYDVYGNLFGLLAAHPVAPLVTLHHLDVVEPIFPNMTRVDALKHLQVPAKLDSAGLMQQSICYDKRRKWTVSVSWGFAVQIFRGIFSAREIEMPSRTFLNWYRRADYTAYAFNTRPVSRHPCQKPFVFYMTSTRVHRVTNMTVSRYEIHRVAHPECRWKMANPSDIKTVIVYKKPDPHLWDRSPRRNCCRVKSKKNNTLEISVAVCKEGEVVEVV

SEQ ID NO: 81728 - protein, 492 aa, Arabidopsis thaliana
  peptide (1)..(492): Ceres Seq. ID no. 12661014
  misc_feature (213)..(467): Pfam Name: Protein of unknown function, DUF604 Pfam Description: Protein of unknown function, DUF604
  misc_feature (1)..(492): Homolog of NCBI NO: 15238082 NR Description: putative protein; protein id: At5g41460.1 thaliana] >gi|9758054|dbj|BAB08517.1|
  misc_feature (1)..(491): Homolog of NCBI NO: 18416156 NR Description: Expressed protein; protein id: At4g23490.1, by cDNA: gi_15529152 [Arabidopsis thaliana]
  misc_feature (1)..(491): Homolog of NCBI NO: 15529153 NR Description: AT4g23490/F16G20_190 [Arabidopsis thaliana]
  misc_feature (72)..(491): Homolog of NCBI NO: 15233347 NR Description: putative protein; protein id: At4g11350.1
  misc_feature (1)..(27): Homolog of NCBI NO: 15233347 NR Description: putative protein; protein id: At4g11350.1
  misc_feature (61)..(491): Homolog of NCBI NO: 37536418 NR Description: hypothetical protein [Oryza sativa (japonica group)] >gi|22002140|gb|AAM88624.1| hypothetical protein [Oryza
  misc_feature (38)..(490): Homolog of NCBI NO: 15223433 NR Description: hypothetical protein; protein id: At1g01570.1
  misc_feature (38)..(490): Homolog of NCBI NO: 25336194 NR Description: F22L4.11 protein - Arabidopsis thaliana Contains similarity to a hypothetical protein F16G20.190
  misc_feature (78)..(459): Homolog of NCBI NO: 7485555 NR Description: hypothetical protein F16G20.190 - Arabidopsis >gi|3451074|emb|CAA20470.1| putative protein [Arabidopsis >gi|7269197|emb|CAB79304.1| putative protein [Arabidopsis
  misc_feature (141)..(459): Homolog of NCBI NO: 15223021 NR Description: hypothetical protein; protein id: At1g07850.1
MVTLLLLVSATYVVYTLKLISNSRACQVEPFSAVVRRLNDIVNSSQPLILFHTNQTAVIKSYASPPPSPPPPPPPPQTGFQHVVFGIAASARLWKQRKEYIKIWYKPNQMRSYVWLEKPVTEEDEEDEISLPPVKISGDTSKFPYKNKQGHRSAIRISRIVTETLKLGLKDVRWFVMGDDDTVFVAENLIRVLRKYDHNQMYYIGSLSESHLQNIYFSYGMAYGGGGFAISYPLAVALSKMQDRCIKRYPALYGSDDRMQACMAELGVPLTKELGFHQYDVYGNLFGLLAAHPVAPLVTLHHLDVVEPIFPNMTRVDALKHLQVPAKLDSAGLMQQSICYDKRRKWTVSVSWGFAVQIFRGIFSAREIEMPSRTFLNWYRRADYTAYAFNTRPVSRHPCQKPFVFYMTSTRVHRVTNMTVSRYEIHRVAHPECRWKMANPSDIKTVIVYKKPDPHLWDRSPRRNCCRVKSKKNNTLEISVAVCKEGEVVEVV

SEQ ID NO: 81729 - DNA, 1350 bp, Arabidopsis thaliana
  misc_feature (1)..(1350): Ceres Seq. ID no. 12661103
  misc_feature: MA Experiment ID: 20001451 Result: Up-regulated in Transcription
  misc_feature: MA Experiment 20001451 PARAMETER Experiment Name: At_Far-red-induction_P Parameter: Age (day) Value: 7
  misc_feature: MA Experiment 20001451 PARAMETER Experiment Name: At_Far-red-induction_P Parameter: Light Value: Far-red vs. White
  misc_feature: MA Experiment 20001451 PARAMETER Experiment Name: At_Far-red-induction_P Parameter: Organism Value: A. thaliana
  misc_feature: MA Experiment 20001451 PARAMETER Experiment Name: At_Far-red-induction_P Parameter: Plant Line Value: Columbia
  misc_feature: MA Experiment 20001451 PARAMETER Experiment Name: At_Far-red-induction_P Parameter: Timepoint (hr) Value: 24
  misc_feature: MA Experiment 20001451 PARAMETER Experiment Name: At_Far-red-induction_P Parameter: Tissue Value: Whole Plant
atgaagatttctcaagctccgatctctgttttcgtactcttcttgctctccactgttttgcctcaccatctctcactgggagctccgattacatgctctggtatagttccaatgaaacacagaaacgagatgctatcaatttcggattttggagctgtcggtgacggcaagaccttgaacaccaaagcattcaattcagctattgatcggatacgaaactccaataacagtaacgaaggaactcttctttatgtgcctcgtggtgtgtatttgactcaaagcttcaatcttacgagtcacatgactttatacctcgccgatggtgctgttattaaagccgttcaggatacggagaaatggcctttgaccgatcctttgccgtcttatggaagaggacgggagcatcctggacgaagatatatcagctttattcacggagacggactcaacgacgttgttattacaggcagaaatgggacgattgatggccaaggagaaccttggtggaacatgtggagacatggaactctaaagtttaccagacctggtctcatcgaattcaacaactcaacaaacatcctcgtctctcatgttgttcttcagaactcccctttctggacacttcatccggtttattgcagtaatgttgttgttcatcatgttactatcctcgctccaactgattcgtacaacaccgatggaattgatccagattcaagctctaacgtctgtatagaagactcctacatatctactggtgacgaccttgttgcggtgaagagcggttgggacgagtatggcattgcatacaaccgtccaagccgtgacatcaccatccgccgcatcactggatcttccccatttgctggaatagccatcggaagcgaaacttctggcggaatccaaaatgtaacagttgaaaacatcactctctacaattctggtatcggcatccacatcaagacaaacattggccgaggaggaagcatacaggggataacaatctccggggtttacctagaaaaagtccggaccgggattaagatctctggcgacaccggagatcatccagacgataaattcaacacatccgctcttcccatagtaagaggcataacgatcaagaacgtatggggcatcaaagtcgagcgtgctggcatggttcagggattaaaagattcacctttcaccaatctctgcttctccaatgttacactgaccggaacaaaaaggtctccaatatggaaatgctcagatgtcgtaggagccgctgacaaggtcaaccccacaccttgccctgaactaagcgcaaccacacaacaaggtggttcctgtgaaaaccaatcctaa

SEQ ID NO: 81730 - protein, 449 aa, Arabidopsis thaliana
  peptide (1)..(449): Ceres Seq. ID no. 12661104
  misc_feature (159)..(432): Pfam Name: Glycosyl hydrolases family 28 Pfam Description: Glycosyl hydrolases family 28
  misc_feature (1)..(449): Homolog of NCBI NO: 15238207 NR Description: polygalacturonase, putative; protein id:
  misc_feature (13)..(444): Homolog of NCBI NO: 15236625 NR Description: polygalacturonase, putative; protein id: supported by cDNA: gi_17065241 [Arabidopsis thaliana]
  misc_feature (27)..(447): Homolog of NCBI NO: 34912726 NR Description: putative polygalacturonase [Oryza sativa cultivar- group)] >gi|15623906|dbj|BAB67963.1| putative
  misc_feature (29)..(435): Homolog of NCBI NO: 22329119 NR Description: polygalacturonase, putative; protein id: [Arabidopsis thaliana] >gi|27754320|gb|AAO22613.1| putative [Arabidopsis thaliana] >gi|28393881|gb|AAO42348.1| putative
  misc_feature (25)..(445): Homolog of NCBI NO: 18412253 NR Description: polygalacturonase, putative; protein id: supported by cDNA: gi_13358184 [Arabidopsis thaliana] AT3g62110 [Arabidopsis thaliana] >gi|23397166|gb|AAN31866.1|
  misc_feature (25)..(445): Homolog of NCBI NO: 11263971 NR Description: hypothetical protein T17J13.70 - Arabidopsis >gi|6899921|emb|CAB71871.1| putative protein [Arabidopsis
  misc_feature (1)..(445): Homolog of NCBI NO: 40714685 NR Description: putative polygalacturonase [Oryza sativa
  misc_feature (1)..(445): Homolog of NCBI NO: 34897760 NR Description: ESTs AU029388(E30287),D49277(S16474) correspond a region of the predicted gene.~Similar to Arabidopsis thaliana
  misc_feature (65)..(445): Homolog of NCBI NO: 34393209 NR Description: putative polygalacturonase [Oryza sativa
  misc_feature (8)..(444): Homolog of NCBI NO: 7939578 NR Description: polygalacturonase-like protein [Arabidopsis
MKISQAPISVFVLFLLSTVLPHHLSLGAPITCSGIVPMKHRNEMLSISDFGAVGDGKTLNTKAFNSAIDRIRNSNNSNEGTLLYVPRGVYLTQSFNLTSHMTLYLADGAVIKAVQDTEKWPLTDPLPSYGRGREHPGRRYISFIHGDGLNDVVITGRNGTIDGQGEPWWNMWRHGTLKFTRPGLIEFNNSTNILVSHVVLQNSPFWTLHPVYCSNVVVHHVTILAPTDSYNTDGIDPDSSSNVCIEDSYISTGDDLVAVKSGWDEYGIAYNRPSRDITIRRITGSSPFAGIAIGSETSGGIQNVTVENITLYNSGIGIHIKTNIGRGGSIQGITISGVYLEKVRTGIKISGDTGDHPDDKFNTSALPIVRGITIKNVWGIKVERAGMVQGLKDSPFTNLCFSNVTLTGTKRSPIWKCSDVVGAADKVNPTPCPELSATTQQGGSCENQS

SEQ ID NO: 81731 - protein, 412 aa, Arabidopsis thaliana
  peptide (1)..(412): Ceres Seq. ID no. 12661105
  misc_feature (122)..(395): Pfam Name: Glycosyl hydrolases family 28 Pfam Description: Glycosyl hydrolases family 28
  misc_feature (1)..(412): Homolog of NCBI NO: 15238207 NR Description: polygalacturonase, putative; protein id:
  misc_feature (1)..(407): Homolog of NCBI NO: 15236625 NR Description: polygalacturonase, putative; protein id: supported by cDNA: gi_17065241 [Arabidopsis thaliana]
  misc_feature (1)..(410): Homolog of NCBI NO: 34912726 NR Description: putative polygalacturonase [Oryza sativa cultivar- group)] >gi|15623906|dbj|BAB67963.1| putative
  misc_feature (1)..(398): Homolog of NCBI NO: 22329119 NR Description: polygalacturonase, putative; protein id: [Arabidopsis thaliana] >gi|27754320|gb|AAO22613.1| putative [Arabidopsis thaliana] >gi|28393881|gb|AAO42348.1| putative
  misc_feature (1)..(408): Homolog of NCBI NO: 18412253 NR Description: polygalacturonase, putative; protein id: supported by cDNA: gi_13358184 [Arabidopsis thaliana] AT3g62110 [Arabidopsis thaliana] >gi|23397166|gb|AAN31866.1|
  misc_feature (1)..(408): Homolog of NCBI NO: 11263971 NR Description: hypothetical protein T17J13.70 - Arabidopsis >gi|6899921|emb|CAB71871.1| putative protein [Arabidopsis
  misc_feature (1)..(408): Homolog of NCBI NO: 40714685 NR Description: putative polygalacturonase [Oryza sativa
  misc_feature (1)..(408): Homolog of NCBI NO: 34897760 NR Description: ESTs AU029388(E30287),D49277(S16474) correspond a region of the predicted gene.~Similar to Arabidopsis thaliana
  misc_feature (28)..(408): Homolog of NCBI NO: 34393209 NR Description: putative polygalacturonase [Oryza sativa
  misc_feature (1)..(407): Homolog of NCBI NO: 7939578 NR Description: polygalacturonase-like protein [Arabidopsis
MKHRNEMLSISDFGAVGDGKTLNTKAFNSAIDRIRNSNNSNEGTLLYVPRGVYLTQSFNLTSHMTLYLADGAVIKAVQDTEKWPLTDPLPSYGRGREHPGRRYISFIHGDGLNDVVITGRNGTIDGQGEPWWNMWRHGTLKFTRPGLIEFNNSTNILVSHVVLQNSPFWTLHPVYCSNVVVHHVTILAPTDSYNTDGIDPDSSSNVCIEDSYISTGDDLVAVKSGWDEYGIAYNRPSRDITIRRITGSSPFAGIAIGSETSGGIQNVTVENITLYNSGIGIHIKTNIGRGGSIQGITISGVYLEKVRTGIKISGDTGDHPDDKFNTSALPIVRGITIKNVWGIKVERAGMVQGLKDSPFTNLCFSNVTLTGTKRSPIWKCSDVVGAADKVNPTPCPELSATTQQGGSCENQS

SEQ ID NO: 81732 - protein, 406 aa, Arabidopsis thaliana
  peptide (1)..(406): Ceres Seq. ID no. 12661106
  misc_feature (116)..(389): Pfam Name: Glycosyl hydrolases family 28 Pfam Description: Glycosyl hydrolases family 28
  misc_feature (1)..(406): Homolog of NCBI NO: 15238207 NR Description: polygalacturonase, putative; protein id:
  misc_feature (1)..(401): Homolog of NCBI NO: 15236625 NR Description: polygalacturonase, putative; protein id: supported by cDNA: gi_17065241 [Arabidopsis thaliana]
  misc_feature (1)..(404): Homolog of NCBI NO: 34912726 NR Description: putative polygalacturonase [Oryza sativa cultivar- group)] >gi|15623906|dbj|BAB67963.1| putative
  misc_feature (1)..(392): Homolog of NCBI NO: 22329119 NR Description: polygalacturonase, putative; protein id: [Arabidopsis thaliana] >gi|27754320|gb|AAO22613.1| putative [Arabidopsis thaliana] >gi|28393881|gb|AAO42348.1| putative
  misc_feature (1)..(402): Homolog of NCBI NO: 18412253 NR Description: polygalacturonase, putative; protein id: supported by cDNA: gi_13358184 [Arabidopsis thaliana] AT3g62110 [Arabidopsis thaliana] >gi|23397166|gb|AAN31866.1|
  misc_feature (1)..(402): Homolog of NCBI NO: 11263971 NR Description: hypothetical protein T17J13.70 - Arabidopsis >gi|6899921|emb|CAB71871.1| putative protein [Arabidopsis
  misc_feature (1)..(402): Homolog of NCBI NO: 40714685 NR Description: putative polygalacturonase [Oryza sativa
  misc_feature (1)..(402): Homolog of NCBI NO: 34897760 NR Description: ESTs AU029388(E30287),D49277(S16474) correspond a region of the predicted gene.~Similar to Arabidopsis thaliana
  misc_feature (22)..(402): Homolog of NCBI NO: 34393209 NR Description: putative polygalacturonase [Oryza sativa
  misc_feature (1)..(401): Homolog of NCBI NO: 7939578 NR Description: polygalacturonase-like protein [Arabidopsis
MLSISDFGAVGDGKTLNTKAFNSAIDRIRNSNNSNEGTLLYVPRGVYLTQSFNLTSHMTLYLADGAVIKAVQDTEKWPLTDPLPSYGRGREHPGRRYISFIHGDGLNDVVITGRNGTIDGQGEPWWNMWRHGTLKFTRPGLIEFNNSTNILVSHVVLQNSPFWTLHPVYCSNVVVHHVTILAPTDSYNTDGIDPDSSSNVCIEDSYISTGDDLVAVKSGWDEYGIAYNRPSRDITIRRITGSSPFAGIAIGSETSGGIQNVTVENITLYNSGIGIHIKTNIGRGGSIQGITISGVYLEKVRTGIKISGDTGDHPDDKFNTSALPIVRGITIKNVWGIKVERAGMVQGLKDSPFTNLCFSNVTLTGTKRSPIWKCSDVVGAADKVNPTPCPELSATTQQGGSCENQS

SEQ ID NO: 81733 - DNA, 1521 bp, Arabidopsis thaliana
  misc_feature (1)..(1521): Ceres Seq. ID no. 12661114
  misc_feature: MA Experiment ID: 20000184 Result: Down-regulated in Transcription
  misc_feature: MA Experiment 20000184 PARAMETER Experiment Name: At_Shoots__P Parameter: Age (day) Value: 7
  misc_feature: MA Experiment 20000184 PARAMETER Experiment Name: At_Shoots__P Parameter: Tissue Value: Shoots vs. Whole Plant
  misc_feature: MA Experiment ID: 20001451 Result: Up-regulated in Transcription
  misc_feature: MA Experiment 20001451 PARAMETER Experiment Name: At_Far-red-induction_P Parameter: Age (day) Value: 7
  misc_feature: MA Experiment 20001451 PARAMETER Experiment Name: At_Far-red-induction_P Parameter: Light Value: Far-red vs. White
  misc_feature: MA Experiment 20001451 PARAMETER Experiment Name: At_Far-red-induction_P Parameter: Organism Value: A. thaliana
  misc_feature: MA Experiment 20001451 PARAMETER Experiment Name: At_Far-red-induction_P Parameter: Plant Line Value: Columbia
  misc_feature: MA Experiment 20001451 PARAMETER Experiment Name: At_Far-red-induction_P Parameter: Timepoint (hr) Value: 24
  misc_feature: MA Experiment 20001451 PARAMETER Experiment Name: At_Far-red-induction_P Parameter: Tissue Value: Whole Plant
atgatcttttgtcttctggtccttattctaattcttggcatctcttggactgtttctgtatgtagtgatgaagtggttaagagtcttagaggaagcattggatcaccgtggtcactaaggagaagaaagcgagttcttcaacctaaacaatggaatgcttttttcacagaggaagggcgactcagtgatggaggtgtcaaatttctgaagaaagttcgtagtgggggtgtacatccaagcatcagaccagaagtttggccgttccttcttggagtgtatgacttaaagagcaacaaagaagaaagagactccattcgacagctgaaactgacggaatatgaaaacctgcggagacagtgtcgcgagattcatgaacgctatgaaaatgtctgcgactcaaaggagacagctcagagcagcaacactgaagacagtcaggttcttgaatcccatgatattgaggaagtcgagagttccacaagaaccatcaccgtagatgaatcagagaagttgaattctgaatcgattatgcaggatgagaactgtgaaaagagcgatgtcaccacagaagatgctgctggtaatgattcagactcaaccaatcctgaagaaaccgagacttcaccttttctagctaacgaagaagtagaaagccacaatactgttaaccaagaaaaagaaatttcgtctccatcatcaaagccaaaatctcaggcagcggacgaggatttcatgtcaacttggcagagaattatccgcctagatgctgtgagagcaaatgacgaatgggtgccctactcaccaactcaagctgctgtttctgagacaaaagcccggggaatagccattcaggttggtctcaatgactatgaccacttggaaccctgccggatatttcacgcagcccgcctggtcgggatccttgaagcctacgcagtctatgatccagaaattggttactgtcaaggaatgagcgacttactatctcctttaatcgcagtgatggaagacgacgtcttagcattctggtgctttgttggcttcatgagtaaagcacggcataatttccggttagacgaggttggaatcaggcggcaactctcaatggtatcgaaaatcataaaattcaaagacattcacttgtaccgacacttggagaaccttgaagcagaagactgcttctttgtataccgtatggttgtagttctgttcagacgagaactaacctttgagcagacgttgtgtctctgggaagtaatgtgggcggatcaagctgcaatacgaactgggattgcgaaggcgacatgggggagaatccggttacgagcaccaccgacagaagatttgttgctttacgcgatagctgcaagcgtgctgcagaggaggaagacgataatagagaaatacagtgggatggatgagataatgaaggaatgtaacagcatggctggtcatcttgatgtttggaaacttctagacgatgctcatgacttagtcgtcaatcttcacgacaagatctaa

SEQ ID NO: 81734 - protein, 506 aa, Arabidopsis thaliana
  peptide (1)..(506): Ceres Seq. ID no. 12661115
  misc_feature (1)..(506): Homolog of NCBI NO: 15238237 NR Description: GTPase activator protein of Rab-like small
  misc_feature (35)..(506): Homolog of NCBI NO: 9759196 NR Description: GTPase activator protein of Rab-like small
  misc_feature (35)..(506): Homolog of NCBI NO: 15238777 NR Description: GTPase activator protein of Rab-like small protein; protein id: At5g53570.1, supported by cDNA: gi_14517421, by cDNA: gi_20908079 [Arabidopsis thaliana]
  misc_feature (35)..(506): Homolog of NCBI NO: 15238518 NR Description: GTPase activator-like protein of Rab-like small protein id: At5g24390.1 [Arabidopsis thaliana]
  misc_feature (133)..(506): Homolog of NCBI NO: 37536102 NR Description: putative GTPase activating protein [Oryza sativa
  misc_feature (112)..(506): Homolog of NCBI NO: 15229125 NR Description: GTPase activating -like protein; protein id:
  misc_feature (284)..(422): Homolog of NCBI NO: 23296366 NR Description: unknown protein [Arabidopsis thaliana]
  misc_feature (44)..(123): Homolog of NCBI NO: 23296366 NR Description: unknown protein [Arabidopsis thaliana]
  misc_feature (284)..(422): Homolog of NCBI NO: 15239749 NR Description: putative protein; protein id: At5g54780.1 thaliana] >gi|9758258|dbj|BAB08757.1| contains similarity to
  misc_feature (44)..(123): Homolog of NCBI NO: 15239749 NR Description: putative protein; protein id: At5g54780.1 thaliana] >gi|9758258|dbj|BAB08757.1| contains similarity to
MIFCLLVLILILGISWTVSVCSDEVVKSLRGSIGSPWSLRRRKRVLQPKQWNAFFTEEGRLSDGGVKFLKKVRSGGVHPSIRPEVWPFLLGVYDLKSNKEERDSIRQLKLTEYENLRRQCREIHERYENVCDSKETAQSSNTEDSQVLESHDIEEVESSTRTITVDESEKLNSESIMQDENCEKSDVTTEDAAGNDSDSTNPEETETSPFLANEEVESHNTVNQEKEISSPSSKPKSQAADEDFMSTWQRIIRLDAVRANDEWVPYSPTQAAVSETKARGIAIQVGLNDYDHLEPCRIFHAARLVGILEAYAVYDPEIGYCQGMSDLLSPLIAVMEDDVLAFWCFVGFMSKARHNFRLDEVGIRRQLSMVSKIIKFKDIHLYRHLENLEAEDCFFVYRMVVVLFRRELTFEQTLCLWEVMWADQAAIRTGIAKATWGRIRLRAPPTEDLLLYAIAASVLQRRKTIIEKYSGMDEIMKECNSMAGHLDVWKLLDDAHDLVVNLHDKI

SEQ ID NO: 81735 - protein, 330 aa, Arabidopsis thaliana
  peptide (1)..(330): Ceres Seq. ID no. 12661116
  misc_feature (1)..(330): Homolog of NCBI NO: 15238237 NR Description: GTPase activator protein of Rab-like small
  misc_feature (1)..(330): Homolog of NCBI NO: 9759196 NR Description: GTPase activator protein of Rab-like small
  misc_feature (1)..(330): Homolog of NCBI NO: 15238777 NR Description: GTPase activator protein of Rab-like small protein; protein id: At5g53570.1, supported by cDNA: gi_14517421, by cDNA: gi_20908079 [Arabidopsis thaliana]
  misc_feature (1)..(330): Homolog of NCBI NO: 15238518 NR Description: GTPase activator-like protein of Rab-like small protein id: At5g24390.1 [Arabidopsis thaliana]
  misc_feature (1)..(330): Homolog of NCBI NO: 37536102 NR Description: putative GTPase activating protein [Oryza sativa
  misc_feature (1)..(330): Homolog of NCBI NO: 15229125 NR Description: GTPase activating -like protein; protein id:
  misc_feature (108)..(246): Homolog of NCBI NO: 23296366 NR Description: unknown protein [Arabidopsis thaliana]
  misc_feature (108)..(246): Homolog of NCBI NO: 15239749 NR Description: putative protein; protein id: At5g54780.1 thaliana] >gi|9758258|dbj|BAB08757.1| contains similarity to
  misc_feature (84)..(246): Homolog of NCBI NO: 30688016 NR Description: expressed protein [Arabidopsis thaliana]
  misc_feature (1)..(33): Homolog of NCBI NO: 15224288 NR Description: hypothetical protein; protein id: At2g43490.1
MQDENCEKSDVTTEDAAGNDSDSTNPEETETSPFLANEEVESHNTVNQEKEISSPSSKPKSQAADEDFMSTWQRIIRLDAVRANDEWVPYSPTQAAVSETKARGIAIQVGLNDYDHLEPCRIFHAARLVGILEAYAVYDPEIGYCQGMSDLLSPLIAVMEDDVLAFWCFVGFMSKARHNFRLDEVGIRRQLSMVSKIIKFKDIHLYRHLENLEAEDCFFVYRMVVVLFRRELTFEQTLCLWEVMWADQAAIRTGIAKATWGRIRLRAPPTEDLLLYAIAASVLQRRKTIIEKYSGMDEIMKECNSMAGHLDVWKLLDDAHDLVVNLHDKI

SEQ ID NO: 81736 - protein, 262 aa, Arabidopsis thaliana
  peptide (1)..(262): Ceres Seq. ID no. 12661117
  misc_feature (1)..(262): Homolog of NCBI NO: 15238237 NR Description: GTPase activator protein of Rab-like small
  misc_feature (1)..(262): Homolog of NCBI NO: 9759196 NR Description: GTPase activator protein of Rab-like small
  misc_feature (1)..(262): Homolog of NCBI NO: 15238777 NR Description: GTPase activator protein of Rab-like small protein; protein id: At5g53570.1, supported by cDNA: gi_14517421, by cDNA: gi_20908079 [Arabidopsis thaliana]
  misc_feature (1)..(262): Homolog of NCBI NO: 15238518 NR Description: GTPase activator-like protein of Rab-like small protein id: At5g24390.1 [Arabidopsis thaliana]
  misc_feature (1)..(262): Homolog of NCBI NO: 37536102 NR Description: putative GTPase activating protein [Oryza sativa
  misc_feature (1)..(262): Homolog of NCBI NO: 15229125 NR Description: GTPase activating -like protein; protein id:
  misc_feature (40)..(178): Homolog of NCBI NO: 23296366 NR Description: unknown protein [Arabidopsis thaliana]
  misc_feature (40)..(178): Homolog of NCBI NO: 15239749 NR Description: putative protein; protein id: At5g54780.1 thaliana] >gi|9758258|dbj|BAB08757.1| contains similarity to
  misc_feature (16)..(178): Homolog of NCBI NO: 30688016 NR Description: expressed protein [Arabidopsis thaliana]
  misc_feature (59)..(178): Homolog of NCBI NO: 15224288 NR Description: hypothetical protein; protein id: At2g43490.1
MSTWQRIIRLDAVRANDEWVPYSPTQAAVSETKARGIAIQVGLNDYDHLEPCRIFHAARLVGILEAYAVYDPEIGYCQGMSDLLSPLIAVMEDDVLAFWCFVGFMSKARHNFRLDEVGIRRQLSMVSKIIKFKDIHLYRHLENLEAEDCFFVYRMVVVLFRRELTFEQTLCLWEVMWADQAAIRTGIAKATWGRIRLRAPPTEDLLLYAIAASVLQRRKTIIEKYSGMDEIMKECNSMAGHLDVWKLLDDAHDLVVNLHDKI

SEQ ID NO: 81737 - DNA, 1239 bp, Arabidopsis thaliana
  misc_feature (1)..(1239): Ceres Seq. ID no. 12661132
  misc_feature: MA Experiment ID: 20000184 Result: Up-regulated in Transcription
  misc_feature: MA Experiment 20000184 PARAMETER Experiment Name: At_Shoots__P Parameter: Age (day) Value: 7
  misc_feature: MA Experiment 20000184 PARAMETER Experiment Name: At_Shoots__P Parameter: Tissue Value: Shoots vs. Whole Plant
  misc_feature: MA Experiment ID: 20000495 Result: Down-regulated in Transcription
  misc_feature: MA Experiment 20000495 PARAMETER Experiment Name: At_Guard_Cells_P Parameter: Harvest Date Value: 8/2/2002
  misc_feature: MA Experiment 20000495 PARAMETER Experiment Name: At_Guard_Cells_P Parameter: Organism Value: A. thaliana
  misc_feature: MA Experiment 20000495 PARAMETER Experiment Name: At_Guard_Cells_P Parameter: Tissue Value: Guard Cells vs. Leaves
  misc_feature: MA Experiment ID: 20000794 Result: Down-regulated in Transcription
  misc_feature: MA Experiment 20000794 PARAMETER Experiment Name: At_Petals_P Parameter: Age (day) Value: 23-25 days
  misc_feature: MA Experiment 20000794 PARAMETER Experiment Name: At_Petals_P Parameter: Plant Line Value: WS
  misc_feature: MA Experiment 20000794 PARAMETER Experiment Name: At_Petals_P Parameter: Tissue Value: Petals vs. Whole plant
  misc_feature: MA Experiment ID: 20001451 Result: Down-regulated in Transcription
  misc_feature: MA Experiment 20001451 PARAMETER Experiment Name: At_Far-red-induction_P Parameter: Age (day) Value: 7
  misc_feature: MA Experiment 20001451 PARAMETER Experiment Name: At_Far-red-induction_P Parameter: Light Value: Far-red vs. White
  misc_feature: MA Experiment 20001451 PARAMETER Experiment Name: At_Far-red-induction_P Parameter: Organism Value: A. thaliana
  misc_feature: MA Experiment 20001451 PARAMETER Experiment Name: At_Far-red-induction_P Parameter: Plant Line Value: Columbia
  misc_feature: MA Experiment 20001451 PARAMETER Experiment Name: At_Far-red-induction_P Parameter: Timepoint (hr) Value: 24
  misc_feature: MA Experiment 20001451 PARAMETER Experiment Name: At_Far-red-induction_P Parameter: Tissue Value: Whole Plant
atggaagctagactctccgaaactcttggcctcccatctccaaatcttaatcactgccattttcccaacgagttcaattctctcttcactcatttctccgatctcacctccgtccaaagccctatcgtcagaaaccctaaactcaaaaccaaatcctctcaaaaacccccaaaattttcagcaaatttcagaagatccgacccaccatttgcatcaacatcaatctcggatccaacccacgaaaaacccggacccgaattcctgaaatggatcaaacccgcatcacgaagcagtccaagaattcaaacactcatcaaacaactctccgtctgggaacgtgccatcatcggtgcaggagccggtggactcgccggagctttcacatacgttactcttctcccacttgacgcaatcaaaaccaagcttcaaaccaaaggcgcttctcaggtttatagtaacacatttgatgctatagtgaaaacctttcaagctaaaggtatattaggtttctatagtggtgtctccgccgtgattgttggctctacgttttcctccgccgtgtatttcggtacttgtgagtttggtaagtctctgctctctaagttccctgattttccgacggttttaatcccgcctactgctggtgctatgggaaacataatctcttcagctataatggttcctaaagagctcattacacagagaatgcaagctggagctagtgggagatcttatcaagttttacttaagatacttgagaaagatggaatcttggggctttacgccggttattcggctacattgttgaggaatttacccgctggtgtactcagttattcgtcgtttgagtatctgaaagccgcggttttggagaaaacgaagcagagccatcttgagcctttgcagagtgtttgttgcggtgcgttggctggtgcgatatcggcttcgataactacgccgttagatgttgtgaagactaggctgatgacacagattcatgtggaggctgtggataaactcggtggtgctatgtatactggtgttgctgggacagtgaagcagatattgacagaggaaggttgggttggttttacccgcggcatgggacctcgagttgttcacagcgcttgtttctctgcgatcggttattttgcctttgagactgctaggcttacaatcttgaatgaatatttgaaaaggaaagaagagtctgaagctaacgttgctgctgattcttga

SEQ ID NO: 81738 - protein, 412 aa, Arabidopsis thaliana
  peptide (1)..(412): Ceres Seq. ID no. 12661133
  misc_feature (1)..(412): Homolog of NCBI NO: 15238301 NR Description: mitochondrial carrier protein-like; protein id: [Arabidopsis thaliana] >gi|9757958|dbj|BAB08446.1| mitochondrial
  misc_feature (113)..(411): Homolog of NCBI NO: 34905862 NR Description: P0458E05.7 [Oryza sativa (japonica
  misc_feature (121)..(396): Homolog of NCBI NO: 18399114 NR Description: allinase, putative; protein id: At1g34065.1
  misc_feature (120)..(403): Homolog of NCBI NO: 18420458 NR Description: mitochondrial carrier protein family; protein id: supported by cDNA: 32654., supported by cDNA: gi_15028274, by cDNA: gi_19310698 [Arabidopsis thaliana]
  misc_feature (117)..(401): Homolog of NCBI NO: 34394981 NR Description: mitochondrial aspartate-glutamate carrier
  misc_feature (120)..(394): Homolog of NCBI NO: 27754081 NR Description: RIKEN cDNA 4930433D19; expressed sequence [Mus musculus] >gi|22477482|gb|AAH37142.1| Unknown (protein for
  misc_feature (120)..(390): Homolog of NCBI NO: 6322905 NR Description: mitochondrial carrier protein, highly homologous Mrs3p; Mrs4p [Saccharomyces cerevisiae] Mitochondrial RNA splicing protein MRS4 >gi|83338|pir||S13533
  misc_feature (120)..(404): Homolog of NCBI NO: 27803005 NR Description: unnamed protein product [Podospora anserina]
  misc_feature (120)..(390): Homolog of NCBI NO: 3991 NR Description: ORF (MRS3) (AA 1-314) [Saccharomyces cerevisiae]
  misc_feature (121)..(389): Homolog of NCBI NO: 17539504 NR Description: Agpet8 (29.0 kD) [Caenorhabditis elegans]
MEARLSETLGLPSPNLNHCHFPNEFNSLFTHFSDLTSVQSPIVRNPKLKTKSSQKPPKFSANFRRSDPPFASTSISDPTHEKPGPEFLKWIKPASRSSPRIQTLIKQLSVWERAIIGAGAGGLAGAFTYVTLLPLDAIKTKLQTKGASQVYSNTFDAIVKTFQAKGILGFYSGVSAVIVGSTFSSAVYFGTCEFGKSLLSKFPDFPTVLIPPTAGAMGNIISSAIMVPKELITQRMQAGASGRSYQVLLKILEKDGILGLYAGYSATLLRNLPAGVLSYSSFEYLKAAVLEKTKQSHLEPLQSVCCGALAGAISASITTPLDVVKTRLMTQIHVEAVDKLGGAMYTGVAGTVKQILTEEGWVGFTRGMGPRVVHSACFSAIGYFAFETARLTILNEYLKRKEESEANVAADS

SEQ ID NO: 81739 - DNA, 1524 bp, Arabidopsis thaliana
  misc_feature (1)..(1524): Ceres Seq. ID no. 12661138
  misc_feature: MA Experiment ID: 20000234 Result: Up-regulated in Transcription
  misc_feature: MA Experiment 20000234 PARAMETER Experiment Name: At_Siliques_P Parameter: Age (day) Value: 21
  misc_feature: MA Experiment 20000234 PARAMETER Experiment Name: At_Siliques_P Parameter: Organism Value: A. thaliana
  misc_feature: MA Experiment 20000234 PARAMETER Experiment Name: At_Siliques_P Parameter: Plant Line Value: WS
  misc_feature: MA Experiment 20000234 PARAMETER Experiment Name: At_Siliques_P Parameter: Tissue Value: Less Than 5mm Siliques vs. Whole Plant
  misc_feature: MA Experiment ID: 20000496 Result: Down-regulated in Transcription
  misc_feature: MA Experiment 20000496 PARAMETER Experiment Name: At_Guard_Cells_P Parameter: Harvest Date Value: 7/19/2002
  misc_feature: MA Experiment 20000496 PARAMETER Experiment Name: At_Guard_Cells_P Parameter: Organism Value: Canola
  misc_feature: MA Experiment 20000496 PARAMETER Experiment Name: At_Guard_Cells_P Parameter: Tissue Value: Guard Cells vs. Leaves
  misc_feature: MA Experiment ID: 20000527 Result: Down-regulated in Transcription
  misc_feature: MA Experiment 20000527 PARAMETER Experiment Name: At_10percent_PEG_P Parameter: Age (day) Value: 20
  misc_feature: MA Experiment 20000527 PARAMETER Experiment Name: At_10percent_PEG_P Parameter: Organism Value: A. thaliana
  misc_feature: MA Experiment 20000527 PARAMETER Experiment Name: At_10percent_PEG_P Parameter: Plant Line Value: WS
  misc_feature: MA Experiment 20000527 PARAMETER Experiment Name: At_10percent_PEG_P Parameter: Timepoint (day) Value: 20
  misc_feature: MA Experiment 20000527 PARAMETER Experiment Name: At_10percent_PEG_P Parameter: Tissue Value: Whole Plant
  misc_feature: MA Experiment 20000527 PARAMETER Experiment Name: At_10percent_PEG_P Parameter: Treatment Value: 10percent PEG vs. No Treatment
  misc_feature: MA Experiment ID: 20001557 Result: Up-regulated in Transcription
  misc_feature: MA Experiment 20001557 PARAMETER Experiment Name: At_Drought_Soil_Dry_P Parameter: Age (day) Value: 27
  misc_feature: MA Experiment 20001557 PARAMETER Experiment Name: At_Drought_Soil_Dry_P Parameter: Organism Value: A. thaliana
  misc_feature: MA Experiment 20001557 PARAMETER Experiment Name: At_Drought_Soil_Dry_P Parameter: Plant Line Value: WS
  misc_feature: MA Experiment 20001557 PARAMETER Experiment Name: At_Drought_Soil_Dry_P Parameter: Post Timepoint (hr) Value: 3
  misc_feature: MA Experiment 20001557 PARAMETER Experiment Name: At_Drought_Soil_Dry_P Parameter: Post-Treatment Value: Re-Water vs. No Drought
  misc_feature: MA Experiment 20001557 PARAMETER Experiment Name: At_Drought_Soil_Dry_P Parameter: Timepoint (day) Value: 13
  misc_feature: MA Experiment 20001557 PARAMETER Experiment Name: At_Drought_Soil_Dry_P Parameter: Treatment Value: Drought vs. No Drought
atgagaactatatatctttctttgctagtgtttattattgtcttggctttgaatgaagttatggccaagaaacactcctcaacacctaaattaagaagaagtgattttccagaagattttatttttggagctgcaacgtcagcttaccaagtcgaaggagctgcccatgaagatggtagaggtccaagtatttgggatacattctctgagaaatatccggagaagataaaagatggtagcaatggatctattgcaagtgattcttaccatctttacaaggaagatgtgggtttactacatcaaattggtttcgatgcctatagattctccatctcgtggtcgaggatcttgccacgtgagaatctaaaaggaggaatcaaccaagctggtattgactattacaacaacttgatcaatgagcttttgtctaaaggaattaagccattcgccaccattttccattgggacacaccgcaaagccttgaagatgcttatggagggttccttggcgcggagattgtgaatgatttccgtgattatgcggatatttgtttcaagaattttggagatcgagtgaagcattggatgacattgaacgagccattaacagttgtgcaacaaggatatgttgctggtgtaatggctccaggaaggtgttcaaaattcacaaaccctaactgcaccgcgggaaatggagctaccgagccttatattgttggtcacaacctcattcttgcacatggagaagcagtcaaagtatacagagaaaaatataaggcatctcaaaaaggtcaagttggtatcgccttaaacgcgggttggaacttaccttattcagaatcagctgaagataggttagctgcggcaagagctatggccttcacattcgactatttcatggagccgcttgtaaccggtaaatacccgattgacatggtcaactacgtaaaaggcggtcgcttacctacatttactgcaaaacaatctaaaatgttgaagggatcatatgatttcattggcagaaattattactcatcttcttacgctaaggatgttccttgctcaagcgaaaacgttacattattctctgatccttgtgctagcgtcacaggtgaaagagaaggagtgcctatcggtccaaaggcagcatcagattggcttttgatatatccaaaaggaattcgtgatctccttctctatgcaaaatacaagttcaaggatcctgtcatgtacataaccgaaaatggtagagatgaagctagtaccggtaaaatcgaccttaaagatagtgagaggatcgattactacgctcaacatttgaagatggttcaagacgctatatcaattggagccaatgttaagggattctttgcatggtctttgctagataactttgaatgggcaacgggctacgcagtccgatttggactagtttacgtagatttcaacggtggacgtaagagatatcccaaaaaatcggcaaaatggtttaaaaagttattaaatgaaaagaaaaagaattga

SEQ ID NO: 81740 - protein, 507 aa, Arabidopsis thaliana
  peptide (1)..(507): Ceres Seq. ID no. 12661139
  misc_feature (1)..(507): Homolog of NCBI NO: 15238331 NR Description: glycosyl hydrolase family 1; protein id:
  misc_feature (1)..(507): Homolog of NCBI NO: 15241543 NR Description: glycosyl hydrolase family 1; protein id:
  misc_feature (1)..(507): Homolog of NCBI NO: 15224879 NR Description: glycosyl hydrolase family 1; protein id:
  misc_feature (1)..(375): Homolog of NCBI NO: 30682835 NR Description: glycosyl hydrolase family 1 [Arabidopsis thaliana]
  misc_feature (393)..(507): Homolog of NCBI NO: 30682835 NR Description: glycosyl hydrolase family 1 [Arabidopsis thaliana]
  misc_feature (1)..(501): Homolog of NCBI NO: 15232261 NR Description: glycosyl hydrolase family 1; protein id: supported by cDNA: gi_15028300, supported by cDNA: gi_21281078
  misc_feature (1)..(385): Homolog of NCBI NO: 25289508 NR Description: probable beta-glucosidase [imported] -
  misc_feature (1)..(507): Homolog of NCBI NO: 16757966 NR Description: amygdalin hydrolase isoform AH I precursor
  misc_feature (7)..(507): Homolog of NCBI NO: 7435445 NR Description: beta-glucosidase (EC 3.2.1.21) precursor isoform
  misc_feature (31)..(507): Homolog of NCBI NO: 15778634 NR Description: amygdalin hydrolase isoform AH I precursor
MRTIYLSLLVFIIVLALNEVMAKKHSSTPKLRRSDFPEDFIFGAATSAYQVEGAAHEDGRGPSIWDTFSEKYPEKIKDGSNGSIASDSYHLYKEDVGLLHQIGFDAYRFSISWSRILPRENLKGGINQAGIDYYNNLINELLSKGIKPFATIFHWDTPQSLEDAYGGFLGAEIVNDFRDYADICFKNFGDRVKHWMTLNEPLTVVQQGYVAGVMAPGRCSKFTNPNCTAGNGATEPYIVGHNLILAHGEAVKVYREKYKASQKGQVGIALNAGWNLPYSESAEDRLAAARAMAFTFDYFMEPLVTGKYPIDMVNYVKGGRLPTFTAKQSKMLKGSYDFIGRNYYSSSYAKDVPCSSENVTLFSDPCASVTGEREGVPIGPKAASDWLLIYPKGIRDLLLYAKYKFKDPVMYITENGRDEASTGKIDLKDSERIDYYAQHLKMVQDAISIGANVKGFFAWSLLDNFEWATGYAVRFGLVYVDFNGGRKRYPKKSAKWFKKLLNEKKKN

SEQ ID NO: 81741 - protein, 487 aa, Arabidopsis thaliana
  peptide (1)..(487): Ceres Seq. ID no. 12661140
  misc_feature (1)..(487): Homolog of NCBI NO: 15238331 NR Description: glycosyl hydrolase family 1; protein id:
  misc_feature (1)..(487): Homolog of NCBI NO: 15241543 NR Description: glycosyl hydrolase family 1; protein id:
  misc_feature (1)..(487): Homolog of NCBI NO: 15224879 NR Description: glycosyl hydrolase family 1; protein id:
  misc_feature (1)..(355): Homolog of NCBI NO: 30682835 NR Description: glycosyl hydrolase family 1 [Arabidopsis thaliana]
  misc_feature (373)..(487): Homolog of NCBI NO: 30682835 NR Description: glycosyl hydrolase family 1 [Arabidopsis thaliana]
  misc_feature (1)..(481): Homolog of NCBI NO: 15232261 NR Description: glycosyl hydrolase family 1; protein id: supported by cDNA: gi_15028300, supported by cDNA: gi_21281078
  misc_feature (1)..(365): Homolog of NCBI NO: 25289508 NR Description: probable beta-glucosidase [imported] -
  misc_feature (1)..(487): Homolog of NCBI NO: 16757966 NR Description: amygdalin hydrolase isoform AH I precursor
  misc_feature (1)..(487): Homolog of NCBI NO: 7435445 NR Description: beta-glucosidase (EC 3.2.1.21) precursor isoform
  misc_feature (11)..(487): Homolog of NCBI NO: 15778634 NR Description: amygdalin hydrolase isoform AH I precursor
MAKKHSSTPKLRRSDFPEDFIFGAATSAYQVEGAAHEDGRGPSIWDTFSEKYPEKIKDGSNGSIASDSYHLYKEDVGLLHQIGFDAYRFSISWSRILPRENLKGGINQAGIDYYNNLINELLSKGIKPFATIFHWDTPQSLEDAYGGFLGAEIVNDFRDYADICFKNFGDRVKHWMTLNEPLTVVQQGYVAGVMAPGRCSKFTNPNCTAGNGATEPYIVGHNLILAHGEAVKVYREKYKASQKGQVGIALNAGWNLPYSESAEDRLAAARAMAFTFDYFMEPLVTGKYPIDMVNYVKGGRLPTFTAKQSKMLKGSYDFIGRNYYSSSYAKDVPCSSENVTLFSDPCASVTGEREGVPIGPKAASDWLLIYPKGIRDLLLYAKYKFKDPVMYITENGRDEASTGKIDLKDSERIDYYAQHLKMVQDAISIGANVKGFFAWSLLDNFEWATGYAVRFGLVYVDFNGGRKRYPKKSAKWFKKLLNEKKKN
